United States Patent Application Publication US 2012/0070457 A1 - sequence listing, part 10

SEQ ID NO: 58992 - DNA, 1464 bp, Neisseria meningitidis
atgcgtatcgtagaaaaagcctatactttcgacgatgttttgttggttcccgcacattcgaccgtgctgccgcgagacgttaaacttcaaaccaagctcacccgcgaaatcacactcaacctccccctgctttccgctgcgatggacactgttaccgaggcgcgcctcgccatttcgatggcacaggaaggcggcatcggcatcatccataaaaacatgccgcccgaaatgcaggcgcgcgccgtttccaaagtgaaacgccacgaaagcggcgtggtcaaagaccccgtaaccgttgcaccgacaacgctcatccgcgaagtcttggaaatgcgtgcgcagcgcaaacgcaaaatgtccggcctgcccgtcgttgaaaacggcaaagtcgtcggcatcgtaaccaaccgcgacctgcgttttgaaaaccgcgtcgatttgcccgtttccgccattatgaccccgcgcgaacgtctggttaccgtccccgaaggcacaagcatagacgaagcgcgcgaactgatgcacacgcacaaagtcgagcgcgttttggttctgaacgaaaaagacgaactcaaaggtctgattaccgtcaaagatattttaaaaaccaccgagtttcccaatgccaacaaagactccgaaggccgtctgcgcgtcggtgcggcagtcggcaccggcggcgacaccgaagagcgcgtcaaagccttggttgaggccggcgtggacgtgattgtcgtcgataccgcccacgggcacagccaaggcgtgatcgaccgcgtgcgttgggtcaaagaaacctatccgcacatccaagtcatcggcggcaacatcgccactgccaaagccgctttggatttggtcgccgccggcgcggatgccgtcaaagtcggtatcggtccgggatcgatttgcaccacccgtatcgtggcaggtgtcggcgtgccgcaactgaccgccattcacaacgttgccgaagccctcaaaggcacgggcgttccgctgattgccgacggcggcatccgcttctccggcgacatcgccaaagccctcgccgcaggcgcgtacagcgtcatgctcggcggtatgtttgcaggcacggaagaagcgccgggcgaaatcgaactctaccaaggccgctcgtacaaatcctatcgcggtatgggttccttgggcgcgatgagccaaggttctgccgaccgctacttccaagacaaaaccgacagcaccgacaaatacgtccctgaaggtatcgaaggccgcgtgccttacaaaggcccgatcgtgaatatcatccaccaactgaccggcggtctgcgttccagtatgggttacttgggttgcgccaatattgctgaaatgcacgaaaaagccgaatttgtggaaatcacttccgcaggtatgagcgaatcgcacgttcacgacgttcaaattaccaaagaagcaccgaactaccatcgctga

SEQ ID NO: 58993 - DNA, 1275 bp, Neisseria meningitidis; identical to SEQ ID NO: 51081

SEQ ID NO: 58994 - DNA, 1410 bp, Neisseria meningitidis; identical to SEQ ID NO: 52058

SEQ ID NO: 58995 - DNA, 1155 bp, Neisseria meningitidis
atgaaattcatcgacgaagcaaaaatcgaagtcgccgcaggcaaaggcggtaatggcgcaaccagtttccgccgcgaaaaattcgtaccgcgcggcggcccggacggcggcgacggcggcaaaggcggcagcgtctgggcagaagccgacgaaaacaccaacaccctcgtcgaataccgcttcgttaaacgctaccaagccaaaaacggcgaaaaaggccacggttccgaccgttacggcgcaggtgcggacgacatcgtcctcaaaatgcccgtcggcacccttatccgcgacctcgacaccggcgaaaccgttgccgacctcacttatcacggacagcgcgtctgcctcgccaaaggcggcaaaggcggcttgggcaacatccacttcaaatcgtccgtcaaccgcgccccgaaacaatccacccccggcgaagaaggcgaagcccgttccctgcaactcgaacttaaagtcctcgccgatgtcggcttattgggtatgcccaacgccggcaaatccaccctgattaccgccgtatccgccgcacgccccaaaatcgccaactaccccttcaccaccctgcatccaaacttaggcgtggtacgcatcgacgaaaaccacagcttcgtgatggccgacatccccggcctgattgaaggcgcggcagaaggcgcaggcctcggccatcgtttcctcaaacacttatcacgtaccggcctgctgctgcacgtcgtcgatttggcgcccttcgacgaaaccgtcaaccccgccgaagaagcactcgccatcatcaacgaattacgcaaatacgacgaagaactctacggcaaaccgcgctggctggtactgaacaaactcgatatgcttgacgaagaagaagcccaaacgcgcactgccgccttcctcgaagccgtcggctgggactaccccaaacccgacgaccgtttccaatttgacatggaaaccccgcgcctcttccaaatcagtgcgctgacccaccaaggcacgcaggaattggtacaccaaatcaaccaatacctgaccgagaaaaaacgtatcgaagctgaaaaagccgaagcggagaaagcagcggcaaatgttgaaattatcgaacagcagcctaaaacggatacaggcgtgtttaagccggagtga

SEQ ID NO: 58996 - DNA, 1035 bp, Neisseria meningitidis; identical to SEQ ID NO: 42242

SEQ ID NO: 58997 - DNA, 678 bp, Neisseria meningitidis; identical to SEQ ID NO: 43360

SEQ ID NO: 58998 - DNA, 1629 bp, Neisseria meningitidis
atgatttctaccaacggcatcaccatgcagttcggcgcgaagccgctgtttgaaaacgtatccgttaaattcggcgaaggcaaccgctacggtttgatcggcgcgaacggctcaggcaaatccaccttcatgaaaatcctcggcggcgatttggaacagacggccggcgaagtggcgattgaaaacggcgtgcgtttgggtaaattgcgccaagaccagtttgcctacgaagacatgcgcgtgctggacgtggtgatgatggggcataccgaaatgtgggcggcgatgaccgaacgtgatgcgatttacgccaatcccgaagccaccgaagacgactacatgaaagccgccgaactggaagccaagttcgccgaatacgacggctacaccgccgaagcgcgtgccgccgaactgttgagcggcgtgggcatttccgaagatttgcacaatgcgaaaatggcggaagtcgccccgggcttcaaactgcgcgtattgctggcgcaggcgctgttctccaagccggatgtattgctcttggacgaaccgaccaataacttggacattaataccatccgctggttggaaggcgtgttgaaccaatacgactccacgatgattatcatcagccacgaccgccactttttgaacgaagtctgcacgcatatggcggatttggactacaacaccatcaccatctatccgggcaactacgacgactacatgctcgcctccgcccaatcgcgcgaacgcgccctgaaagacaatgccaaagccaaagagaaactgcaagagctgcaagagttcgtcgcccgcttctctgccaacaaatccaaagcccgtcaggcaaccagccgtctgaaacaggccgacaaaatcaaatcggagatggtcgaagtcaaaccttccacccgtcaaaacccgtatatccgttttgaagccgatgaaaaagccaagctgcaccgtcaggctgtggaagttgaaaaactggcgaaacgctttgaaacccagttgtttaaaaacctgaacttcatccttgaagcgggacaacgcctcgccatcatcggcccgaacggcgcgggcaaatccaccctgctgaaactcttggccggcgcgtacaaccccgaatattcagacggcctgttaccggacgaaggcaccatcaaatgggcggaaaaagccagtgtcggctactatccgcaagaccatgaaaacgacttcgacgtcgatatggacctgagcgaatggatgcgccaatgggggcaggaaggcgacgacgaacaagtcatccgcggcactttggggcgtttgctcttcggcagtaacgatgtcgtgaaaaaagtgaaggttctctccggtggtgaaaaaggccgtatgctttacggcaaactgttgctgttgaaacccaatgtcttagtcatggacgaaccgaccaaccatatggacatggaaagcatcgaatccttgaacatggcactggaaaaatacaacggcacgctgatttttgtctcccacgaccgtcagttcgtttcctccttggcaacccaaatcatcgaactggacggcaaaggcggatatgaacactacttgggcgattacgaaagttacttggagaaaaaaggcgtagcataa

SEQ ID NO: 58999 - DNA, 1296 bp, Neisseria meningitidis
atgttagacatccaattgctccgcagcaacaccgccgccgttgccgaacggcttgcacggcgcggttatgactttgataccgcacgttttgacgcactggaagaacgacgcaagtccgttcaggtgaaaaccgaagaattacaagcctcgcgtaacagcatttccaagcaaatcggcgcactgaaaggtcagggcaaacacgaagaggcacaggcggccatggatcaagtcgcccaaatcaaaaccgatttggaacaggcagccgccgatttggaagccgtgcaaaaggaactggacgcatggctgttgagcattccgaacctgccgcatgaggacgtgcctttcggtaaggatgaaaccgaaaacgtcgaagtccgcaaagtcggcaccccgcgcgaatttgactttgaaatcaaagaccatgtcgatttgggcgaacctttgggtttggatttcgaaggtggcgcgaaactttccggcgcacgatttaccgtgatgcgcggacaaatcgcccgtctgcaccgcgccttggcacagttcatgctggatacgcacacgctgcaacacggctacaccgagcattacacgccttatatcgttgacgatacgacgctgcaaggtacgggccaactaccaaaatttgcggaagatctgttccacgttacccgtggcggcgacgaaaccaaaaccacccaatacctgattccgacagccgaagttaccctgaccaataccgttgccgacagcattatcccgtccgaacaactgccgctgaagctgaccgcgcattcgccctgtttccgcagcgaggcgggttcgtacggcaaagacacgcgcggtctgattcgccagcaccagttcgacaaagtagaaatggtacaaatcgttcatcccgaaaaatcatacgaagcactggaagaaatggtcggccatgccgaaaacatcctgaaggctttggaactgccctaccgcgtgattaccctgtgtaccggcgacatgggcttcggcgcggcaaaaacgtatgacttggaagtttgggtgccggcgcaaaatacctaccgcgaaatctcaagctgctccaactgcgaagatttccaagcccgccgcctgaaggcgcgtttcaaagacgaaaacggcaaaaaccgcttggtacatactttgaacggctccggcttggctgtcggcagaacgctggtcgccgtattggaaaaccatcaaaacgccgacggcagcatcaacatccctgccgcactgcaaccgtatatgggcggtgttgccaagttggaagtcaaataa

SEQ ID NO: 59000 - DNA, 309 bp, Neisseria meningitidis
atgtacgcggtcgtaaaaaccggcggcaaacagtataaagtttccgtcggcgaaaaattgaaagtagaacagataccagccgaactcgacagccaaatcgaactgaccgaagttttgatgattgctgacggcgaatctgtaaaagttggcgcaccttttatcgaaggtgcaaaagtaacggctaaagtagtggcacacggtcgtggcgaaaaagtccgcatcttcaaaatgcgccgccgcaaacactaccaaaaacgccaaggccaccgccaaaatttcacccaaatcgaaatcgtggcaatcgcctaa

SEQ ID NO: 59001 - DNA, 906 bp, Neisseria meningitidis; identical to SEQ ID NO: 38587

SEQ ID NO: 59002 - DNA, 291 bp, Neisseria meningitidis; identical to SEQ ID NO: 37933

SEQ ID NO: 59003 - DNA, 1242 bp, Neisseria meningitidis; identical to SEQ ID NO: 50118

SEQ ID NO: 59004 - DNA, 516 bp, Neisseria meningitidis
atgaaacgcaccaaaaaataccctttcttaacgttgcagcggcaacgtttccatttgaactttgaaaacgcctcttccgccgccggcatcccagccgaacgcgatttctaccgctgggcgtggtctgccttgaaaaatgaataccgccgcgccgacatcagcctgattcttctggacgaagaagaagcccgagcctacaaccgcgactaccgcggcaaagattacgccaccaatgtattgagtttcgcgctcaacgaaggcgaaatcctgccctgccaagtttcggaaaaactgtacggcgatttgattatctgcccgcaagtcgttttaaaagaagccgccgaacagggcaaaacgcccgaacggcattttgcccacctgaccatacacggtactttacacctgatgggctacgaccacatcgaagacgacgaagccgaaataatggaagccgaagaaatccgcctgatgcgggcggcaggcttccccaacccctaccaagaggacggacattaa

SEQ ID NO: 59005 - DNA, 621 bp, Neisseria meningitidis; identical to SEQ ID NO: 42837

SEQ ID NO: 59006 - DNA, 789 bp, Neisseria meningitidis; identical to SEQ ID NO: 36434

SEQ ID NO: 59007 - DNA, 918 bp, Neisseria meningitidis
atgtctgtttataccagtgtttccgatgatgaaatgcgcggcttcctgagcggttacgatttgggggaatttgtttccctgcagggcatcgcgcaggggattaccaacagcaattattttctgacgacaacttcgggacgttatgtgctgaccgtgtttgaagtgttgaaacaggaagagctgccgttttttctggagcttaaccggcatttgagtatgaagggcgtggcggttgccgcgccggttgcgcgcaaagacggccggcttgattccgttttggcgggtaagcctgcctgcctggttgcctgcctgaaaggttcggataccgcgctgccgacggctgagcagtgttttcataccggtgcgatgttggcgaaaatgcaccttgccgccgccgatttccctttggaaatggaaaacccgcgttacaatgcgtggtggacggaggcgtgcgcccggctgctgcccgtcctgtcgcaagacgatgccgcactgctgtgttccgaaatcgatgcgttgaaggacaatctcggcaatcatctgccttcgggcatcatccatgccgatctgtttaaagacaatgtgttgcttgacggcggtcaggtatcgggcttcatcgatttctattacgcctgccggggcaattttatgtatgacttggcgattgcggtcaacgattgggcaaggacggcggacaataagttggatgaggcgttgaaaaaggcgtttatcggcggttatgagggcgtgcgccccttgagtgccgaagaaaaggcgtatttcccgaccgcccaacgtgccggctgcatccgtttttgggtgtcgcgcctgttggattttcattttccgcaggcgggcgagatgacgtttatcaaagacccgaacgcgttccgcaacctgctgttgagtttgggttga

SEQ ID NO: 59008 - DNA, 1170 bp, Neisseria meningitidis; identical to SEQ ID NO: 38149

SEQ ID NO: 59009 - DNA, 456 bp, Neisseria meningitidis
atgttcggcggcgcacacgaattaagcatcgacagtaaggggcggttggctgttcctgccaaattccgtgacattctgtcgcgcctctatacgcctgccgtagtggtaacgctcgagtcgaaacacaagctgttgatgtaccctgttgcggagtgggaaaaggttgcggcgcaacttttaaacttaaaagtggcggataaccctgttttacggcggtttcaaaatcttttgctgcataacgcggaaattttggaatgggacagcgccggccgggtgctggttcctgccggactgaggaagagggtggatttcgaccgtgaagtcgttttggtcggtcgtgccaaccgtttggagctttggggtcgcgagcagtgggaggctgagatggttcaggctttggatgacgatcctgacgaacttgccttccagttgagtcagacggatttgcaattgtga

SEQ ID NO: 59010 - DNA, 1296 bp, Neisseria meningitidis
atgattcgtcctgattttcaagaatatctgccttcttattattttagttcggttaatcctcatactgtttatccgaaacttcaatgccgtctgaaaaccgatacctgtatcatcggcggcggattgagtggtttgtgcactgcattgcccttggcggagcagggacatgaaacggttgtgttggaagccgcgcgtatcggcttcggcgcgtccggcaggagcggcggtcaggttatcagcgactacgcctgcggtatggaggaaattgaaaaacaggttggtttggagcgggcgcaatggttttggcaacagtctttgcaggcggtcgaactggtggacgaacgcgtccgcaaacatgccgtcgattgtgattggcagcgcggttatgccacggttgccgtccgtccgcagcattgggaagagttgcagcagtggcatgaacacgcccaacggcattacggtgcgagtcattatcaactttgggataaagccgagttgaaacagcagcttgacagcgatatgtaccaaggggcacaattcgaccccttatccggacacctgcatccgctcacttacactttgggcatcgctcgtgccgctgccgaagccggtgcgcagattttcgagcaatccccgatgacgtgcatcgaaccgcatcaaaacggttggctggtttacacgcccgaaggcagcgtcgagtgcaaaaatgtggtctatgctgtcaatacttatgcaggtttgaacccgatattccggcctttggaacgcaaggcgattgctgtcagcacctttattattgcgaccgaacccttgggggcgcgcgcaaaagggcttatccgtaacaatatggcagtatgcgacaaccgccatattttggattattaccgcctcagcgcggacggcagactgcttttcggcggtaaggataacgagtttatcgacaatcctgagcgtatgaccgagcttgtccgccaagatatgcttaaagtttttccgcagcttgccgatgtcaaaatcgaatattcgtggggcggggagtgcgacattaccgccaaccttgtcccgcatttcggacgtttagccccgaatgttttttatgcgcaaggttattccggacacgggatggcgataacaggcattgcaggtctggcggttgccgaagcaattttaggggacgaatgccgtctgaagccgtttgagcggttgcgccagccgaatattatcctgcaaccgtttttgcgcaaactcggttctttcctcggctcgaaatattatcagtggaaagacagccgttaa

SEQ ID NO: 59011 - DNA, 660 bp, Neisseria meningitidis; identical to SEQ ID NO: 51260

SEQ ID NO: 59012 - DNA, 1155 bp, Neisseria meningitidis; identical to SEQ ID NO: 44038

SEQ ID NO: 59013 - DNA, 1182 bp, Neisseria meningitidis; identical to SEQ ID NO: 51584

SEQ ID NO: 59014 - DNA, 1380 bp, Neisseria meningitidis
atgcaagattacggtatttccgtttgcctgacactgacgccctatttgcaacatgaactattttcggctatgaaatcctatttttccaaatatatcctacccgtttcactttttaccttgccactatccctttccccatccgtttcggcttttacgctgcctgaagcatggcgggcggcgcagcaacattcggctgattttcaagcgtcccattaccagcgtgatgcagtgcgcgcacggcaacaacaagccaaggccgcattccttccccatgtatccgccaatgccagctaccagcgccagccgccatcgatttcttccacccgcgaaacacagggatggagcgtgcaggtgggacaaaccttatttgacgctgccaaatttgcacaataccgccaaagcaggttcgatacgcaggctgcagaacagcgtttcgatgcggcacgcgaagaattgctgttgaaagttgccgaaagttatttcaacgttttactcagccgagacaccgttgccgcccatgcggcggaaaaagaggcttatgcccagcaggtaaggcaggcgcaggctttattcaataaaggtgctgccaccgcgctggatattcacgaagccaaagccggttacgacaatgccctggcccaagaaatcgccgtattggctgagaaacaaacctatgaaaaccagttgaacgactacaccggcctggacagcaaacaaatcgaggccatagataccgccaacctgttggcacgctatctgcccaagctggaacgttacagtctggatgaatggcagcgcattgccttatccaacaatcatgaataccggatgcagcagcttgccctgcaaagcagcggacaggcgcttcgggcagcacagaacagccgctatcccaccgtttctgcccatgtcggctatcagaataacctctacacttcatctgcgcagaataatgactaccactatcggggcaaagggatgagcgtcggcgtacagttgaatttgccgctttataccggcggagaattgtcgggcaaaatccatgaagccgaagcgcaatacggggccgccgaagcacagctgaccgcaaccgagcggcacatcaaactcgccgtacgccaggcttataccgaaagcggtgcggcgcgttaccaaatcatggcgcaagaacgggttttggaaagcagccgtttgaaactgaaatcgaccgaaaccggccaacaatacggcatccgcaaccggctggaagtaatacgggagcggcaggaagtcgcccaagcagaacagaaactggctcaagcacggtataaattcatgctggcttatttgcgcttggtgaaagagagcgggttagggttggaaacggtatttgcggaataa

SEQ ID NO: 59015 - DNA, 1146 bp, Neisseria meningitidis
atgaccgaaacccaatccctagaactcgccaaagaattgatttcccgcccatccgttacccccgacgaccaaaattgccaaaaactccttgccgaacgcctgcacaaaatcggttttgcggctgaagaactccatttcggcgacaccaaaaacatctggttgcgacgcggcacgaaagctcccgtcgtctgttttgcagggcataccgacgttgtaccgacaggccctgtcgaaaaatgggattcgcccccgttcgagccggccgagcgcgacggaagattatacgggcgcggcgcggcggacatgaaaaccggcatcgcctgttttgttaccgcctgcgaacgtttcgttgccgaacatcccgaccatcaaggcagcattgcgcttctgattacttccgacgaagagggcgacgcgttggacggcacgaccaaagtcgtcgatgtattgaaagcgcgcgacgagcttatcgactactgcatcgtcggcgaaccgacagccgtggacaaattgggcgatatgattaaaaacggccggcgcggctcgctgtcgggcaacctgaccgtcaaaggcaagcaaggccatattgcctatccgcatttggcaatcaatcccgtgcatacttttgccccggccttgttagagctgacgcaggaagtctgggacgaaggcaacaaatacttcccgccgaccagctttcaaatttccaatatcaacggcggtacaggcgcgaccaatgtcattccgggcgagctgagcgtcaaattcaatttccgcttctccaccgagtccaccgaagcagggctgaaacaacgcgtccacgccattttggacaaacacggtgtgcaatacgatttgcagtggtcgtgttcggggcagcccttcctgacccacgcgggcaaactgaccgacgtggcacgcgccgccattgccgaaatctgcggcgtagagaccgaattgtccaccaccggcggcacttcggacggacgcttcatcaaagccattgcaaaagaactcatcgaattaggcccgtccaatgcgaccatccaccaaatcaatgaaaacgtgcggctaaacgacattccgaagctgtctgcggtgtatgaggggatattggcgcggttgttggctggaaatgccgtctga

SEQ ID NO: 59016 - DNA, 2196 bp, Neisseria meningitidis
atgtgtaaaccgaattatggcggcattgtcttgttgcccttacttttggcatcttgtattggcggcaatttcggcgtgcagcctgttgtcgaatcaacgccgaccgcgtaccccgtcactttcaagtctaaggacgttcccactccgccccctgccgggtcttcggtagaaatcacgccggtcaatcagcccgccgtcggtgcggcaatgcggctgccaaggcggaatatcgcagcttttgataaaaatggtaatgaaattcccgatagtaagcaggcagaggagtatctgccgctcaaagaggaggatatcctgtttttagacggtacgccgaaagaacaggctgacaaacttaaaaaggaaatcaacggacggtatcctaatgtaacaatctacacgtccgatttaaaagatgctgtgtataaatatgaacatgtccgggccggatatgtttatactagatttggaacagatgaaatcgaacagaactcaggcggtaagcgggttgcccaccgcttaggttatgacggttttgtatattattccggagaacgtccttcccaatctttaccgagtgcgggaacggtggaatattctggtaactggcaatatatgaccgatgccaaacgtcatcgagcaggtcaggcggttggcattgacaatttgggttatatcacattttatggtaacgatgttggtgcaacttcttatgcggctaaggatgtcgacgaaagggaaaaacatcctgctaaatatacggttgatttcgataagaaaactttgacaggtcaattaattaaaaatcagtatgtgcaaaagaaaaccgatgaaaagaaaccactgaccatttacaacattactgcagaattggacggcaaccgctttaccggcagtgccagtgtcaatcctgaattgaagacaagccattcgggcaaggaatatttgtttttccatgacaatgccaatcagcggcttgagggcggttttttcggcgataacggagaagagcttgccggacggtttatcagcaacgacaacagcgtattcggcgtattcgcaggcaaacaaaaaacagacgcatcaaacgcatcagatacaaatcctgccctgccgtctggaaaacacaccaaaatcttggattctctgaaaatttccgttgacgaggcgactgatgaccatgcccgtaagtttgccatttccactatgcccgattttggtcatcccgacaaacttcttgtcgaagggcgtgaaattcctttggttagccaagagaaaatcatcgagcttgccgacggcaggaaaatgaccgtccgtgcttgttgcgattttctgacctatgtgaaactcggacggataaaaaccgaacgccccgccgtccaaccgaaggcgcaggatgaagagggggacgaagaggatacaggcgttgatagcgtcgaagaaggcgaagacgaaatcgacgatgaagacgaagtttccgaagaagatgcagaagaaatcgaagaagaagctgatgaagttgaagaggaagaagctgaagctgatgaagccgaagaaaccgaagaagaatcgccgacagaagaaagcggcagcggttcaaacgccatcctgcccactccggaagcccctaaaggcagggacatcgaccttttcctgaaaggtatccgcacggcagaaacggatattccgcaaaccggaaaagcacactataccggcacttgggaagcgcgtatcggcgaacccattcaatgggacaatcatgcggataaagcggcaaaagcagtatttaccgttgatttcggcgagaaatcgatttccggaaagctgacggagcaaaacggcgtagaacctgctttctatattgaaaacggcaagattgagggcaacggtttccacgcgacagcacacactcgggagagcggcatcaatctttcgggaactggttcgactaaacctcaaagtttcaaagccagtaatcttcgtgtagaaggaggattttacggcccgcaggcggcggaattgggcggtactattttcaataatgatgggaaatctcttggtataactgaaaatattgaaaatgaagttgaagttgaagttgaagctgatgttggcaaacagttagaacctgatgaagttaaacacaaattcggcgtggtattcggtgcgaagaaagatatgcaggaggtggaaaaatga

SEQ ID NO: 59017 - DNA, 1386 bp, Neisseria meningitidis
atggtcagcatttttgatattttcaaaatcggtatcgggccttccagttcgcatacggtcggcccgatgaaggcagccgccgcctttgcggcaggtttggatgcacaggctgttcgcatcgtcatcgacatttacggctcgctcgccctgaccggatacggacacggtacatttgacgcgctgatgctcggtttggaaggcagcctgccgcacgacatcccgcttgtcggcattcccgaacgcctcgaacgcatccgcacgcagcacatcctccggctcaacgggcaagaaatccgcttcatccccgaccgcgacctgaacatactcggcaatcaagtgctgcccaaacaccccaacggcctgcgttttaccgcctatgcttcagacggcacggtattgaatgaacaggtttattattcggtcggcggcggctttgtcgttaccgaagaagattttgaccggcaggcggaaacggaaaaagccgttccctatccctataccagttgcgccgaactgcttgcccgatgccgtctgaaccggctcgacatctccgaagtcgtgttggcaaacgaagccgcgcttgccggatgcggcgaagccgaaatccgccgccgcgccgctgccgttgccgaggttatggaaggctgcatcaaacgcggcttgggtgcggacggcgaactgcccggcggattgaacgtccgccgccgcgccccgcagcttgccgccaagctcaaagtcctgcgcgaaaccgaaatcgtcaacacccagctctggccgatggtgtacgccatggcggtcaacgaagaaaacgccgccggcggacgcgtcgttaccgcaccgaccaacggcgcggcaggcatcattcccgccgtattgcactatttccgcaagttcaatccgcacgccacacaggaacgcgtcgaaaacttcctgctcaccgcaggcgcaatcggcatcctctacaagaccaacgcctccatttccggtgcggatgtcggctgtcagggcgaagtcggcgtagcgtgttcgatggcggcgggcgcatacgccgaagtcatcggcggcacgcccaaacaagtggaaaacgccgccgaaatggcgatggaacaccatttggggctgacttgcgaccccgtcggcggactggtgcaaatcccctgcatcgagcgcaacggcatcgccgccgaaaaagccctcaaactcggcacgctcgcgcttttggaagacggcacggacaaaaaagtctcgctcgacgaagtcatccgaaccatgctgcaaaccggccgggatatgaaggcgacctacaaagaaacctcgcttgccggactcgccgccacgctccggaaaaaagccgtccccgtatccgtgcgcgtggtcgagtgctga

SEQ ID NO: 59018 - DNA, 294 bp, Neisseria meningitidis; identical to SEQ ID NO: 42632

SEQ ID NO: 59019 - DNA, 657 bp, Neisseria meningitidis
atgaaaaacaaaaccaaagtctgggacttccccacccgccttttccactggctgcttgccgcatccctaccctttatgtggtatagcgcgaaaaccggcggcgatatgctgcaatggcacacgcgcgtcgggctgtttatccttttcctgctcgtatttcgcctctgctggggcatttggggcagcgataccgcccgtttctcccgtttcgtccgcggatggtcgggtatcagggattatctgaaaaacggtattcccgaacatatccagcccggacacaaccccttgggcgcactgatggtcgtcgcgcttttggccgccgtctcatttcaagtcggcacggggctttttgccgccgatgaaaacaccttcagcaccaacggctacctcaaccatttggtttccgaacatacaggcagccttatgcggaaaatccacctcaactttttcaagctgctcgccgttttttccgccattcatatcgccgccgtcgccgcataccgcgtgttcaaaaagaaaaacctcgtcctcccgatgataaccggcttcaaatacatcgaaggcaaaacctcaatccgctttgccggcaaaaccgcgcttgccgccgcattatcggttgccgcgcttgtcgcagccgccatcctgctcctgtcctga

SEQ ID NO: 59020 - DNA, 306 bp, Neisseria meningitidis; identical to SEQ ID NO: 49127

SEQ ID NO: 59021 - DNA, 621 bp, Neisseria meningitidis; identical to SEQ ID NO: 43253

SEQ ID NO: 59022 - DNA, 324 bp, Neisseria meningitidis; identical to SEQ ID NO: 43895

SEQ ID NO: 59023 - DNA, 498 bp, Neisseria meningitidis
atgtcttcatctgtttcaagtaaaacgcgctattgggtattggcacttgccgccatcgtgctggaccagtggtcgaagtgggcggtgctgtcgtcgtttcagtatcgggaacgcgtcaatgtcattccttcctttttcgatttgaccttggtgtacaacccgggtgcggcgttcagcttccttgccgatcagggcggctggcaaaaatacttttttttggtgctggcggtggcggtgagcgcgtatttggtacgcgccatcttgcgcgatgagtttgcaaccctcggcaaaacgggtgcggcgatgattatcggcggtgcgttaggcaatgtcatcgaccgcctgatacacggtcatgtcgtcgatttcttattgttttattggcaaaattggttttatcccgcctttaatattgccgacagctttatctgcgtcggcgcggtgttggcagtgttggacaacatcgtccaccgtaaaacccaagaagaaaaatattga

SEQ ID NO: 59024 - DNA, 672 bp, Neisseria meningitidis
atgacgacacaagacgaactcaagcgcatcgccgccgaaaaagcagtcgaattcgtacccgaaaacgaatacatcggcatcggtaccggctcgaccatcaactttttcatcgaagccttgggtaagagcggcaaaaaaatcaaaggcgcggtatctacttccaaaaaatccagtgaactgcttgcccaatatgatattcccgtcgtttccctgaacgaagtatcggggttggcggtctatattgacggtgcggatgaagtgaaccacgccctgcaaatgattaaaggcggcggcggcgcacacctcaacgaaaaaatcgtcgccagcgcatcagaaaaattcgtctgcattgcggacgaaagcaaatatgtttcacgtttgggcaaattccctctgcccgtggaagtcgtcgaaagcgcgcgttcccttgtttcgcgcaaactgctcgctatgggcggacagcctgaattgcgtatcggctacaccactttttacggtaaccaaatcgtcgatgtccacggcttgaatatcgacaaaccgctgatgatggaagacgaaatcaacaaaatcaccggcgtactcgaaaacggaatattcgcccgcgatgccgccgatgtgttgattttggggacggaagagggtgcgaaagtcatctatccctgccaagggtaa

SEQ ID NO: 59025 - DNA, 690 bp, Neisseria meningitidis; identical to SEQ ID NO: 38413

SEQ ID NO: 59026 - DNA, 156 bp, Neisseria meningitidis
atgcgcgataaaatcaaactggaatccagtgcaggtactggtcacttctacaccactaccaaaaataaacgcactatgcccggcaaattggaaatcaaaaaatttgacccagttgcccgcaaacacgtagtgtataaagaaaccaaactgaaataa

SEQ ID NO: 59027 - DNA, 1596 bp, Neisseria meningitidis; identical to SEQ ID NO: 42222

SEQ ID NO: 59028 - DNA, 246 bp, Neisseria meningitidis
atgaccgaacaagaaatctaccggttgttgcgcgataccctgaccgagttgtttgaaatcgaaccggaacggattacgcctgataccaatctttacgaagatttggaaatcgacagcatcgatgccatcgacctgattgaccgcatcaagcgcgaaaccggccgcaagctgcaggccgaagatttccgcaatgtccgcaccgtcaacgacgtggtacaggcggtattgaagattcaggcgggctaa

SEQ ID NO: 59029 - DNA, 1380 bp, Neisseria meningitidis; identical to SEQ ID NO: 46976

SEQ ID NO: 59030 - DNA, 777 bp, Neisseria meningitidis; identical to SEQ ID NO: 51731

SEQ ID NO: 59031 - DNA, 378 bp, Neisseria meningitidis; identical to SEQ ID NO: 53550

SEQ ID NO: 59032 - DNA, 651 bp, Neisseria meningitidis
ttgctcaaactgattaaccgccaactgaccgaaaaaaacctaaaagtagagaaagcatccgccgccgtcattgacgccaccattattcagaccgccggcagcaaacagcgtcaggccatagaagttgacgaagaaggacaaatcagcggccaaaccacaccgagtaaggacagcgatgcccgttggatcaagaaaaacggcctctacaaactcggttacaaacaacatacccgtaccgatgcggaaggctatatcgagaaactgcacattacccccgccaatgcccatgagtgcaaacacctgccgccgttgttggaaggactgcccaaaggtacgaccgtctatgccgacaaaggctatgacagtgcggaaaaccggcaacatctggaagagcgtcagttgttagacggcattatgcgcaaagcctgccgcaaccgtccgctgacggaaacgcaaaccaaacataaccgatatttgtcgaagatccgttatgtggtcgaacaaagcttcggtacgctgcaccgcaaattccgctatgcgcgggcagcctatttcgggctgattaaagtgagtgcgcaaagccatctgaaggcgatgtgtttgaacctgttgaaagcggccaacaggctaagtgcgcccgctgccgcctaa

SEQ ID NO: 59033 - DNA, 1095 bp, Neisseria meningitidis
atgaaaaccaatctgctcaactacgaccttcaagggctgacccgacattttgccgatatgggcgaaaaacccttccgtgccaaacaggttatgcgttggatgcaccaatccggcgcgcaaaattttaacgaaatgaccgatttggcaaaatcgttgcgccataaactgaacgaacaggcaggcatcgaaattcccaagctgatgatgtctcaaaaatcttcagacggcactcgaaaatggcttttggatgtcggtacgggcaacggggtggaaaccgtcttcatccccgaatcggatcgcggcacgctctgcatttcctcacaagtcggctgcgctttggaatgtacattttgttcgaccggccggcagggcttcaaccgcaatttgactgctgccgaaatcatcgggcaattgtggtgggcaaacaaagcgatgggtgttacaccgaaaaacgaacgcgtaatttccaatgtagtgatgatgggtatgggcgagccgatggcgaacttcgacaatgtcgttaccgccttaagcatcatgctggacgaccacggctacggtttgagccgccgccgcgtaaccgtttccacttcgggtatggttccccaaatggacaggttgcgcgatgtcatgccggtggctttggcggtttccctccacgcttccaatgacgaagtccgcaaccaaatcgtaccgttgaacaaaaaatatcccttgaaagaattgatggctgcatgccaacgctatctagtcaaagcacccagggatttcatcactttcgaatacgtcatgttggacggaataaacgataaggcgcaacatgcgcgcgaactgatcgaactggtcacagatgttccctgcaagttcaatctgattccgttcaatcccttcccaaactccggatacgaacgctccagcaatgagaacatccgtgtgttccgcgatattttgcagcaggcaggatttgtcgttaccgtacgaaaaacgcgcggcgacgacatcgatgccgcctgcggacagttggcggggcaggttcaggataaaacgcgccgccaacaaaaatggcagcagattttaatcggacaacaggggtaa

SEQ ID NO: 59034 - DNA, 933 bp, Neisseria meningitidis
atgaagcagaaccgcacctttaccttccccgattttcgcaccgtttacagctatgcgcctttatatcggctgcaacatttaaaatacacattgcgaaaatttttcggaaaaaaagaaatttacgccttcgagcagtttgtcaacgcctcccctatccgtcaggggctgttcctccactgcccgcaaaatgcctatccgctgctgcgcgaatttgttgacaggcgttttaactgcaaacgccgtttagatgcgatgacggcagattttctcatggcggaaaaactgttcggcacagacatcctgcaccaaatggaagactaccgcttccatctggtcttggcgcacctttcagacggcatcagcttgtggctcaaccgcaacgacaactgcgtcgaagaaggcgcgtggtctttatctttgcgcgacgaagcaggcaaccggctgtatatggcgactttcgcctttgtcggcacacacctgctgacagcctccgtacaagggccggcgggtgaagaagccaaagacaccgtccgccgcataaccaaacaactccacggcttgcgtccccaacaactgatggtaaccgccctgcaatatttcgccgccgtactcggcttggacggcgcaatgggcattgcacaaaaacatcaggtcaaactgcgctggaaacttaaaaagcgtgtcaaaatgaattacgacgcattctggcaggaatacggcgcaagtttggaacgggacggctactggcatctcccccaaacccccgcccgcaaagaccttgccgacatcgaaagcaaaaagcgttcgatgtaccgcaagcgttatgaaatgctggacaatatggttgcagagatgaaagacagtctgaaaacagaagcacgcggcatttcagacggcatccaaacggaaaaaccgctccgccggacagcctga

SEQ ID NO: 59035 - DNA, 1092 bp, Neisseria meningitidis
atgagtttgaaatgcggcatcgtcggtttgcccaacgtcggcaaatccaccctttttaacgcgctgacccaatcgggtatcgaagcggcaaactatcctttctgtaccatcgaacccaacgtcggcatcgtcgaagtccccgatccgcgtatggccgaattggcaaaaatcgtcaatccgcaaaaaatgcagcctgccatcgtcgaatttgtcgatattgccggtttggttgcaggcgcgagcaaaggcgagggcttgggcaaccagttccttgccaacatccgcgaaaccgatgcgattgtgaatgtcgtgcgctgctttgacgacgacaacatcgtccacgttgcaggccgcgtcgatccgattgccgacatcgaaaccatcggcacagagttggcacttgccgacctggcaagtgtggaaaaagccatcgtccgcgaagaaaaacgcgcccgttcaggcgacaaagacgcgcaaaagctggtcgatttgtgcaaaaaactgctgccgcatctggacgaaggcaaacccgtgcgttccttcggtttggacgcggaagaacgcgcgatgctcaaaccgctgttcctgctgaccgccaaacctgcgatgtatgtgggcaacgtcgccgaagacggttttgaaaacaatccgcacctcgaccgcctgaaagaattggcggcaaaagaaaacgcccccgtcgtcgccgtatgcgccgcgatggaaagcgaaatcgccgaattggaagacgacgaaaaagccgaattcctcgccgaaatgggtttggaagaacccggcctgaaccgcctgatccgcgccggctacgacctcttgggcctgcaaacctacttcaccgccggcgtgaaagaagtccgcgcgtggacgatacacaaaggcgacaccgccccgcaagccgccggcgtgattcatacggattttgaacgcggcttcatccgcgcccaagtgattgcctacgatgattttgtctcgctcggcggcgaagccaaagccaaagaagccggcaaaatgcgtgtggaaggcaaagaatacgtcgtgcaggatggggatgtgatgcactttttgtttaacgtgtaa

SEQ ID NO: 59036 - DNA, 1056 bp, Neisseria meningitidis
atgccgtctgaaacacgcctgccgaactttatccgcaccttgatatttgccctgagttttatcttcctgaacgcctgttcggaacaaaccgcgcaaaccgttaccctgcaaggtgaaacgatgggcacgacctataccgtcaaatacctttcaaacaatcgggacaaactcccctcccctgccgaaatacaaaagcgcatcgatgacgcgcttaaagaagtcaaccggcagatgtccacctatcagcccgactccgaaatcagccggttcaaccaacacacagccggcaagcccctccgcatttcaagcgacttcgcatacgttactgccgaagccgtccgcctaaaccgcctgacacacggcgcgctggacgtaaccgtcggccctttggtcaacctttggggattcggccccgacaaatccgttacccgtgaaccgtcgccggaacaaatcaaacaagcagcatcttatacgggcatagacaaaatcattttgaaacaaggcaaagattacgcctccttgagcaaaacccaccccaaagcctatttggatttatcttcgattgccaaaggcttcggcgttgataaagttgcgggcgaactggaaaaatacggcattcaaaattatctggtcgaaatcggcggcgagttgcacggcaaaggcaaaaacgcgcgcggcgaaccgtggcgcatcggtatcgagcagcccaatatcgtccaaggcggcaatacgcagattatcgtcccgctgaacaaccgttcgcttgccacttccggcgattaccgtattttccacgtcgataaaaacggcaaacgcctctcccatatcattaatccgaacaacaaacgacccatcagccacaacctcgcctccatcagcgtggtcgcagatagcgcgatgacggcggacggcttgtccacaggattatttgttttaggcgaaaccgaagccttaaagctggcagaacaagaaaaactctctgttttcctgattgtcagggataaaggcggctaccgcaccgccatgtcttccgaatttgaaaaactgctccgctaa

SEQ ID NO: 59037 - DNA, 801 bp, Neisseria meningitidis; identical to SEQ ID NO: 50869

SEQ ID NO: 59038 - DNA, 963 bp, Neisseria meningitidis
atgcaagcacggctgctgatacctattcttttttcagtttttattttatccgcctgcgggacactgacaggtattccatcgcatggcggaggtaaacgctttgcggtcgaacaagaacttgtggccgcttctgccagagctgccgttaaagacatggatttacaggcattacacggacgaaaagttgcattgtacattgcaactatgggcgaccaaggttcaggcagtttgacagggggtcgctactccattgatgcactgattcgtggcgaatacataaacagccctgccgtccgtaccgattacacctatccacgttacgaaaccaccgctgaaacaacatcaggcggtttgacaggtttaaccacttctttatctacacttaatgcccctgcactctcgcgcacccaatcagacggtagcggaagtaaaagcagtctgggcttaaatattggcgggatgggggattatcgaaatgaaaccttgacgactaacccgcgcgacactgcctttctttcccacttggtacagaccgtatttttcctgcgcggcatagacgttgtttctcctgccaatgccgatacggatgtgtttattaacatcgacgtattcggaacgatacgcaacagaaccgaaatgcacctatacaatgccgaaacactgaaagcccaaacaaaactggaatatttcgcagtagacagaaccaataaaaaattgctcatcaaaccaaaaaccaatgcgtttgaagctgcctataaagaaaattacgcattgtggatgggaccgtataaagtaagcaaaggaattaaaccgacagaaggattaatggtcgatttctccgatatccaaccatacggcaatcatatgggtaactctgccccatccgtagaggctgataacagtcatgaggggtatggatacagcgatgaagcagtgcgacgacatagacaagggcaaccttga

SEQ ID NO: 59039 - DNA, 2766 bp, Neisseria meningitidis
atgagatcttctttccggttgaagccgatttgtttttatcttatgggtgttatgctatatcatcatagttatgccgaagatgcagggcgcgcgggcagcgaggcgcagatacaggttttggaagatgtgcacgtcaaggcgaagcgcgtaccgaaagacaaaaaagtgtttaccgatgcgcgtgccgtatcgactcgtcaggatatattcaaatccagcgaaaacctcgacaacatcgtacgcagcatccccggtgcgtttacacagcaagataaaagctcgggcattgtgtctttgaatattcgcggcgacagcgggttcgggcgggtcaatacgatggtggacggtatcacgcagaccttttattcgacttctaccgatgcgggcagggcaggcggttcatctcaattcggtgcatctgtcgacagcaattttattgccggactggatgtcgtcaaaggcagcttcagcggctcggcaggcatcaacagccttgccggttcggcgaatctgcggactttaggcgtggatgacgtcgttcagggcaataatacctacggcctgctgctaaaaggtctgaccggcaccaattcaaccaaaggtaatgcgatggcggcgataggtgcgcgcaaatggctggaaagcggagcatctgtcggtgtgctttacgggcacagcaggcgcagcgtggcgcaaaattaccgcgtgggcggcggcgggcagcacatcggaaattttggcgcggaatatctggaacggcgcaagcagcaatattttgtacaaacaggcgggttgaaattcaattccaacagcggaaaatgggaacgcgatttgcaaaggcaattctggaaaaccagttactataaacaatacaaagacccccagaaactgaaaaaatacatcgaagaccaagataaagactggcgggaaaacctggcgccgcaatacgacatcacccccatcgatccgtccagcctgaagcagcagtcggcaggcaatctgtttaaattggaatacgacggcgtattcaataaatacacggcgcaatttcgcgatttaaacaccaaaatcggcagccgcaaaatcatcaaccgcaattatcaattcaattacggtttgtctttgaactcgtataccaacctcaatctgaccgcagcctacaattcgggcaggcagaaatatccgaaagggtcgaagtttacaggctgggggcttttaaaggattttgaaacctacaacaacgcaaaaatcctcgacctcaacaacaccgccaccttccggctgccccgcgaaaccgagttgcaaaccactttgggcttcaattatttccacaacgaatacggcaaaaaccgctttcctgaagaattggggctgtttttcgacggtcctgatcaggacaacgggctttattcctatttggggcggtttaagggcgataaagggctgctgccccaaaaatcaaccattgtccaaccggccggcagccaatatttcaacacgttctacttcgatgccgcgctcaaaaaagacatttaccgcttaaactacagcaccaataccgtcggctaccgtttcggcggcgaatatacgggctattacagctcggaaggcgaatttaagcgggcattcggagaaaactcgccgacatacaagaaacattgcaacccgagctgcgggctttatgaacccgtattgaaaaaatacggcaaaaagcgcgccaacaaccattcggtcagcattagtgcggacttcggcgattatttcatgccgttcgccagctattcgcgcacacaccgtatgcccaacatccaagaaatgtatttttcccaaatcggcgactccggcgttcacaccgccttaaaaccagagcgcgcaaacacttggcaatttggcttcaatacctataaaaaaggattgttaaaacaagatgatacattaggattaaaactggtcggctaccgcagccgcatcgacaactacatccacaacgtttacgggaaatggtgggatttgaacggggatattccgagctgggtcagcagcaccgggcttgcctacaccatccaacaccgcaatttcaaagacaaagtgcacaaacacggttttgagttggagctgaattacgattatgggcgttttttcaccaacctttcttacgcctatcaaaaaagcacgcaaccgaccaacttcagcgatgcgagcgaatcgcccaacaatgcgtccaaagaagaccaactcaaacaaggttatgggttgagcagggtttccgccctgccgcgagattacggacgtttggaagtcggtacgcgctggttgggcaacaaactgactttgggcggcgcgatgcgctatttcggcaagagcatccgcgcgacggctgaagaacgctatatcgacggcaccaacgggggaaataccagcaatttccggcaactgggcaagcgttccatcaaacaaaccgaaactcttgcccgccagcctttgatttttgatttttacgccgcttacgagccgaagaaaaaccttattttccgcgccgaagtcaaaaatctgttcgacaggcgttatatcgatccgctcgatgcgggcaatgatgcggcaacgcagcgttattacagctcgttcgacccgaaagacaaggacgaagacgtaacgtgtaatgctgatggcttgtgcaacggcaaatacggcggcacaagcaaaagcgtattgaccaattttgcacgcggacgcacctttttgatgacgatgagctacaagttttaa

SEQ ID NO: 59040 - DNA, 684 bp, Neisseria meningitidis; identical to SEQ ID NO: 36776

SEQ ID NO: 59041 - DNA, 126 bp, Neisseria meningitidis; identical to SEQ ID NO: 42720

SEQ ID NO: 59042 - DNA, 609 bp, Neisseria meningitidis; identical to SEQ ID NO: 39049

SEQ ID NO: 59043 - DNA, 777 bp, Neisseria meningitidis; identical to SEQ ID NO: 39763

SEQ ID NO: 59044 - DNA, 927 bp, Neisseria meningitidis
atgtcttttgcattcttctttcccggacaaggttcccaaagcctcggtatgatgaacggctttgccggacacgccgtcgttaaaaacacctttgccgaagcctccgccatattggggcaggacttgtgggcgatgataaacggcagcgatgccgaaatcatcggtcaaaccgtcaacacccagcccattatgctcgccgccggcgttgccgtttaccgcgcctatttggaagcgggcggcaaaacgcctgccgccgttgccggacacagcctcggcgaatacaccgcactcgttgccgccggcgcattggattttgccgacgcggtcaaactcgtgcgcctgcgcgccgaactgatgcagtctgccgtaccgcaaggcgtgggcgcaatggcggcgattctcggcttggaagatgaacaggtaaaacaaatttgcgccgaatccgcacaaggtgaagtggttgaagccgtcaacttcaactcgcccggacaagtcgtgattgcaggcaataccgccgccgtcgagcgcgctatgcttgccgccaaagaagccggcgccaaacgcgccctgccgctgcccgtgtccgtaccttcccattgcagcctgatgaaacccgccgccgacaaactcgccgaagccctgaaaaccgttgaaatcaagcagccgcaaatccgcgtcatccacaacgccgacgttgccgcctacgatgatgtcgacaaaatcaaagacgcgctcgtccgccagctttacagccccgtacgctggacggaaaccgtcaacgcccttgtttcagacggcattgccgaatccgccgaatgcggcccgggcaaagttctggcaggtctggcaaaacgcatcaacaaagccgccgcgtgcagcgcactgaccgatgccggacagattgccgcctttatcgaagcgcactga

SEQ ID NO: 59045 - DNA, 1227 bp, Neisseria meningitidis; identical to SEQ ID NO: 43663

SEQ ID NO: 59046 - DNA, 552 bp, Neisseria meningitidis; identical to SEQ ID NO: 37494

SEQ ID NO: 59047 - DNA, 738 bp, Neisseria meningitidis
atgaaaaaattatctcggattgtattttcaactgtcctgttgggtttttcggccgctttgccggcgcagacctattctgtttattttaatcagaacgggaaactgacggcgacgatgtcttctgccgcttatatcaggcaatatagtgtggcggagggtattgcgcacgcgcaggatttttattatccgtcgatgaagaaatattccgaaccttatatcgttgcttcaacgcaaatcaaatcttttgtgcctaccctgcaaaacggtatgttgattttgtggcattttaatggtcagaaaaaaatggcggggggcttcagcaagggtaagccggacggggagtgggtcaactggtatccgaacggtaaaaaatctgccgttatgccttataaaaatggtttgagtgaaggtacggggtaccgctattaccgtaacggcggcaaggaaagcgaaatccagtttaaacagaataaggcaaacggcgtatggaagcaatggtatgccgacggcaatatcaaaacggaaatggttatggtcaatgatgagcctgccaagattctgacttgggatgaaagcggccgattactctcggaactgtctatccgccaccatcaacgcaacggggtggttttggagtggtatgaagatggttctaaaaagagcgaggctgtttatcaggatgacaagttggtcaggaaaacccagtgggataaggatggttatttaatcgaaccctga

SEQ ID NO: 59048 - DNA, 900 bp, Neisseria meningitidis
ttggcagccgatcgaaccatacctgaaccgtcaaaaacccgttacctcagagattaccgcggccgtcccgcctatcccctgttgtccatgttcaaagccgtcctgctcggacaatggcacagcctctccgatcccgaactcgaacacagcctcatcacccgcatcgacttcaacctgttttgccgttttgacgaactgagcattcccgattacagcaccttatgccgctaccgcaactggttggcgcaagacaacaccctgtccgaattattggaactgatcaaccgccaactgaccgaaaaaggcttaaaagtagagaaagcatccgccgccgtcattgatgccaccattattcagaccgccggcagcaaacagcgtcaggccatagaagtcgatgaagaaggacaaatcaacggtcaaaccacaccgagtaaggacaaagatgcccgttggataaagaaaaacggcctctacaaactcggttacaaacaacatacccgtaccgatgcggaaggctatatcgagaaactgcacattactcccgccaatgcccatgagtgcaaacacctgtcgcctttgctggaaggactgcccaaaggtacgaccgtctatgtcgacaaaggctacgacagtgcggaaaaccggcaacatctggaagaacatcagttgcaggacggcattatgcgcaaagcctgccgcaaccgtccgctgacggaggcacaaaccaaacgcaaccgttatgtggtcgaacaaagcttcggtacgctgcaccgtaaattccgctacgcccgggcagcctatttcggactgattaaagtgagtgcgcaaagccatctgaaagcgatgtgtttgaacctgttgaaagccgccaacaggctaagtgcgcccgctgccgcctaa

SEQ ID NO: 59049 - DNA, 1131 bp, Neisseria meningitidis
atgaaacaagccgattcaaccatcaaatctcgtgcggcggtggcattcgcccctaaccaacccttacaaattgtggaaatcgacgtagaaatgccgcgtaaaggcgaggtgttaatccgcaatacccacactggcgtgtgccatactgatgcgtttacgttatcaggaagcgatcctgaaggcgtattccctgtggtgcttggacacgaaggtgcgggtgtggtcgttgctgtgggcgaaggtgtgtcaagcgtaaaaccgggtgatcacgtgattccgctttacaccgccgaatgtggcgaatgtgagttttgttgttcaggtaaaaccaacttgtgcgtctcagtgcgtgatacacaaggtaaaggcttaatgccggacggcacgacgcgtttttcttatcaaggtcagccgatttatcactatatgggctgttcgactttcagtgaatactccgttgttgccgaagtttcactggcgaaaatcaaccctgaagccaaccatgaacaagtatgtttgctcggctgcggcgttaccacaggtattggtgcggtacataatacggcaaaagtgcaagaaggcgactctgttgccgtgtttggcttaggcgcgattggtttggcggtggtgcaaggtgcgcgtcaagccaaagccggccgcattatcgccattgataccaatccatcaaaatttgagttggcaaaacagtttggtgcaacggattgtttgaacccgaacgattacgataaaccgatcaaagatgtgttgttagacattaataaatggggcattgaccatacctttgaatgtatcggcaacgtaaacgtaatgcgtcaggcattagaaagtgcacatcgtggttggggtcaatccattatcatcggcgtagcaggtgcgggacaagaaatttcaacgcgtccgttccagttggtaacaggtcgtgtttggaaaggttcagcatttggcggtgtgaaaggtcgctctgaactgccgaaaatggtggaagattcaatgaaaggcgacattgagttagaaccgtttgtaacccacacaatgacactcgatcaaatcaataaagcctttgacttaatgcacgaaggtaaatcgatccgcgccgttattcactactaa

SEQ ID NO: 59050 - DNA, 975 bp, Neisseria meningitidis
atgacagaatatcccggcatcgggtcgccgttgttttacggcgttttttttgcggcagtgctggtcatgattgccttggatatgttttcgctgaagaaaaacggcagccataaagtcggcgtcaaagaagccttggcatggagcggcttgtgggttgccgtatcctgcctgttcgcgggctggctgtatttcgaactcgccggcaatcccggctacggcgcggcagtcgcaaaagaaaaagtattggaattctttaccggctacattttggaaaaatcgttggcagtcgacaatattttcgtgttcctgatgatattcggctacttcaaagtcgcaccgcagtttcagcaccgcgtgctgctgtacggcgtattgggcgcattggtattgcgcactgtcatgattttcgtcggcgcggcactggttcggcagtttgagtggattctgtatctgtttggcgcgttcctgctctatactggtatacacatgatgaagcccgaaggcgatgagaaagaggatttggcaaacagcaggctgctgaatgccgtcaagaaagtcgttccggtcggcacggaatttcacggcgagaaattttttaccgtcgaaaacggcaaaaaaatcgccacgccgctgtttttggtgctggtcatgattgaattgagcgatgtcgtgtttgccgtggacagcatccccgccgtctttgccgttaccaccgatccgtttatcgtgctgacttccaatattttcgctattttgggtttgcgggcgatgtatttcctgctggcggatgtggcggaacgctttatcttcctgaaatacggcttggcattcgtgttgggttttatcggtgtgaagatgctgattatgcattgggtgcatatcccgatttccgtttcgctgtcggtcgtgttcggcgcgttgggtgcatcgatactgacctcgttaatttatacgaaaaaacagcctgataaataa

SEQ ID NO: 59051 - DNA, 888 bp, Neisseria meningitidis; identical to SEQ ID NO: 42424

SEQ ID NO: 59052 - DNA, 1122 bp, Neisseria meningitidis
atgagtaatcaagatttttatgcgacgctgggtgtggcaagaacagctaccgatgatgagattaaaaaagcttaccgtaaattggcgatgaaataccatcccgaccgcaatcctgacaacaaagatgcggaagagaagtttaaagaagtacaaaaggcgtatgaaactttgtccgacaaggaaaagcgcgctatgtacgaccagtatgggcatgcggcgtttgaaggcggcggacaggggggcttcggagggtttggcggatttggcggtgcgcagggttttgactttggggatattttcagccaaatgtttggaggcggttcggggcgcgcccagcctgattatcagggtgaggacgttcaagtcggtatcgaaatcacgcttgaagaagccgcaaaaggtgtgaagaaacgcatcaatattccgacttatgaagcgtgtgatgtctgtaacggcagtggcgcgaaaccggggacatccccggaaacctgcccgacttgcaaaggttcgggtacggtgcacatccagcaggcgattttccgtatgcagcagacttgtccgacctgccacggtgcgggcaaacacattaaagaaccttgcgtcaaatgccgtggcgcggggcggaataaggcggtcaagacggtggaagtcaatattcccgccggtatcgatgacgggcagcgtatccgtttgagcggcgaaggcggaccgggtatgcacggtgcgcctgccggcgacctgtatgtaaccgttcgcattcgggcgcataagattttccaacgcgacggtctggacttgcattgcgaactgccgatcagttttgccacggctgctttgggcggggagttggaagtgccgaccttggacggaaaggtcaagctcaccgtccccaaagaaacccaaaccggcaggaggatgcgcgtgaagggtaagggtgtcaaatctttacgcagcagcgcgaccggcgatttgtactgccatattgttgtcgaaacgcctgtcaatttgaccgaccgtcaaaaagagcttttggaagaatttgagcggatttctaccggcttggaaaaccaaacaccgcgcaagaaatcgtttttagacaagctgcgcgatttgtttgattga

SEQ ID NO: 59053 - DNA, 741 bp, Neisseria meningitidis
atggaaacgacactgttcaaacccgccctgtggcagataccgcatatcggatccggcggcgaaaccgcccttgcggaaaaaacggaaaccctcaaacaacgcctgcaccggattgtcggcagccaccgggatgcacggtttgccagcagccttgcggcagaagatatggtgattaccgaccttatcgccggcgaaaacctcaatatcggcatttttaccttggatacggggctgctccacacggaaaccctgaacctgctggacaggctcggacgcgcatatccccatttgcggataaagcgtttccggccggttcgagaagatgccgaccgttatgtggaaagcaaaggcaggtttgccttttacgacagcgttgaagcgcgccgcgaatgctgccgcatccgaaaaatcgaaccgctcaaccgcgccattgcaggcgcggacgcctggcttaccgggcaacgccgcgaacaatccgccacacgcacggaactgccgtttgccgaatacgatgccggacggggcatcggcaaatacaacccgattttcgactggtcggaacacgacgtgtgggcatacatcctcgccaacaatgtgccttacaacgatttgtaccggcaaggatttcccagcataggctgcgacccctgcacccgccccgtcaaggcgggcgaagacatccgcgccgggcggtggtggtgggaaggcagaaacagcaaagaatgcgggctgcacaaataa

SEQ ID NO: 59054 - DNA, 1302 bp, Neisseria meningitidis
atgccgtctgaaaccgcccgccccctttatgcggacacgtgcgccgcacacacgctcgtctggttccgccaaaacctccgcatccgcgacaacgccgccttatgcgccgccgttgccgaaggtttgcccattatcggcatttggattgacgatgccgaaacagacaaccctcgccgcgccgcgttctaccgccaatccgccgccgaactcgcccaagggcttgcagggcgcggcatcccgctctacacggcggcatctcctgccgagctcgtccggctcgccgtccgcctcaatatccgcaccgtcatcgccgacgaatcccatacttttgccgacaaactcgccgacaacgccctttggcacgaattggacaaacacggcatcgcgttaaccttcgtcaacgaccgcgccgttttcggcaaaaccgacctgatacccgacggcggcacggcatatgccgatttcgaccgctaccgcgaagtatggctcgaccgcttttccaagcagccccccgccggtccggacctattcgcggcataccgccaacccttccccgaaaacctttccgccccgcagcctgccgcgctttcagacggcatcttcctgccgcaaaacagcggcgaaacggcggcttggcggcagtggcggcggtttctcgaacaggcggattcctactccgttttaaaggatttcccctcgcgcaaacacacttcgctgatgggcgcgtatttgagtgccggctgcatctcgccgcgcctgctcgcgcgggaaagcctcgaacgccgtctgaacgcgtgggcggacaacatcatccgccgcgattttttccttcaacttgccttgcagcacacggatgacgacccttcagacggcaatcctgaacacaccctgcgcctgacgctttggcagcagggccagaccggcattccgattatcgatgccgcgatgcgctgtttgcacaaaaccggcagcctccaccccgccctgagacgcttgagcgcggattttttctgccacgttttaaacctcccccgccgcgaaggcgagatatggtttgcccggcagctgaccgatttcgatgcggcaatcaaccaaggcaactggtggcttgccgcctcacggcacacctgccccgacattgccgccgccgcacacaagaccgaccccgacggcacctttgtcagacggcacattcccgagcttgcccacctgtccgccgacaccgtccacacgccttggcggtttgcctgttcggtcgatacccacggctatcccgcctatcctgtcgccggtattccctaa

SEQ ID NO: 59055 - DNA, 1566 bp, Neisseria meningitidis; identical to SEQ ID NO: 42664

SEQ ID NO: 59056 - DNA, 771 bp, Neisseria meningitidis; identical to SEQ ID NO: 52338

SEQ ID NO: 59057 - DNA, 759 bp, Neisseria meningitidis
atgattaccatccgcaacgtcagctaccgcatcggcacacgccccatcctcgacaacgtcagcctcgacatccccgaaggcggcattaccgccctcgtcggccccaacggcgcgggcaaatccaccctgttttcctttatggcgcggctgcgcccgcttgaaagcggcagcatcgcctaccgcggcaaaaaccttgccgacacccccaccgccgaactcgccaaaactctgtccatcctcacccaagaaaacagcatcatgagccgcattaccgtgcgcgacctgctgatgttcggacgttacccctaccatcaaggcaggccgactgccgaatgccgccgtatcgttaacggtgcaatcgaagaattccacctgcaagacctctccgaccgctatctgaccgaactctccggcggacaacgccaacgcgccatgattgcgatggtgttctgccaaagcaccgactacgtccttttggacgaaccgctgaacaacctcgatatgtatcacgcccgctcgctcatgcagattctgcaaaagctcacgcgcgaacacaaacgcaccaccgtcgccgtattgcacgacatcaaccaggccgccgcctacgccgaccacgtcgtcgccatgaaaaacggcaaagccgtcctgaccggcacgcccgaagaagtgttcaccgtacacaacatcaaagaactgttcgacatggacgtggacgtactcgactacgaaggcaaaaaactcatcgtccaccatatctga

SEQ ID NO: 59058 - DNA, 465 bp, Neisseria meningitidis
atgaaatgcccgttttgcgcccaccccgacacccgcgttgccgattcgcgtctgatggaagaacgcaacgccgtgcgccgccgccgccactgccccaactgcggcaaacgcttcggcacgctcgaaaccgccgaactcaaaatgcccgccgtcatcggtccggacaaaaaacgttcgcccttcaatgcacaacgcctccgcaacgacctgaccgccgccgcccgaaaatccgccctgacacccgaacagatcgacgaaaccgtccgcctgacggaacacaggctctacacttcgggtcagcgcgacatcccctctgccgcacttgccgacatggtgctaaaagaactgctccgacaagatacggaagccgccgtccgtttcgccgccctgcacaaacgcttcgacaatccggcagactttgcctcgtggctggcgcaagccgtcaaaacagaccgcaaagcctga

SEQ ID NO: 59059 - DNA, 525 bp, Neisseria meningitidis
ttgaggtcgtctgaaatggatattttattgaaatactggaagccggtaggtgtattgctgctaatcgtcctgatttttaccgcatggcatttcgaccgtgccgaaaaataccgcatgggacgggaggctgctgctgccgaaatctcgaatcgtctgaaagacggctatatcgagcaggcaaagcaggcgcgttctgccgagcagaaggccgctgccgcgtttgccgaacgacaaaccaaattagaagaggaaaaacaaaatgctgaaaaaactgttgccgctatgcgtcttgagcttaaccgcctgcgccactacgccgccgcccaaaatcgcaacagaaacctgcccgcaaccgctaccgccgccaccgcatctgatggcgcgtcagattcccaaggctggctattattcggacagtgcgctgaaaaatatgcaggactggcagaaacagccgacggacatgcagccgatttaagggaatggcaggcatatggtcatgcagtaagcagtcagcgtgccgaataa

SEQ ID NO: 59060 - DNA, 786 bp, Neisseria meningitidis; identical to SEQ ID NO: 42976

SEQ ID NO: 59061 - DNA, 453 bp, Neisseria meningitidis; identical to SEQ ID NO: 42252

SEQ ID NO: 59062 - DNA, 483 bp, Neisseria meningitidis; identical to SEQ ID NO: 51699

SEQ ID NO: 59063 - DNA, 681 bp, Neisseria meningitidis; identical to SEQ ID NO: 51452

SEQ ID NO: 59064 - DNA, 375 bp, Neisseria meningitidis; identical to SEQ ID NO: 38650

SEQ ID NO: 59065 - DNA, 1284 bp, Neisseria meningitidis; identical to SEQ ID NO: 43586

SEQ ID NO: 59066 - DNA, 567 bp, Neisseria meningitidis; identical to SEQ ID NO: 50541

SEQ ID NO: 59067 - DNA, 1887 bp, Neisseria meningitidis
ttgggcatttcccgcaaaatatcccttattctgtccatactggcagtgtgcctgccgatgcatgcacacgcctcagatttggcaaacgattcttttatccggcaggttctcgaccgtcagcatttcgaacccgacgggaaataccacctattcggcagcaggggggaacttgccgagcgcagcggtcatatcggattgggaaacatacaaagccatcagttgggcaacctgatgattcaacaggcggccattaaaggaaatatcggctacattgtccgcttttccgatcacgggcacgaagtccattcccccttcgacaaccatgcctcacattccgattctgatgaagccggtagtcccgttgacggattcagcctttaccgcatccattgggacggatacgaacaccatcccgccgacggctacgacgggccacagggcggcggctatcccgctcccaaaggcgcgagggatatatacagctacgacataaaaggcgttgcccaaaatatccgcctcaacctgaccgacaaccgcagcaccggacaacggcttgccgaccgtttccacaatgccggcgctatgctgacgcaaggagtaggcgacggattcaaacgcgccacccgatacagccccgagctggacagatcgggcaatgccgccgaagctttcaacggcactgcagatatcgtcaaaaacatcatcggcgcggcaggagaaattgtcggcgcaggcgatgccgtgcagggtataagcgaaggctcaaacattgctgtcatgcacggcttgggtctgctttccaccgaaaacaagatggcgcgcatcaacgatttggcagatatggcgcaactcaaagactatgccgcagcagccatccgcgattgggcagtccaaaaccccaatgccgcacaaggcatagaagccgtcagcaatatctttatggcagccatccccatcaaagggattggagctgttcggggaaaatacggcttgggcggcatcacggcacatcctatcaagcggtcgcagatgggcgcgatcgcattgccgaaagggaaatccgccgtcagcgacaattttgccgatgcggcatacgccaaatacccgtccccttaccattcccgaaatatccgttcaaacttggagcagcgttacggcaaagaaaacatcacctcctcaaccgtgccgccgtcaaacggcaaaaatgtcaaactggcagaccaacgccacccgaagacaggcgtaccgtttgacggtaaagggtttccgaattttgagaagcacgtgaaatatgatacgaagctcgatattcaagaattatcggggggcggtatacctaaggctaagcctgtgtttgatgcgaaaccgagatgggaggttgataggaagcttaataaattgacaactcgtgagcaggtggagaaaaatgttcaggaaacgagaagaaggagtcagagtagtcagtttaaagcccatgcgcaacgagaatgggaaaataaaacagggttagattttaatcattttataggtggtgatatcaataagaaaggcacagtaacaggagggcatagtctaacccgtggtgatgtacgggtgatacaacaaacctcggcacctgataaacatggggtttatcaagcgacagtggaaattaaaaagcctgatggaagttgggaggtgaaaacgaaaaaaggtgggaaagtgatgaccaagcacaccatgttcccaaaagattgggatgaggctagaattagggctgaagttacttcggcttgggaaagtagaataatgcttaaggataataaatggcagggtacaagtaaatcgggtattaaaatagaaggatttaccgaacctaatagaacagcatatcccatttatgaatag

SEQ ID NO: 59068 - DNA, 1221 bp, Neisseria meningitidis
atgaccctattttgcgaacaagtcccctacccccgccttgccgaagcattcggcacaccgctttatgtgtacagccaatccgcgctgaccgaagcatttgaacactatcaaaccgcctttgccgagctctccccgctcgtctgctatgcggttaaagccaatggcaacctgagcatcatcaaacactttgcttctttggggagcggttttgacattgtgtccggcggcgaattggcacgcgttttggcggcaggcggcgatgcggcaaaaaccatattttcaggcgtgggcaaaagcgaggcagaaatcgagtttgcgctgaatgccggcgtgaaatgcttcaatatggaaagcatccccgaaatcgaccgcattcaaaaagttgccgcgcgtttgggcaaaaccgcgtccgtctccctgcgcgtcaatcccgatgtcgatgcgaaaacccatccttacatctccacaggtctgaaagccaacaaattcggcatcgcctacgccgacgcactcaaagcctaccgccacgtcgcacaacagcccaatttgaaaatcatcggcatcgactgccatatcggctcccaactgaccgacctcagcccgcttgtcgaagcctgtgaacgtatcttggtcttggtcgatcaactggcagacgaaggcattgtgttggaacacttggacttgggcggcggtgtcggcattgtttaccaagatgaaaatgtgcctgatttgggcgcgtatgcccaagcggttcaaaaactgatcggcacacgccgtctgaaactcattcttgagcccggccgcagcttggtcggcaacgcaggcgcgttgttgacgcgtgtcgaattcgtcaaatacggcgaagagaaaaactttgtgatggtcgatgcggcgatgaacgatttaatgcgccccgccctatatgatgcctatcatcacatcgaagcggtagaaccaaaaaacatcgcgccgctgactgccaacatcgtcggcccgatttgtgaaaccggcgacttcctcggcaaagaccgcaccatcgcctgcgaagaaggcgatttgctgcttatccgcagcgcgggcgcatacggggccagtatggcgagcaattacaacgcgcgcaaccgtgcggcagaggtgttggtggacggcaacgaataccgactcatccgccggcgcgaaaccttggaacagcaaatggcaaacgaactcgcctgcctgtaa

SEQ ID NO: 59069 - DNA, 669 bp, Neisseria meningitidis; identical to SEQ ID NO: 43457

SEQ ID NO: 59070 - DNA, 192 bp, Neisseria meningitidis; identical to SEQ ID NO: 43532

SEQ ID NO: 59071 - DNA, 5742 bp, Neisseria meningitidis
atgaataaaggtttacatcgcattatctttagtaaaaagcacagcaccatggttgcagtagccgaaactgccaacagccagggcaaaggtaaacaggcaggcagttcggtttctgtttcactgaaaacttcaggcgacctttgcggcaaactcaaaaccacccttaaaaccttggtctgctctttggtttccctgagtatggtattgcctgcccatgcccaaattaccaccgacaaatcagcacctaaaaaccagcaggtcgttatccttaaaaccaacactggtgcccccttggtgaatatccaaactccgaatggacgcggattgagccacaaccgctatacgcagtttgatgttgacaacaaaggggcagtgttaaacaacgaccgtaacaataatccgtttctggtcaaaggcagtgcgcaattgattttgaacgaggtacgcggtacggctagcaaactcaacggcatcgttaccgtaggcggtcaaaaggccgacgtgattattgccaaccccaacggcattaccgttaatggcggcggctttaaaaatgtcggtcggggcatcttaactaccggtgcgccccaaatcggcaaagacggtgcactgacaggatttgatgtgcgtcaaggcacattgaccgtaggagcagcaggttggaatgataaaggcggagccgactacaccggggtacttgctcgtgcagttgctttgcaggggaaattacagggtaaaaacctggcggtttctaccggtcctcagaaagtagattacgccagcggcgaaatcagtgcaggtacggcagcgggtacgaaaccgactattgcccttgatactgccgcactgggcggtatgtacgccgacagcatcacactgattgccaatgaaaaaggcgtaggcgtcaaaaatgccggcacactcgaagcggccaagcaattgattgtgacttcgtcaggccgcattgaaaacagcggccgcatcgccaccactgccgacggcaccgaagcttcaccgacttatctctccatcgaaaccaccgaaaaaggagcggcaggcacatttatctccaatggtggtcggatcgagagcaaaggcttattggttattgagacgggagaagatatcagcttgcgtaacggagccgtggtgcagaataacggcagtcgcccagctaccacggtattaaatgctggtcataatttggtgattgagagcaaaactaatgtgaacaatgccaaaggcccggctactctgtcggccgacggtcgtactatgatcaatgatgctactattcaagcgggtagttccgtgtacagctccaccaaaggcgatactgaattgggtggaaatacccgtattattgctgaaaacgtaaccgtattatctaacggtagtattagcagtgctgctgtaattgaggctcaagacactgcacacattgaatcgggcaaaccgctttctttagaaacctcgaccgttgcctccaacatccgtttgaacaacggtaacattaaaggcggaaagcaggtggtactgatggctgatggcgacattcaggcaaaagcctccaatctgaatgcatccggcaatctgtatattcatgcaggtaaggatctggatttgaatgccgataaagacttatcaacacaaagtatcagcctgagggcagacaacaccgccctcatcagcagcaacggtaacaccttgactgcagaaaagaatctggatattcaggcaggtagcttgagtgtgcgtcaaagtaatctgcaatccagtggcggtaatgtgcagatgagcgcgactaaaggcaacatcagcttgaatcagagttggataaatgccagtcagaatattgatacggcagcacttcaaggcaatattatttcagacggtctgactgctgttgccgaagttggacgcgtatctcttcttgccaacggcaatgttgatttcaacggtctaaataccttgattgcggaaggagacattaatgctggttcagtcggtaaaggccgtctgaaaatggacaataccgatatttatgcttctgcaggcgatgtgaaactggttgccggaggtcaattagatttaggcaacggcaccgttaacggcggtcatatcagcttagacagcaataaaggcagcatggtggtgcagaatgtacacctgaatgcccgcgcatcactgaaagtggatgcggatcaaactttaaccattaataacagcaagctcaattccggtcacaatacccagattaatacaaatcatggtcatatgacgcttaatcagcttgatgctcattcacgtcgtcatatgagtatcagtgcacagggtaaaggcaaaggaaaagacagcggtcaaattttacaaaacgaccagcaaaacagtaaaagtactttggcggcagatggtgtattgtcattgaacagcagcgcattacaggttttggacaatactaccctgcgcggtggcgcgataaacatcaaagctggcggaggcatcatcaaacggggccatatcgattgggaaacccaagatacggcaactatgcgttcagcggaactgaaaccactgtccggtatgatgtcgatagaatcgggcggtaataaccctttaaccgttgaacccggtaaccgtatcgtttctgcaggtgatttggccgtgaaacacaacggtacattccaaatcagtgccagagcaggaaataacggcaatccgagtgcgcaaacagccagcgtttcagctaaaggcaatatcgggattgtggcgggagaggtggatattgatgcagcaaatattgccgcagggaaagatttggctttagtggcaactaaagggaatatttcactaaacagtattaggaatacgtttagtaactatcaattgaaaacagataaacacaatatcacacagcaacttactgatgtagagcaggagcttagtaagttaacgagcgatcctaaatatcgtaaagcacaggatcttccacaaatgttgaggcgtaaatataagaggcgtgacaaagtattcggtgatagtgaggccagattacgtggtttacgagcaaagataaatgctgctgatgaggcttgggcagaactccaatccccagtaaaagcgttacttgaacgtaaacaattgttacaacaagcccttttaacagtttcccaaccgggtagtggtcacgaaaaccaaggtagcacccttagcggtcaaaatatcaaactgctcgctgcaggtggtatccgtatccagggctccaaagttgctgccacccaacaggcaaatatccaagctgcaggatttttacctgcaccagccgcagaggaactgcaagaaggtcgacttcaatcagccattgacatcagcggtgtatttgatacttttgaatatggtcagcaaggcagcgataaatacggctatgccattttcagcaggccatctgaaatttcaggaaaaacaggtgttaccctctctgcaccaaatgccaatgagaacagccgcatcagtctgagtgcggcaaacatcgaagctgaaaacggcaaaatcaaaattcaatcttacggtgaccaatattactatgcgagacagagcgaactctatacctttgaacgccgcagctacaaaaccggcaaatggtacaaccgcaaacacattaccgaagtcaaagaacacaaaaacgccaagcccgacgcagtaaacctcagcgcatcccaaggcatcgacatcaaatctggtggcagcatcgacgcctacgccaccgcattcgatgcccccaaaggcagcattaacatcgaagccgggcggaaattgacactctatgccgtagaagagctcaactacgacaaactagacagccaaaaaaggcgcagatttctcggcatcagctacagcaaagcacacgacaccaccacccaagtcatgaaaaccgcgctgccctcaagggtagttgcagaatctgccaatctgcaatcaggttgggataccaaactgcaaggcacacagtttgaaaccacactgggtggcgcaaccatacgcgcaggcgtaggcgagcaggcacgggcagatgccaagattatcctcgaagggatcaaaagcagcatccacacagaaaccgtgagcagcagcaaatctactctatggcaaaaacaggcaggatggggcagtaacatcgaaaccttgcaattgccgagtttcaccggtcccgttgcgcccgtactgaccgctcccggcggctatatcgccgacatccccaaaggcaacctcaaaaccgaaatcgaaaaactcgccaaacagcccgagtatgcttatttgaaacaacttcaagttgcgaaaaacatcaactggaatcaggtgcagcttgcttacgacagatgggactacaaacaggagggcttaaccgaagcaggtgcggcgattatcgcactggccgttaccgtggtcacctcaggcgcaggaaccggagccgtattgggattaaacggtgcggccgccgccgcaaccgatgcagcatttgcctctttggccagccaggcttccgtatcgttcatcaacaacaaaggcaatatcggtaacaccctgaaagagctgggcagaagcagcacggtgaaaaatctggtggttgccgccgctaccgcaggcgtatccaacaaaatcggtgcttcctcccttgccacttggagcgaaaccccttgggtaaacaacctcaacgtcaacttggccaatgcgggcagtgccgcactgattaataccgctgtcaacggcggcagcctgaaagacaatctggaagcgaatatccttgcggctttggtcaataccgcgcatggagaagcagccagtaaaatcaaacagttggatcagcactacatagtccacaagattgcccatgccatagcgggctgtgcggctgcggcggcgaataagggcaagtgtcaggatggtgcgataggcgctgcagtcggtgagattgttggtgaggctttggttaagaataccgatttcagcggtatgactgcttctgaaattgaaaaagctaaagcgaatattactgcgtatgcaaaattggtagccggagcgactgtaggtgttacaggaggcaatgttgatgtggcggcaaatgcttccgaaacagctgttaaaaataatgcattagatattatttgggatatcggcaacctcgtatgggacggcggtaaatggatttacgccaaatctattggcgataagcagatggctcgagaagcggcgattgattttggtgtggatgccgccgcagctgccgttccctttgttccggcaggtgcgactaaaatcagccgaggcggggcttatgttctgaaggcgggagacgaagcagttgatacggctaaagccatacaggaaattcagaagcagaccggaatcaagcttacttatgataaggttaataaggtttggacaacaccggcggggttagattatgggttagatgctaagcatggtaataggattaaacatgttttagcccatacaattccaaatccaaacaaacctgttcattctgtttttaatgtgtcccgtaaagaagttttgcctttggttgatgaagcttggagaatgaaaggaaatcctttgccaaatgattcatccgtatatcttgtagatatgaagaaacctattggaacaaaaggagaaacaaaagtgcggattgttgtgcaaaaaggaacaaataaaatcatttctgcatatcctcagaaataa

SEQ ID NO: 59072 - DNA, 828 bp, Neisseria meningitidis; identical to SEQ ID NO: 38675

SEQ ID NO: 59073 - DNA, 1893 bp, Neisseria meningitidis
atgcctatccttaccatccgtgaagtgtgcaacattaatcattggggcataggttattatgatgttgacgattccggcgaaatcatcgtccgccccaatccggcgcaacacaatcaaactgcttcactgcaaaaactgactgaagccgtgcaacaaaaacatcaggcgcgcctgcctgttttgttttgttttccgcaaatcctcgaacaccgcctccgcgacattaaccgcgcctttcagacggcacgggaagagtgcggctataagggcggttattgtttggtttaccctatcaaggtcaaccaacaccgccgtgtcatcgaatcgcttatgtcaagcggacaaccgcatggtttggaagctggttctaaagccgaactgatggcggttttggcacacgccggcacccggcaaacattaatcgtctgcaacggctataaagaccgtgaatatatccgtttcgccttgatgggcgaaaaactggggcatcaggtttatttggtgattgagaagctgtccgaaatacaaatggtattggaagaggcggaaaaactcggcatcaagccccgtttgggtgtgcgcgccagactggcttcccaaggttcgggaaaatggcagtcttcgggtggggaaaaatcaaaattcggcttgtcggcttcccaagttttgcaactggtcgatattttgaaacaaaaaaacaggctggattgcctgcagcttttgcatttccatttgggctcgcagcttgggaacatccgtgatgttgccacaggtgtacacgaatcggctcggttttatgttgagttgcacaaactgggggtaaatatccgctgttttgatgtaggcggcgggcttggcgtggattacgaaggaaaccgcacacaatcggattgttccgttaattacagcctcaacgaatatgccgccacagtcgtatggggcatcagtcaggcttgtctcgaacacgggctgccgcatccgacaatcatcaccgagagcgggcgcggcattaccgcacatcacgccgttttggttgctaatgttataggcgttgaacgttacaaaccgcgccggctggatgcgccatcgcccgaagcaccgcgtgtgttgcacagtatgtgggaaacttggacggatatttccgcctcgcgggaaaaacgttccttacgcagctggatacacgaagggcagtttgatcttgctgatgtgcataatcagtataatgtcgggctgttgagtttggcgcaacgtgcgtgggcggagcaactgtatttaaatatctgtcatgaagtcggcgaattgtttaatgaaaaacaccggtctcaccgaaccattattgacgaattgcaagaacgttttgccgataagctgtatgtcaatttctcactcttccaatctttgcccgatgcttggggcatagatcaacttttccctgtttgtcccattaccggtttgaatgaaccgattgcgcgccgcgccgtgttgttggacattacctgcgattcagacggtacgattgaccactacatcgacggagacggcatcgccggtacgatgcctatgcctgattatcccgaagaagagccgccgcttttaggcttttttatggtgggagcatatcaggaaatactcggcaatatgcacaatcttttcggcgacactgccactgccgatgttgttgtaggggaagacggacaatttaccgtcatcgattacgatgaaggaaacaccgttgccgatatgctcgaatacgtttatcaagatccgaaagagctgatgaaacgctatcgcgaacaaatcgaacattcagaccttcctgcctcgcaggctatgtctttcttaaaagaactcgaagcggggcttaatggttatacctatttggaagacgaatag

SEQ ID NO: 59074 - DNA, 435 bp, Neisseria meningitidis; identical to SEQ ID NO: 40706

SEQ ID NO: 59075 - DNA, 369 bp, Neisseria meningitidis; identical to SEQ ID NO: 51331

SEQ ID NO: 59076 - DNA, 1062 bp, Neisseria meningitidis
atggattggcacgaacgtttccccgaattggaagcgcaactgggtgcgccgattgaggattacgcgccgccgaaacattggacgcgcaagcagctcagaagtatggggcgtgtgtcgtatttgtgcgtcgatgcggcggagcaggctttgacggatgccggtttgctcggggacgaaagcattaccgacggacggatgggcgttgcctgcggctcttccagcggcagcaccaaagacatcggcgatgtaggcgaattgttgctgaccggcatgtcgcgcaacttcagtgccaacacctatgtgcgtatgatgccgtacaccgccgccgccaatatcggcatctttttcggactgaaaggacgcatcatcccgacatcgagcgcgtgttcgtccggcagccaaggcataggttatgcctacgaagccatcaaatacggtctgaccgatatgatgctggcgggcggaggcgaagaatttttcccgtccgaagtgtatgttttcgactcgctttatgccgccagccgccgcaacggcgaaccggaaaaaaccccgcgcccatacgacgcgaaccgcgacgggctggtcatcggcgaaggcgcggggattttcgtgctggaagaattggaacacgccaaacggcgcggtgcgataatttacgccgaactcgtcggctacggagccaacagcgatgcctaccatatttccacgccccgccccgacgcgcaaggcgcaatccttgcctttcagacggcattgcaacacgcaggtcttgcgcccgaagacatcggctggattaatctgcacggcaccgggacgcaccacaacgacagtatggaaagccgtgccgttgcagcggttttcggcaacaatacgccctgcacgtccaccaagccgcaaaccggacacacgctgggtgcggcgggcgcaatcgaagccgcgttcgcgtggggctttgccgaccggcaaagcaatcccgaaggaaaacttccgccccagctttgggacgggcagaacgaccccgacctgcccgccattaacctgaccggcagcggcagcttctag

SEQ ID NO: 59077 - DNA, 447 bp, Neisseria meningitidis; identical to SEQ ID NO: 42843

SEQ ID NO: 59078 - DNA, 2115 bp, Neisseria meningitidis; identical to SEQ ID NO: 43515

SEQ ID NO: 59079 - DNA, 756 bp, Neisseria meningitidis; identical to SEQ ID NO: 39133

SEQ ID NO: 59080 - DNA, 924 bp, Neisseria meningitidis; identical to SEQ ID NO: 50333

SEQ ID NO: 59081 - DNA, 1233 bp, Neisseria meningitidis; identical to SEQ ID NO: 51079

SEQ ID NO: 59082 - DNA, 534 bp, Neisseria meningitidis; identical to SEQ ID NO: 44316

SEQ ID NO: 59083 - DNA, 1389 bp, Neisseria meningitidis
atgaatgcagtcgtagttgccgtaatcgttatgctggtgctgtcgctgtcgcgcgtgcacgtggtattgagcctgacggtcggcgcgtttgtcggcggcgcggtggcgggtatgccgctgcaaaacattgccgatgcggcgggacaggtcagtcaggcggggattatccccgtgttcaacaaaggtttggaaggcggtgcgaagattgcgctttcttatgcgatgctcggcgcgtttgcaatggcgattacccattccggcctgccgcagcagcttgccggcgcggtcgtccgcaagctgaaccggggcggtatgcccgacagcgtgcgttcgggcgagggcgcggtcaaatggctgctgctttccatcatccttgtgatgggcatgatgagtcagaacatcatacctatccacatcgcctttatcccgatgattgttccgccgctgcttttggtgttcaaccgcctgaaaatcgaccgccgtctgattgcgtgcgtcatcactttcgggctggttacgacttatatgttcctgccttacggcttcggcgcgatttttttgaacgaaatcctgttgggcaacatccattccgccgcgccacagcttgatgtgaaaaacatcaacgtaatggcggcaatggcgattcccgcgttgggaatgctggccggactcctgctggcgtttgtccattaccgcaaaccgagcctgtaccaaagcaacaatgccgatacggcgggcaacgccgatgcggcaaaccgtccgcagccgtccgcctaccgcagcctggccgccgccgccgccattgccgtatgctttgccatccagttgatgtatgaagactcgctggtgttgggcgcgatgctcggtttcgccgtatttatgatgttgggcgtcatcaaccgcgacaaggcaaacgacgtattcggcgaaggcatcaagatgatggcgatggttggcttcattatgattgccgcgcagggttttgccgccgtgatgaatgcgaccgggcatattcagccgctggtggaaagcagtatggcgatattcggcaacagcaaaggtatggcggcgttggcgatgctggcggtggggcttttggtaacgatgggcatcggttcgtccttttccactttgccgattatcgccgcgatttatgtgcctttgtgtgtcggtttgggtttttcgccgcttgccaccgtcgccatcgtcggcacggcgggggcgttgggcgatgccggttcgcctgcgtccgattccacgctgggtccgacgatggggctgaacgccgacgggcagcacgaccacatccgcgattccgttatcccgaccttcatccactacaacatcccgctgctgattgccggctggattgccgcgatggtgctgtaa

SEQ ID NO: 59084 - DNA, 660 bp, Neisseria meningitidis; identical to SEQ ID NO: 50175

SEQ ID NO: 59085 - DNA, 1290 bp, Neisseria meningitidis; identical to SEQ ID NO: 50425

SEQ ID NO: 59086 - DNA, 1569 bp, Neisseria meningitidis
atgagtcaaaccgatacgcaacgggacggacgatttttacgcacagtcgaatggctgggcaatatgttgccgcacccggttacgctttttattattttcattgtgttattgctgattgcctctgccgccggtgcgtatttcggactatccgtccccgatccgcgccctgttggtgcgaaaggacgtgccgatgacggtttgattcacgttgtcagcctgctcgatgctgacggtttgatcaaaatcctgacgcataccgttaaaaatttcaccggtttcgcgccgttgggaacggtgttggtttctttattgggcgtggggattgcggaaaaatcgggcttgatttccgcattaatgcgcttattgctcacaaaatctccacgcaaactcactacttttatggttgtttttacagggattttatctaataccgcttctgaattgggctatgtcgtcctaatccctttgtccgccatcatctttcattccctcggccgccatccgcttgccggtctggctgcggctttcgccggcgtttcgggcggttattcggccaatctgttcttaggcacaatcgatccgctcttggcaggcatcacccaacaggcggcgcaaatcatccatcccgactacgtcgtaggccctgaagccaactggttttttatggtagccagtacgtttgtgattgctttgattggttattttgttactgaaaaaatcgtcgaaccgcaattgggcccttatcaatcagatttgtcacaagaagaaaaagacattcggcattccaatgaaatcacgcctttggaatataaaggattaatttgggctggcgtggtgtttgttgccttatccgccctattggcttggagcatcgtccctgccgacggtattttgcgtcatcctgaaacaggattggtttccggttcgccgtttttaaaatcgattgttgtttttattttcttgttgtttgcactgccgggcattgtttatggccgggtaacccgaagtttgcgcggcgaacaggaagtcgttaatgcgatggccgaatcgatgagtactctggggctttatttggtcatcatcttttttgccgcacagtttgtcgcattttttaattggacgaatattgggcaatatattgccgttaaaggggcgacgttcttaaaagaagtcggcttgggcggcagcgtgttgtttatcggttttattttaatttgtgcttttatcaatctgatgataggctccgcctccgcgcaatgggcggtaactgcgccgattttcgtccctatgctgatgttggccggctacgcgcccgaagtcattcaagccgcttaccgcatcggtgattccgttaccaatattattacgccgatgatgagttatttcgggctgattatggcgacggtgatcaaatacaaaaaagatgcgggcgtgggtacgctgatttctatgatgttgccgtattccgctttcttcttgattgcgtggattgccttattctgcatttgggtatttgttttgggcctgcccgtcggtcccggcgcgcccacattctatcccgcaccttaa

SEQ ID NO: 59087 - DNA, 924 bp, Neisseria meningitidis
atgcaatacagcacactggcaggacaaaccgacaactccctcgtttccaataatttcgggtttttgcgcctgccgcttaattttatgccgtatgaaagtcatgccgattgggttattaccggcgtgccttatgatatggcggtttcagggcgttccggcgcgcgtttcggtcctgaagccatccggcgcgcctccgtcaacctcgcttgggagcaccgcaggtttccatggacatttgatgtgcgcgaacgcctgaacattattgattgcggcgacttggttttttcttttggcgacagcagggattttgtcgaaaaaatggaagcgcacgccggcaaattactttcttccggcaaacgctgtttgagtttgggcggcgaccatttcattaccctaccgttgttgcgcgcccacgcccgctatttcggcaaactcgcactgattcattttgacgcgcacaccgacacctacgacaacggcagcgaatacgaccacggtacgatgttctataccgcccccaaggaaggcctcatcgacccgtcccgttccgtacaaatcggcatacgcaccgaacacagtaaaaaattgccttttactgtgttgtccgcccctaaagtcaatgaagacagtgttgaagagaccgtccgtaaaatcaaagaaaccgtcggcaatatgcccgtttacctgactttcgacatagactgcctcgacccgtcgttcgcccccgggaccggtacgcccgtatgcggcggcttgagcagcgacagggcattaaaaatcctacgtgggctgacggatctcgacatcgtcggtatggatgttgtagaagttgccccctcttacgaccaatccgacattaccgctttggccggcgccacaattgccttggaaatgctttaccttcaaggtgcgaaaaaggactga

SEQ ID NO: 59088 - DNA, 1410 bp, Neisseria meningitidis
atgaaatacatcagcacgcgcggcgaaaccgcacacaaaccgttcagcgaagttttattgatggggcttgcccccgacggcggcctgatgctgccggaacattatccgcaaatcgggcgcgaaaccttggacaaatggcgcggtttagcttatcccgaattggcgtttgaaattatgcgcctgtttgttacggatattccggaggacgatttgcgcgacattctgaaccgtacttacacggaagcggcgttcggtactaaggaaatcacccccgtccgcacgctttcagacggcatcaaaatccaagccttgtccaacggcccgacgctggcgttcaaagatatggcgatgcagtttttgggcaatgcgtttgaatatgttttaaacaaagaaggcaaaaaactcaatatcttgggcgcaaccagtggcgatacgggttcggctgcggaatatgccttgcgcggcaaaaaaggcgtgaacgtatttatgctgtcgcccgacggtaagatgagcgcgttccaacgcgcacagatgtacagtctgcaagacggaaatatccacaatatcgctgtgaaggggatgtttgacgactgtcaggatattgtgaaggcggtgcagaacgatgccgcattcaaggaaaaataccatatcggtacggtcaactcgattaactggggacgcatcgtcgcgcaagtggtttattactttgcgggctatttcaaagcgacgcaaagcaatgacgagcaggtcagcttctgcgtaccgagcggcaacttcggcaatgtttgcgcgggacacatcgccaaacaaatgggcctgcctgtccgccgcctgattgtcgcgaccaatgaaaacgatgtattggacgagtttttcaaaaccggcgcgtaccgcccgcgcaacagcgcgcatacttatgttacctccagcccgtctatggacatttccaaagcgtccaatttcgagcgtttcgtgttcgacctgatggatcgcgatcctcaggaaatcaatacgctgtgggcggaagtcgcggcaggcaaaggctttgacctgcgatttgccttggacaaagtcggtggcaaatacggctttacttccggcaagtccacccacgccgaccgcctcgccaccatcagacaggtttacgagcaagaccaagaactcatcgacccgcacactgccgacggcgtaaaagtcgcccgcgaagtgcgcgaagaaggtgaaacggtggtttgtttggaaaccgcgttggcggcaaaattcgatgcgaccatacgcgaagccgtcggcgatgtcgccattccgcgccctgccgcgctggaaggtttggaaaagctgccgcagcgcgtgcaaaccgtgccgaacagtgcggatgcggtaaaaggcatcatcgaacaaaccctaaactga

SEQ ID NO: 59089 - DNA, 2016 bp, Neisseria meningitidis
atgatgaaactcaatccccaacagctcgaagccgtccgctacctcggcggcccactgctcgtccttgccggtgcaggcagcggcaaaaccggcgtgattactcaaaaaattaagcatttgattgtcaatgtcggctacctgccgcataccgttgccgcaattacctttaccaacaaagccgctgcggaaatgcaggagcgcgttgccaaaatgctgcccaaaccgcaaacgcgcgggctgacgatttgcacgttccactctttgggcatgaagattctgcgcgaagaggcgaaccatatcggttacaaaaaaaacttctccattctcgattctaccgacagcgcgaaaatcatcggcgaactcttaggcggtacgggcaaagaagccgtattcaaggcgcaacatcaaatttccctttggaaaaacgatttaaaaacgcctgaagatgtcgttcagacggcctctaatgcgtgggaacaacaaaccgcacgcctgtatgcgagctatcaggaaaccttacaaagctatcaggcagtggacttcgacgacttaatccgcctgcctgccgtgctgttgcagcaaaacagcgaagtgcgcaacaaatggcagcggcggctgcgttatctgctggttgacgaatgccaagatacgaatacctgccaatttacgttgatgaaacttctgaccggcgcggaaggtatgtttaccgccgtcggcgacgacgaccagtccatctacgcatggcgcggcgcaaacatggaaaacctgcgcaaaatgcaggaaaactatccgcagatgaaggtcattaaactggagcaaaactaccgctccactgcgcggattctcaaaatcgccaacaaagtcattgaaaacaatccaaaattgttcaccaaaaaactttggtcgcagttcggcgaaggagaaatcgtcaaagtcgttgcctgtcaaagcgagcagcacgaagccgactgggttgtcagccaaatcgttaagcagaagctggtcggcggcgacaaaacccaatacgccgatttcgccgtcttataccgcggcaaccatcaggcgcggatttttgaggaagcattgcgcggcgcgcgcatcccctaccggctctcgggcggacaaagctttttcgacaaagctgaaatcaaagacgtgttgtcttatgtgcgactgcttgccaaccccaacgacgatcccgcctttctgcgtgccgtaaccacgcccaaacgcggcatcggcgatgtaacgctgggcaagctcaacacttacgcgcacgaacacgaatgcagcctgtatgaagccgcgcaaaacgaagaagcccttgctttgctgaacaacaccaaccgccaacacctgcaaacctttatggatatgttcggcagctaccgcgccaaagccgaaaccggcgaagcgggcgaactcatcaacaacctgctcgaagaaatcgactataaaaaccatttgatgcaaaacgaagaaggcaaagccggcgaaatcaaatggcgcaacgtcggcgatttggtatcatggtttgcgcgaaaaggcggggaagacggcaaaaacatcatcgagcttgcccaaaccatcgccctgatgacgcttttagagggtaaaagcgaagaagaagtcgatgccgtcaaactctccaccctgcacgcttccaaaggtttggaatacccctacgttttccttgtcggttgcgaagaaggtgttttgccgcacaacgacagcatcgaagaaggcaacgtcgaagaagaacgccgcctgatgtacgtcggcatcacccgcgccaaacgccaactcacgctgacccactgcatcaaacgcaaaaaacaaggcatatggcagttccccgaacccagccgattcatagacgaaatgccgcaggaagatttgaaaatcctggggcgcaaaggcggcgaaccgattgtcagcaaagaagaaggcagacgcaaccttgccgatataatcggaaggctcgacagcatgaaaaaaggcggtccggcggattaa

SEQ ID NO: 59090 - DNA, 855 bp, Neisseria meningitidis; identical to SEQ ID NO: 52164

SEQ ID NO: 59091 - DNA, 966 bp, Neisseria meningitidis
atgagctacacgcaactgacccaaggcgaacgataccacatccaatacctgtcccgccactgcaccgtcaccgaaatcgccaaacagctgaaccgccacaaaagcaccatcagccgcgaaatcagacggcaccgcacccaagggcagcaatacagcgccgaaaaagcccagcggcaaagccagactatcaaacagcgtaagcgacaaccctataagctcgattcgcagctgattcagcacatcgacccccttatccgccgcaaactcagtcccgaacaagtatgcgcctacctgtgcaaacaccaccagatcacgctccaccacagcaccatttaccgctaccttcgccaagacaaaagcaacggcagcacgttgtggcaacatctcagaatatgcagcaaaccctaccgcaaacgctacggcagcacatggaccagaggcaaagtacccaaccgtgtcggcatagaaaaccgacccgctatcgtcgaccagaaatcccgtatcggcgattgggaagccgacaccattgtcggcaaaggacagaaaagcgcattattgaccttggtcgaacgcgttacccgctacaccatcatctgcaaattggatagcctcaaagccgaagacactgcccgggcagctgttaggacattaaaggcacataaagacagggtgcacaccatcaccatggataacggcaaagagttctaccaacacaccaaaataaccaaagcattgaaagcggagacttatttttgtcgcccttaccattcttgggagaaagggctgaatgagaacaccaacggactcatccggcaatacttccccaaacaaaccgatttccgtaacatcagtgatcgggagatacgcagggttcaagatgagttgaaccaccgaccaagaaaaacacttggctacgaaacgccaagtgttttattcttgaatctgttccaaccactaatacactag

SEQ ID NO: 59092 - DNA, 984 bp, Neisseria meningitidis; identical to SEQ ID NO: 42465

SEQ ID NO: 59093 - DNA, 900 bp, Neisseria meningitidis; identical to SEQ ID NO: 42089

SEQ ID NO: 59094 - DNA, 615 bp, Neisseria meningitidis; identical to SEQ ID NO: 49632

SEQ ID NO: 59095 - DNA, 825 bp, Neisseria meningitidis
atgattaagaagacaatcggcggcatcataccgatttttacggcggttttcatccctgcatcggcaggcgcggcggatttgatgctggcgcaggaatacaaagggcaggatattgccggctgggcaatgagcgagaaactcgacggcgtgcgcgcctattgggacggaaagcacctgataagccgtcagggctacgcgtttacgccccccaaaggctttaccgcgcagtttccgccttatcctttggacggcgaattgtatagcggacgcggtcagttcgagcagatttccgctaccgtgcgttctgtttcttcagactggcgcggcatccgtctgcacgttttcgacgtacccaaggcgcagggcaatctctaccaacgtttggcagtcgcaacgcagtggctgaaaacgcatccgaacgcgccgattaccatcatcccgcaaatcaaagtgcgcgaccggcagcacgcgatggactttttaaaacaaatcgaagcgcagggcggcgaaggcgtgatgctgcgccagcccgaatcccgttatagcggcggcaggagcagccaattattgaagctgaaaagccaatacgacgacgaatgcacggtaacgcggcactatgagggcaaagggcgaaacgccggacggctgggcgcggtcggctgcaaaaaccgacacggcgaattccgcatcggcagcggtttcaaggacaaagaccgcgacaacccgcccaaaatcggcacgctgattacctaccgttaccgtggctttacgcggaaaggcacgccgaaatttgccacatttgtgcgcgtgcgtaccgaccgctga

SEQ ID NO: 59096 - DNA, 837 bp, Neisseria meningitidis
atgttactgctcaaaacgcccggcgtactgcccggcttcaaactcagccttggtctgaccgtattgtgcctgtcgctgctggtggttttgccgtttgcgatgatggcggcgaaggcggctgaaatcggctggggcggcttttggaacacgattgccgagccgaacgtattggcggccgtctggctgagtttgcggatgtcgttttatgcgatgctgaccaatgtcgtgttcggcacgctggtggcgtgggtattggtgcgctatgaatttccgggcaagggcttggcgaacgcgctggttgatttgccgtttgcgctgccgacggcggttacgggtatcgcgttggcgaccctgtatgcgcccaacggttggataggccgttttttcgagcctttgggcatcaaaatcgcgtttacacccgtcggcatttggattgcgctggtcgtcgtcagcctgccctttatcgtccgcgccgtgcagccggtgttggaggaattatcgggcgaatatgaggaagcggcggcgactttgggcgcaaaccgctttacgacgttccgccgcgtgctgctgccggaaatcacgccggcactcttgactggcgcgggaatgatgttcgcgcgggcaacgggggaatacggctcggtgatttttatcgcgggcaatattccgatggtttctgaaatcctgccgctgattattacgggcaagctggaacagttcgacgtgcagggcgcgtcggcggtggcgttgtttatgctgctggtttcgtttgtgattctgtttgcgctgaacgtgatgcagtgggcgttgggcaggcgttcgggcgcgaagggttga

SEQ ID NO: 59097 - DNA, 435 bp, Neisseria meningitidis
atgcgccgggcgttgattgcaaaaattaaaattgcccaaaaggagctgggcttggacgacggtacctatcgcgcggtgttggagcgcgtgacgggcaagcggtcgtgtgcggatatggatgtttccgaacttgagtctgttgtcgctgatatgcggtcgcacggatttaagcctaaagcaaaaggtaacccacacggtaaaccacatctgcgtcggacatcatcagcggcaatgttggacaaagtcgaagccctgctgaccgtcggcggcaaacattggaactatgcacacgcaatggcgcggcggatgtttggtaaggataaggtcgaatatttagacgatacgcagctacataaactggttgctgcgttgcagattgcggaaaacaggaaaacggaaaaagcgggtggggatgatggggttcgaaaaagttga

SEQ ID NO: 59098 - DNA, 360 bp, Neisseria meningitidis
atgaatatcaaacacctgattaccgccgcactcattgcctcagccgcctttgccgcgcaggcagccccgcaaaaacccgtatccgccgcccaaaccgcgcaacatccggccgtttggatcgatgtccgcagcgaacaggaatttagcgaagggcatttgcacaacgcggtcaacatccccgtcgaccaaatcgtccgccgcatacacgaagccgcgcccgacaaagacacgccggtcaacctctactgccgcagcggacggcgtgccgaagccgcccttcaagagctgaaaaaagcaggttatacaaatgttgccaatcacggcggttatgaagacctgctcaaaaaagggatgaaatga

SEQ ID NO: 59099 - DNA, 2016 bp, Neisseria meningitidis
atgaaatcctaccccgacccctaccgccattttgaagacctcgattccgccgaaacgcaaaacttcgctgctgaagcgaatgccgaaacgcgcgcgcgttttttaaacaacgacaaggcgcgcgcattgtctgacggtattttggcgcagttgcaggacacgcggcagattccgttttgtcaggaacaccgcgcgcggatgtaccatttccatcaggacgcggaatatccgaagggcgtgtaccgcgtgtgtaccgcagcgacataccgttccggctatcctgagtggaaaatcctgttttcagtggcggatttcgacgaattgctcggcgacgatgtatatttgggcggcgtgtcgcacttggtggaacagcccaaccgtgcgttgttaacactgagcaaatcgggcggcgatacggcgtacacgctggaagtggatctggaagcaggggagttggtagaaggcggttttcactttccggcaggcaaaaaccatgtgtcgtggcgcgatgaaaacagcgtgtgggtgtgtccggcttggggcgaacgccagttgaccgaatcgggctatccgcgcgaggtgtggctggtggaacgcggcaagagtttcgaggaaagcctgcctgtgtatcaaatcgataaaggtgcaatgatggtgaacgcgtggcgttatctcgatccgcaaggttcgccgattgatttgattgaagcgtcggacggtttttacaccaaaacctatttgcaggtgtcgtcggaaggcgaggcgaaaccgttaaacctgcccaacgattgcgacgtggccggctatctagccggacatcttttgctgacattgcgtaaagactggcaccgcgcgaaccaaagctatccgagcggcgcattggtggcagtaaaattaaaccgaggcgaactcggggcggcgcagcttttgtttgcgcccgatgaaacgcaggcattggaaagcgtggaaacgaccaagcgttttgtggtagcgagcctgctggaaaacgtacaaggccgtctgaaagcgtggcggtttgccgacggcaaatggcaggaagtcgaactaccgcgcctgccttcgggcgcgttggaaatgaccgaccaaccgtggggtggcgacgtggtttaccttgccgccggcgatttcaccacgccgctgacgctgtttgcgctggatttgaacgtgatggaactgaccgtcatgcgccgtcagccgcagcagttcgattcagacggcatcaacgtgcagcagttttggacgacttcagctgacggcgaacgcatcccttatttccacgtcggcaaaaacgccgcgcccgacacgccgacgctggtttatgcctacggcggtttcggcgtacccgagctgccgcattatctgggcagcatcggcaaatactggctggaagagggcaacgccttcgtgttggcgaacatacgcggcggcggcgagttcggcccgcgctggcatcaggcggcgcagggaatcagcaaacacaaaagcgtcgatgatttgcttgccgtcgtgcgcgatttgtccgagcgcggcatcagttcgccccaacacatcggtttgcagggcggcagcaacggcggcctgattaccgccgccgccttcgtgcgcgaaccgcaaagcataggcgcactggtgtgcgaagtgccgctgaccgacatgatccgttatccgctgctctccgccggttcaagctggacagacgaatacggcaatccgcaaaaatacgaagtctgcaaacgccggttgggcgaattgtcgccgtatcacaatctttcagacggcatcgattatccgcccgcgctcatcaccaccagcctcagcgacgaccgcgtccatcccgcccacgcgctcaagttttacgccaaactgcgcgaaacctcgccgcaatcttggctctactcgcctgacggcggcggccataccggcaacggcacgcagcgcgaagccgccgacgaactcgcctgcgtgttgctgtttttgaaagagtttttgggctaa

SEQ ID NO: 59100 - DNA, 444 bp, Neisseria meningitidis; identical to SEQ ID NO: 45126

SEQ ID NO: 59101 - DNA, 1581 bp, Neisseria meningitidis
  misc_feature 1562, 1563, 1564, 1565, 1566: 'n' is a, c, g or t
atgatttacggctcaatgccgtctgaaaagctcacaatttttcagacggcatttgttatgcaagtaaatattcagattccctgtatgctgtacagacgcgggagtgttaagccccccttgtttgaagctccgcggctcctgccgagcttcaccgaccccgttgtgcccaagctctctgctcccggcggctacattgtcgacatccccaaaggcaatctgaaaaccgaaatcgaaaagctggccaaacagcccgaatacgcctacctgaaacagcttcagacggccaagaacgtcgattggaaacaggtgcagctggcctacgacaaatgggactataaacaggaaggcttgaccggagccggtgcagcgattgtggtgattattgtaaccgctctaacttatggatacggagcggctgcagcgggtagcgtaactgccgcaggaagtagtacagccgcagctgcaacaacgacagcggcagcaactaccactgtttctactgcagctgccatgcaaaccgcagctttagcctccttgtatagccaagcagctgtagccatcatcaataataaaggcgatgtaggcaaagcattaaaagatctcggcaccagtgatacggtcaagcagattgttacttccgcactgacggcgggtgcattaaaccagatgggcgcagatattgcccaattgaacagcaaggtaagaaccgaactgttcagcagtacgggcaatcaaaccattgccaaccttggaggcagattggccaccaacctcagcaatgcaggtatctcagctggtatcaataccgccgttaacggcggcagcttgaaagacaacttaggcaatgccgcattgggagcattggttaatagcttccaaggggaagccgccagcaaaatcaaaacaaccttcagcgacgattatgttgccaaacagttcgcccacgctttggcgggttgtgttagcggactggtacagggaaaatgtaaagatggggcaattggcgcagcagttggggaaatcgtagctgaatccatacttggcggcagaaaccctgctacactcagcgatgcagaaaagcataaagttatcagttactcgaagattattgcgggcagcgtggcggcactcaacggcggcgatgtgaatactgcggcgaatgcggctgaggtagctgtggtgaataatgctttgaattttgacagtacccctaccaatgcgaaaaagcatcaaccgcagaagcccgacaaaaccgcactggaaaaaatcatccaaagtattatgcctgcacatgcggcaggtgcgatgactaatccgcaggataaggatgctgccatttggataagcaatatccgtaatggcatcacaggcccgattgtgattaccagctatggggtttatgctgcaggttggacagctccgctgatcggtacagcgggtaaattagctatcagcacctgcatggctaatccttctggttgtactgtcatggtcactcaggctgccgaagcgggcgcgggaatcgccacgggtgcggtaacggtaggcaacgcttgggaagnnnnncacacacttaattaa

SEQ ID NO: 59102 - DNA, 708 bp, Neisseria meningitidis; identical to SEQ ID NO: 42117

SEQ ID NO: 59103 - DNA, 408 bp, Neisseria meningitidis; identical to SEQ ID NO: 43781

SEQ ID NO: 59104 - DNA, 393 bp, Neisseria meningitidis
atgaacggtaaatactactacggcacaggccgccgcaaaagttcagtggctcgtgtattcctgattaaaggtacaggtcaaatcatcgtaaacggccgtcccgttgacgaattcttcgcacgcgaaaccagccgaatggttgttcgccaacccttggttctgactgaaaacgccgaatctttcgacatcaaagtcaatgttgttggcggcggcgaaaccggccagtccggcgcaatccgccacggcattacccgtgccctgatcgacttcgatgccgcgttgaaacccgccttgtctcaagccggtttcgttactcgcgatgcccgcgaagtcgaacgtaaaaaaccgggtctgcgcaaagcacgccgtgcaaaacaattctccaaacgttaa

SEQ ID NO: 59105 - DNA, 333 bp, Neisseria meningitidis
atgcagattttatcttttcaggcggacattgcggaacgtatgctggaaggtacggaaggcgagtcggtcaacgaaaacgcacaattcgtccgtacggacaacggctattggattgcgtggcatgaaggcgtagcggcactgcttgcgcccgatacgccgccgggcattccctgtttttgggtggaaggcgcggaaagccttgaagagttgtgcgccatggtggaacgcggcgagtttgacgaagtggaagagtttgacggcgatgacgacgaatggctcgaaacggcacagggttgcgggcaccacggcgacgcttgcgcctgcggacattaa

SEQ ID NO: 59106 - DNA, 1035 bp, Neisseria meningitidis
atgggtgccggtgcggcgtttgccgccttggtctggctggttttcgcgctcggcgatactttgactccgtttgcggttgcggcggtgctggcgtatgtattggaccctttggtcgaatggttgcagaaaaagggtttgaaccgtgcatccgcttcgatgtctgtgatggtgttttccttgattttgttgttggcattattgttgattatcgtccctatgctggtcgggcagttcaacaatttggcatcgcgcctgccccaattaatcggttttatgcagaacacgctgctgccgtggttgaaaaatacaatcggcggatatgtggaaatcgatcaggcatctattattgcgtggcttcaggcgcatacgggagagttgagcaacgcgcttaaggcgtggtttcccgttttgatgaggcagggcggcaatattgtcagcagtatcggcaacctgctgctgcttcccttgctgctttactatttcctgctggattggcagcggtggtcgtgcggcattgccaaactggttccgaggcgttttgccggtgcttatacgcgcattacaggcaatttgaacgaggtattgggcgaatttttgcgcgggcagcttctggtgatgctgattatgggtttggtttacggtttgggattggtgctggtcgggctggattcggggtttgcaatcggtatggttgccggtattttggtttttgttccctatttgggcgcgtttacaggactgctgctggcaaccgtcgccgccttgctccagttcggttcgtggaacggcatcctatcggtttgggcggtttttgccgtaggacagtttctcgaaagttttttcattacgccgaaaatcgtgggagaccgtatcggcctgtcgccgttttgggttatcttttcgctgatggcgttcgggcagctgatgggctttgtcggaatgttggccggattgcctttggccgccgtaaccttggtcttgcttcgcgagggcgtgcagaaatattttgccggcagtttttaccggggcaggtag

SEQ ID NO: 59107 - DNA, 267 bp, Neisseria meningitidis; identical to SEQ ID NO: 51702

SEQ ID NO: 59108 - DNA, 696 bp, Neisseria meningitidis; identical to SEQ ID NO: 51216

SEQ ID NO: 59109 - DNA, 1209 bp, Neisseria meningitidis; identical to SEQ ID NO: 38616

SEQ ID NO: 59110 - DNA, 198 bp, Neisseria meningitidis; identical to SEQ ID NO: 55598

SEQ ID NO: 59111 - DNA, 543 bp, Neisseria meningitidis; identical to SEQ ID NO: 41579

SEQ ID NO: 59112 - DNA, 474 bp, Neisseria meningitidis; identical to SEQ ID NO: 36318

SEQ ID NO: 59113 - DNA, 669 bp, Neisseria meningitidis; identical to SEQ ID NO: 51814

SEQ ID NO: 59114 - DNA, 1980 bp, Neisseria meningitidis
atgtctcaactggcaaacgcaatccgcttcctctcggccgatgccgttcaaaaagccaattccggccaccccggcgcgcctatgggtatggcggaaatggcggaaacattgtggacgaaattcctcaatcacaatcccgccaaccccaaattctacaaccgcgaccgcttcgtcctctccaacggccacgcgtctatgctgttgtacagcctgctgcacctgaccggctacaacctaagcattgaagacttgaaaaacttccgccaactgcacagcaaaacccccggccatcccgaatacggctacaccgacggcgtggaaaccacgaccggcccgttggggcaagggattgccaacgcggtgggtatggcattggcagaaaaaatccttgccgccgaatttaataaagacggtttgaacatcgtcgatcattacacctacgtcttcatgggcgacggctgcctgatggaaggcgtatcgcacgaagcctgctcactcgccggcactttaggcttgggcaaactgattgttttgtatgacgataacaatatttccattgatggtaaagtggacggctggtttaccgaaaacatcccgcaacgctttgaaagctacggctggcacgtcgttcctaacgtaaacggtcatgacaccgccgccattcaagccgccatcgaagccgcacgtgccgaaaccggcaaaccgtccatcatctgctgcaaaaccttaatcggcaaaggcagtgccaacaaagaaggcagccacaaaacccacggcgcacctttgggcgcggacgaaatcgaagccacgcgcaaacatttgggctggacttaccccgcctttgaaatcccgcaagaaatttacgatgcgtggaatgccaaagaacaaggcgcgaaactggaagccgactggaacgaactgttcgcgcaatatcaagccaaatatcctgccgaagccgcagaatttgtgcgccgtatggataaaaagctgccggacaatttcgatgaatacgttcagacggcattgaaagaagtgtgcgccaaagccgaaaccatcgctacccgcaaagccagccaaaacagcatcgaaatcttggcaaaagagttgcctgaattggtgggcggttcggccgacctgaccccgtccaacctgaccgactggtcaaacagcgtctccgttacccgcgacaaaggcggcaactacatccactacggcgtgcgcgagttcggtatgggtgcgattatgaacggtcttgccctgcacggcggcgtaaaaccctttggcgcgaccttcctgatgtttagcgaatacgaacgcaacgccttgcgcatggcggcactgatgaaaatcaaccctgtatttgtgttcacccacgattccatcggtttgggcgaagacggcccgacccaccagccgattgagcaaaccgccaccctgcgcctgattccgaacatggacgtatggcgtccgtgcgacaccgccgaatctctggtggcttgggcagaagccgtcaaagccgccgatcatccgtcctgcctgattttcagccgtcaaaacctgaaattccaagcgcgcagcgaacaacaactgaacgacatcaaacgcggcggctacatcatcagcgaagcccaaggcaacgcgcaagccgtcatcattgccaccggttccgaagtcgagctggctttggaagcgcaaaaagccctcgccgcgcaaaacatcgccgtacgcgtcgtttccatgccgtccaccaacgtattcgaccgccaagacgccgcctatcaagccaccgtcctgcccgaaggtctgccgcgcgttgccgtagaagccggacacgccgacggctggtacaaatacgtcggtctgaacggcgcagtcgtcggcatcaaccgcttcggcgaatccgcccctgccgacttactcttcaaagcattcggctttaccgtggacaatgtggtcgatacagtgaaatcagtgctgtaa

SEQ ID NO: 59115 - DNA, 648 bp, Neisseria meningitidis; identical to SEQ ID NO: 44828

SEQ ID NO: 59116 - DNA, 189 bp, Neisseria meningitidis
ttgaccctgaaatacactatctttctttcaacaagccaccacagcaatcagacaaaagcaacccaccgccacacccatgtcggcagtacggccggacaaaccaccatccgaagcggcggggataccaccctcaaaggtgcgcagcttatcggcataggcatacaggcagacccccaactacaaccctga

SEQ ID NO: 59117 - DNA, 474 bp, Neisseria meningitidis; identical to SEQ ID NO: 50426

SEQ ID NO: 59118 - DNA, 1554 bp, Neisseria meningitidis; identical to SEQ ID NO: 56777

SEQ ID NO: 59119 - DNA, 1020 bp, Neisseria meningitidis
atgaaaaaaattctcgttaccggcggcaccggttttatcggctcgcataccgttgtttctttgctgaaaagcggccatcaagtcgtgattttggataacctatgcaattccagcatcaatatcctgccacgcttgaaaacgattaccggccaagagattccgttttatcaaggcgatatccgcgatcgtgagattttgcgccgtatttttgcggaaaaccgcattgattcggtgattcattttgccggcttgaaagcggtgggtgaaagtgtggccgagccgatgaaatattatgataataatgtttccggcagcttggtgttggcggaagaaatggcgcgtgccggcgtatttaagattgtgttcagctcatcggctacggtttacggcgatccgggcaaagtgccttatacggaagatatgcaaccgggggatacgaccagcccttacggcacatctaagtctatggtggagcgcattttgacggatatccaaaaggccgatccgcgttggagcgtgattttgttgcgctatttcaaccctatcggtgcgcatgaaagcggtttgatcggcgagcagccaaacggtatcccaaacaatctgctgccttatatctgccaagtggcttcgggcaggctgccgcaactgtcagtattcggcggcgattatccgacccccgacggtacgggaatgcgcgactatattcatgtgatggatttggcagaaggccatgtcgcggctatgcaggcgaaaagcaatgtagcaggcacgcatttgttgaacttaggttccggccgcgcttcttcggtattggaaatcatccgcgcatttgaagcagcttcgggtttgacgattccgtatgaagtcaaaccgcgccgtgccggtgatttggcgtgcttctatgccgacccttcctatgcaaaggcgcaaatcggctggcaaacccagcgtgatttaacccaaatgatggaagactcatggcgctgggtgagtaataatccgaatggctacgacgattaa

SEQ ID NO: 59120 - DNA, 957 bp, Neisseria meningitidis; identical to SEQ ID NO: 36740

SEQ ID NO: 59121 - DNA, 1296 bp, Neisseria meningitidis; identical to SEQ ID NO: 51060

SEQ ID NO: 59122 - DNA, 276 bp, Neisseria meningitidis; identical to SEQ ID NO: 41790

SEQ ID NO: 59123 - DNA, 246 bp, Neisseria meningitidis; identical to SEQ ID NO: 43892

SEQ ID NO: 59124 - DNA, 1287 bp, Neisseria meningitidis; identical to SEQ ID NO: 42118

SEQ ID NO: 59125 - DNA, 360 bp, Neisseria meningitidis; identical to SEQ ID NO: 36598

SEQ ID NO: 59126 - DNA, 1101 bp, Neisseria meningitidis; identical to SEQ ID NO: 43122

SEQ ID NO: 59127 - DNA, 2595 bp, Neisseria meningitidis
atgtccaaatccgccgtttccccaatgatgcagcaatacctcggcatcaaagcgcaacataccgacaaactggtgttttaccgtatgggcgatttttacgagatgtttttcgacgatgcggtagaagcggcaaaacttttggatattaccctgaccacgcgcggacaggtggatggcgagccggtcaaaatggcaggcgtgccgtttcacgccgccgaacaatatctggcgcgcctggtcaagttgggcaaaagcgtggcgatttgcgaacaggtcggcgaagtcggcgcgggcaaagggcctgtggagcgcaaagtcgtgcgcatcgtaacgcccggcacgctgaccgattccgcattgctggaagacaaggaaaccaaccgcatcgttgccgtgtcccccgacaaaaaatacatcggtttggcgtgggcatcgctgcaaagcggcgaattcaaaaccaagctgacaactgtggataaattggacgacgaactggcgcgcctgcaggcggcggaaattctgttgcctgacagtaaaaacgcaccgcaacttcagacggcatcgggtgttacgcgcctgaacgcgtggcagtttgccgccgacgcgggggaaaaactgctgacggaatatttcggctgccaggatttgcgcggcttcggtttggacggcaaagaacacgccgttgcgattggcgcggcaggtgcactgttgaactatatccgtctgacgcaaaacctgatgccgcaacatttggacggcctgtcgctcgaaaccgacagccaatatatcggtatggatgccgccacgcgccgcaatctcgaaatcacgcaaaccctctccggcaaaaaatcgccgaccctgatgtccacgctcgacctttgcgctacccatatgggcagccgcctcttggctctctggctgcaccaccctttacgcaaccgcgcccacatccgagcgcgccaagaagccgttgccgcgctggaaagccaatacaaacccctccaatgccgtctgaaaaacattgcggacattgaacgcattgctgcccgcatcgccgtcggcaacgcccgcccgcgcgatttggcatctttacgcgacagtctgttcgagttggcacaaatcgacttgtccgcaaacggcagcagcctgttggaaaccctcaaagccgttttcccggaaaacctatccacagccgaacagctccgccaagccattttgcccgaaccttccgtctggctgaaagacggcaatgtcatcaaccacggttttcatcccgaactggacgaattgcgccgcattcaaaaccatggcgacgaatttttgctggatttggaagccaaggaacgcgaacgtaccggtttgtccacactcaaagtcgagttcaaccgcgttcacggcttttacattgaattgtccaaaacccaagccgaacaagcacctgccgactaccaacgccggcaaaccctcaaaaacgccgaacgcttcatcacgccggagttgaaagcctttgaagacaaagtgctgactgctcaagagcaagccctcgccttagaaaaacaactctttgacggcgtattgaaaaaccttcagacggcattgccgcagcttcaaaaagctgccaaagccgccgccgcgctggacgtgttgtccacattttcagccttggcaaaagagcggaacttcgtccgccccgagtttgccgactatccggttatccacatcgaaaacggccgccatcccgttgtcgaacagcaggtacgccacttcaccgccaaccacaccgaccttgaccacaaacaccgcctcatgctgctcaccggccccaatatgggcggcaaatccacctacatgcgccaagtcgcgctgattgttttattggcacacaccggctgttttgtgcctgccgatgccgccacaatcgggcccatcgatcaaatcttcacccgcatcggcgcatcggacgacctcgcctccaaccgctccactttcatggtcgaaatgagcgaaaccgcctacatcctgcatcacgccaccgaacaaagccttgttttaatggacgaagtcggacgtggtacttccactttcgacggcctcgccctcgcgcacgccgttgccgaacacctgctgcaaaaaaacaaatccttcagcctgtttgctacccactatttcgagctgacctacctgcccgaagcccacgccgccgccgtcaatatgcacctttccgcgctcgaacagggacaggacatcgttttcctgcaccaaatccaaccgggtcccgccggtaaaagctacggcattgccgtcgccaaactcgccggcctgcctgtacgcgcattgaaatccgcccaaaagcatttgaacggactggaaaaccaagccgccgcgaaccgtccccaactggatattttcagtaccatgccgtctgaaaaaggagatgaaccgaatgtgggcaactttgtggataaatcagaggaaaaacattttgaaggtatattggcagcagccttggaaaaactcgatcccgacagcctaaccccgcgcgaagcattgtcagaactgtaccgtctgaaagatttgtgcaaatccgtatcttaa

SEQ ID NO: 59128 - DNA, 2286 bp, Neisseria meningitidis
atgcaactgctggcagccgaaggcattcaccaacaccaattgaatgttcagaaaagtacccgtttcatcggcatcaaagtgggtaaaagcaattacagcaaaaacgagctgaacgaaaccaaactgcccgtacgcgttatcgcccaaacagccaaaacccgttcaggctgggataccgtgctcgaaggtaccgaattcaaaaccacgctggccggtgccgacattcaggcaggtgtaggcgaaaaagcccgtgccgatgcgaaaattatcctcaaaggcattgtgaaccgtatccagtcggaagaaaaattagaaaccaactcaaccgtatggcagaaacaggccggacgcggcagcactatcgaaacgctaaaactgcccagcttcgaaagccctactccgcccaaattgtccgcacccggcggctatatcgtcgacattccgaaaggcaatctgaaaaccgaaatcgaaaagctgtccaaacagcccgagtatgcctatctgaaacagctccaagtagcgaaaaacatcaactggaatcaggtgcagcttgcttacgacagatgggactacaaacaggagggcttaaccgaagcaggtgcggcgattatcgcactggccgttaccgtggtcacctcaggcgcaggaaccggagccgtattgggattaaacggtgcggccgccgccgcaaccgatgcagcattcgcctctttggccagccaggcttccgtatcgttcatcaacaacaaaggcgatgtcggcaaaaccctgaaagagctgggcagaagcagcacggtgaaaaatctggtggttgccgccgctaccgcaggcgtagccgacaaaatcggcgcttcggcactgaacaatgtcagcgataagcagtggatcaacaacctgaccgtcaacctagccaatgcgggcagtgccgcactgattaataccgctgtcaacggcggcagcctgaaagacaatctggaagcgaatatccttgcggctttggtcaataccgcgcatggagaagcagccagtaaaatcaaacagttggatcagcactacatagtccacaagattgcccatgccatagcgggctgtgcggcagcggcggcgaataagggcaagtgtcaggatggtgcgataggtgcggctgtgggcgagatagtcggggaggctttgacaaacggcaaaaatcctgacactttgacagctaaagaacgcgaacagattttggcatacagcaaactggttgccggtacggtaagcggtgtggtcggcggcgatgtaaatgcggcggcgaatgcggctgaggtagcggtgaaaaataatcagcttagcgacaaagagggtagagaatttgataacgaaatgactgcatgcgccaaacagaataatcctcaactgtgcagaaaaaatactgtaaaaaagtatcaaaatgttgctgataaaagacttgctgcttcgattgcaatatgtacggatatatcccgtagtactgaatgtagaacaatcagaaaacaacatttgatcgatagtagaagccttcattcatcttgggaagcaggtctaattggtaaagatgatgaatggtataaattattcagcaaatcttacacccaagcagatttggctttacagtcttatcatttgaatactgctgctaaatcttggcttcaatcgggcaatacaaagcctttatccgaatggatgtccgaccaaggttatacacttatttcaggagttaatcctagattcattccaataccaagagggtttgtaaaacaaaatacacctattactaatgtcaaatacccggaaggcatcagtttcgatacaaacctaaaaagacatctggcaaatgctgatggttttagtcaaaaacagggcattaaaggagcccataaccgcaccaattttatggcagaactaaattcacgaggaggacgcgtaaaatctgaaacccaaactgatattgaaggcattacccgaattaaatatgagattcctacactagacaggacaggtaaacctgatggtggatttaaggaaatttcaagtataaaaactgtttataatcctaaaaaattttctgatgataaaatacttcaaatggctcaaaatgctgcttcacaaggatattcaaaagcctctaaaattgctcaaaatgaaagaactaaatcaatatcggaaagaaaaaatgtcattcaattctcagaaacctttgacggaatcaaatttagatcatattttgatgtaaatacaggaagaattacaaacattcacccagaataa

SEQ ID NO: 59129 - DNA, 807 bp, Neisseria meningitidis
atgaagaaaacattgacactgctcgccgtttccgccctatttgccacatccgcccacgcccaccgcgtctgggtcgaaaccgcccacacgcacggcggcgaataccttaaagccgacttgggctacggcgaatttcccgaactcgaacccatcgccaaagaccgcctgcacatcttcagcaaaccgatgcagctggttaccgaaaaaggcaaggaaaacatgattcaacgcggcacatacaactaccagtaccgaagcaaccgtcccgttaaggacggcagttacctcgtcatcgccgaatatcagcctactttctggtcaaaaaacaaagcaggctggaaacaggcgggcatcaaagaaatgcctgacgcaagctattgcgaacaaacccgaatgttcggcaaaaacatcgtcaacgtcggacacgaaagcgcggacaccgccatcatcaccaaaccggtcggacaaaacttggaaatcgtcccgctggacaatcccgccaacattcacgtaggcgaacgcttcaaagtccgcgttctgttccgtggcgaaccgctgcccaatgccaccgttactgccacctttgacggcttcgacaccagcgaccgcagcaaaacgcacaaaaccgaagcacaggctttctccgacagcacagacgacaaaggcgaagtggacatcatccccttgcgccaaggcttctggaaagccaatgtcgaacacaaagccgacttccccgatcaaagcgtgtgccaaaaacaggcgaactactcgactttaaccttccaaatcggccattcgcaccattaa

SEQ ID NO: 59130 - DNA, 432 bp, Neisseria meningitidis
atggatatccaaaccatcctcgaaaaaaccctgcccggcctgggctacgaactggtcgatttcgaactgaccgcgcaaggaacattgcgcgtgttcatcgataaagaaggcggcattaccgtcgaagactgcgcaaccgtcagcaaccacttgagccgcgtcttcatggtggaagacatcgactacaaaaacctggaaatttccagccccggactcgatcgccccttgaaaaaagccgccgacttcgtgcgctttgccggtcagaatgccaaaatcaaaacccgcctgccgatagatggtcagaaaaactttatcggtaaaatcgaaggctgcgaaaacgataccgttaccatatccttcgacggcaaaaccgtacaaatcgaattgggcaacatcgacaaagcccgcctgcgccccgaattcaaattctaa

SEQ ID NO: 59131 - DNA, 309 bp, Neisseria meningitidis; identical to SEQ ID NO: 39572

SEQ ID NO: 59132 - DNA, 390 bp, Neisseria meningitidis
atgaaaaacgttcaaaaaggctttacgctgctcgagctgatgattgccgtcgccatcctcggcatcctgacgctcatcacctacccttcctataaaacctacatccggcgcatccgcctgacggaagtcaggacgaccctgctgcacaacgcgcagaccatggaacgttactaccgccaaaaagggacgtttaaaacctacgacaaaaacaaactgaaacaaaacgaatatttcgatatcactttaagcgaagtcagccccgaccattttacccttaaggcaacgcccaatcccaccaccaacgacggcgaaacctgcttcgttacgctcaacgacggcggtaccattgccgcttccggtacaaaccaatcctgccccggcttcgactaa

SEQ ID NO: 59133 - DNA, 225 bp, Neisseria meningitidis; identical to SEQ ID NO: 51807

SEQ ID NO: 59134 - DNA, 144 bp, Neisseria meningitidis
atgatttgggatttgctatattgtgttatgagcgcaatgcagccgacaaaaaagaattcttggattggttatatggaattgtcaggactgtccctgccgaaagttttccaacaaacgccacccgaagaccaaagtgccgtttga

SEQ ID NO: 59135 - DNA, 324 bp, Neisseria meningitidis
atgataattgacgaaaaatccacttcagatgtactgaaacaatatcaagaactagggtttgatttggcaaaaccgacgataatagagttttttatagagggttctcaaaagaatctgcaatcaatagaaagtcaaatcatttcttatcggcaggatgttcaaatcagtattgagcaaaatgaattcggagggatgtggacttgctattgttccgtcaatatcgtcccttcccttgaaaacattttagctattgaaactacgttatttggtattgcacaaaaaaatgattgtaattatgaaggttttggttcgtatgggaactaa

SEQ ID NO: 59136 - DNA, 5469 bp, Neisseria meningitidis
atgaaaaccaaacgttttaaaattaacgccatatccttatccatctttcttgcctatgcccttacgccatactcagaagcagcattggtcagagacgatgtcgattatcaaatattccgtgactttgcagaaaacaaaggcaaattttttgtcggcgcaaccgatttatcagtgaaaaacaaacaaggtcaaaacatcggcaacgcattatccaacgtaccgatgattgattttagcgttgcagatgtcaacaaacgcatagcaacggtagtcgatccccaatatgctgtcagcgtcaaacacgccaaagcagaagtccatactttttattacggtcaatacaacggtcataatgatgtagccgacaaagaaaatgaataccgcgttgtcgaacaaaataactatgaaccacataaagcttggagtgcgagcaacttaggccgtctcgaagattataatatggcgcgttttaacaagtttgtaaccgaagttgcgccgattgcaccaactgatgccggcggcggattggatacctacaaagataaaaaccgtttttcctcttttgtcagagttggcgcaggcaggcaattagtttatgaaaaaggggcttatcatcaagaaggaaatgaaaaaggctacgatttgcgcgatctttcacaagcctatcgttatgccattgcaggtacaccttataaagatattaatattgaccaaacaatgaataccgaaggtttgattggctttggtaatcacaatacacactattcagcagaagaacttaaacaagcactctcgcaagatgcgttaacaaattacggcgtattgggcgatagcggctctccgttatttgcttttgacaaacaaaaaaatcaatgggtctttttgggaacttatgattattgggcaggttacggaaaaaaatcttggcaagaatggaatatctataaaaaagaatttgcagataaaatcaaacaacgcgataacgccggcaccatcaaaggttatggcgaacatcattggaaaaccacgggcacaaacagccatatcggttcgacagcggtaaggcttgccaacaatgaaagggatgcaaacaacggacagaatgttacctttgaaaacaacggcactttggtattggatcaaaacatcaaccaaggcgcgggcggtctgtttttcaaaggcgattacacagtcaaaggtgcaaataatgacatcacttggctaggtgcggggattgatgttgccgacggcaaaaaagtcgtttggcaagtcaaaaatccgaatggcgacagattggcgaaaatcggcaaaggcacattagaaataaacggcacaggcgttaaccaagggcaattaaaagtcggcgacggtacggttattctgaatcaaaaagccgattcaaaccaaaaagtccaggctttctcccaagtcggcattgtcagcggacgcggtacattggtattaaatagttcaaatcagattaatcccgataacctatatttcggtttccgtggcggtcgtttggatgccaatggcaatgacttgacttttgaacacatccgcaacgtggatgaaggcgcgcgcattgtcaaccacaacacagaccgcgcctccacaatcacattaaccggcaaatcattaattaccgctcctcaaaatctttctgtttatgaaatccgaaatgattacgatgatgacgattattatggctattacagctatagaaaacccattccgcaaggcaaagatctttattacaaaaactatcgttattacgccctaaaatccggcggcagcgtgaacgcaccgatgcccgaaaacggacaaacggaaaataacgactggattttaatgggcagcacacaagaagaagccaagaaaaacgcgatgaaccacaaaaacaatcagcgtattagcggttttagcggtttctttggcgaagaaaacggaaaaggacataacggcgcattaaaccttaatttcaacggcaaaagcgcgcaaaaccgtttcttgttaacaggcggcacgaatttaaacggaaaaataagcgtaactcaaggcaatgtcttgttatcaggtcgtccaacaccgcacgcaagagattttgtgaacaaatcttcagcccgaaaagacgcacatttctccaaaaacaatgaagtcgtatttgaagacgactggataaaccgcacattcaaagccgcagaaattacggttaatcaatccgcatcattctcttccggcagaaatgtatccaacattaccgccaacatcaccgcaacagacaacgccaaagtaaatttgggttacaaaaacggcgatgaagtttgcgtgcgctcggactataccggttacgttacctgcaacacagacaacttatccgataaggctttaaacagctttggagcgacacagattaacggcaatgtgaatttgagtcagaatgcggcattggtcttaggcaaggctgcattatgggggcaaattcaagggcaaggaaacagcagcgtcagcctaaaccaacatagcaaatggcatttgaccggcgacagccaagtacacaatctgtcattggcggatagccatattcatttgaacaacgcttccgacgcgcaaagtgcaaataaataccacacgctcaaaatcaatcatttatccggtaacgggcattttcattatctgacgcacctggcgaaaaatcttggggataaggtgcttgtgaaggaatccgcatccggtcattatcagctccatgttcaagataaaacaggcgaacccaatcaggaagggctgaatctctttgatgcatcatccgtacgagaccgctcccgcctttctgtttccttggcgaataaccatgtagatttaggcgcattgcgttatacaatcaaaacagaaaacggtattacccgattgtacaatccttatgccgagaaccgccgccgagtcaaaccggccccgtctcctgccacaaacacggcttctcaagcacaaaaggcaacacaaacggacggtgcacaaattgccaagcctcaaaatatcgtcgtcgcaccgcctagcccgcaggcaaatcaagccgaagaagcaaaacgccaacaagcaaaagcggagcaagtgaagcgtcagcaagcagaagcagagcgtaaatcggcaaagttagcaaaacaaaaagcagaagccgaacgcgaagcaagagagctggcgacccgccaaaaagcagaacaagaacgcagcagcgccgaacttgcacgtcgacatgaaaaagaacgcgaagcggcagagttgtcggcaaaacaaaaagtcgaagccgaacgtgaggctcaagcattggcggtacgccgaaaagcagaagccgaagaggcaaaacgccaagctgcagagcttgcacgccggcatgaaaaagaacgcgaagcggcagagttgtcggcaaaacaaagggtcggggaagaggaacgccgtcaaacagcccaatcccagccgcaacgccgcaaacgccgtgccgcaccgcaggattatatggcagcttcccaagaccgtcctaaacgccgcggacaccgttcggtacagcaaaacaatgtggaaattgcccaagcccaagcagaacttgcgcgccgacagcaggaagaacgcaaagcggcagagttgttggcaaaacaaagggcagaagccgaacgtgaggctcaagcattggctgcgcgccgaaaagcagaagccgaagaggcaaaacgccaagctgccgaacttgcacatcgccaggaagcagaacgcaaagcggcagaattgtcggcaaaccaaaaagccgcagctgaagcccaagcattggcggcacgccaacaaaaagcccttgcgcgtcaacaggaagaagcacgaaaagctgcagagttagccgtcaaacaaaaagcggaaaccgaacgcaaaaccgccgaacttgccaagcaaagggcagcagccgaagcagcaaaacgccagcaagaagctcgccagaccgccgaacttgcacgtcgtcaagaagcggaacgccaagcagcagagttgtcggcaaaacaaaaagccgaaacagatcgagaagcggcagaatcggcgaaacgaaaagctgaggaagaagagcaccgtcaagcagcccaatcccagccgcaacgccgaaaacgccgtgccgcacctcaggattatatggcagcttcccaaaatcgtccgaaacgtcgcggacgcagatctactctgccggcaccgccctcgccatcatttgattcgtcagcttacgcagcacccagggccttgcataatccggactggtatgaaaatgactatgaagaaatccccttggatgcgttggaagatgaagatgtatctgaatcagttgacacatcagacaaacagcctcaagacaatacggaacttcatgaaaaatatgaaaatgattatgaagaaatccccttggatgcgttggaagatgaagatgtatccgaatcggttgacacatcagacaaacagcctcaagacaatacggaacttcatgaaaaagttgagacagtgagtttgcaaccaagagccgctcagccgcgagcccaagccgccgcgcagccgcaagcccaagccgatgcagtcagcaccaataccaactcggctttatctgacgcaatggcaagcacgcaatctatcttgttggatacaggtgcttcattaacacggcacattgcacaaaaatcacgtgctgatgccgaaaaaaacagcgtttggatgtcgaacatcggttatggccgtgattatgcttccgcacaatatcgccggtttagttcgaaacgcacgcaaacacaaatcggcattgaccgcagcttgtccgaaaatatgcagataggcggcgtattgacttactctgacagtcagcatacttttgatcaggcgagcggcaaaaatacttttgtgcaagccaacctttatggtaagtattatttaaatgatgcttggtatgtggccggcgatattggtgcaggcagcttgagaagccggttacaaacgcagcaaaaagcaaactttaaccgaacaagcatccaaaccggccttactttgggcaatacactgaaaatcaatcaattcgagattgtccccagtgcggggatccgttacagccgcctgtcatctgcagattacaagttgggtaacgacagtgttaaagtaagttctatgtcagtgaaaacactgacggccggactggattttgcttatcggtttaaagtcggcaaccttaccgtaaaacccttgttatctgcagcttactttgccaattatggcaaaggcggcgtgaatgtgggcggtaattccttcgtctataaagcagataatcaacagcaatattcagcaggtgccgcgttactgtaccgtaatgttacattaaacgtaaatggcagtattacaaaaggcaaacaattggaaaaacaaaaatccggacaaattaaaatacagattcgtttctaa

SEQ ID NO: 59137 - DNA, 1218 bp, Neisseria meningitidis; identical to SEQ ID NO: 39744

SEQ ID NO: 59138 - DNA, 825 bp, Neisseria meningitidis
atgaaatggctcttcacccttttggcggtactcaatattgccgtattcggcggcacggtgggctataaattggccgttaaagcgacgggcggcgtgccggaaaaccgggccgtcgaaaacacgccccccgcaacgcccgccgccgacaatgcggcggcatccgtggaggatacggcggcactgctcaaaccgggcgacatcctgaccgaagagcaggccgagcagttgcgcttgaaaaaggaagcggaacagaaaaaactgagggagaaaaaacagcgtgaagaaaaagcccgccgcgaaaaactcgccgcagaaaaggcgcaggcggaacgcgaaaacggcgcggcggatgccttatgcgccgcgcaggcaagcctcacgatggacgaagatgactaccaccgcatcaaaggacttttgggcaaatggtcgcacgttgccagcaggagcgtcgaaaaacgcaccgccaaagccaaacctgccgacaaaacctaccgcgtcgtcctgcccgtttccgccgatgccgaaaatcaggcggcggagctgtctgccaaaggtttcaaccccataccgtttgacggcgcattgagtttgggtgtcggcaacagccgggaaaacgcccaagccctgcaaaaccggcttgccggcgccggattcggcggggcgtatattgtcgaacactttgccgaagccgacaggcaggacgattctttgagcgtgtcgcgtatgacggttttgtttaccggcgtgaatgccgccgatgcggacgaaattcgtaaaatcacgtccctatacggcaaactgaacctcaagtcttgcaaatag

SEQ ID NO: 59139 - DNA, 840 bp, Neisseria meningitidis
gtgaaacgaatttttctgtttttggctaccaatatcgctgttttggtcgtaatcaacattgttttggcggttttgggcatcaacagccggggcggcacgggcagcctgttggcgtattccgccgtcgtcggcttcactggttcgattatttcgctgctgatgtccaaatttatcgccaaacaatcggtcggcgcggaagttatcgacacgccgcgcaccgaagaagaagcctggcttttgaacactgtcgaagcccaagcgcggcaatggaacctgaaaacgcccgaagtcgccatctaccactcccccgaacccaatgcctttgccacgggcgcatcgagaaacagctccctgatcgccgtcagcaccggtttgctcgaccatatgacgcgcgacgaagtggaagccgtattggcgcacgaaatggcacacgtcggcaacggcgatatggttacgctgacgctgattcaaggcgtggtcaatactttcgtcgtgttcctgtcgcgcattattgccaacctgattgcccgaaacaacgacggcagccagtcccagggaacttatttcctggtcagcatggtattccaaatcctattcggcttccttgccagcttaattgtcatgtggttcagccgacaacgcgaataccgcgccgatgcgggcgcggcaaaactggtcggcgcgccgaaaatgatttccgccctgcaaaggctcaaaggcaacccggtcgatttgcccgaagaaatgaacgcaatgggcatcgccggagatacgcgcgactccctgctcagcacccacccttcgctggacaaccgtatcgcccgcctcaaatcgctttaa

SEQ ID NO: 59140 - DNA, 1887 bp, Neisseria meningitidis
atgatttaccccaaaacctacgacgttatcgtcgtcggcggcggacacgccggcacggaagccgcgcttgccgccgcacgcatgggcgcgcagacgcttttgctcacacacaatattgaaacgctcggacaaatgtcgtgcaacccctccatcggcggcatcggcaaagggcatttggtacgcgaactcgacgcgctcggtggcgcaatggcgttggcaaccgacaaatcaggtatccaattccgccgcctgaacgccagcaaaggcgcggcagtgcgagccacgcgcgcacaggccgaccgcattttgtataaagccgccatccgcgaaatgttggaaaaccaagaaaacctcgaccttttccaacaagccgtcgaagacgtaacgctcgacggcgaacgcatcagcggcgtaattaccgcgatgggcgtggagtttaaagcacgcgccgtcgtgttgaccgcaggcacgtttttgtccggcaaaatccacatcggtttggaacactacgaaggcggacgcgccggcgaccccgccgccaaatcgctgggcggacgtttgcgcgaattgaagctgccgcaaggccgtctgaaaaccggcacgccgccgcgcatcgacggacgcacgattgacttctcccaactgaccgaacagcccggcgacacgcccgttcccgtcatgtccgtacgcggcaacgccgaaatgcacccgcgccaagtgtcctgctggattacgcataccaacacgcaaacccacgacatcatccgctcaggcttcgaccgcagcccgatgtttaccggcaaaatcgaaggcgtgggcccgcgttattgtccgtctatcgaagacaaaatcaaccgcttcgccgacaaagacagccaccagattttcctcgaacccgaaggcctgaccacgcacgaatactaccccaacggtatctccaccagcctgccgttcgacatccaaatcgcgctcgtccgcagtatgaaaggtttggaaaacgcccatatcctgcgccccggctacgccatcgaatacgactacttcgatccgcgcaacctcaaagcaagcctcgaaaccaaaaccattgccggattgtttttcgccgggcaaatcaacggtacgacaggttatgaagaagccgccgcgcaaggactgctggcaggcgcgaacgccgtgcaatacgtccgcgaacaagacccgctcctgctgcgccgcgaacaagcctatctcggcgtattggtggacgacctcatcaccaaaggcgtgaacgaaccctaccgaatgttcaccagccgtgccgaataccgcctgcaactcagggaagacaacgccgacatgcgcctgaccgaagacggctacaaaatcggcttggtgtccgaagcgcaatggcgcatgttcaacgaaaaacgcgaagccgtcgaacgcgaaatccaacgtttgaaaacaacgtggtacacgccgcaaaaactcgccgaaggcgaacaaatccgtgtgttcggacaaaaactcagccgcgaagccaacctgcacgacctcctgcgccgcccaaacctcgactacgccgcgctgatgacgctcgaaggcgcgatgccgtctgaaaacctctccgccgaagtcatcgaacaagtcgaaatccaagtcaaataccaaggctatatcgaccgccaaaacgaagaaatcgacagccgccgcgacatcgaaaccttaaaactgcccgacggcatcgattacggcaaagtcaaaggcttgtcggcagaagtgcagcaaaagctcaaccagcacaaacccgaaaccgtcggacaagccagccgcatttccggcgtaacccctgcggcagtggcattgctgatggtgcatttgaagcgcgggtttaaagacgcgaaataa

SEQ ID NO: 59141 - DNA, 843 bp, Neisseria meningitidis
atgcaaaaccacgttatcagcctaagcaccgccgcagaacgcagggcgcacattgccgcaaccttcggcgcgcgcggcatcccgtttcagtttttcgacgcgctgatgccgtctgaaaggctggagcaggcgatggcggaactcgtccccggattgtcggcgcacccctatttgagcggagtggaaaaagcctgctttatgagccacgccgtattgtggaaacaggcattggatgaaggtctgccctatgttgccgtatttgaggatgatgtcctgcttggcaaagacgcagaaaagttccttgccgaagatacttggttggaagagcgttttgataaggattctgcctttatcgttcgtttggaaacgatgtttgcgaaagttattgtcagaccggataaagtcctgaattatgagaaccggtcatttcctttgctggagagcgaacattgggggacggctggctatatcatttcgcgtgaggcgatgcggtttttcttggaaaggtttgccgttttgccggcagagtggattaaagcggtagattggatgatgtttacttatttctttgataaggaggggatgcctgtttatcaggttaatcccgccttatgtacccaagaattgcattatgccaagttcctcagtaaaaacagtatgttgggtagcgatttggaaaaagatagggaacaagaaagaagacaccgccgttcgttgaaggtgatgtttgacttgaagcgtgctttgggtaaattcggtagggaaaagaagaaaagaatggagcgtcaaaggcaggcggagcttgagaaagcttacggcaggcgggtcatatcgttcaaatag

SEQ ID NO: 59142 - DNA, 300 bp, Neisseria meningitidis; identical to SEQ ID NO: 52011

SEQ ID NO: 59143 - DNA, 1437 bp, Neisseria meningitidis
atgccgctgctgtctgtcgagttcgcactgttctttctcgccttcctgccgatttactggggcttggcgaaatacccgtccgtccaaaacctgctgcttttggctgccggtatgggctggctctaccatatcggccccgtatttgcggcaatcgtcgtcctttattcctcctgcgtgtaccttttgggcgaactgctccgttccgatcgcgaaaatacgcgccgcttttggctggggtgcggcattgccgtctcgctgaccgtcttgggctttttcaaatatttcgactttttccgcccgctgattgcacaatatgccggacaaggcggcgcaatcgacatcctgatgccgctggggctttcgtattacaccttccagtcgctcgcctatctggtttactgcttccgcgccccgcacgccgcgcgtttcgagtggcacgagctgctgctgcacctgagttttttccccaccgttacctccggcccgattatccgcgccgccgcattcaaaagcgcagacggcgagcaggcgggcgcattggcgcaaatccgtacccgccaaccgcgctcacccgtccgccccgcactcgccgtttccctgattctgctgggtattgccaaaaaatggtggctggcggggatgctggcggaaaactgggtgtcgcccgtatttgaaaatcccgcccaattcgacggctggggcgtattgggcggcgtgtacggctataccttccaactctttttagacttttccggatattccgatttggttatcggcatggcgatgctgctgggtttccggctgcccaaaaacttctccgcaccgcttcgtgctttaaacatccgcgcattttgggacaaatggcacatcagcctttccacctggatacgcgactacatctacatccccttgggcggcagcaaaaaaggctttttacggacacagctcaacctgatggcggcaatggtactctcaggcatctggcacggctacggctggaacttcctcatttggggcgcgctgcacggcacggcactggtgctgctcaacacgggcgatcgctatttcggacgcaacgcgctatgccgtctgaaataccttgcgccgctctcgtggtttgttaccttccatttcgtctgccttagctttgttgtcttcaataccgcaagccccgacgatgcaggcgcagttttcaatgccctctttgccaatgccaacggctggaatgcgccgcaacaggcaaacatgctgctgcttgcctcgtttgcatccgtgatgctgctctacccttacctgcaacgcgctttcgacggcgcggtcaaaggtttggaaaaaatcccgatgtggctgtggtttatccccgtttccgccgtcctgctgctgattatcgtcctcgccccctcggggatacccggctttatttatgccaatttttaa

SEQ ID NO: 59144 - DNA, 924 bp, Neisseria meningitidis; identical to SEQ ID NO: 42309

SEQ ID NO: 59145 - DNA, 441 bp, Neisseria meningitidis; identical to SEQ ID NO: 42705

SEQ ID NO: 59146 - DNA, 636 bp, Neisseria meningitidis; identical to SEQ ID NO: 42737

SEQ ID NO: 59147 - DNA, 1194 bp, Neisseria meningitidis
atgaatcccaaacacctcatcgcattttccgccctgttcgccgccacgcaggcaaacgctctgcccgtcgcctccgtcagcctcgacaccgttaccgtttccccgtccgccccctacaccgatacaaacgggctcttgaccgactacggcaacgccgccgcctcgccttggatgaaaaaactccgatccgtcgcacaaggcagcggcgagaccttccgcatcctgcaaatcggcgactcgcacaccgccggcgacttctttaccgacagcctccgcaaacgcctgcaaaaaacatggggcgacggcggcataggctgggtctaccccgccaacgtcaaagggcagcgcatggcggcagtccggcacaacggcaactggcaaagcctcaccagccgaagtgcagcagcagacttcccgctcggtggcatcctcgcccacaccggcagcggcggcagcatgaccctgaccgcatcggacggcaagaccggcaaacagcgcatttccctgtttgccaaacccctgctcgccgaacaaaccctgaccgtcaacggcaacaccgtctccgccaacggcggcggctggcaggtactggatacgggcgcggcactgcccctgaccatacagaccgaaatgccgtgggacatcggcttcatcaacatcgaaaatcccgccggcggcattaccgtttccgcgatgggcatcaacggcgcacaattaacccagtggtcgaaatggcgtgccgaccggatgaacgaccttgcccaaaccggcgccgatttggttatcctttcctacggcaccaacgaagccttcggcgacaacatcgacattgccgacactgaacaaaaatggctggataccgtccgccaaatccacgacagcctgcctgccgccggcatcctcatcatcggcgcacccgaatccctgaaaaacacgctcggcgtatgcggcacacgtcccgtccgcctgaccgaagtccaacagatgcagcggcgcgtcgcccggcagggacaaaccatgttctggtcttggcaaaacgccatgggcggcatatgcagcatgaaaaactggctcaaccaaggatgggccgccaaagacggcgtacacttctccgccaaaggctaccggcgcgcggcggaaatgctcgccgacagcctcgaagaactcgtccgcgccgccgcaatcaggcaataa

SEQ ID NO: 59148 - DNA, 1119 bp, Neisseria meningitidis; identical to SEQ ID NO: 39438

SEQ ID NO: 59149 - DNA, 1410 bp, Neisseria meningitidis; identical to SEQ ID NO: 50733

SEQ ID NO: 59150 - DNA, 1014 bp, Neisseria meningitidis
ttgcaacctttagtcagcgtattgatttgcgcctacaacgcagaaaaatatttcgcccaatcattagccgccgtcgtgaatcaaacttggcgcaacctggagattttgattgtcgatgacggctcgacagacggcacgcccgccattgcccggcgtttccaagaacaggacggcaggatcaggataatttccaatccccgcaatttgggctttatcgcctctttaaacatcgggctggacgcattggcaaagtcgggaatgggggaatatattgtgcgcaccgatgccgacgatattgccgcccccgactggattgaaaaaatcgtgggcgagatggaaaaagacgcggatattgtcgcaatgggttcctatttggagattttggcggaagaaaacaataaaagcgtgcttgccgccattgcccgaaacggcgaaatttggaagaaccccctgacccatcaggaaattacgtctgcctttcccctccgcaatcccatacacaacaacacgatgattatgcggcgcagcgtcattgacggcggtttgcggttcgaccccgcctatattcacgccgaagactataaattttggtacgaagtcggcaaattgggcaggctggcgaattatcccgaagccttggtcaaataccggttccatcaagaccagacttcctccaagcacaacctgcaacagcgtcagacggcgtggaaaatcaaagaagaaatcagggcggggtattggaaggcggcaggcataaccgtcgggtcggactgcccgaattacaggcttttgaaatcaacggcatatgccttgcacgaaaaagccttgtccggacaagatatcggatacctccgcctgttcctgtacgaaaatttcttgtcgttggaaaagtattctttgaccgatttactggattttttgacagaccgcgtgatgaggaagctgtttgccgcaccgcaatataggaaaatcctgaaaaaaatgttacgcccttggaaataccgcagctattga

SEQ ID NO: 59151 - DNA, 456 bp, Neisseria meningitidis; identical to SEQ ID NO: 42518

SEQ ID NO: 59152 - DNA, 2607 bp, Neisseria meningitidis
atggctgccaaccaacgttaccgcaaaccgctgcccggtacggatttggaatactacgacgcgcgtgcggcgtgtgaggacatcaagcccggctcttacgacaagctgccttacacgagccgcattttggcggagaatttggtcaaccgcgcggacaaagtcgatttgccgacgctgcaaagctggctgggtcagctgattgagggaaaacaggaaatcgactttccttggtatccggcgcgggtggtgtgccacgatattctggggcagaccgcgttggtggatttggcaggtctgcgcgatgcgattgccgaaaaaggcggcgatcctgccaaagtgaatccggtggtgcaaacccagctcatcgtcgaccactctctggccgttgaatgcggcggctacgaccccgatgccttccgcaaaaaccgccaaatcgaagacagacgtaacgaagaccgtttccacttcatcaactggacaaaaaccgcatttgaaaatgtggacgtgattccggcgggcaacggcatcatgcaccaaatcaatctagaaaaaatgtcgcccgtcgtccaagtcaaaaacggcgtggcgttccccgatacctgcgtcggtactgactcacatacgccgcacgtcgattcattgggcgtgatttccgtgggcgtgggcggattggaagcggaaaccgtaatgctgggacgcgcgtccatgatgcgcctgcccgatattgtcggcgttgagctgaccggcaaacgccggccgggcattactgccaccgacatcgtgttggcactgactgagttcttgcgcaaagaacgcgtggtcggggcatttgtcgaattcttcggcgaaggtgcgagaagcctgtccatcggcgaccgcgcaactatttccaatatgacccctgaattcggcgcgactgccgcgatgttcgctattgatgagcaaaccattgattatttgaaactgaccggacgcgacgacgcgcaggtgaaattggtggaaacctacgccaaaaccgcaggcttatgggcagatgccttgaaaaccgccgtttatccgcgcgttttgaaatttgatttgagcagcgtaacgcgcaatatggcaggcccaagtaacccgcatgcccgttttgcgaccgccgatttggcggcgaaagggctggcgaagccttacgaagagccttcagacggccaaatgcctgacggtgcagtgattattgccgcgattacttcgtgtaccaatacttccaatccgcgcaacgttgtcgccgctgcgctgttggcacgcaatgccaaccgcctcggcttgcaacgcaaaccttgggtgaaatcttcgtttgccccgggttcaaaagtagccgaaatctatttgaaagaagcaggcctgctgcctgaaatggaaaaactcggcttcggtatcgttgccttcgcatgtaccacctgtaacggcatgagcggcgcgctcgacccgaaaatccagaaagaaatcatcgaccgcgatttgtacgccaccgccgtactgtcaggcaaccgcaacttcgacggccgtattcatccgtatgcgaaacaggctttcctcgcttcgcccccgttggtcgttgcttacgcgctggcaggcagcatccgtttcgatattgaaaacgatgtactcggcgttgcagacggccgcgaaatccgcctgaaagacatctggccgaccgacgaagaaatcgatgccgtcgttgctgaatatgtgaaaccgcagcagttccgcgatgtgtatgtaccgatgttcgacaccggcaaagcgcaaaaagccccaagcccgctatacgactggcgtccgatgtccacctacatccgccgcccgccttactgggaaggcgcgctggcaggggaacgcacattaagaggtatgcgtccgctggcgattttgcccgacaacatcaccaccgaccacctctcgccgtccaatgcgattttggccgtcagtgccgcaggcgagtatttggcgaaaatgggtttgcctgaagaagacttcaactcttacgcaacccaccgcggcgaccacttgaccgcccaacgcgctaccttcgccaatccgaaactgtttaacgaaatggtgaaaaacgaagacggcagcgtgcgccaaggctcgttcgcccgcgtcgaacccgaaggcgaaaccatgcgcatgtgggaagccatcgaaacctatatgaaccgcaaacagccgctcatcatcattgccggtgcggactatggtcaaggctcaagccgcgactgggcggcgaagggcgtgcggctcgcgggagtggaagccatcgccgccgaaggtttcgagcgcatccaccgcaccaatctcatcggcatgggcgtcttgccgctgcaattcaaacccggcaccaaccgccacaccctgcaactggacggcacggaaacctacgacgttatcggcgaacgtacaccgcgctgcgacctgaccctcgtgattcaccgtaaaaacggagaaaccgtcgaagttcccgttacctgccgcctcgatactgcagaagaagtattggtatatgaagccggcggcgtgttgcaacggtttgcacaggattttttggaagggaacgcggcttag

SEQ ID NO: 59153 - DNA, 1647 bp, Neisseria meningitidis; identical to SEQ ID NO: 50819

SEQ ID NO: 59154 - DNA, 558 bp, Neisseria meningitidis
atgaacatcattgataccgccattcctgacgtaaaactgcttgagccccaagtcttcggcgacgcgcgcggcttttttatggaaaccttccgcgacgagtggtttaaaacccaagtctgcgaacgcaccttcgtgcaggaaaaccactccaaatccggcaaaggcgtattgcgcggcctgcactaccaaaccgaaaacacacaaggcaaactcgtacgcgtagttgtcggcgaagtgttcgacgtggccgtcgatatgcgtaaagactcccccactttcggcaaatgggtaggcgagattctgtccgcagaaaacaaacgccaactgtgggtacccgaaggtttcgcacacggcttctatgtactgagcgatgaagccgagttcgtctataaatgcacggactattacaagcctgaagccgaacaggttttaatatggaacgacccgacagtcggcataggctggccgcttcaaaccgcgccgctgctgtcgcccaaagaccttgccggcaaaacgtgggcgcaagccgaaaagctccgccttccgctttaccgataa

SEQ ID NO: 59155 - DNA, 2259 bp, Neisseria meningitidis
atgtacacaagaatcatggaaatcagcccttggacgctgcgttcggcaaaactggaaaaagaacacaaacggctgcaagagagcctgaccagcttgggcaacggctatatgggtatgcgcggcagctttgaggaaacctattccgccgacagccacttaggcacctacatcgccggcgtgtggttccccgacaaaacccgcgtcggctggtggaaaaacggctatcccaaatatttcggcaaagccatcaacgcgttcaatttcagcaaagtcaaaatctttgtcgacgggcaggaagtggacttggcgaaaaacgacgttgccggcttctccgtcgaactcgatatgcggcacggcgtgttgcgccgctcgtttaccgtattcggtgtgcgtttcaatgtgtgcaaattcctgtccgtcgcgcaaaaagagctggcggtcatccgctgggaagccgtatccgttgacggtaaaacccaccaagtccgcatcgattccatcatcgatgccgacgtgaaaaacgaagactccaactacgaagaaaaattctggcaggtattggacaaaggcgtttcagacagtctctcctacattgccgcccaaaccgttgccaaccctttcggcgtggaacaatttatcgtcaacgccgagcaaactttcgccggcagcttcaaagccctcggcggcagccaaaccgactggcaagtctccaattctttcgaggtcgaagtcggcggcacgcccaaaacctttgaaaaacgggttattgttaccaccagccgcgattatcagggcttggaagcagtgaaagccgcaggccgcgccttgtcggaaaaagtcgcaggcgttgcgtttgaaaccttgctggacgcgcacaaagcaggctggctgcaccgttgggaaatcgccgacgtggtcatcgaaggcagcgacgaagcgcagcaaggcatccgtttcaatctgttccaactgttctccacctactacggcgaagatgcgcgcctgaacatcggccccaaaggctttaccggcgaaaaatacggcggcgcgacctattgggataccgaagcctatgccgtaccgctctacctcgcactggcggaacccgaagttacccgcaacctgctgcaataccgccgcaaccaactgccgcaggcgcagcacaacgcgcgcgaacagggcttggcgggcgcactctatccgatggtaacgtttacgggtatcgagtgccacaacgaatgggaaatcaccttcgaggaaatccaccgcaacggcgcgattccttacgccatctacaactacaccaactacaccggcgacgagggctatcttgccaaagaaggcttggaagtcttggtcgaagtgtcccgcttctgggcggaccgcgtccacttctccaaacgcaacggcaaatacatgattcacggcgtaaccggcccgaacgaatacgaaaacaacatcaacaacaactggtacaccaacaccctcgccgcctgggtattggactacacccgcgaagccctggcgaaatacccgcgcccggatttgaacgtgcgtgccgccgagttggaaaaatgggcggacatcagcgcgaatatgtaccgtccgcatgacgaagaactcggcgtattcgtccaacacgacggcttcctcgacaaagacatccgtcccgtgtccgcgctttcgcccgacgatttgccgctcaaccagaaatggtcgtgggacaaaatcctgcgttcgcccttcatcaagcaggcggacgtgttgcaaggcatctacttcttcggcgaccgtttcaatatcgacgaaaaacgccgcaacttcgatttctacgaaccgatgaccgtgcatgaaagctcgctgtcgccctgtatccactctattctcgccgccgaactgggcaaagaagaaaaagccgtggaaatgtaccggcgcaccgcccgcctggacttggacaactacaacaacgacaccgaagacggcctgcacattacttctatgaccggctcgtggctcgccatcgtccaaggtttcgcccaaatgaaaacttggggcggcacactcagcttcgcaccgttcctgccgggcgcatggacaggctacgccttccatatcaactaccgaggccgtctgattaaagtcgccgtcggcaaagaaaacgtcgtcttcaccctgctcaaaggcgaaccgcttgatttgcaggtgtacggcaaagacatcacgctcaacggcagccacaccgttgcgttggaaaaataa

SEQ ID NO: 59156 - DNA, 3090 bp, Neisseria meningitidis
atgaatcaaaatcatttttcacttaaaattctgaccgttatgctgttatcggcttacggtggttcttttgcagacggtgttgtgcctgtttcagacggcaataccgtcagtctggatacggtcaatgtacgcggctctcatgctttgtcgggtaagaccgagaagacccgttcttatacgatagatcggatgtccaccgccacaggtatgaggattgcgggcaaggatacgccgcagtcggtcagcgtcatcacgcgcagccgccttgacgataaggcggtgcatacgcttgaagaggcaatgaaaaacacgacgggtgtcaacgttgtgcgcgattcaggcttgcagacgcggtttttgtcacgcggtttctatattgatcagattggtgaagacggtattaccgtcaatgttgcaggccgttcgggatatacggcgaaaatcgacgtgtctccgagtaccgatttggcagtttatgaccatattgaagttgtacggggtgcaacggggttgacccaatccaattcagagccgggcggaaccgtcaatttgatccgtaagcgacctaccgcttctttcaaacataccggagagctgaccgccgaccatcgcggcagccggcgtgcagtgttggatgtttcaggcagcctgaataaggcgaataccttacgcggaaggttggtgggtgcggaagagtataaaaaatcgtttaaagaccgcgtttggggcaggaaacatatggtttacggcattgccgaagccgatgcgggcgacagcagtgtgcttactttgggtggtatgtatcagaagagtagggaggtccctgatttttcgggcattattttgccctgtgagaatcagaaaactgcctcgttcagttcaacgcctgcctgcaaccgacctttgcaactgccgcgcaacacttatttgggggaggattggtcgcggttgcgtgccgacaaatacaaccttttctcaggtttcaaacatgtgtttgacaacggttggcagctcaatgccgaagtgtcttataccaagaatgaatccgatgcgaaggtggggcagttttttctgaaaaacgaacatgcggcaggtttgtcgggtgaggatgcggtaggctttttgaccgaaagaaacgaagtcattccgttcgagccgaaagataaggcattggagaaactgaaagcatatcgtgacgaaaccgccaaggaataccgggagcgcaaagacgattttgttaaaaaccgtttcgataatactgctttcgaacagtatcgcagccgccgtgccgcagaacgcaaagccggttttgacaagtgtatgagtgcccctttcgcgctggactttatctgtcaaggttcttggggggatccgggcgttgatgccgacaaggcggaatttgtcgataaagcccttgcgaaggagggcatctttaataatgcggcacaacgttttccaaacagcctgtatgactcttcctttaatcggaaggctaccgccaaccgacgatacagttatatgccgttgcggcataccaaagacgaccgccaatggggaatcaaacttgacctgaccggcacatacgggctgttcgggcgggaacacgatttctttgtcggctatgcctacggtgatgaaaagatacgttccgaatatctggaaatctacgaacgccgccacagagtacgtccgaatacgggggcaacgcacggcgtgtatgcgggaagttgtcaggaggagccggacggcgatttgtcgtctcctttggtcagggggcataaagaacccgattggcaggcgtacgatgaaaaaggcaaccgtaccgtttatgccgaagaatgcaggaatgccaagaaaataaaaaccgagcccaagctcgatgcagaaggcaagcaggtgtattactatgacgaatacagcggcagtcggacgccggtatatgtcgatgtatatgaactggacgaaaaaggcaataagattcaggagaccaatcccgacggcacgcctgcctttaccggtttttccggtacggtgccggtttggaaaaccgtcaaagtggccgacgaccatgttcctgcgctgtataactacgccaaatacctcaacaccaacaaaacccattcgctgactgccagcacgcgtttcaacgtaaccggccgactgcatcttttgggcgggctgcactacacgcgctatgagacttcgcaaaccaaagatatgcctgtccgctatgggcagccggcaagcgattttcagacggcatcgagcattaaggcggatcaggaccattacacggccaagatgcaaggtcataaattgacgccctatgcaggcattacctatgatttgacaccgcaacagagtatttacggaagttataccaaaatcttcaaacagcaggataatgtcgatgtcagtgccaaaaccgttttaccgcctttggtcggcacaaactatgaggtaggctggaaaggcgcgttcttgcaaggacggctgaatgcttcgttcgcattgttttatctcgaacagaaaaaccgcacggtcgtcgattttggctatgttcccggagcaggcggcaagcaggggtcgttccaaaccgttgccaaaccgataggcaaagtggtcagcaggggtgcggaattcgagttgtcgggtgagttgaacgaagattggaaagtctttgcgggttacacctacaacaagagcaggtataggaatgcagccgaagtcaacgccgaacgccttgccaaaaattccagtgcagacccgtacaacttcagcaatttcacacccgtgcacatattccgtttcggaacgagcttccatataccgaatacggggctgaccgtcggcggcggcgtgtccgcacaaagcggcacaagcagcctgtacaacatccgtcagggcggctacgggctgatagacggtttcgtccgttacgaattgggcaaacacgccaaattgagcctcatcggtacgaacttaaacggacgcacttattttgagaacaactacaaccgtacgcgcggcgcaaacaacttctatggagagccgcgcactgtcagcatgaaactggattggcagttttaa

SEQ ID NO: 59157 - DNA, 279 bp, Neisseria meningitidis; identical to SEQ ID NO: 36210

SEQ ID NO: 59158 - DNA, 693 bp, Neisseria meningitidis
gtgcaggcggatttagcttatgccgccgaacgcattacccacgattatccgaaaccaaccggtgcaaacaacacaagcacagtaagcgattatttcagaaacatccgtgcgcattccatccacccccgggtgtcggtcggctacgacttcggcggctggagaatagcggcagattatgccagttacagaaaatggaacaacaataaatattccgtaaacacaaaagaggtgcaaagaaacaataacgctggcaactggcaagaactgaagacggaaaatcaggaaaacggcagcttccacgccgtctcttctctcggcttatccgccatttacgatttcaaactcaacgataaattcgataaattcaaaccctatatcggtgcgcgcgtcgcctacggacacgttaaacatcaggttcattcggtgagaaaagaaaccacgactactttcagtaaagcaggggcaggtgctacagagccaggcaaaattatatcaggtccgatctccaaacctgcctatcacgaaagccacagtatcagcagcttgggtcttggtgtcatcgccggtgtcggtttcgacatcacgcccaagctgaccttggacaccggataccgttaccacaactggggacgcttggaaaacacccgcttcaaaacccacgaagtctcattgggcgtgcgctaccgcttctga

SEQ ID NO: 59159 - DNA, 1470 bp, Neisseria meningitidis; identical to SEQ ID NO: 43805

SEQ ID NO: 59160 - DNA, 813 bp, Neisseria meningitidis; identical to SEQ ID NO: 52526

SEQ ID NO: 59161 - DNA, 387 bp, Neisseria meningitidis; identical to SEQ ID NO: 50648

SEQ ID NO: 59162 - DNA, 624 bp, Neisseria meningitidis
atggaacgcaaagaacgcctgcgtgcaggcattgccgcgatggggctggatatttcggaaatggcgcaggacaggcttttggtctatgtggatttgttgaaaaagtggaacaaaacctacaatctgaccgccctgcgcgacgaggaaaaaatgattgtccatcatcttttggacagcctgacgctgctgccccatatcgagggtgtgcaaacgatgctggatgtcggttcgggcggcggtcagcccggcattccggcggcggtgtgccgtccggatgtgcaaataacccttttggatgcgaatacgaagaaaacggcttttttacagcaggcggttatcgagttggggttggacaatgtgcgcgtggtatccggacgcgtggaggcggtttcggacgtgcgtgccgatgtggttaccagccgtgcgtttgcagaactggcggattttgtgtcgtggacggtgcatctgttgaaagacggcggctactgggcggcgatgaagggcgtgtatccgcaggaagaaatcggccgcctgccgcaggatgtgtgcgttgaaaaagtccaaaggctcgacgtgccgggcttggatgcggaacgccatatcgtcatcctgagcaagcgttga

SEQ ID NO: 59163 - DNA, 2397 bp, Neisseria meningitidis
atgattaaaaagattttaacgacttgttttggtttggtttttgggttttgtgtatttggagtgggtttggttgccattgctattttggtaacgtatccgaaactgccgtctttggattctttgcagcattaccagcctaaaatgccgttgactatttattcggcggatggggaagtcatcggtatgtatggggagcagcggcgcgaatttacaaaaatcggcgatttcccagaggtgttgcggaatgcggttatcgccgccgaggataaacgcttttaccggcattggggggtggatgtttggggtgttgcccgcgctgccgtcggcaatgtcgtgtccggcagcgtgcagtcgggtgcgagtacgattacgcagcaggtggcgaaaaatttttatttgagcagtgaaaaaacgttcacacgcaaattcaatgaggtgttgcttgcctataaaatcgagcagtctttaagcaaagacaaaatcctcgagttgtatttcaatcagatttacctcggtcagcgcgcctatggttttgcatctgccgcgcaaatctatttcaataagaatgtccgagatttgactttggcggaagccgccatgcttgcgggactgcccaaggctccgtctgcctataatccgattgttaatccggaacgtgccaagttgcgccagaagtatattttgaacaatatgctcgaggagaagatgattaccgtgcaacagcgcgatcaggcgttgaatgaggaactgcattacgagcggtttgttcggaaaatcgatcagagtgctttatatgtggcggaaatggtgcgtcaggaactgtatgagaaatacggtgaagatgcctatacgcagggttttaaggtttataccacggtccgcgccgatcatcagaaggtggcaaccgaggcattgcgcaaggctctacggaatttcgatcgcggcagcagctaccgcggtgcggaaaactatatcgatttgagtaagagtgaagatgtcgaggagactgtcagccagtatctgtcgggactctataccgtcgataaaatggttcccgccgttgtgttggatgtgactaaaaagaaaaatgtcgtcatacagctgcccggcggcaggcgggttacgcttgacaggcgcgccttgggttttgcggcccgcgcggtcaataatgaaaaaatgggggaggaccgtatccgcaggggcgcggtcatccgtgtcaaaaacaacggcgggcgttgggcggtggttcaagagccgttgctgcagggggctttggtttcgctggatgcaaaaaccggagctgtgcgcgcgctggtcggcggttatgattttcacagcaaaacattcaatcgtgccgttcaggcaatgcggcagccgggttcgacctttaagccgtttgtctattcggcggcattatctaaggggatgaccgcgtccacggtggttaacgatgcgccgatttccctgccggggaaagggccgaacggttcggtttggacacctaaaaattcagacggcagatattccggctacattactttgagacaggctctgacggcttccaagaatatggtttccatccgtattttgatgtctatcggtgtcggttacgcgcaacagtatatccggcgtttcggcttcaggtcgtccgagctgccggcaagcctgtctatggctttaggtacgggcgagacaacgccgttgaaagtggcggaggcatatagcgtatttgcgaacggcggatatagggtttcttcgcacgtaatcgataagatttatgacagagacggcaggttgcgcgcccaaatgcaacctttggtggccgggcaaaatgcgcctcaggcaatcgatccgcgcaatgcctatattatgtataagattatgcaggatgtggtccgtgtcggtacggcaaggggggcagctgcgttgggaagaacggatattgccggtaaaacgggtacgaccaatgacaataaggatgcgtggtttgtcggttttaaccctgatgtggttactgccgtatatatcggcttcgacaaacctaagagtatggggcgtgtcggctacggcggtacgattgcggtgccggtttgggtggactatatgcgttttgcgttgaaaggaaagcagggcaaggggatgaaaatgcctgaaggtgtggtcagcagcaatggcgaatactatatgaaggaacgtatggtaaccgatccgggcttgacgctggacaacagcggtattgcgccgcaaccttcccgacgggcaaaagaagatgacgggggcgcggcagaaggcggacggcaggcggcggatgacgaagtccgccaagatatgcaggaaacgccggtgcttccgagtaatactggttccaaacagcagcagttggattctctgttttaa

SEQ ID NO: 59164 - DNA, 1497 bp, Neisseria meningitidis; identical to SEQ ID NO: 51695

SEQ ID NO: 59165 - DNA, 786 bp, Neisseria meningitidis; identical to SEQ ID NO: 51283

SEQ ID NO: 59166 - DNA, 864 bp, Neisseria meningitidis
atgagtgagattggtttggtaaagatctattttggaaaagtgcgcgatttatatgaaatcgacgataaacgtatgctgatggtcgcttccgaccgcctgtctgcattcgatgtgattttggacgacccgattccgagcaaaggggagattctgacgcagatttccaatttttggtttaaaaaactggtgcatattatgcccaaccactttaccggtcaaacggtttacgatgttttgcctgaaaacgaagccaaagctttagagaaacgcgccgtcgtggctaaaaagctcactccggtgaaagtagaggcgattgtgcgtggttatctggcaggcagcggttggaaagattatcaaaaaaccggctcggtttgcggtattcaactgcctgaaggtatgcaggaagcgcaacaactgcctgaagtgatttttacgccctcaaccaaagccgcagtcggcgatcacgatgaaaacatcagctttgaagaatgcgaacgcattatcggaaaagaattggcggcggaagtgcgcgccaaagcgattcagctttatacagaagcggcggaatatgccaaatcgcgcggcatcatcatttgcgataccaaatttgaattcggtttggatacaaacggtacgctgacgctgatggatgaggtattgactcccgattcgagccgcttctggcctgccgaccaatataaagtcggcacaaatccgccgtcttttgacaaacaatttgtccgcgactggctggaacaaagcggttggaacaaaaaagcccctgcgcctaaagtgcctgccaatgtgattcaaaaaacagtcgaaaaatatcaggaagcattgactttgctgactcaggattga

SEQ ID NO: 59167 - DNA, 711 bp, Neisseria meningitidis; identical to SEQ ID NO: 42623

SEQ ID NO: 59168 - DNA, 456 bp, Neisseria meningitidis
ttggatctctacaaactcggttacaaacaacatacccgtaccgatgcggaaggctatatcgagaaactgcacattacccccgccaatgccaatgagtgcaaacacctgtcgccgttgttggaaggactgcccgaaggtacgaccgtctatgccgataaaggctacgacggtgcggaaaaccggcaacatctggaagaacatcagttgttagacggcattatgcgcaaagcctgccgcaaccgtccgctgtcggaaacgcaaaccaaacgcaaccggtatttgtcgaagacccgttatgtggtcgaacaaagcttcggtacgctgcaccgtaaattccgctatgcgcgggcagcctatttcgggctgctcaaagtgagtgcgcaaagccacctgaaagcgatgtgtttgaacctgttgaaagcggccaacaggctaagtgcgcccgctgccgcctaa

SEQ ID NO: 59169 - DNA, 174 bp, Neisseria meningitidis; identical to SEQ ID NO: 38300

SEQ ID NO: 59170 - DNA, 270 bp, Neisseria meningitidis; identical to SEQ ID NO: 36672

SEQ ID NO: 59171 - DNA, 780 bp, Neisseria meningitidis; identical to SEQ ID NO: 50668

SEQ ID NO: 59172 - DNA, 852 bp, Neisseria meningitidis
atgcacatcctgttgaccgccctgctcaaatgcctctccctgctgccgctttcctgtctgcacacgctgggaaaccggctcggacatctggcgttttaccttttaaaggaagaccgcgcgcgcatcgtcgccaatatgcgtcaggcaggcatgaatcccgaccccaaaacggtcaaagccgtttttgcggaaacggcaaaaggcggtttggaacttgcccccgcgtttttcagaaaaccggaagacatagaaacaatgttcaaagcggtacacggctgggagcacgtgcagcaggctttggacaaacacgaagggctgctgttcatcacgccgcacatcggcagctacgatttgggcggacgctacatcagccaacggctgccattccccttaaccgccatgtataaaccgccgaaaatcaaagcgatagacaaaatcatgcaggcgggcagggttcgcggcaaaggaaaaaccgcgcctaccagcatacaaggggtcaaacaaatcatcaaagccctgcgttcgggcgaagcaaccatcgtcctgcccgaccacgtcccctcccctcaagaaggtggggaaggcgtatgggtggatttcttcggcaaacctgcctataccatgacgctggcggcaaaactggcaaacgtcaaaggcgtgaaaaccctgtttttctgctgcgaacgcctgcctgacgggcagggtttcgatttgcacatccgccccgtccaaggggaattgaacggcgacaaagcccatgatgccgccgtgttcaaccgcaatgccgaatattggatacgccgttttccgacgcagtatctgtttatgtacaaccgctacaaaatgccgtaa

SEQ ID NO: 59173 - DNA, 423 bp, Neisseria meningitidis; identical to SEQ ID NO: 44835

SEQ ID NO: 59174 - DNA, 351 bp, Neisseria meningitidis; identical to SEQ ID NO: 54616

SEQ ID NO: 59175 - DNA, 2889 bp, Neisseria meningitidis
atgagtaacacaaccgtagaacaatttgccgccgagctgaaacgccccgtcgaagacctgttgaaacagttgaaagaagccggcgtcagcaaaaacagcggcagcgattccctgacgctggacgacaaacagcttctgaacgcctacctgaccaagaaaaacggcagcaacggcggcaccatcagcatccgccgcaccaaaaccgaagtcagcaccgttgacggcgtaaaagtcgaaacacgcaaacgcggacgcactgtcaacattccttctgccgaagagttggcagcacaggtaaaagccgcccaaacccaagccgcacctgtccggccggagcagacggcagaagacgcggcaaaagcccgagccgaagctgccacacgtgcagaagcccgtgccaaggcagaagcggaagcggcaaaactgaaagcggcaaaagcaggcaacaaagccaaacctgccgcgcagaaacccaccgaagcaaaagccgaaaccgcacccgttgcggcggaaaccaaacccgccgaagaaagcaaagcggaaaaagcccaagccgacaaaatgccgtctgaaaaacccgccgaatccaaagaaaaagccgccaagccgaaacacgagcgaaacggcaaaggcaaagatgccaaaaaaccggcgaaacctgccgcacctgccgtgccgcaacccgtggtcagcgcagaagaacaggcgcaacgcgatgaagaagcacgccgcgccgccgcacttcgcgcccaccaggaagccctgttgaaagagaaacaggaacgccaggcacgccgcgaagccatgaaacaacaggcagaacaacaggcaaaagccgcacaggaagccaaaaccggcagacagcgtcccgccaaacctgccgagaaacagcaggcagccgcgccagccgtcgaaaataaacctgtcaatccggcaaaagcgaaaaaagaagaccgccgcaaccgcgatgacgaaggtcaaggccgcaacgccaaaggcaaaggcggaaaaggcggacgcgaccgcaacaatgcacgcaatggcgacgacgagcgcgtacgcggcggtaaaaaaggcaaaaaactcaaactcgagccgaaccaacacgccttccaagcaccgaccgaacctgtcgtacacgaagttttggtgcctgaaaccattaccgttgccgacttggcacacaaaatggcagtcaaaggcgtggaagtggtcaaagccctgatgaagatgggcatgatggttaccatcaaccaatccatcgaccaagacaccgccctgattgtcgtcgaagaactcggacacatcggcaaacccgccgccgccgacgatcccgaagccttcttggacgagggcgcggaagcggtggaagccgaagcattgccgcgtccgcccgtcgttaccgtcatgggccacgtcgaccacggcaaaacctcgctgctggactacatccgccgtaccaaagtggtacagggcgaagcaggcggcattacccaacacatcggtgcataccacgttgaaaccccacgcggcgtgattaccttcttggatactccgggtcacgaagcgtttaccgccatgcgtgcgcgcggtgcgaaagcaaccgacatcgtgattcttgtggtcgccgccgacgacggtgtgatgccgcaaaccatcgaagccattgcacacgccaaagcggcaggcgttccgattgtggttgccgtcaataaaatcgataaagacactgccaaccccgaacgtatccgccaagaactgacccaacacgaagtcatccccgacgattggggcggcacggttcaattcatcgacgtttctgcgaaaaaaggaacgaacatcgacgcgctgctcgaagccgtattgctcgaagccgaagtattggaactgaccgcacctgtcgatgcgcccgccaaaggcatcatcgttgaggcgcgcttagacaaagggcgcggcgcggttgccacattgctggttcaaagcggtacgctgaaaaaaggcgatatgctgctggccggtaccgcattcggcaaaatccgcgcgatggtcgatgaaaacggcaaatccattaccgaagccggcccgtccatcccggtcgaaatcctcggcttgtccgacgtacccaatgcgggtgaagacgcaatggcgttggcagacgagaaaaaagcccgcgaaatcgcactcttccgccaaggcaaataccgcgacgtgcgccttgccaaacagcaggcggcgaagctggaaaacatgttcaacaacatgggcgaaaaccaagcccaatccctgtcggtcatcatcaaagcagacgtacaaggttcttacgaagctttggcgggcagcctgaaaaaactgtccacagacgaagtgaaagtgaacgtgttgcacagcggcgtgggcggcattaccgaatctgatgtcaaccttgccatcgcttcgggcgcgttcattatcggctttaacgtgcgtgcagatgcctcttcgcgcaaacttgccgaaaatgaaaacgtggaaatccgctactacaacatcatctacgatgccatcgacgacgtgaaggcggcgatgagcggtatgctttccccggaagagaaagagcaagtaaccggtacggtcgaaatccgtcaggtcatctccgtttccaaagtcggcaacattgcaggctgtatggttaccgacggcgtggtcaaacgcgattcccatgtccgcctcatccgcaacaacgtagtcatccacacgggcgaactggcttcgttgaaacgctataaagacgacgtcaaagaagtccgtatgggctttgagtgcggtctgatgattaaaggctacaacgaaatcatggaaggcgaccaactggaatgcttcgacatcgtcgaagtggcacgcaccctgtaa

SEQ ID NO: 59176 - DNA, 558 bp, Neisseria meningitidis; identical to SEQ ID NO: 43551

SEQ ID NO: 59177 - DNA, 861 bp, Neisseria meningitidis
atgaaaccctattccgccaatcccaacctgaccgaaccgcgctggctgcgcgtgttgctgattgccgccgcgctgggctttctgctgctgatgctggtcgtgccgctcgtcgccgtgttttacgaagccttaaaaggcggttgggatttgtacctgaaatccttaaacgatcccgaagcgtggtctgccatcaaattgacgctgattaccgcgctgattgtcgtccccgtcaatgccgtcttgggcgtggcgatggcgtggctgctgacccgttttgattttcgcggcaagcagttgctgactaccctgctcgatttgccgttttccgtatcgcccgtggtggccggtttaatgttcgtcttattgttcggcgcgcacacggcattgggtggctggctcgaagcgcaaggcatacagattatcttcgccatccccggcattattctggcgacgctgttcgttactttcccctttgtcgcacgcgaaatcatcccgctgatgcaggctcagggcgacagcgaagaacaggcggcattgatactcggcgcaagcggctggcagatgttttggcgcgttaccctgcccaacatcaaatgggcgttactctacggcatcatcctcaccaacgcccgcgcgatgggcgagttcggcgcggtcagcgtggtatcgggacacatacgcggcgaaaccaacaccgtcccgcttttggtcgaaatcttctacaacgaatacaacttcaccggcgcattcgccctctccggcgtattggcacttttggcactggcgacgctggcggtgcagaacatcattaccaaattacaagacaaaaaactcgccgccgccgaaaggaacgcagtatga

SEQ ID NO: 59178 - DNA, 975 bp, Neisseria meningitidis
atgctcgaaaatctgccctatttccagcgacatctgcctgaagaccttgccaaagtcaatgaagtcatcaaccgtgcggtgcaatccgatgtcgcactgatttcgcaaatcggtacatatatcatcagcgcgggcggcaaacgtctgcgtccgattatgacgattttggcgggtaaggcggtcggttatgatgacgagaaactgtattcgctggcggcgatggtcgagtttatccacacttccaccctcctgcacgacgatgtcgtcgatgaaagcgatttgcgccgtggacgggcaacggcaaacaatctgttcggcaatgcggcggcagtgttggttggcgactttttatacacgcgcgcctttcaactgatggttgcctcgggcagtatgcgcgttttggaagtgatggcggatgcaaccaacattattgccgagggcgaagtcatgcagctgatgaacatcggcaatacggacattaccgaagaacaatatatccaagtcatccaatataaaacggcaaaattgtttgaagctgccgctcaagtcggcgcaattttgggcaaggcttcccccgaacacgaacaggcgttgaaagactacggtatgtatgtcggtacggcattccaaattattgacgatgtgctggactattctggcgaaaccgaagaaaccggcaaaaacgtcggcgacgatttggcggaaggaaaaccgactttgcctttgatttatctgatgcgtcagggttccgaacaggttgcgaacgatgtgcgtactgctttggaaaatgcagatcgcagctattttgagaaaatccacgattatgtcgtccgttcggatgctttggcatattcgataggcgaggcgcgcaaagcagtcgattgtgccgttaccgccttggatgccctgcccgacagcgaagtgaaggatgccatgattcagctggcgaaggaatctttggtcagggtgtcttga

SEQ ID NO: 59179 - DNA, 615 bp, Neisseria meningitidis
atgaagaataatgattgcttccgcctgaaaaacccccagtctggtatggcgctgatagaagtcttggtcgctatgctcgttctgaccatcggtattttggcactattgtctgttcagttgcggacagtcgcttccgtcagggaggcagagacgcaaaccatcgtcagtcaaatcacgcaaaacctgatggagggaatgttgatgaatccgaccattgattcggacagcaacaagaaaaactataatctttacatgggaaaccatcatacactatcagctgtggatggcgattttgcggttgatgccgtgaaaagcaagaaggatttggcaaaagcccagttggacaggttcggttatgaattgaaaaatgccttgccggatgcggcagccatctattacgccatctgcaaggattcgttgggtgttgcgccgacattgtccgccggtagtactttttcttcaaattgcgatgctagtgcaaatggggatactttgattaaagtattgtgggtaaatgattcggcaggggattcggatatcgcccatacgaatcttgagacgaacggcaacaatatcgtatatacctatcaggcaagggtcggaggtcgtgaatga

SEQ ID NO: 59180 - DNA, 1410 bp, Neisseria meningitidis; identical to SEQ ID NO: 42274

SEQ ID NO: 59181 - DNA, 252 bp, Neisseria meningitidis; identical to SEQ ID NO: 51270

SEQ ID NO: 59182 - DNA, 966 bp, Neisseria meningitidis
atgagctacacgcaactgacccagggcgaacgataccacatccaatacctgtcccgccactgcaccgtcaccgaaatcgccaaacagcttaaccgccacaaaagcaccatcagccgcgaaatcagacggcaccgcacccaagggcagcaatacagcgccgaaaaagcccagcggcaaagccggactatcaaacagcgtaagcgacaaccctataagctcgattcgcagctgattcagcacatcgacacccttatccgccgcaaactcagtcccgaacaagtatgcgcctacctgtgcaaacaccaccggatcacgctccaccacagcaccatttaccgctaccttcgccaagacaaaagcaacggcagcacgttgtggcaacatctcagaatatgcagcaaaccctaccgcaaacgctacggcagcacatggaccagaggcaaagtccccaaccgtgtcggcatagaaaaccgacccgctatcgtcgaccagaaatcccgtatcggcgattgggaagccgacaccattgtcggcaaaggacagaaaagcgcattattgaccttggtcgaacgcgttacccgctacaccatcatctgcaaattggatagcctcaaagccgaagacactgcccgggcagctgttaggacattaaaggcacataaagacagggtgcacaccatcaccatggataacggcaaagagttctaccaacacaccaaaataaccaaagcattgaaagcggagacttatttttgtcgtccttaccattcttgggagaaagggctgaatgagaacaccaacggactcatccggcaatacttccccaaacaaaccgatttccgtaacatcagtgatcgggagatacgcagggttcaagatgagttgaaccaccgaccaagaaaaacacttggctacgaaacgccaagtgttttattcttgaatctgttccaacctctaatacactag

SEQ ID NO: 59183 - DNA, 759 bp, Neisseria meningitidis
atgaatccaaaaactccccccgaccatacagaagatgccgtgcgcctgtccaaacgcatggcgcaactggggctttgttcgcgccgcgaagccgacggctatatcgaacagggttgggtaacggtcaacggcaaaaccgccgtactcggtcagaaagtttcgccggcagaccgtatcgaactaaacaagaaagcccacgaacagcaggcggcacgcattaccatcctgctgaacaaacccgtcggctatgtcagcgcacaagcggaaaaaggctataaatccgccgccgaactgattacctctgaaaaccgctgggaaggcgacaccggccgcatccgtttcgatccgaaacacaaaatcggtcttgcccccgccggcaggctcgatatcgattcagtcggattactggtgttgacgcaggacggccgtatcgccaagcagcttatcggcgaaaacagcggcagtgaaaaagaatatttggtgcgcgtgcgcggcaaattggacgaaaaaggacttgccttactgaatcacggattgagtttggacggcgagaaactgcgtcccgcccaagtagaatggcaaaacgaagaccaactgcgcttcgtgttgaaacagggtaaaaagcggcaaatccgccgtatgtgcgaactggtcggactgcgcgtcgtcgggctgaaacgcatccgcatgggtaaggtcaagctcggcaggctgccgcccggcaaatggcgttatcttgctcccggcgaatcgttttaa

SEQ ID NO: 59184 - DNA, 384 bp, Neisseria meningitidis; identical to SEQ ID NO: 38550

SEQ ID NO: 59185 - DNA, 216 bp, Neisseria meningitidis; identical to SEQ ID NO: 50612

SEQ ID NO: 59186 - DNA, 1539 bp, Neisseria meningitidis
atgaatatgctgggagctttggcaaaagtcggcagcctgacgatggtgtcgcgcgttttgggatttgtgcgcgatacggtcattgcgcgggcattcggcgcgggtatggcgacggatgcgttttttgtcgcgttcaaactgcccaacctgcttcgccgcgtgtttgcggagggggcgtttgcccaagcgtttgtgccgattttggcggaatataaggaaacgcgttctaaagaggcgacggaggcttttatccgccatgtggcggggatgctgtcgtttgtgctggtcatcgttaccgcgctgggcatacttgccgcaccttgggtgatttatgtttccgcacccggttttgccaaagatgccgacaaatttcagctctccatcgatttgctgcggattacgtttccttatatcttattgatttcactttcctcttttgtcggctcagtactcaattcctatcataaattcagcattccggcgtttacgcccacgttcctgaacgtgtcgtttatcgtattcgcgctgtttttcgtgccgtatttcgatcctcccgttaccgcgctggcttgggcggtttttgtcggcggtattttgcaactcggcttccaactgccctggctggcgaaactgggttttttgaaactgcccaaactgagtttcaaagatgcggcggtcaaccgcgtgatgaaacagatggcgcctgcgattttgggcgtgagcgtggcgcagatttctttggtgattaacacgattttcgcgtcttatctgcaatcgggcagcgtttcatggatgtattacgccgaccgcatgatggagctgcccagcggcgtgctgggggcggcactcggtacgattttgctgccgactttgtccaaacactcggcaaaccaagatacggaacagttttccgccctgctcgactggggtttgcgcctgtgtatgctgctgacgctgccggcggcggtcggactggcggtgttgtcgttcccgctggtggcgacactgtttatgtaccgcgaatttacgctgtttgacgcgcagatgacgcagcacgcgctgattgcctattctttcggcttaatcggtttgattatgattaaagtgttggcacccggcttctatgcgcggcaaaacatcaaaacgcccgtcaaaatcgccatcttcacgctcatctgcacgcagttgatgaaccttgcctttatcggcccactgaaacacgtcggactttcgcttgccatcggtctgggcgcgtgcatcaatgccggattgttgttcttcctgttacgcagacacggtatttaccaacctggcaagggttgggcagcgttcttagcaaaaatgctgctctcgctcgccgtgatgggaggcggcctgtatgccgcccaaatctggctgccgttcgactgggcacacgccggtggaatgcaaaaggccgcccggctcttcatcctgattgccgtcggcggcggactgtatttcgcatctctggcggctttgggcttccgtccgcgccatttcaaacgggtggaaagctga

SEQ ID NO: 59187 - DNA, 405 bp, Neisseria meningitidis
atgaccgcccaaccctgccccatctgcacggcacaagatgaagatattttgctgcaaacccccaagctgcgcgtcatcgccgtccataacgacagcggttcgcctgcattctgccgcgtcatttggcgtaagcatattgccgaaatgaccgacctttcggcagcggaacgcggcgaattgatggaaatagtgtacaaagtcgaagccgctatgcgccaagtgttccggccggcaaaaatcaacctcgccagcttgggcaatgtcgtgccgcacctgcactggcatattatcgcccgctttgaaaacgatgcgtccttccccgcgccgatttgggcaaaccccgtccggaaacacggtatgaccctgccgcaagattggacggaacagcttaaaaagctgctttaa

SEQ ID NO: 59188 - DNA, 876 bp, Neisseria meningitidis; identical to SEQ ID NO: 38647

SEQ ID NO: 59189 - DNA, 957 bp, Neisseria meningitidis; identical to SEQ ID NO: 51773

SEQ ID NO: 59190 - DNA, 291 bp, Neisseria meningitidis
gtggaatattttatgttgctggcaacagacggggaggatgtgcacgaggcgcgtatggcggcacgtcccgaacacctcaaacggctggagacgctgaagtcggaaggccggctgttgacggcaggcccgaatcctttgccggaggactccaaccgcgtttcgggcagtttgattgtggcgcagttcgagtctttggatgcggcagaggcgtgggcggaagacgatccctatgttcatgcaggcgtgtacagcgaagtgctgatcaagccgtttaaagcggtgttcaaataa

SEQ ID NO: 59191 - DNA, 1179 bp, Neisseria meningitidis
atggaatttgtttacgacgtggcagaatcggcagtcagccctgcggtgattaaagtaatcggcttgggcggcggcggttgcaatgcaatcaataacatggttgccaacaatgtgcgcggtgtggagtttatcagtgccaatacggatgcgcagtctctggcaaaaaaccatgcggcgaagagaatccagttgggtacgaatctgacacgcggtttgggcgcgggcgcgaatcccgatatcggccgtgcggcagcccaggaagaccgggaagccattgaagaagccattcgcggtgcgaatatgctgtttatcacgaccggtatgggcggcggtaccggtaccggttccgcgccggttgttgctgagattgccaagtctttgggcattctgaccgttgccgtggttacccgaccgttcgcatatgaaggtaagcgcgtccatgtcgcacaggcagggttggaacagttgaaagaacacgtcgattcgctgattatcatcccgaacgacaaactgatgactgcattgggtgaagacgtaacgatgcgcgaagccttccgtgccgccgacaatgtattgcgcgatgcggtcgcaggcatttccgaagtggtaacttgcccgagcgaaatcatcaacctcgactttgccgacgtgaaaaccgtgatgagcaaccgcggtatcgctatgatgggttcgggttatgcccaaggtatcgaccgtgcgcgtatggcgaccgaccaggccatttccagtccgctgctggacgatgtaaccttggacggagcgcgcggtgtgctggtcaatattacgactgctccgggttgcttgaaaatgtccgagttgtccgaagtcatgaaaatcgtcaaccaaagcgcgcatcccgatttggaatgcaaattcggtgcggctgaagacgagaccatgagcgaagatgccatccggattaccattatcgctaccggtctgaaagaaaaaggcgcagtcgattttgttccggcaagggaggtagaagcggttgctccgtccaaacaggagcaaagccacaatgtcgaaggtatgatccgcaccaatcgcggtatccgcacgatgaaccttaccgctgcggatttcgacaatcagtccgtacttgacgactttgaaatccctgcgattttgcgtcgtcaacacaattcagacaaataa

SEQ ID NO: 59192 - DNA, 1059 bp, Neisseria meningitidis; identical to SEQ ID NO: 51733

SEQ ID NO: 59193 - DNA, 1401 bp, Neisseria meningitidis; identical to SEQ ID NO: 43904

SEQ ID NO: 59194 - DNA, 651 bp, Neisseria meningitidis
atgccgtctgaaaacacaaaaggaacaaccatgaccacacatcatgtcgaattgaggaaggtaaccaaacggttcggggcgcaaaaagccgtcaaccaagtcgatttggttttgaaggcaggagaaagcgtcgggcttgccggacacaacggcgcgggcaagtccaccattatgaagctgatactcgggctgattaccccgaccgaaggcgaagtgatgcttttgggcgaacgtaccggtagcaaagcgggggcgcggcttcgcagccaaatcggctacctgcccgaaaccgttgcgctgcacccttcgctgatcggcatcgaaacgctggatttttatgccaaacttaaaaaacagccgctcacgcagaaccgggggctgcttgagcgcgtcggcatttcacaggcggcacaccgccgcgtcggcacttattctaaagggatgcgccaacgccttgccttggcacaagccctgctgggcgagcccaaagtcctgctgtttgatgaaccgacaaccggtcttgaccctgcatcacgacaaatgttttacgaagtcgtgcgcgaactcaacgggcgcggcgcgaccgtattgctcagcacccacgcccttgccgagttggacgggcacgccgaccgcattatcgtggattaa

SEQ ID NO: 59195 - DNA, 768 bp, Neisseria meningitidis; identical to SEQ ID NO: 51522

SEQ ID NO: 59196 - DNA, 570 bp, Neisseria meningitidis
atggtacggcgtttgataatcggcatcagcggggcgagcggtttccaatacggcgtgaaggctttggaacttttgcgcgcgcaagatgtcgaaacgcaccttgtggtatcgaaaggtgcggagatggcgcgcgcttcggaaacggcttatgcgagagacgaagtgtatgccttggcggacttcgtgcatccgatcggcaatatcggggcgtgcattgccagcggtacgtttaaaacggacgggatgctggtcgccccctgttcgatgcggacgcttgcctcggtcgcgcacggcttcggcgacaacctcttgacgcgtgcggcggatgtggttttgaaggaaaggcggcggctggtgctgatggtgcgcgaaacgccgttgaaccttgcccatttggacaatatgaaacgggtaacagaaatgggcggcgtggtgtttccccctgttcctgcgatgtaccgcaaaccgcaaactgcagacgatattgttacacacagtgttgcacacgctttgtcgcttttcggaatcgatacgccggattcggcggaatggcaggggatagcggattaa

SEQ ID NO: 59197 - DNA, 375 bp, Neisseria meningitidis; identical to SEQ ID NO: 52416

SEQ ID NO: 59198 - DNA, 1407 bp, Neisseria meningitidis
atgaccgccgctcctgacatcctctaccggcaagccgccgcccttttggaacaatccaataccgcccaagccctgcccctgctgcaacaggccgcagagcagggatatacggaagctgcttttgtattgggcaaccatctgctgcaaaacggccaaccggagcaggcactttcatggttggaagccgccgcggcccaacgccatcccaaagcactcttctccctgctgcaacaacgcgaacacaacggcaccccgaccggacagcttctcaacgactatgcctggctgggtgagcaggggcactcagaagcccaattaatcctcatgcgttaccacgcgcaacgcaacgatccacaatcgctctactgggcggaacttgctgccgcccgatatgccgcacctgcgtattaccatctggcacgccatcatcaacgccaaggcgacgttgaaacagccatcgaacaatacgaaaaagcggcagcactcggcgtaactgccgcctgctggcaacttggtcaaatctacttctacggtacaggtgtcagccccaaccacgcacaagccgaacactatctcgaaccagccgcacaagccggccacatcgccgcacaaacgctgctggctgaccttcttgccgcccaacgcaaacctgaagccttggaatggtatcgtcgtgccgccgataaggaacaagcggaagcacagtctaagctggcccaatacgccctgaccggcgaactttccgaacgcgatccgttccaagcggcacgatatgccaaagccgctgccgagaaaaaccatcctgaagccctgaaaatcatgggcgacctctaccgctacggcctcggcatcaaagctgacaaccatatcgcgcacgattactaccaccgtgctgccgcgctgggttctgccgccgcagcacaaaaactcatcagcgacgccgcgctgtaccatccgcaacaatacgaacaaatcaaaactgccgccctgcaacagcaacaaaccgaaaccatctaccgtttggcggaaacacaagcccatgccatcggtcgtcccgccgactataatgccgcacgcaaaaattacatggaagctgctgagttccaccataaaaacgcggcggctgccttaggccgcatctaccattacggcctcggtacggcgcaagatcctcgggcggctgcacactggtacgccattgctgccgaacaaaaccacccttccgcccaataccacctcgcctgtttttactatcacgggcaaggtgtcggctgtcatgttccgaccgcctgctactggctgcaggctgccatcagcaacggccacacttcggccgaatcattaatatccctattagaacaatggcgacgcgaagcacaccatgccatcggacaaaaggccgtctga

SEQ ID NO: 59199 - DNA, 279 bp, Neisseria meningitidis; identical to SEQ ID NO: 38377

SEQ ID NO: 59200 - DNA, 135 bp, Neisseria meningitidis; identical to SEQ ID NO: 53509

SEQ ID NO: 59201 - DNA, 291 bp, Neisseria meningitidis; identical to SEQ ID NO: 42317

SEQ ID NO: 59202 - DNA, 726 bp, Neisseria meningitidis
atgagtgagggaatgatgtctcctgttttgtatttgattcctacgcctttgggtacgcccgatacgccgtgcctgttgccgcatgaacaacgagcggttgtcgggctgacggattttgtcgtggaagcggaaaaaacggcgcgcgcgcatttgaaacatttgggcgtgacaatgcctatccgcgaactgaatttgcaaacgctgaacgaacacacggatttgaagactttgccggaattgctaaaacctttgcaagaagggcgcagtatgggcattgtcagcgaggcgggttgcccggctgtggctgatccgggtgcgaatttggtggcattggcgcataaacacggttttgaagtacggcctttggtcggtccgtccagcttgttgctggcgctgatggcttcgggtgcgaatgggcagaactttgcgtttaagggttatttgccgtctgaaaaaaatgagcggattcagagtttgaaggctttggaacaacgttcgcgccagcagaatgaaacgcagctgtttatcgaaacgccgtatcgcaacgatgtgttgttggcggatgcggtggaaaacctgcatcctgaaacgcgcttgtgcacggctacggatttgacgttgccgactcagtcggtggtcagtaaaacggttgcggattggcgcaggatgaaggaaatgcccaatctgaaaaaacgcccgacgatttttgtgatgtatgcaggttga

SEQ ID NO: 59203 - DNA, 966 bp, Neisseria meningitidis; identical to SEQ ID NO: 58908

SEQ ID NO: 59204 - DNA, 1545 bp, Neisseria meningitidis; identical to SEQ ID NO: 50143

SEQ ID NO: 59205 - DNA, 621 bp, Neisseria meningitidis; identical to SEQ ID NO: 51257

SEQ ID NO: 59206 - DNA, 3204 bp, Neisseria meningitidis
atggctaaattttttatcgaccgccctatttttgcgtgggttatttcgattttcattattgcggcgggtattttcggcatcaaaagcctgcctgtttcgcaatatccgtccgtcgccgccccgaccattactttgcacgccacttatccgggtgcgtccgcgcaggtaatggaagacagcgtgctttccgtgatcgagcggcatatgaacggcgtggaaggtttggattatatgtccacttccgccgattcgagcggcagcggcagcgtgagcctgacctttacgcccgataccgacgagaatctggcgcaggtggaagtgcagaacaagctttccgaagtattgagcacgctgccggcaaccgtccagcaatacggcgtaaccgtatccaaggcgcgttccaatttcctgatgattgtgatgctttcgtcggatgtgcagtcaaccgaagagatgaacgactacgcgcagcgtaatatcgttcccgagttgcagcgtatcgaaggcgtggggcaggtacgcctgttcggcgcgcaacgcgcgatgcggatttgggttgatcctaagaaactgcaaaactacaatttgtcgtttgccgatatcggcagcgcgctgtccgcccagaacgtccagatttcagcgggttctatcggttcgcttcccgccgttcgcggacagacggttacggctaccgtaacggcgcaagggcagttgggtacggcagaagaattcggcaacgtcatcctccgcgccaataccgacggttctaatgtttacctgaaggatgtggcaagggtcggactgggtatggaagactattcttcctcaacccgtctgaacggtgtaaataccaccggtatggcggtgatgctgtccaacagcggcaatgcgatggcgacggcaaaggcggttaaagaacgcatggcgacgttggaaaaatactttcctcagggtatgagctggaaaaccccttacgatacttccaaattcgtcgaaatttcgattgaaaaagtgattcacactttaatcgaagcgatggtgctggtgtttgtcgtaatgtatctcttcctgcaaaacatccgttatacgctgattccgaccattgtcgtaccgatttcgctgttgggcggtttcgctttcatctcttatatgggcatgtcgattaacgtactgaccatgtttgcgatggttttggtcatcggcatcgtggtcgatgacgcgattgtggtggttgaaaacgtcgagcgcattatggcgggtgaaggcttgccgcccaaagaagcgaccaaaaaagcgatgggtcagatttcgggcgcggtcatcggtattaccgccgttctgatttccgtgttcgtaccgttggcgatgttcagcggggcgacgggcaatatttacaaacagtttgccctgacgatggcgtcatcaatcgcattctccgccttccttgcgctgacccttacccctgctttgtgtgccacaatgttgaagacaatcccgaaagggcatcacgaagagaaaaaaggtttcttcggctggtttaacaagaaattcaacagttggacgcacggttacgaaggccgggttgccaaagtgctgcgtaagactttccgcatgatggttgtctatatcggcttggcggttgtgggcgtgttcctgtttatgcgcctgccgacttcgttcctgccgaccgaagaccaaggcttcgtcatggtcagcgtgcaactgcctgcaggagcgacccaagagcgcaccaatgcgactttggcgcaagttacccaactggcgaaaagcattcctgaaatagaaaacatcattaccgtttccggcttcagcttttcgggcagcggtcagaatatggcgatgggttttgccatattgaaagattggaacgagcgtaccgcgcccggcagcgatgccgttgcgattgccggcaagctgacgggtatgatgatggggacgcttaaagacggttttggcatcgccgtcgtcccgcctccgattctggagttgggcaatggttcgggcctgagcatcaacctgcaagaccgcaataataccggccataccgcattgctggcgaagcgcaacgagttgattcagaaaatgcgtgccagcggtttgtttgaccccagcaccgtccgtgccggcggtttggaagactcgccgcagttgaaaatcgacatcaaccgtgccgccgcggcggcgcaaggcatttcgtttgccgacatccgcaccgcattggcaagtgcgctgagttcgtcttatgtcagcgacttcccgaaccaaggccgtctgcaacgcgtgatggtgcaggccgacgaggatgcccgtatgcagcctgccgatattttgaacctgaccgtgccgaacaaatccggcgtcgccgtaccgctttccaccattgctactgtttcttgggaaaacggtacggaacagagcgtacgcttcaacggttatccttcgatgaagctgtccgcttcgcctgcaaccggcgtttccaccgggcaggctatggcggcggttcaaaaaatggttgacgaattgggcggcggttacagcttcgaatggggcggacagtcgcgcgaagaggcaaaaggcggctcgcaaaccctgattttgtacggtttggcggttgcagccgtatttttggtacttgccgcgctttatgaaagctggtcgattccgctggcggtcatccttgtgattccgttgggtttgatcggtgcggctgcgggcgtaaccgggcgcaacctgtttgaaggactgttgggcagcgttccctcgttcgccaacgacatctactttcaagtcggtttcgttaccgtgatgggtttgagtgcgaaaaacgcgattttgattatcgagtttgccaaagaccttcaagcgcaagggaaaagcgcggtcgaagccgctttggaagccgcccgcctgcgtttccgtccgattatcatgacctcgttcgcctttattttgggcgtggttcccctgtatattgccggtggtgcaagttctgccagccagcgcgccatcggcacgaccgtattctgggggatgctcatcggcacgctcttgtccgtgttccttgttccgcttttctatgtggtggtgcgcaaattcttcaaagaaaccgcgcacgaacacgaaatggcagtaaaacacgccgccgaagcgggcatcaccggttcggacgacagccaacattaa

SEQ ID NO: 59207 - DNA, 576 bp, Neisseria meningitidis; identical to SEQ ID NO: 37908

SEQ ID NO: 59208 - DNA, 4344 bp, Neisseria meningitidis
atgaaaacaaccgacaaacggacaaccgaaacacaccgcaaagccccgaaaaccggccgcatccgcttctcgcctgcttacttagccatatgcctgtcgttcggcattcttccccaagcctgggcgggacacacttatttcggcatcaactaccaatactatcgcgactttgccgaaaataaaggcaagtttgcagtcggggcgaaagatattgaggtttacaacaaaaaaggggagttggtcggcaaatcaatgacaaaagccccgatgattgatttttctgtggtgtcgcgtaacggcgtggcggcattggtgggcgatcaatatattgtgagcgtggcacataacggcggctataacaacgttgattttggtgcggaaggaagaaatcccgatcagcaccgtttttcttaccaaattgtgaaaagaaataattataagcctgacaattcacacccttacaacggcgattaccatatgccgcgtttgcataaatttgtcacagatgcagaacctgtcgaaatgacgagtgacatgagggggaatacctattccgataaagaaaaatatcccgagcgtgtccgcatcggctcaggacaccactattggcgttatgatgatgacaaacacggcgatttatcctactccggcgcatggttaattggcggcaatacacatatgcagggttggggaaataatggcgtagttagtttgagcggcgatgtgcgccatgccaacgactatggccctatgccgattgcaggtgcggcaggcgacagcggttcgccaatgtttatttatgacaaaacaaacaataaatggctgctcaacggagttttacaaaccggctacccttattccggcagggaaaacggtttccagctgatacgcaaagattggttctacgatgacatttacagaggcgatacacataccgtcttttttgaaccgcgcagtaacggacatttttcctttacatccaacaacaacggtacgggtacggtaacagaaaccaacgaaaaggtttccaatccaaagcttaaagtacagacagtccgactgtttgacgaatctttgaatgaaactgataaagaaccagtttacgcggcagggggtgttaatcagtaccgtccaaggttaaacaacggtgaaaacctttcttttatcgattacggcaacggcaaactcatcttatcaaacaacatcaaccaaggcgcgggcggtttgtattttgaaggtgattttacggtctcgcctgaaaacaacgaaacgtggcaaggcgcgggcgttcatatcagtgaagacagtaccgttacttggaaagtaaacggcgtggcaaacgaccgcctgtccaaaatcggcaaaggcacgctgcacgttcaagccaaaggggaaaaccaaggctcgatcagcgtgggcgacggtacagtcattttggatcagcaggcagacgataaaggcaaaaaacaagcctttagtgaaatcggcttggtcagcggcaggggtacggtgcaactgaatgccgataatcagttcaaccccgacaaactctatttcggctttcgcggcggacgtttggatttaaacgggcattcgctttcgttccaccgtattcaaaataccgatgaaggggcgatgattgtcaatcataatgccacaacaacatccaccgttaccattacagggaatgaaagtattacacaaccgagtggtaagaatatcaatagacttaattacagcaaagaaattgcctacaacggttggtttggcgagaaagatacgaccaaaacgaacgggcggctcaaccttgtttaccagcccgccgcagaagaccgcaccctgctgctttccggcggaacaaatttaaacggcaacatcacgcaaacaaacggcaaactgtttttcagcggcagaccgacaccgcacgcctacaatcatttaggaagcgggtggtcaaaaatggaaggtatcccacaaggagaaatcgtgtgggacaacgactggatcaaccgcacgtttaaagcggaaaatttccatattcagggcgggcaggcggtgatttcccgcaatgttgccaaagtggaaggcgattggcatttgagcaatcacgcccaagcagtttttggtgtcgcaccgcatcaaagccatacaatctgtacacgttcggactggacgggtctgacaaattgtgtcgaaaaaaccattaccgacgataaagtgattgcttcattgactaagaccgacatcagcggcaatgtcagccttgccgatcacgctcatttaaatctcacagggcttgccacactcaacggcaatcttagtgcaaatggcgatacacgttatacagtcagccacaacgccacccaaaacggcaaccttagcctcgtgggcaatgcccaagcaacatttaatcaagccacattaaacggcaacacatcggcttcgggcaatgcttcatttaatctaagcaacaacgccgcacaaaacggcagtctgacgctttccgacaacgctaaggcaaacgtaagccattccgcactcaacggcaatgtctccctagccgataaggcagtattccattttgaaaacagccgctttaccggacaactcagcggcagcaaggatacagcattacacttaaaagacagcgaatggacgctgccgtcaggcacggaattaggcaatttaaaccttgacaacgccaccattacactcaattccgcctatcgccacgatgctgcaggcgcgcaaaccggcagtgtgtcagacacgccgcgccgccgttcgcgccgttccctattatccgttacaccgccaacttcggtagaatcccgtttcaacacgctgacggtaaacggcaaattgaacggtcagggaacattccgctttatgtcggaactcttcggctaccgcagcgacaaattgaagctggcggaaagttccgaaggcacttacaccttggcggtcaacaataccggcaacgaacctgcaagcctcgaacaattgacggtagtggaaggaaaagacaacaaaccgctgtccgaaaaccttaatttcaccctgcaaaacgaacacgtcgatgccggcgcgtggcgttaccaactcatccgcaaagacggcgagttccgcctgcataatccggtcaaagaacaagagctttccgacaaactcggcaaggcagaagccaaaaaacaggcggaaaaagacaacgcgcaaagccttgacgcgctgattgcggccgggcgcgatgccgtcgaaaagacagaaagcgttgccgaaccggcccggcaggcaggcggggaaaatgtcggcattatgcaggcggaggaagagaaaaaacgggtgcaggcggataaagacaccgccttggcgaaacagcgcgaagcggaaacccggccggctaccaccgccttcccccgcgcccgccgcgcccgccgggatttgccgcaactgcaaccccaaccgcagccccaaccgcagcgcgacctgatcagccgttatgccaatagcggtttgagtgaattttccgccacgctcaacagcgttttcgccgtacaggacgaattagaccgcgtatttgccgaagaccgccgcaacgccgtttggacaagcggcatccgggacaccaaacactaccgttcgcaagatttccgcgcctaccgccaacaaaccgacctgcgccaaatcggtatgcagaaaaacctcggcagcgggcgcgtcggcatcctgttttcgcacaaccggaccgaaaacaccttcgacgacggcatcggcaactcggcacggcttgcccacggcgccgttttcgggcaatacggcatcgacaggttctacatcggcatcagcgcgggcgcgggttttagcagcggcagcctttcagacggcatcggaggcaaaatccgccgccgcgtgctgcattacggcattcaggcacgataccgcgccggtttcggcggattcggcatcgaaccgcacatcggcgcaacgcgctatttcgtccaaaaagcggattaccgctacgaaaacgtcaatatcgccacccccggccttgcattcaaccgctaccgcgcgggcattaaggcagattattcattcaaaccggcgcaacacatttccatcacgccttatttgagcctgtcctataccgatgccgcttcgggcaaagtccgaacacgcgtcaataccgccgtattggctcaggatttcggcaaaacccgcagtgcggaatggggcgtaaacgccgaaatcaaaggtttcacgctgtccctccacgctgccgccgccaaaggcccgcaactggaagcgcaacacagcgcgggcatcaaattaggctaccgctggtaa

SEQ ID NO: 59209 - DNA, 279 bp, Neisseria meningitidis; identical to SEQ ID NO: 36778

SEQ ID NO: 59210 - DNA, 207 bp, Neisseria meningitidis; identical to SEQ ID NO: 51405

SEQ ID NO: 59211 - DNA, 687 bp, Neisseria meningitidis
atgtacgcatttaccgccgcacagcaacagaaggcactcttccggctggtgctttttcatatcctcatcatcgccgccagcaactatctggtgcagttccctttccaaattttcggcatccacaccacttggggcgcattttcctttcccttcatcttccttgccaccgacctgaccgtccgcattttcggttcgcacttggcacggcggattatcttttgggtcatgttccccgcccttttgctttcctatgtcttttccgttttgttccacaacggcagttggacgggcttgggcgcactgtccgaattcaacacctttgtcggacgcatcgcgctggccagctttgccgcctacgcgctcggacaaatccttgatatttttgtgttcaacaaattacgccgtctgaaagcgtggtggattgccccgaccgcatcaaccgtcatcggcaacgctttggatacgctggtatttttcgccgttgccttttacgccagcagcgatggatttatggcggcaaactggcagggcatcgccttggtcgattacctgttcaaactcaccgtctgcggtctgtttttcctgcccgcctacggcgtgattctgaatctgctgacgaaaaaactgacgaccctgcaaaccaaacaggcgcaagaccgccccgcgccctcgctgcaaaatccgtaa

SEQ ID NO: 59212 - DNA, 819 bp, Neisseria meningitidis; identical to SEQ ID NO: 37573

SEQ ID NO: 59213 - DNA, 993 bp, Neisseria meningitidis
atggaaaatgtaaaccgcatcgttgcagaaggcattgccgcagtagaagctgcgcaagacttcaacgctctagaacaaatcaaagcccgttatcttggcaaaaccggcgagttgaccggacttctgaaaactttggggcaaatgtcgcctgaagagcgcaaaaccataggtgcgcatatcaatgaatgcaaaaaccggtttcagacggcttttaatgccaaacgcgatgccctcaacgaagccaagctgcaagcccgacttgccgccgaagccctcgacattaccctgcccggacgcgctcaggaaggcggcagcctgcatcccgtaaccctgaccttgcaacgtgtggtcgaactctttcacggaatgggtttcgaagtggcggacgggcctgaaatcgaagacgattttcacaatttccaagccctgaacatccctgcaaaccatcctgcccgtgcgatgcaggatacgttttacgttgaaaacggcgatgttttgcgtacgcacacttccccgattcaaatccgctatatgctcgataaaaaagagccgcccatccgcattatcgcccccggccgcgtttaccgtgtggacagcgatgccacgcactcgcctatgttccatcaggcggaaggtttgtgggtagaagagggcgtaacttttgccgatttgaaagcagtgttcacggattttatccgtcgcttctttgaacgcgatgatttgcaagtacgtttccgcccgtctttcttcccgttcaccgaaccgtctgccgaaatcgacattatgggcgaaaacggcaaatggctggaagtcggcggctgcggcatggtgcatcccaacgtgttgaaaaatgtgaatatcgattctgaaaaatacaccggtttcgctttcggtatcggtctcgaccgcttcgctatgctgcgttacaacgtgaacgacttgcgcctgttcttcgataatgatttgaactttttgaagcagtttgcgaaatga

SEQ ID NO: 59214 - DNA, 678 bp, Neisseria meningitidis; identical to SEQ ID NO: 51353

SEQ ID NO: 59215 - DNA, 1110 bp, Neisseria meningitidis
atgttttcggacacagatatatccatgatggaaaccgccctccgacttgccgctttggggcgtttttccacttcgcccaatccgcgcgtcggctgcgttatcgcacacggcagccaagttgtcgggcagggcttccacgtcaaagcgggcgaaccgcacgccgaagtccacgccctgcatcaggcgggcgaaatggctcaaggcgcgaccgcctttgttaccctcgaaccatgcagccattacggacgcacaccgccctgcgccgaagcactggtgcgggcgggcgtgtcccgcgtcgttgccgccatgcgcgaccccaacccgctggttgcaggcaaagggcttgccctgctcgaagcagcaggcatcaagacggaatgcggtttactcgaacatcaggcaagggaactcaaccgaggcttcctgtcgcgcatcgaacgccgccgcccctttgtccgcctcaaatgcgccgtttcgctggacggcaaaaccgccctttcagacggcagcagcttttggattaccggcgaagacgcgcgtgccgacgtacaggttttgcgtgccgaaagctgcgcggtgctgaccggcatcggcacggtgttggcggacaatccccggctcaacgtccgcgcttttccaactttgcgccaacccgcacgcatcgttttagacagccgcctgcgcctgcccttggacagccaccttctgaccgacggacaatctccaacctacatcgccaccttggaacgcgatgaagacaaactccgcccctatcgcaaacacgcccacgtccgcatcctgatgccgtctgaaacggcaggcggcaaaatcgatttgaacagcctgatgcgcctgcttgccgacgaaggcataggggaactcatagtcgaagcaggctccgaactcacatctgcatttttggcagaagatttggcagacgaaatcgtgctgtaccgttcgcccaaaatcctcggcagcggcaaagacctgttttccctgcccgaaaaccgcgccgccctttccgcaccgcccttgtggatgcccgtttccaccgaaatcctcggacacgacatcaaaaccgtgttccgaaaaaacggtaacgccttttaa

SEQ ID NO: 59216 - DNA, 201 bp, Neisseria meningitidis
atgaaatttgaagaacgtttcatagttcaagacttggaaacgcatgactttatttatcccgatccgttcggtgacgtggggtttactcaaaatattaaatcagcaggtcaatttgaaagttacgaagatgcattgaactcaggcataaatgaaataggcggaggattccaaatatttcagttcttcgtgaaatcggaataa

SEQ ID NO: 59217 - DNA, 1263 bp, Neisseria meningitidis; identical to SEQ ID NO: 45630

SEQ ID NO: 59218 - DNA, 198 bp, Neisseria meningitidis; identical to SEQ ID NO: 43079

SEQ ID NO: 59219 - DNA, 1476 bp, Neisseria meningitidis; identical to SEQ ID NO: 50882

SEQ ID NO: 59220 - DNA, 543 bp, Neisseria meningitidis; identical to SEQ ID NO: 42127

SEQ ID NO: 59221 - DNA, 204 bp, Neisseria meningitidis; identical to SEQ ID NO: 51544

SEQ ID NO: 59222 - DNA, 1023 bp, Neisseria meningitidis; identical to SEQ ID NO: 50683

SEQ ID NO: 59223 - DNA, 681 bp, Neisseria meningitidis
atgattttccaaacagtctggttttcagatatggtactgtcggtttcgtggattgtccttatcctgatactggcagcttccgcgccgtcggcattccgctcgcttgcccgctaccgttccgcccttccactgtgtaccgtaattttttccgcagcatggtgtctgaacgcctctgccggcggcggacagcttgcacagatgaactaccacctgctcgccgtcaatctggttgcactgatggtgggcacttccgccgccttttggcttgccgcgctgctgatgctgccctactgcctgctgtttgccggttctgccggcgcatatccgccgaacgctttagtgctgattctgcccgcgcttgccgtcaaccgcctgtcgcgtatgctggtcaaccgcctgccgcccaatattttcatctttattttcgtcaacggctttctcgcttccgccgccggcattctgttgaccgggctggtgctgaccggtattttggatgctgcaaacgcttttccgtccgaaatattgtggacgaccgccctgcccgtctttattctgctggcgtgggcggaagccttcctcagcggcatttcaactgccatatttgttgcactgaagccccattggatcaacactttcgacgacaaccgctatctgaagtccgaccgcggcatatggcggtag

SEQ ID NO: 59224 - DNA, 225 bp, Neisseria meningitidis; identical to SEQ ID NO: 42454

SEQ ID NO: 59225 - DNA, 1299 bp, Neisseria meningitidis
atggctaaaaatgttgtagtaatcggcgcacagtggggcgacgagggtaaaggtaaaatcgttgactggctggcggaagaagccggaggcgtggtgcgcttccaaggcggccacaatgcgggtcataccttggttgtcggcggcaaaaaaaccattttgcgcctgattccgagcggtatcctgcatgaaagtctggactgcttcatcggttcgggcgttgtcgtctcccccgaagccctgttgggcgaaatcgacgagttgaacgcggcaggcgtgaaaaacgtcgaaggccgtctgaaaatcgcgccgacctgcccgctgatcctgccttatcacatcgcgctcgaccaagcccgagaagcatcgcgcggcaaaggcaaaatcggcacgaccggccgcggcatcggccctgcctacgaagacaaagtggcacgccgcgccattcgcgccgccgatttgctgcatcctgaaaaactgcgtgaaaaactggatgccgtccttgcttattacaacgtccaactgcaacatctgcacaatgccgaaccggttaaagcggaagacgtgatggcggttatcgaaaaagtcgcgccgcgcattgcgccgatgattaccgacgtgtcccgcgtgttgaacgagaaaaacaaaaacggcgaaaaactgctgtttgaaggcgcgcaaggtgcgttgttggacatcgactacggcacttatcccttcgttacctcgtccaactgtctggcgggagccgcttccgcaggcgcgggcgtaggtcctcaaatgctggattatgttttgggcatcgtcaaagcctataccacgcgcgtcggttcgggcccgttcccgaccgaattgttcgacgaagtaggcgtaggtttggcagaacgcggacacgaattcggttcggtaaccggacgcgcacgccgctgcggctggtttgatgccgccgcattgaaacgctccatccaaatcaacggcatttccggtatgtgtattactaaactcgatgtaatggacggcgttgaaaccatcaatatctgcgtcggctatgaattgcccgacggcggcaaaaccgacatcctgccttgcggttccgatgcggtggaaacctgcaagccgatttacgaaaccatgcccggctggcgtgaatccactttcggcgtgaaggactacggcgcattgcccgaaaacgccaaagcatatttgaaacggattgaagaagtctgcggcgcgccggtcgccatcgtctccaccggccccgaccgagaagaaacgattgtgctgcatcatccgttcgcataa

SEQ ID NO: 59226 - DNA, 843 bp, Neisseria meningitidis
atgttagtctgcaacccctacgaagtcgtcatccacggcacaacgagttccggcaagattttccgtcccagcgactgggcggaacgcctgtgcggcattctgtcctcgttcaccaaagaccacaggctttcctattcgaaatgggtgcgccccatgctggtggacaacatccgctgcgtcgccgtcgataaaaaactggaaaccgacaacccccaaatgttccgcttcctgatggactttgccgccgacaacgacctgcgcgtcatcgactgcaaagccctgctcgaagaacgcgaacagggcggacaaaacgaccctgccaacgaacgcgtcctgctggcacaggcaatcgaagaaaaacacgccgccgaaaaagcacaggaacagaccgcctcgggcgcatcctacgttttgcgcgaaatcggcgcggacgacaccgccaccgcctttgcagccttgagcgttttgcgttccgccctgaccgacatcaaccgctttaccgaacagatcaacaaagtccaacgcccccaaggctaccgcctgctgggtatttttgaagaaggcaaacacaatgccgtcgccgtctgcggcttccgcgaagcctgcaccctcgccagcggccgccacatccacatcgatgacatcgttaccctgccgcaaagccgccgcaaaggctacgcctcgcgcctgctggaagaagtccggaaaatcggtgcggaaacaggggttaccaaaatccacctcaacgtccacgtcaaccacgaccgtgccgacgcgcaccgcctgtatttcaaaaacggttttgaaatctgcgcataccacttccgttgcgaccccaaatga

SEQ ID NO: 59227 - DNA, 807 bp, Neisseria meningitidis; identical to SEQ ID NO: 42461

SEQ ID NO: 59228 - DNA, 627 bp, Neisseria meningitidis; identical to SEQ ID NO: 50959

SEQ ID NO: 59229 - DNA, 201 bp, Neisseria meningitidis; identical to SEQ ID NO: 37363

SEQ ID NO: 59230 - DNA, 1188 bp, Neisseria meningitidis
atgaataccttactcaagcagctcaaaccctatccctttgcccgactgcacgaggcgatgcagggcatttccgcgcctgaaggcatggaagccgtcccactgcatatcggcgaaccgaaacatccgacaccgaaagtcattacggatgcgctgaccgcctcattgcacgagttggaaaaatatccgctgacggccggtttgcctgaactgcgtcaggcgtgtgcgaactggttaaaacgccgttacgatggcttgacagtggatgcggataatgaaattctgccggttttaggcagtagggaggcgttgttttcttttgttcaaaccgtgttgaaccctgtttcagacggcatcaaacccgcaattgtcagcccgaatcccttttatcagatttacgaaggtgcgacacttttgggcggcggtgaaatccattttgccaattgccccgcgccgtctttcaaccccgattggcgtagtatttccgaagaggtttggaaacgcaccaaactggtgttcgtctgctcgcccaacaaccccagcggcagcgtgctggatttggacggatggaaagaagtttttgatttgcaggacaaatatggtttcattattgcctcggacgaatgctattccgaaatctatttcgacggcaacaagcctttgggctgcctgcaggccgctgcacagttggggcgaagcaggcaaaaactgcttatgttcaccagtttgtccaagcggtccaatgttccaggcctgcgttccggttttgtcgccggcgatgccgaactgcttaaaaattttctgctttacagaacctatcacggcagcgcaatgagcattcccgtgcagcgcgcaagcattgccgcttgggatgacgaacagcacgttatcgacaaccgccgcctgtatcaggaaaaatttgagcgcgttattcccattttgcaacaggtatttgacgttaaattaccggatgcctcgttttacatctggttgaaagtccccgatggcgacgatttggcatttgcacgcaatttatggcaaaaagccgctatccaagtattgcccggacgctttttggcacgggataccgaacagggcaatcccggggaaggttatgtccgtatcgctttggttgccgatgtcgcaacttgtgtcaaagctgcggaagacatagtttcactgtatcggtaa

SEQ ID NO: 59231 - DNA, 561 bp, Neisseria meningitidis; identical to SEQ ID NO: 50732

SEQ ID NO: 59232 - DNA, 2133 bp, Neisseria meningitidis
atgtctatcgtatccgcaccgctccccgccctttccgccctcatcatcctcgcccattaccacggcattgccgccaatcctgccgatatacagcatgaattttgtacttccgcacagagcgatttaaatgaaacgcaatggctgttagccgccaaatctttgggattgaaggcaaaggtagtccgccagcctattaaacgtttggctatggcgactttacccgcattggtatggtgtgatgacggcaaccattttattttggctaaaacagacggtgggggtgagcatgcccaatatctaatacaggatttaactacgaataagtctgcggtattgtcttttgccgaattttctaacagatattcgggcaaactgatattggttgcttcccgcgcttcggtattgggcagtttggcaaagtttgactttacctggtttattccggcggtaatcaaataccgccggttgttttttgaagtattggtggtgtcggtggtgttgcagctgtttgcgctgattacgcctctgtttttccaagtggtgatggacaaggtgctggtacatcggggattctctactttggatgtggtgtcggtggctttgttggtggtgtcgctgtttgagattgtgttgggcggtttgcggacgtatctgtttgcacatacgacttcacgtattgatgtggaattgggcgcgcgtttgttccggcatctgctttccctgcctttatcctatttcgagcacagacgagtgggtgatacggtggctcgggtgcgggaattggagcagattcgcaatttcctgaccggtcaggcgctgacttcggtgttggatttggcgttttcgtttatctttctggcggtgatgtggtattacagctccactctgacttgggtggtattggcttcgttgcctgcctatgcgttttggtcggcatttatcagtccgatactgcggacgcgtctgaacgataagttcgcgcgcaatgcagacaaccagtcgtttttagtagaaagcatcactgcggtgggtacggtaaaggcgatggcggtggagccgcagatgacgcagcgttgggacaatcagttggcggcttatgtggcttcgggatttcgggtaacgaagttggcggtggtcggccagcagggggtgcagctgattcagaagctggtgacggtggcgacgttgtggattggcgcacggctggtaattgagggcaagctgacggtggggcagctgattgcgtttaatatgctctcgggacaggtggcggcgcctgttatccgtttggcgcagttgtggcaggatttccagcaggtggggatttcggtggcgcgtttgggggatattctgaatgcgccgaccgagaatgcgtcttcgcatttggctttgcccgatatccggggggagattacgttcgaacatgtcgatttccgctataaggcggacggcaggctgattttgcaggatttgaacctgcggattcgggcgggggaagtgctggggattgtgggacgttcggggtcgggcaaatccacactcaccaaattggtgcagcgtctgtatgtaccggagcagggacgggtgttggtggacggcaacgatttggctttggccgctcctgcctggctgcggcggcaggtcggcgtggtcttgcaggagaatgtgctgctcaaccgcagcatacgcgacaatatcgcgctgacggatacgggtatgccgctggaacgcattatcgaagcagccaaactggcgggcgcacacgagtttattatggagctgccggaaggctacggcaccgtggtgggcgaacaaggggccggcttgtcgggcggacagcggcagcgtattgcgattgcccgcgcgttaatcaccaatccgcgcattctgatttttgatgaagccaccagcgcgctggattatgaaagtgaacgagcgattatgcagaacatgcaggccatttgcgccaaccggacggtgctgattatcgcccaccgtctgtccactgttaaaacggcacaccggatcattgccatggataaaggcaggattgtggaagcgggaacacagcaggaattgctggcgaagccgaacggatattaccgctatctgtatgatttacagaacgggtag

SEQ ID NO: 59233 - DNA, 1431 bp, Neisseria meningitidis
atgacctgggaaaccgtaatcggcttggaaatccacgtccaattgaacaccaaatccaaaatcttcagcggcgcatcgaccgcattcggcgcagaacccaacgcgcacgccggcgtagtggaatgtgctttgccgggcgtactgccggtaatgaaccgtgaagtcgttgaaaaagccatcaaattaggcttggctttggatgcgaaaatcaaccggaaaaacgtgttcgaccgcaaaaactacttctatcccgacttaccaaaaggttatcaaatcagccagttggacttaccgattgtcgaacacggcaaattggaaatcgtagtcggcgacgatgtgaaaaccatcaacgtaacccgtgcgcacatggaagaagacgcaggcaagtccgtgcatgaaggcttgaacggcgcgaccggtatcgacctgaaccgcgccggcacgccgctgttggaagtcgtatccgaacccgaaatgcgctccgccgccgaagccgttgcctacgccaaagccttgcacagcttggtaacctggctgaacatttgcgacggcaatatggcggaaggttcgttccgcgtcgatgccaacgtatccgttcgcccgaaaggtcaagcggaattcggcacgcgccgcgagattaaaaacctcaattccttccgtttcttggagcaggcgattaattacgaagcagaagcgcaaatcgagattttggaagacggcggcaaagtacagcaggcaacgatgctgtttgatcccgaaaaaggcgaaacccgcgtaatgcgcctgaaagaagacgcgcaagactaccgctacttccccgaccccgatttgctgcccgtcatcatttcagacgctcaaatgcaaaaagccaaagcagaaatgcccgagctgccgaaagaaatggcagtgcgtttcgtggcggactacggcgtgtccgaatacgacgcgcgcctgctcaccgcaagccgcgcacaggccgcctattttgaagaagccgccaaagagagcggacaaggcaagccgactgccaactggatgaacggcgaactcgccgccgcactgaacaaagaaggcatggaacttgccgacagcccgattaccgctccgcgcctcgccgcgctggtaggcaaaatcgccgacggcacattaagcagcaaattagcgaaaaaagcctttgaagccatgtgggcagaacccgaagccactattgccgaaatcatcgaaaaacacggtttgcaacagatgaccgataccggcgcggttgaagcgatggtggacgaagtgctagcaaacaacgccaaagccgtggaacagtttaaatccggcaacgaaaaagccctgaatgcgattgtgggacaagtgatgaaggccagcaaaggcaaagccaaccccgcgcaggttcaagagctgattaaagccaaactggcttaa

SEQ ID NO: 59234 - DNA, 1026 bp, Neisseria meningitidis
atggattatcagggtaagaaagaccgattggaagaagttgtcggtctttccgaagaccccgaactttggaacgacccgaaacgcgcccaagaaatcggcaaagagcgcaaaatcctcgaaggcatcgtgttgacgctcgacaacatcgcttcgggcatcgaagacaaccgtatgctgattgaaatgaccgtcgaagaaaacgacgaagaaggtttcgccgccgtgcaggaagatgtggcggggctggaaaaacagatggcggatttggagttcaaacggatgttcaaccagcctgccgatccgaacaactgctttatcgacatcaccgcaggcgcgggcggtacggaagcggaagactgggcggggatgctgttccgtatgtacagccgctacgccgagcgcaaaggcttcaaaatcgaaatccttgaggaagacgacggcgaaatcgcgggcatcaaccgcgcgactatccgagtggaaggcgaatacgcctatggtttgctgcgtaccgaaaccggcgttcaccgcttggtgcgctattcaccgtttgactcgaacaacaaacgccatacttcgtttgcctccgtgttcgtttaccctgaaatcgatgattccattgaaatcgaaatcaaccccgccgatttgcgtatcgacacctatcgcgcatcgggcgcgggcggtcagcacatcaataaaaccgactccgccgtgcgcattacccacgagccgacggggattgtggtgcaatgtcaaaacgaccgttcgcaacacgccaacaaagccgccgcgatggaaatgttgaagtccaaactgtatgaattggaaatgcgcaaacgcaatgaagagaaacaggcgttggaagaaggtaaatccgatgtaggttggggcagccaaatccgttcgtatgttttggattcctcacgtatcaaagacttgcgtacaggctacgaagtcggcaacaccaaagccgtattggatggcgatttggacggctttatcgaagccagcctgaaacagggcgtgtag

SEQ ID NO: 59235 - DNA, 750 bp, Neisseria meningitidis; identical to SEQ ID NO: 45151

SEQ ID NO: 59236 - DNA, 1407 bp, Neisseria meningitidis
gtggaatttagcacaaaaaccgaaatcttgcaggaacagcaggcaggcgcacagttatttgtctgcaccgaagaggcgcaattaaaccatccgaccgcccttgcccttttgtcttcgcttgaagaaggtcaaaattttgccgacacaaaaatcccgacaggcaacggtttgcaggctgttgccgtatgctgtctgaaaagcaccggccgcgccgcattgaacaaggccgccgccgaagccgccaaatgggcgcaaaatcaggaaacggtcaatgtggacgttcacgtctttgaagaagcgcaggctgcagccgttgccgaagcgtttgcgattgcgttcggcaacgccgcctaccgtttcgaccgctacaaaaaagaagccaagcccgccaaatttgaaactgccgtgttccacagcgcacacgaagccgccgttaaagaagccttgcgcgtcgccgaagcgcaagtttacggacaaagcctctgccgcgacttgggcaatgccgcgccgaacgaatgcacgcccgaatttttagcgcgcaccgccaaggccgaagccgaaaaattgggcgcacacgccaaaatcattgaaaaagactacatcaaagaaaacatgggttcgttctggtcggtcgccaaaggcagcgcggaagccccctatttggtcgaactgagctatttcggtgcagccgacaaagaagccgcccccgtcgtcttggtcggcaaaggcattaccttcgacaccggcggcatctccctcaaacccggcctgaacatggacgaaatgaagtttgatatgtgcggcgcggcaaccgtcatcagcaccttctgcgccgccgtcaaactgcaactgccgattaacctgattgccgtcgtcgccacttgtgaaaatatgccttccggcgcggccaacaaaccgggcgatgtcgtgaaaagtatgaaaggtctgaccatcgaagtgttgaacaccgatgccgaaggccgtctgattttgtgcgacgcgctcacttacgccgagcagttcaaacccaaagccgtcatcgacgtcgccaccctgaccggtgcatgcatcgtcgccttggggcacgatgtcagcggcgtgatgggcaacaatcaagatttggtcgacagcctgcttgtcgcttcctacaacgtggacgacaaagcgtggcaactgccgctctttgaaacctacaaagaccagctcaaatccaactttgccgacatccccaatatcggcacgcccggcgcgggcacgattaccgccgcaacattcctatcctactttaccgaagactatccatgggcacaccttgacatcgcgggtacggcgtggaaatccggtgcggaaaaaggtgcgaccggccgtcccgttcccttgctgctgaactatctgcggaatctttaa

SEQ ID NO: 59237 - DNA, 201 bp, Neisseria meningitidis; identical to SEQ ID NO: 59216

SEQ ID NO: 59238 - DNA, 1167 bp, Neisseria meningitidis; identical to SEQ ID NO: 51878

SEQ ID NO: 59239 - DNA, 318 bp, Neisseria meningitidis; identical to SEQ ID NO: 51629

SEQ ID NO: 59240 - DNA, 405 bp, Neisseria meningitidis
atggccgaagggcaggatgtcgatttggtagagatttccccaactgctaaaccgcctgtgtgcaaactgatggattacggtaaatacaaataccaacaagccaagaagcgcgacgaagccaagaaaaaccaaaagcaggtgcaaatcaaggaaatcaaattccgtccgggtacggatgagggcgattatcaaatcaagatgcgcaacattaaccgcttccttgccgacggcgataaagtcaaagtgacattgcgttttcgcggccgtgaaatggctcaccagcaactcggcgcgcaacttttggaacgtgtaaaagaagatttggctgaagtggcgcaaatcgagtcctttcccaaaatggaaggtcgccaaatggtgatgatgattgcgccgaagaaaaaataa

SEQ ID NO: 59241 - DNA, 3435 bp, Neisseria meningitidis; identical to SEQ ID NO: 50915

SEQ ID NO: 59242 - DNA, 516 bp, Neisseria meningitidis
ttggccgtccaatcggcagaagacaaatatgccgatttgaaacagcatatccatgatatttatcgacgacataagggaagatacggctaccggaggattgcagcagccatccttcatgcaggaacaccggtcaatcacaagaaagtcagccgtctgatggcgaagacggggctgaaggcagtgatacggcggcgcaaataccgctcgttcaaaggagaagtcggcaaaattgcgccgaatatcctgcgacgctgtttccatgcagaaaagccgaatgagaaatgggtaacggacgttaccgagttcaatgtaggcggagaaaagatatacctttctccgattatggatttgtttaacggggaaatcgtcagttaccgtattcaaatccgcccgactttcgatttggccggcgagatactgaaaggtgcgccggagaaaccgggatcgtctgaaaagccgatactgcattcggatcaaggttggcaatatcagatgttttttatcaaaagcagttga

SEQ ID NO: 59243 - DNA, 1836 bp, Neisseria meningitidis; identical to SEQ ID NO: 51658

SEQ ID NO: 59244 - DNA, 1575 bp, Neisseria meningitidis; identical to SEQ ID NO: 43669

SEQ ID NO: 59245 - DNA, 669 bp, Neisseria meningitidis; identical to SEQ ID NO: 43279

SEQ ID NO: 59246 - DNA, 2751 bp, Neisseria meningitidis
atgaccgacgcaaccatccgccacgaccacaaattcgccctcgaaaccctgccggtaagccttgaagacgaaatgcgcaaaagctatctcgactacgccatgagcgtcattgtcgggcgtgcgctgccggacgttcgcgacggtctcaagccggtacaccgccgcgtactgtacgcgatgcacgaattgaaaaacaactggaatgccgcctacaaaaaatcggcgcgcatcgtcggcgacgtcatcggtaaataccacccccacggcgataccgccgtatacgacaccatcgtccgtatggcgcaaaatttcgctatgcgttatgtgctgatagacggacagggcaacttcggatcggtggacgggcttgccgccgcagccatgcgctacaccgaaatccgcatggcgaaaatttcccacgaaatgctggcagacattgaggaagaaaccgtcaatttcggcccgaactacgacggtagcgaacacgagccgcttgtactgccgacccgtttccccacactgctcgtcaacggctcgtccggcatcgccgtcggcatggcgaccaatatcccgccgcacaacctttccgataccgtcaatgcctgcctgcgcctgctcgatgcacccgacaccgaaatcgacgaactgatcgacattatccaagcccccgacttcccgaccggggcaaccatctacggcttgagcggcgtgcgcgaaggctataaaacaggccgcggccgcgtcgttatgcgcggtaagacccatatcgaacccataggcagaaacggcgaacgcgaagccatcgttatcgacgaaatcccctatcaggtcaacaaagccaagctggtcgagaaaatcggcgatttggttcgggaaaaaacactggaaggcatttccgagctccgcgacgaatccgacaaatccggtatgcgcgtcgttatcgagctgaaacgcaacgaaaatgccgaagtcgtcttaaaccaactctacaaactgactccgctgcaagacagtttcggcatcaatatggtggttttggtcgacggacaaccgcgcctgttgaacctgaaacagattctctccgaattcctgcgccaccgccgcgaagtcgttacccgacgtacgcttttccggctgaagaaggcacgccatgaagggcatattgccgaaggcaaagccgtcgcactgtccaatatcgatgaaatcatcaagctcatcaaagaatcgcccaacgcagccgaggccaaagacaaactgcttgcgcgcccttggcgcagcagcctcgttgaagaaatgctgacgcgttccggtctggatttggaaatgatgcgtccggaaggattggctgcaaacatcggcttgaaagagcaaggttattacctgagcgagattcaggcagatgctattttacgcatgagcctgcgaaacctgaccggcctcgatcaagaagaaattgtcgaaagctacaaaaacctgatgggtaaaatcatcgactttgtggatatcctctccaaacccgaacgcattacccaaatcatccgcgacgaactggaagaaatcaaaaccaactatggcgacgaacgccgcagcgaaatcaacccgttcggcggcgacattgccgatgaagacctgattccgcaacgcgaaatggtcgttaccctgacacatggcggctatatcaaaacccagccgaccaccgactatcaggcgcagcgtcgcggcgggcgcggcaaacaggcggctgccaccaaagacgaagactttatcgaaaccctgtttgttgccaacacgcatgattatttgatgtgctttaccaatttgggcaagtgtcattggattaaggtttacaaactgcccgaaggcggacgcaacagccgcggccgtccgattaacaacgtcatccagttggaagaaggcgaaaaagtcagcgcgattctggcagtacgcgagttccccgaagaccaatacgtcttcttcgccaccgcgcagggaatggtgaaaaaagtccaactttccgcctttaaaaacgtccgcgcccaaggcattaaagccatcgcgctcaaagaaggcgactacctcgtcggcgctgcgcaaacaggcggtgcggacgacatcatgctgttctccaacttaggtaaagccatccgcttcaacgaatactgggaaaaatccggcaacgacgaagcggaagatgccgacatcgaaaccgaaatttcagacggcatcgaagatgaaaccgccgacagcgaaaacgcactgccgagcggcaaacacggtgttcgcccgtccggtcgcggcagcggcggtttgcgcggtatgcgcctgcctgccgacggcaaaatcgtcagcctgattaccttcgcccctgaaaccgaagaaagcggtttgcaagttttaaccgccaccgccaacggatacggaaaacgcaccccgattgccgattacagccgcaaaaacaaaggcgggcaaggcaatattgccattaacactggcgagcgaaacggcgatttggtcgccgcaaccttggtcggcgaaaccgacgatttgatgctgattaccagcggcggcgtacttatccgcaccaaagtcgaacaaatccgcgaaaccggccgcgccgcagcaggcgtgaaactgattaacttggacgaaggcgaaaccttggtatcgctggaacgtgttgccgaagacgaatccgaactctccgacgcttctgtaatttccaatgtaaccgaaccggaagtcgagaactga

SEQ ID NO: 59247 - DNA, 2262 bp, Neisseria meningitidis
atgttacaaatcgaaatcgacggcaaacaagtatctgtggagcagggcgcgacggtgattgaagccgcgcacaagctcggtacttatattccgcatttctgttaccacaaaaaactttccatcgccgccaactgccgtatgtgtctggtgaacgtagaaaaagccccaaaacccctgcctgcctgtgccacgccggttacagacggcatgattgtgcgtacgcattcggcaaaagcccgagaggcgcaggaaggcgtgatggagttcctgctcatcaaccatccgcttgattgtccgacctgcgaccaaggcggcgaatgccagttgcaggatttggcggtgggctacggcaaaaccaccagccgctataccgaagaaaaacgttctgtcgtcggcaaggacatgggtcctttggtttccgccgaggaaatgagccgttgtatccactgtacccgttgcgttcgtttcactgaagaaatcgccggtttgcaggaaattgcgatggcgaatcgcggcgaacactccgaaatcatgccctttatcagcaaagcagtggaaaccgaattgtcaggcaacgtcatcgatttatgtcccgtcggcgcattgaccagcaaaccgttccgcttcaacgcgcgtacttgggaattgaaccgccgcaaatccgtttccgcccatgatgctttgggcagcaacctgattgtacaaaccaaagaccataccgtccgccgcgtgttgccgttggaaaacgaagccatcaacgaatgctggctgtccgaccgcgaccgttttgcctacgaaggcctgtatcacgaaagccgtctgaaaaacccgaaaatcaaacagggcggcgagtggatggacgtggattggaaaaccgcgttggaatatgtccgcagcgcgattgaatgtatcgccaaagacggcaaccaaaaccaagtcggcgtttgggcgaacccgatgaatacggttgaagagctgtatctggcgaaaaaactcgccgacggcttgggtgttaaaaactttgcaacccgtttgcgccaacaagacaaacgtctttcagacggccttaaaggtgcgcaatggttgggacaaagtatcgaatcgctggcggacaacgaagccgtattggtagtcggcgcgaacctgcgcaaagaacagccgctcctgaccgcccgcctgcgccgcgccgctaaagaccgcatggctttgagcgtattggcaagcagtaaagaagaattgtttatgccgcttctgtctcaagaagccgtacatcccgacgagtgggcaggtcgtctgaaaaacctgtctgccgatgcggaacacgccgttaccgccagcctgaaaaacgctgaaaaagcagcggtgattttgggcgcggaagtgcaaaaccatcctgattacgccgccatttatgccgccgcgcaagagctggcggacgcgaccggcgcagtgctgggtattttgccgcaagccgccaacagtgttggtgcggatgtcttgaatgtaaactccggcgagagcgttgccgaaatggcaaacgcgccgaaacaggcagtcttgctgctcaatgtcgagcctgaaatcgatactgttgacggtgcaaaagccatagccgcgttgaaacaggcgaaaagcgtgatggcgtttacgccgtttgtcagcgaaacgctgctggacgtgtgcgacgtgttgttgccgattgcaccgtttaccgaaacctcaggcagcttcatcaatatggaaggccgtctgcaatctttccacggcgtggtacaaggcttcggcgattcgcgtccgatgtggaaagtattgcgcgtattgggcaatctgtttgacctgaaaggttttgaatatcacgataccgctgcgattctgaaagacgcgctggatgcagaaagcctgccgtccaaactggacaaccgcaacgcatggacaggggagggcgttcagacgacctcagaccgcctcgtccgtgtcggcggcgtcggtatttatcacaccgattctatcgtgcgccgttccgcaccgttgcaagaaaccagccatgccgccgtgcctgctgcgcgtgtaaatccaaatacattggcacgcttgggcctgcaagacggacaaaccgctgtcgccaaacaaaacggcgcaagcgtatcggttgccgtcaaagccgatgccggactgcctgaaaacgtggtgcatctgccgctgcataccgaaaatgccgcgctgggtgcgttgatggacactattgaactggcgggagcttga

SEQ ID NO: 59248 - DNA, 606 bp, Neisseria meningitidis; identical to SEQ ID NO: 43702

SEQ ID NO: 59249 - DNA, 1185 bp, Neisseria meningitidis
atgagtttacacagcgacatcctcgtcgtcggcgcaggtccggcgggtttaagttttgcagccgaacttgccggcagcggtttgaaagttaccctgatcgaacgcagcccactgactgttctgcaaaatcctccatatgacggacgcgaaatcgccctgacccatttttcccgcgaaatcatgcagcgtctgggtatgtgggacaaaattcccgaaaatgaaatttaccctttgcgcgatgccaaagtgctgaacggacgttccgactaccagctccactttccccaaccgaccgaggcgcgcggcgaacctgccgactgtttgggctatctgatttccaaccacaatatccgacgcgctgcctacgaagtcgtatcccaactcgacaacattaccattctgaccgatacggttgtcaaagaagtcaaaacatctgacaacgaagcacaagtcattttggaaaacggcaaaatcctgactgcacgcctgcttttggcggcagacagccgcttctcgcaaacccgtcgacaactcggtatctcctccgatatgcacgattacagccgaaccatgttcgtctgccgtatgaaacataccctttccaaccaacataccgcttacgaatgcttccattacggacgcaccatcgcactgctgccgctggaagagcacctgaccaataccgtcattaccgtcgataccgataaaatcaacagcgttcaaaacctttcgcccgaagaattggcggcaagcgtaaaagaacagctcaaggccaggcttggcgacatggaactggtcagcagcatccaccattacccccttgtcggtatgattgccaaacgtttctacggcaaacgcagcgcgctgatcggcgatgcggctgtcggtatgcaccccgttaccgcacacggtttcaacttgggtctgtccagcgcagatattttggcaaaactgatactcgaagccgagcagcgcggtcaggacatcggcgcggcttccttgttggaaaaatacagcagcaaacatatgctgcatgcccagccgctttatcacggaaccaatatgatgctgaaactgtttaccaatgagaccgcgccggcaaaactgctgcgcggtttggtattgcgtgccggcaacaacttcccgccgctgaaaaaactgattaccaaacaactgaccggttga

SEQ ID NO: 59250 - DNA, 870 bp, Neisseria meningitidis; identical to SEQ ID NO: 43036

SEQ ID NO: 59251 - DNA, 633 bp, Neisseria meningitidis
atgaccctacgttacgaaatcctctccgttacccccttccgccaaaactgcaccctgatttgggacgacgaaagcggcgaagccgtcctgaccgatgtcggcggcgacgtgccgttcctgctgcaagcgttggcaaaccgcaaacttacgctcacggcaatctggctgacgcacggccatctcgatcacgcgggcggcgtggtcgaaatgttgaaaacgcataaagtccctgtcctcgggccgcatccggacgatgaattcctgctccaatcgctgccgcaaaccaccgcgcaatacggatttcctgtctcgcccgcctttgcgccgaaccgttggctcgaagaaggcgaaacgctcacggtcggacgctatgcctttcaagtgctgcatattccgggccatacgccgggacatatcgtcttttattgtgccgaggcggaattgctgattgcgggcgacgtgctgttttacgaaaccataggcagaaccgattttccgcgcggcaaccacgccgacttaatcaataatatccgcaacaaattattcgccctccccgaaaccgtgcaagttgtcgccggacacgggcgtatgacttccatcggacacgaaaagcggcacaatccgtttttctaa

SEQ ID NO: 59252 - DNA, 999 bp, Neisseria meningitidis
gtggcggcacatatcggacacattgatacggacgcgcctttgaaacccctgtacgtcatccacggcgaggaagaactgttgcgtatcgaggcattggacgcattgagggcggcggcgaagaaacaaggttaccttaatcgggaagtttatacggcagacaatgccttcgattggaacgaactgttgcaaaccgcaggcagtgcgggtctgtttgccgatttgaagctgttggaactgcatatccccaacggaaaacccggcaaaaccggcggcgaggcgttgcaggattttgccgcccgcctgccggaagatacggtaacgctggttttgctgcccaaactggagaaaacccagctccagtccaaatggtttgccgcattggcggcaaagggggaagtgtgggaagccaaaccggtcggcgcggcggccttgccccaatggatacgcggacggctggacaaaatcggtttgggtatcgaggcagacgcattggcactgtttgccgagcgcgtggaaggcaatttgttggcggcgcgtcaggaaatcgacaagctcgcgctgctgtatccgaaagggcataccgtcaatatcgatgaggcgcaaaccgccgttgccaatgttgcccgctttgacgtttttcagcttgccggcgcatggatgaagggcgatgtcccgcgcgtatgcaggcttttggacggattgcaggaggaaggcgaagaaccggtgctgcttctgtgggcggttgccgaagacgtgcggacgctgatccggcttgccgccgccttgaagcaggggcagagcatccaatccgtccgcaacggcctcaggctttggggcgacaagcagacgctcgcaccgcttgcagtcaagcggatttccgtcgtccgcctgcttgacgcgctcaaaacctgtgcccaaatcgaccgaatcatcaaaggcgcggaagagggcgacgcatggacggtattcaaacggcttgtcgtgtcgctggcggaataa

SEQ ID NO: 59253 - DNA, 486 bp, Neisseria meningitidis; identical to SEQ ID NO: 42873

SEQ ID NO: 59254 - DNA, 387 bp, Neisseria meningitidis; identical to SEQ ID NO: 42223

SEQ ID NO: 59255 - DNA, 885 bp, Neisseria meningitidis; identical to SEQ ID NO: 50330

SEQ ID NO: 59256 - DNA, 312 bp, Neisseria meningitidis; identical to SEQ ID NO: 39965

SEQ ID NO: 59257 - DNA, 1068 bp, Neisseria meningitidis
atgagaaaaatccttgttaccggcggtgcgggctttatcggttctgccgttgtccgtcatattatccgaaacacccaagattccgtcgtcaacctcgacaaactgacctacgcgggcaatctcgaatcgctgaccgacattgccgataatccccgctacgcttttgagcaagtggatatctgcgaccgcgccgaactcgaccgcatattcgcacaacaccagcctgatgccgtgatgcacttggctgcggaaagtcatgtcgaccgctctatcgattcggcaggcgaatttatccaaaccaatatcgtcggcacattcaacctacttgaagctgcgcgcgcctattggcagcaaatgccgtctgaacagcacgaagccttccgtttccaccatatttccaccgatgaagtctatggcgatttaggcggcacggacgatttgtttaccgaaaccacgccctacgcgccgtccagcccctactctgcctctaaagcgtccagcgaccacctcgtccgcgcgtggttgcgtacttacggcttgccgaccattgtaaccaactgctccaacaactacggtccttaccattttccggaaaaactcattcctttgatgattctgaacgcgcttgacggcaaaccgctgcctgtgtacggcgacggtatgcaaatccgcgactggctgtttgtcgaagaccacgcgcgcgcactgtatcaggttgttaccgaaggtgttgtcggcgaaacctacaatatcggcggccacaatgaaaaagccaatattgaagtcgtcaaaaccatctgcgccctgctggaagaactcgctcccgaaaaaccggccggtgtggcgcgttatgaagatttgattacttatgtgaaagaccgccccggccacgatgtgcgctatgcgattgatgcagcaaaaatcggccgcgagttgggttggcagccgcaggaaacttttgaaagcggcattcgcaaaacagtggaatggtatctggacaacaaaacctggtggcaaaatgtattgaacggcagctatcgtttggaacgtttaggtactggaaaatag

SEQ ID NO: 59258 - DNA, 390 bp, Neisseria meningitidis
atgtggaaaatcataaaagaggatagtgatgatttaggatttgcaattaaatgcttattctctcaatctattgatttaaatgaattcaagttatggattgaacaagtaatacgcgatatgcccatcgaggacatccctttttatatttttgacttggcggatttcgatgtaggaattggcgatattggcaatattgtaggttttgctccgagttccagcctgccgaaatcgaaaaaaaatgccttgaccggcattgccttcttaagggggatagatgtctatgaccctcccgtttcaaaagaaaaagcattaaaagccttagagaaatatcctgaaatttatcagaaatttcagcatttctttccgtttgtagagctgcctccgctttaa

SEQ ID NO: 59259 - DNA, 747 bp, Neisseria meningitidis
atgaaaagcagcacgcaggccgttttggaacacaccgccatccccaagcatatcgccgtgattatggacggcaacggccgttgggcgaaaaagcgtttcctcccgcgcataatgggacacaaacgcggtttggacgcattggaaaatatggtgaagcattgcgccaaactgggtgtgcaatatctgaccgtgtttgccttttcaaccgaaaactggcgccgccccgaagacgaagtttcgttcctgatggggctgtttttacaggctttgcaaaaacaggtacgccgcctgcacgaaaacaatatgcgcctgaaaatactgggcagccgcgaacgcttcagccgtcaaatcctgaagggcatcgaagaggcggaggcgttgacggcaaacaataccggtctgaccctgagcattgccgccgattacggcggcagatgggacattttgcaggcggcaaacaaactgattgccaaaggcgtatccgagattacggaagacacgctggcgaaacacttgatgctgggcgatgcgcccgagccggatttgttcatccgcaccggcggcgaaacgcgcatcagcaatttcctgctctggcagatggcatatgcagaactgtatttcaccgatattttgtggcccgattttgacggcaaggctttggacgatgccgtcgcttcgttccaaaaacgcgaacggcggttcggacgcacctccgagcaactgcctatcgaacagcaaaggaactga

SEQ ID NO: 59260 - DNA, 1692 bp, Neisseria meningitidis
atgagcgcatcacaattactgtcaagactgacccaaaccgtaggcgaaaaatacatcatcaccgaccccgcgaaaaccgaacaataccgccaaggttaccgcttcggcgagggtaaggcgttggcggtggttcgccccggaagcattctggaaatgtggaaaattctgcaggcgtgcgtcgaagcagacgtgattgtgattacgcaggcggcgaataccggtttgacgggcggctcgacccccgacggcaacgattacgaccgcgacatcgtgatagtgaacactatgcggatgaacatcatccaaaccatcaacaacaacgaacaagtcgtctgcctgcccggctcgaccctgaaccagctcgaattgctgctgaaacctttggggcgcgaaccgcattcggttatcggctcatcctgtatcggcgcgtccgtcttgggcggcgtgtgcaacaactctggcggcgcgttggtacagcgcggcccggcctacaccgaaatggcgttgttcgcccaaatcaacgaagaaggcaggttggaactggtcaaccacttgggcatagacttgggcaacacgcccgaagaaatcctgaccaatcttcaaggtcatcattatcaaaacaaagacatcacgcaagacgcgggcaaaggacacgaccacgcctattgcgaacatgtccgccaagtggacgaaccgaccgccgcgcgtttcaatgccgacccagcgcgccattacgaagcctcgggctgcgcgggcaagctgatggtattcgccgtccgcttggatacctttccgcaagaaaaacaaacggccgtgttctacatcggcacgaacgacatcaacgagctgaccgacatccgccgcgccgccttgggcgaatttgaaagcctgcccgtttccggcgaatacatccaccgccacgctttcgacattgccgacgtgtacggcaaagatacgttttacgtcatcaaaaaattcggtacgcaccaactgccgaaattatttgatttgaaggcacgcgtggacaggttcggcaaaaaagtcagcttcctgcccaaacatttttccgacaaggcaatgcagttcgtcagcaaattcctgcctgaccatctgcccaaatccatgcgcgattaccgcgacaaatacgaacaccacctgattctgaaaatgggcggaaaaggcgtggatgaggcgcgcgcgttcctgaaagagtattttgcacatcacggcggcgcgtttttcgagtgcaacgccgaagaaacccaagccgcgatgctgcaccgtttcgccgtcgcctcagccgccatccgctaccgtgccgtacacgacgacgaagtggaggacttggtcgcgcttgacatcgccctgcgccgcgacgaccgcgactggtttgaaaaactgccgccggaaatcgacaataaaatcatccacaagctctactacggacatttcatgtgccacgttttccatcaggattacatcatcaaaaaaggcaacgactgcatggcattggaacacgaaatgctgcatctcttggatcaacgcggcgcgcaatatccagccgaacacaacgtcggccatttgtacgaagccaagcccgcgctcaaacagttttaccgcaaacttgacccgaccaacagcttcaacccgggcgtaggcaaaaccagcaaaaagaaaaactgggcggaataa

SEQ ID NO: 59261 - DNA, 639 bp, Neisseria meningitidis; identical to SEQ ID NO: 52442

SEQ ID NO: 59262 - DNA, 717 bp, Neisseria meningitidis; identical to SEQ ID NO: 43534

SEQ ID NO: 59263 - DNA, 1173 bp, Neisseria meningitidis
ttgataaccggcacgcccggttcagggaaaacattaaaaatggtttccatgatggcaaacgacgaaatgttcaagccggatgaaaacggcataagccgtaaagtatttacgaacataaagggcttgaaaataccgcacacctacatagaaacggacgcaaaaaagctgccgaaatcgacagatgagcagttatcggcgcatgatatgtacgaatggataaagaagcccgaaaatatcgggtctattgtcattgtagatgaagctcaagacgtatggccggcacgctcggcaggttcaaaaatccctgaaaatgtccaatggctgaatacgcacagacatcagggcattgatatatttgtattgacacaaggtcctaaactcttagatcagaacttgcgaacattggttaaaagacattaccacattgcggccaacaaaatgggtttgcgtaccctgcttgaatggaaagtatgcgcggatgacccggtaaaaatggcatcttctgcattttccagtatctacacactggataaaaaagtttatgacttgtacgaatccgcagaagttcacacggtaaacaaagtcaagcgttcaaaatggttttatgcattgcccgtcatcatattattgattccgctatttgtcggtttgtcttacaaaatgttgagcagttacggaaaaaaacaggaagaacccgcagcacaagaatcggcggcaacagaacagcaggcagtacttccggataaaacagaaggcgagccggtaaataacggcaaccttaccgcagatatgtttgtcccgacattgacggaaaaacccgaaagcaagccgatttataacggtgtaaggcaggtaaaaacctttgaatatatagcaggttgtgtacaaggcggaagaaccggatgcacctgctattcgcatcaagggacagcattgaaagaagtgacggagttgatgtgcaaggactatgtaaaaaacggcttgccgtttaacccatacaaagaagaaagccaagggcaggaagttcggcaaagcgcacagcaacattcggacagggcgcaagttgccacgttgggcggaaagccgctgcaaaatcttatgtatgataattggcaggagcgaggaaaaccgtttgaaggaatcggcgggggcgtggtcggatcggcaaactga

SEQ ID NO: 59264 - DNA, 1263 bp, Neisseria meningitidis
atgtcaaacacacaaaaacagcttgcccttgccaaagcggcaaaaaaatccgtcaacacggcggatacggaagaaaaaaaccgcgcgctgtttgctatggcggacagcttggaagcggcggcggcagatattttggcggcaaaccgtcaagacttggaagccgcggcaggcaacattcccgaaagcatgaccgaccgccttttgttggacggcaaacgcatttgcgcgatggcggacggcatcagggcggttgccgcgctgcccgaccccgtgggcgaaatactggaaacctcgactttgcccaacggcttggaaatcgtcaaaaagcgcgtggcgatgggcgttatcggcattatttacgaaagccgcccgaacgttacgtccgatgcggcggctttggcactgaaaagcggcagcgcggtcgtactccgcagcggcaaagatgcattccaatccgcacgcgccatcgttgccgccctgaaaacggggttggcacaaacccgcatcgaccccgacgcgctccagttgattgaagacacagggcgtgagggcagttacgaaatgatgagggcgaaagattatctagacctgctgattccgcgcggcggggcggggctgatacgggcggtggttgaaaatgccgttgtgccggtcattgaaacgggaacgggcattgtccacatttatatcgacaaggacgctgattgggataaggcactccgtatcgtgtacaacgccaaaaccagccgtccgtccgtgtgcaactcgatggaagtgctgctggtacatgaagacattgctgccgacttcctgcccaagctcgaacggctgttggttcgcgaccgtatagaagccggactgccgcccgtccgcttccgtttggatccgcaggcggcgcggcatatcggcggcgaagcggcgggtgcagacgatttcgataccgagtttttagactacatcctcgccgtgaaaaccgtcgcttcggtcgaagaggcggtcgggcacatcgaaacccacggcacgcaccattcagacggcatcgttaccgaaaaccgccacgctgcggactatttcacgacccatatcgattctgccgccgtgtatgtcaacgcgtccacgcgctttaccgacggtggcgaattcggcttgggttgcgaaatgggcatctccacgcaaaaactccacgcccgaggcccgatgggcttgaaagagctaacgagttataaatacatcgtacaaggcacgggacaggtcagggaataa

SEQ ID NO: 59265 - DNA, 567 bp, Neisseria meningitidis
atgccgtctgaagcctgttggcgtttcagacggcatattctgattgaaaagatgatgacactgaaaaccgccccgctcaaacgccgctttgccgccatgctgtacgaaatgctgctggtcggtgcggcaacctgtttggcagcattgtttgccggtattgccgccatttttctgaatcccgtttctatcgcggtttctgcattggtaacaagtatcctgataatgggatcatggtggctttattttcgcgccaactggcacggtcaggggcagaccttggcgatgaggacatggaaaatcggcttgtgcgaccttaacggcatacagccgtctttgtacctgctgcgcctgcgctttatttgggcgtgcatattcatcgtatttatccctatgttagcctatgccggattacgccacctgctcggtatttcacccaaggatgcattcggtgcggcattgatttggctgattttaccgtgggggtttgccctgctgaatcccgatcggcagtttctgtatgattttcttgcaggaacaagattggtggcggtcaaaggaaagccttaa

SEQ ID NO: 59266 - DNA, 2058 bp, Neisseria meningitidis
atgacacgcaaaatcctcgttacctccgccctgccctatgccaacggcagcatccacctcggccacatggtcgaacacatccaaaccgacgtttgggtgcgctttcaaaaactgcgcggccacgagtgccactactgctgcgccgacgacacccacggcacgcccgtgatgcttgccgcgcaaaaacaaggcatcgcgcccgaagacatgattgccaaagtgcgcgaagagcacctcgccgactttactggctttttcatcggttacgacaattattacagcacccattcccctgaaaacaaacagttttcccaagacatttaccgcgcgctgaaagccaacggcaagattgagagccgcgtcatcgagcagcttttcgaccccgaaaaacaaatgttcctgcccgaccgcttcgtcaaaggcgaatgcccgaaatgccacgcccaagaccaatacggcgacaactgcgaagtctgcggcacgacctattccccgaccgaactgattaatccgtattccgccgtttccggtgccaaacccgaattgcgcgaatccgaacacttcttcttcaaactggacgaatgcgccgacttcctcaaagcatggacttccggcaacaatccgcacgacggcaagccccatctgcaacccgaagccctcaacaaaatgaaagaatggctgggcgaaggcgaagaaaccaccctgtccgactgggacatttcccgcgacgcgccgtatttcggttttgaaatccccgacgcgccgggcaaatacttctacgtctggctggacgcgcccgtcggctacatggcatcgtttaaaaacctgtgcgaccgcatcggcatcgattttgacgaatacttcaaagccggcagccaaaccgagatgtaccacttcatcggcaaagacatcctctatttccacgccctgttctggcccgctatgctgcatttctccggccaccgcgccccgaccggcgtgtacgcacacggctttttgaccgtcgacggacaaaaaatgtccaaatcgcgcggcaccttcatcaccgcaaaatcctatctggaacaaggcctaaaccccgagtggatgcgctactacatcgccgccaaactcaacagcaaaatcgaagacatcgatttgaacctgcaagactttatctcgcgcgtcaacagcgacctcgtcggcaaatacgtcaacatcgccgcccgcgcgtcaggtttcattgccaaacgctttgaaggccgtttgaaagacgtcgccgacagcgcattattggcaaaactgaccgcacaaagcgaagccattgccgaatgctacgaaagccgcgaatacgccaaagccctgcgcgacatcatggccttggcagacattgtcaacgaatacgttgatgccaacaaaccttgggaactcgccaaacaagaaggccaagacgaacgcctgcacgaagtatgcagcgaactcatcaacgcctttaccatgctgaccgcctacctcgcccccgtgttgccgaaagtggccgaaaatgccgccaaattcctgaatttggaagccatcacttgggcaaatacacgcgaaaccttgggcaaacacgccatcaacaaatacgaacatttaatgcaacgagtggagcaaaaacaagtggacgatttaatcgaagccaacaaacaaagcatcgccgccgcagccgtgcctgccgccgaagagggcaaatacgaaaaagttgccgaacaggcgagtttcgacgactttatgaaaatcgacatgcgcgtcgccaaagtattgaactgcgaagccgtcgaaggcagcaccaaactcttaaaattcgacctcgatttcggttttgaaaaacgtatcatcttctccggcatcgccgcgttttaccccaaccctgccgagttaaacggaagaatggtcatcgccgtcgccaacttcgccccgcgcaaaatggcaaaattcggcgtatccgaaggcatgattttgagtgccgccacggcagacgggaaactgaagctcttggatgtggatgcaggcgcgcaaccgggcgacaaagtcggttaa

SEQ ID NO: 59267 - DNA, 357 bp, Neisseria meningitidis; identical to SEQ ID NO: 36545

SEQ ID NO: 59268 - DNA, 1266 bp, Neisseria meningitidis
atgttcagcttcttccgtcgcaagaaaaaacaggaaactccggctcccgatgaggctcaaattcaggaaaccgcagcaaaagcagagtctgaagttgctcaaatagttgaaaatattaaagaagatgctgaatctttaacggaaagcgtcaaagggcaggtcgaatctgccgttgaaaccgtcagcggtgcggttgaacaggtaaaggaaaccgttgccgagatgctgtctgaagcagaggaagcggcggaaaaagcagcggaacaagtcgaagcggcgaaagaagctgttgccgaaaccatcagcgaggctgtcgggcaagttaaagaagacgttgcgacaactgaagaacacaagctcagttgggcggcgcgtttgaaacaaggtttgaccaaatcgcgcgacaaaatggcgaaatcgctggcgggcgtgttcggcggcggacaaatcgacgaagatttgtacgaagagctggaaaccgtgctgattaccagcgacatgggcatggaagccaccgaatacctgatgaaagacgtgcgcgaccgcgtcagcctcaaagggctgaaagacggcaacgaattgcgcggcgcgttgaaagaagccttgtacgacctgattaagcctctggagaaacctttggttttgcccgaaaccaaagagccgtttgtcatcatgcttgccggcatcaacggcgcgggcaaaaccacgtctatcggcaaactcgccaaatatttccaagcgcagggcaaatccgtattgctggcggcaggcgatactttccgcgccgccgcgcgtgagcagcttcaagcttggggcgagcgcaacaacgttaccgtgatttcgcaaaccacgggcgattccgccgccgtgtgcttcgatgccgtccaagccgccaaagcgcgcggcatcgacatcgtgcttgccgacaccgccggccgcctgcccacgcagcttcatttgatggaagaaatcaaaaaagtgaaacgcgtgctgcaaaaagccatgcccgacgcgccgcacgaaatcatcgtcgtgcttgatgccaacatcgggcaaaacgccgtcaaccaagtcaaagcctttgacgacgcattagggctgacggggcttatcgttaccaaactcgacggcacggcaaaaggcggcatcctcgccgcgcttgcctccgaccgcccagttcccgtccgctacatcggcgtgggcgaaggcatagacgacctgcgcccgtttgacgcgcgcgcgtttgtggacgcactgctggattga

SEQ ID NO: 59269 - DNA, 699 bp, Neisseria meningitidis
atgaaatccagacacctcgccctcggcgttgccgccctgttcgcccttgccgcgtgcgacagcaaagtccaaaccagcgtccccgccgacagcgcgcctgccgcttcggcagccgccgccccggcagggctggtcgaagggcaaaactataccgtccttgccaacccgattccccaacagcaggcaggcaaagtcgaagtccttgagtttttcggctatttctgtccgcactgcgcccacctcgaacctgttttaagcaaacacgccaagtcttttaaagacgatatgtacctgcgtaccgaacacgtcgtctggcagaaagaaatgctgacgctggcacgcctcgccgccgccgtcgatatggctgccgccgacagcaaagatgtggcgaacagccatattttcgatgcgatggtcaaccaaaaaatcaagctgcaaaatccggaagtcctcaaaaaatggctgggcgaacaaaccgcctttgacggcaaaaaagtccttgccgcctacgagtcccccgaaagccaggcgtgcgccgacaaaatgcaggagctgaccgaaaccttccaaatcgacggtacgcccacggttatcgtcggcggtaaatataaagttgaatttgccgactgggagtccggtatgaacaccatcgaccttttggcggacaaagtacgcgaagaacaaaaagccgcgcagtaa

SEQ ID NO: 59270 - DNA, 771 bp, Neisseria meningitidis; identical to SEQ ID NO: 42376

SEQ ID NO: 59271 - DNA, 1005 bp, Neisseria meningitidis; identical to SEQ ID NO: 38281

SEQ ID NO: 59272 - DNA, 561 bp, Neisseria meningitidis
ttgtactgtctgcggcttcgtcgccttgtcctgatttttgttaatccactatatctgcatcagtttcatgaaacgcaagtcggaagcgtcaaacaactgattgcccattttgaccggctgattgacgaattggacaaacaaatcgacgaccacacccacacgcattttgacggcaaagcccaagtggcagaacaaatcaaaggcatcggttcgataacgacggctacgctgatggcgatgctgcccgaattgaggcggctgtcgcacaaacggatagcgggtttggccggcattgccccgcacccgagggagagcggggaaaccaaattcaaaagccgctgctttggcggaaggtctgcggtgcgtaaggcactgtatatggctaccgtggcagcgacacgttttgaaccgcttattcgggatttccaccaacgcccgctgtccgagggtaagccgtataaggttgccgttacggcatgtatgcgcaaactgctgacgatatcgaatgcccggatgcgtgattattttgccgaaaacgataccgccgaaaacggtatctaa

SEQ ID NO: 59273 - DNA, 396 bp, Neisseria meningitidis; identical to SEQ ID NO: 50850

SEQ ID NO: 59274 - DNA, 1221 bp, Neisseria meningitidis; identical to SEQ ID NO: 44162

SEQ ID NO: 59275 - DNA, 2376 bp, Neisseria meningitidis
atgaataaaaatattaaatctttaaatttacgggaaaaagacccgtttttaagtcgtgaaaaacagcgttatgaacatcctttgcccagtcgggaatggataatcgaattgttggagcgcaaaggtgtgccttcaaaaatcgaatcgcttgcgcgcgagctgtcgattacggaagacgagtatgtcttttttgaacgccgtctgaaggcgatggcgcgggacggtcaggttttaatcaaccgccggggcgcggtttgcgcggcggacaaattggatttggtcaaatgccgtgtcgaggcgcacaaagacggcttcggtttcgccgtgccgctcacgcccgccaaagacggtgattttgttttgtacgaacgccagatgcgcggcattatgcacggcgatattgtcactgttcgtcctgccggcatcgaccgcagggggcggcgggaagcggtggttttggatattgtcgaacgcgcgcaaagcaaagtggtcgggcgtttctatatggatcgcggcgtggcggttttggaagcggaagacaagcgtctgaaccaaagcatcgtattggaaccggacggcgtggcgcgtttcaaacctgaatccggtcaggtcatcgtcggcgaaattgaggtttatcctgagcaaaaccggccggcagtggcaaaaatcatcgaagttttgggcgattatgccgacagcggcatggagattgaaattgccgtgcgcaagcatcatttgccgcaccaattcagtgaagcgtgtgccaaagccgcgaaaaaaattcccgaccatgtacgcaaaagcgatttgaaaggccgcgtcgatttgcgcgacctgcctttggtaacgatagacggcgaaacggcgcgcgattttgacgatgccgtgtttgccgagaaaatcggacgcaattaccgtctggtcgtggcgattgccgatgtcagccattatgtccgccccgatgacgctatcgacacggacgctcaggaacgcagcaccagtgtttacttcccgcgccgcgtgattcccatgttgccagaaaacctgtccaacggcatctgctcgctcaatcctaatgtcgagcgtttgtgtatggtgtgcgatatggtcatcacttacgcgggcaatattaaagaataccgcttctaccccgccgtgatgcgctctcatgcccgcctgacctacaaccaagtttggaaatggctttcaggcggcatcgggcatccgttcaaagcccaaatcgacacgctttacaaactcttcaaaatccttcagaaaaagcgtttcgaacgcggggcggtggagtttgacagcatcgaaacccaaatgcttttcgacgacaacggtaaaattgaaaaaatcgtgcccgtcgtccgcaacgatgcccacaagctgattgaagaatgtatgttggcggcaaacgtttgcgcagcggattttctgttgaaaaacaagcataccgcattgttccgcaaccatttggggcccacgcccgaaaaactcgccgccttgcgcgagcagctcggtctgttggggcttcaacttggcggcggcgacaacccgtcgccgaaagactatgccgcgcttgccggacagttcaaaggcaggccggatgccgaattgctgcaagtcatgatgttgcgctccatgcaacaggcggtttacgaaccgcattgcgacggacactttggtcttgcctacgaagcatacgcccacttcacctcgcccatccgccgctatcccgacctgaccgtacaccgcgccatcaaagccgtgttgaatcagcaaacctacacgccaaaaaaaagctggcaggctttgggcgtgcatacctcgttctgtgagcgccgtgccgacgacgccagccgcgacgtggaaaactggttgaaaacctattatatgcgcgataaggtcggcgaagtattcgaaggtaaaatctccggcatgaccagttttggtatctttgtaacactggacggcatccacattgacggcttggtgcatatcagcgatttgggcgaagactatttcaacttccgccccgaaatcatggcaatcgaaggcgaacgcagcggcatccgtttcaacatgggggacagggttgccgtccgggtcgcccgtgccgatttggatgatggaaaaatcgattttgtcctgattgccgaggggagcggcagggggcggaaagttaaatcatccgcgtctgccaaaccggcagggacggcggggaaagggaaaccgaaaaccgccgccgagaaaaaaacagcccgaggcggcaaagtaaggggaaggggcgcgtctgccgccgcagaatcggggaaaaaggcaaagaaaccggttccgattaaggtaaaaaaacggaaaggcaaatcataa

SEQ ID NO: 59276 - DNA, 2853 bp, Neisseria meningitidis
atgaaactgtccgaactgttcaaccccgacgaatttgccgcgcggcatttgagtttcggcgacgaagcggcgttgcttgccgctgtcggcgagaaaagtatggacgattttgtcggcaacaccgtgccgcaaagcatccgtatgccgtctgaactcgatttgcccgatgccctgaccgaagcggacgcgttggcaaaattgaaaggcattgcgtcgaaaaacgtgatcaacaagtcctatatcggtttaggctattacccgacccgcgtgccgaatgtgattttgcgcaacgtattggaaaatccgggctggtataccgcctacacgccgtatcaggcggaaattgcccagggtcgtttggaagctttgttgaacttccaacaagtgtgtatcgatttgaccggtttccctgtggcgggcgcgtctttgctggacgaagcgaccgccgccgccgaagcgatggcgatggcgcaccgcgtgggcaaggtaaaatccgagcgtttctttgtggacgagcgcgtgtatccgcaaactttggacgtgatgaaaacccgtgccaagtatttcggcttcgagctggtggtcggcgattttgccaaagcggatgaaggcgaatacttcggcgcgctgttccaatacgtcggcaaagacggcgatgtgcaagacttgcaggacgttatcggccgtctgaaagccaaaggcacaatcgtggccgttgccgccgacattatgagcttggttttgctgaagtctccggctgaattgggcgcggatattgctttgggcaacacccaacgcttcggcgtaccgatgggcttcggcggtccgcatgctgcttatttcgcgtttaaagacgagttcaaacgttccgccccgggccgtatcatcggcgtatccaaagacgcatcgggcaaacctgccttgcgcatggcgttgtccacccgcgagcaacacatccgccgcgaaaaagcgacatccaatatttgtaccgcgcaggcattgctggcgaacttggcgggtatgtacgccgtttaccacggccctgaaggtgtgaaacgcatcgccaaccgcattcacgcgctggcttctgcctttgccgatgcgctggtttcagacggcctgaatgtggttcataaggtcttcttcgataccgttaccgtcgatttcggcaacaaagagaaagcagaccaagtgtttgccgctgctttggaatcgggctataacctgcgccgcgttaacgatactcaagttgcggctgcattccacgaaacatcggcatgcgaagatttggttgatttgtaccgcgcgtttaccggcaaggatacgttcgcatttgccgatgatgtcaaaggccgtctgaacgccgaactgctgcgtcaagacgacattctgcaacatcctgtgttcaacagttaccacaccgaacacgaaatgctgcgctacctgaaaaaactcgaagaccgcgacttggcgatgaaccgcagtatgatttcattgggcagctgcaccatgaaactcaatgcgactgcggaaatgctgccgattacttgggcggagttctccgacatccacccttacgctcccgaagcgcaaaccgccggctaccgcgaattgcttgccgacatggaaaacagcctgaaagccatcaccggctttgacgcgatttccttccagcccaactccggcgcgcagggcgaatacagcggtatgctctccatccgccgctatcaggaagccaacggcgagggacaccgcaacatctgcctgattcccaaatccgcccacggcaccaaccccgccaccgccgccatgctcggtttgaaagtcgtcgtcgtcgataccgacgaacacggcaacgtcaacatcgacgatttgaaagccaaagccgaacaacaccgcgacgccttgtccgccatcatgattacctacccgtccacccacggcgtatacgaagaaggcatccgcgacatctgccgcatcatccatgaaaacggcggacaggtttacatggacggcgccaacctcaacgctcaaatcggtatcatgcagcctgccgaagtcggcgcggacgtgttgcacatgaacctgcacaaaaccttctgtatccctcacggcggcggcggcccgggcatgggtccgattggcttgaaagcccacctcgccccgttcgcactaggacacgctttgaccgacacccacagcacaagtgccgagcaaaccgccgtggctgccgcagcatatggttctgcatccatcctgccgattacttggatgtacctgaccatgatgggcaaacaaggcatggaacaggcgacacgctgggcattgctcaacgccaactacgtcgccaaacggctgggcgaagactatccgattctgtacacaggcaaaaacggccgcgtcgcgcacgaatgtatcgttgatttgcgtccgctcaaagccgaaagtggcattaccgaaaccgacatcgccaaacgcctgatggactacggcttccacgcgccgacggtttccttccccgttgccggtacgctgatgatcgagccgaccgagagcgaaagcaaagccgaactcgaccgcttcatcgccgccctgaaacaaatcaaacaggaagtgctgaaagtcgggcgcggcgaatggccgaaagacgacaacccactggtcaacgcgccgcacaccgccgcagatataaccggcgactgggcgcgcccgtattcccgcgaagaagccgtcttcccgctgcccttcgtgcgcgaacacaagttttggcccttcgtcaaccgcgtggacgacgtgtacggcgaccgcaatctcgtgtgcagctgcccaccgatggaaaattatgaagactga

SEQ ID NO: 59277 - DNA, 1176 bp, Neisseria meningitidis; identical to SEQ ID NO: 51635

SEQ ID NO: 59278 - DNA, 693 bp, Neisseria meningitidis; identical to SEQ ID NO: 40219

SEQ ID NO: 59279 - DNA, 273 bp, Neisseria meningitidis; identical to SEQ ID NO: 50472

SEQ ID NO: 59280 - DNA, 657 bp, Neisseria meningitidis; identical to SEQ ID NO: 53308

SEQ ID NO: 59281 - DNA, 642 bp, Neisseria meningitidis; identical to SEQ ID NO: 43107

SEQ ID NO: 59282 - DNA, 2298 bp, Neisseria meningitidis
atgcttgcacccgaattggaacagattttgcagcagctttaccgcgaggcgcgtaaggctcattatgaatttatcagcctcgagcatctgcttttggtactcatcgaagaagatgcctccgtgccgaacgtcttaaaactatgcggcgcggatttgaaagtggtgtccgaacagctcgccgccagcgttgccgaaaacacccccctgattcccgaacaccttttagacacggtcgaaacacggcccacgctcggcttccaacgcgtgatgcaacgggcgatggtgcatacccagtctgccggaaaagccgcagtcgaaccgttggacgttttggtcgcgctgatgagcgaaaccgacagccacaccgtctatttcctcaagctgcaatcggttacgcgttttgaagttttgcgctgtattgcccacggctctcccgatgaagatgaagatgaagacgatggcaactattcttcagacggcatggacgacgataatgaaaaccgcaccaaaccgggcaaaaaccctttatcggcgtacaccgtcaacctcaacgccgaagtcaaagccggccgtatcgaccctttgattggtcgcaaacacgaaatggaacggctggtgcaaatcctatgccgccgccgcaaaaacaatccgcttttggtcggcgaagcgggagtgggcaaaaccgcgctggcggaaggtttggcacatcaaatcgtcaacggcggcattccagacgcgctcaaagatgccgaagtgtacgcgctggatatgggctcgctgttggcgggcacgaaataccgcggcgactttgaagcgcgggtcaaatccgtcttgaaacagctcgaaaaaatcccgcacgccattttgtttatcgacgaaatccacaccatcatcggcgcgggcagcaccagcggcggcaccatggacgcgtccaacctgctcaaacccgcgctggcaaaaggttcgctgcgctgcatcggcgcgaccacctacgacgaataccgcaccattttcgacaaagaccatgccttaagccgccgcttccaaaaaatcgacgtggtcgaacccaccgtttccgaaaccgttcaaatcctgcgcggcttgaaaccgatgtttgaagccttccaccaagtccgctacactcaaggcgcactcgaagccgccgccgaactctccgcacgctacatcaacgagcgtttcctgcccgacaaagccatcgacgtaatggatgaagcaggcgcggcgcaacggattctgcccaaatccaaacagaaaaaagtcatcggcaaagcacaaatcgaaaccgtcatcgccaaagtttcgcggattcccgaaaaaaccgtgtcgcacgacgacaaacaagtgctgcaattcctcggtcgcgatttgaaaaacatggtttacggtcaagaaaacgccatcgacgcgctggttgccgccgtcaaaatgtcgcgttccggccttgccctgcccgacaaaccgataggcagcttcctcttctccggcccgaccggcgtgggcaaaaccgaagccgccaaacagcttgcctactcgctgggcgtaccgctgcaacgctttgatatgtccgaatacatggaacgccatgccgtatcgcgcctcatcggcgcgccaccgggctacgtcggctttgaacaaggcggccttttgaccgaagccgtcaacaaacagccgcattgcgtattgctcttggacgaaatcgaaaaagcccaccccgacattttcaacgtcctcctgcaagtcatggacgcaggcaaactgaccgacaacaacggcaagagtgccgatttccgcaacgtcatcctgattatgaccaccaacgcaggcgcggaaagcctcagccgccccagcctcggctttaccgccaagcgcgaacgcggcgacgaaatgcaggcaatcaacaagctcttcacgcccgagttccgcaaccgcttggacgcgattatcccgtttgcacccttgtccgaacccatcatcgtcaaagtcgtggacaaattcctgctccagctcgaacaccagctcctcgacaaaaaagtcgaagccgaattcacgtcggcattgcacaaatatctggcggaaaaaggtttcgacccgcaaatgggcgcgcgcccgatgcaccgcctgattcaggaaaaaatccgcaaaccgctcgccgacgaactcctgttcggcaaactatccgacggcggcttcgtgcggatagactgggatgcggcaaaagaagaagccgtgttgaagtttaagaaaagcaaggtcaaaataaaaaccgcctccgcgtaa

SEQ ID NO: 59283 - DNA, 1281 bp, Neisseria meningitidis; identical to SEQ ID NO: 50418

SEQ ID NO: 59284 - DNA, 180 bp, Neisseria meningitidis
atgttttggtatgtgattggcttttgcgcctttgtcgtcgcgctgctgtcgctgtgggtcaatgccggcgcgttcggtatgcaggaagacgataccccgcaatcggattatgaaaggcgtttgggcttgggtgcgaagctgaaaaacaaaaatccggatacggacgaaaaacggcaataa

SEQ ID NO: 59285 - DNA, 711 bp, Neisseria meningitidis
atgctgtttgaaggcttgccgtgtttggcggtttggtgcaaaaaccggctgtctgccgttttgcctgttggaggattgaacgtgtctgaaaatctgcttgaaatcgaaacccatcccttcgattccgtgttgccgccgaaggctgcggtcatgatgatggggacgtttccgcccaaggaagacaaacgcgcgatgcagtttcattatccgaatttccaaaacgatatgtggcgcgtttacgggctggtgtttttcggcgatgcggattatttcaaagtgccgtccaacggggaggctgcgcactctgaaaaagcgtttgatgccgagaaaatcaaggcgtttttgcacgaacgggggattgcgtcctgtccgaccgttttgaaggcggtacgtcagcacggcaatgcgtccgacaagtttttaaaggtagttgaaaccgttgatttggcggcggtgttggcgcagatgcccgagtgccgccatatttgtacgacaggcggcaaggcgacggaaatcctgctcgatattcagggtggcggcatcaaaatgccgaaaacgggcgaaaccgtgccgtttccgtttgccggacgggatttgaccctgacgcgcctgccttcgacttcgcgtgcctatcctttgagtttggcgaaaaaggcggcggcgtatcgggcgtttttcgaaatggcgggtttgtgtgaaaaacagttataa

SEQ ID NO: 59286 - DNA, 810 bp, Neisseria meningitidis
atgattcaagacacccgaccccttatccgcgtcgttgccggcatcctgctcgattcagacggcaactacctgctcagctcgcgccccgaaggcaaaccctatgccggatattgggaatttgccggcggcaaggtcgaagcgggcgaaaccgacttccaagccttgcaacgcgagtttgaagaagaactcggcatccgcatcctcgccgccacgccttggctgaccaaaatccattcctacgaacacgcccgcgtctgcctgaaattcctatgggtaaaccccggccaatggacgggcgaaccgcaatcgcgcgaaggacaggcatggtcgtggcagaaggcgggtgattttaccgttgcccccatgctgcccgccaacggcgcgcttttgcgttcgctgtccgtcccgcgccgtttgtacggcagcctgaaaacgggtttgcacggagaaaacagtatgggcgcgtaccgcgtcctgcctttgggttcggcagagggaagcggtgcgaacgttttgatggaggcggcgcaatggcaggacagacccgaacacgccgacagcgtgtggatgatggtgcagacccgcgaacaatggcggcaggcgcaggaaaagggcgcggatgttgtcgtgtggcgcgtgtgcaatgatgttcaggcacaagaggcggcagaagccctgcggcagggcgtatccgtgccgctcgtacttgcagcaaacggacagacggttgcacgttatggaaaactatggctcggattgggggcgcacgtggtggtaagggatgaaacaatagggaagaatcatgaataa

SEQ ID NO: 59287 - DNA, 483 bp, Neisseria meningitidis; identical to SEQ ID NO: 39611

SEQ ID NO: 59288 - DNA, 372 bp, Neisseria meningitidis
atgaagcggcaggctttcttcaaactgatggcgtgtgcggcatttctgtctgccgtttcgctgcgcctccccgtattgggcgcgtgttacgcaatattgtccctctatgcgtttgcactttacggcatcgacaaacggcgtgccgtgcgaggaaaacgccgcattcccgaacaccgcctgctgctgcctgccttgttcggcggttgggcgggcgcatacttgggcagcaggatattcaggcataaaacggcgaaaaagcgttttgttgtgctgttccgtctgactgtttcgggcaatgtcctggcgacctgcatcctgattgattatttcgttccgcccgaactttttgtcaaactcgggcaacatctctga

SEQ ID NO: 59289 - DNA, 1845 bp, Neisseria meningitidis; identical to SEQ ID NO: 50091

SEQ ID NO: 59290 - DNA, 156 bp, Neisseria meningitidis; identical to SEQ ID NO: 39708

SEQ ID NO: 59291 - DNA, 492 bp, Neisseria meningitidis; identical to SEQ ID NO: 39850

SEQ ID NO: 59292 - DNA, 1065 bp, Neisseria meningitidis; identical to SEQ ID NO: 43710

SEQ ID NO: 59293 - DNA, 1155 bp, Neisseria meningitidis
atggatacgcacacggacgaaacaaaacttcaaaacacgcaagccaaacgcaaacgccgcctgacggcattgacgctgctgttcgcgcttgccgccgcagccgccgggtcggcgttttttttatggtggcagcacgaagaggaaacggaagacgcttatgttgccggacgcgtggttcaggttacgccgcaaaagggcggtacggtgcggaaggttttgcacgacgatacggatgccgtgaaaaaaggcgacgtgctggcggtattggacgacgataatgatgtgctggcttacgagcgggcaaaaaacgagctggttcaggcggtgcggcaaaaccgccggcaaaatgccgccacttcgcaggcgggggcgcaggttgccttgcgccgggcggatttggcacgcgcacaggatgatttgcgccgccggtctgctttggcggaatcgggcgcggtgtccgccgaagagctggcacacgcccgtgcggcagtgtctcaggcgcaggcggcggtcaaagcggctttggcggaagaatcttcggcacgcgcggctttgggcggagatgtttctttgcgcgaacagccggcggttcagacggcaatcggcaggttgaaagatgcgtggttgaaccttcagcggacgcaaatccgcgcgccggcggacggtcaggtggcgaagcgttcggtgcaggtcgggcagcaggtggcggcaggcgcgccgctgatggcggtggtgccgctgtcggatgtgtgggtggatgccaattttaaagagacgcagttgcggcatatgaaaatcggacagcctgccgaactggtgtccgatttgtacggcaaacaaattgtttatcgcggcagggtggcagggttttcggcaggtacgggcagcgcgttttcgctgattccggcgcaaaacgcaacgggcaactggattaaagtggtgcagcgcgtccccgtccgtatcgtgctgaaccgcgaagatgtggacaggcatccgttgcgtatcggtttgtcgatgacggttaaagtggatacttccgccgcaggcgcgcctgtttcaaaaacgccgggtgcggcattgccggaaatggaaagtaccgactggtcggaagtcgatcggacggtcgatgaaatcctcgggcaatccgcgccctga

SEQ ID NO: 59294 - DNA, 1815 bp, Neisseria meningitidis; identical to SEQ ID NO: 50410

SEQ ID NO: 59295 - DNA, 606 bp, Neisseria meningitidis; identical to SEQ ID NO: 43290

SEQ ID NO: 59296 - DNA, 1248 bp, Neisseria meningitidis
atgagtcagagaagagtagtcattacaggcttaggtcaggtttcccctgtcggcaacactgtcgcagaggcttgggacaccctgctcgccggcaaaagcggcatcggcgcgattacccgctttgacgcatccgacatcaacagccgtgtcgccggcgaagtgcgcggtttcgacatcggacaatacatcagcgcgaaagaagcgcgccggatggacgtattcatccactacggcattgccgccgcattgcaggcaatcgccgattcgggcttggacgatgtggaaaacctcgacaaagaccgcatcggcgtgaacatcggttccggcatcggcggactgcccagcatcgaggtcaccggcaaagccgtaatcgaaggcggcgcgcgcaaaatcaaccccttctttatccccggttctctgattaatctgatttccggacacgttaccatcctcaaaggctaccgcggcccgagctacgggatggtttccgcctgcaccaccggcgcgcacgccatcggcgattccctccgtatgattaaatacggcgacgcggacataatggttgccggcggcgcggaaggcgcaatcagcactttgggcgtgggcggttttgccgcgatgaaagccctctccacccgcaacgacgaccccgccaccgcttcccgtccgtgggacaaaggccgcgacggcttcgttatcggcgaaggcgcgggcatattggtgttggaagaattggaacacgccaaaaaacgcggcgcgaaaatctacgccgaaatcgtcggcttcggcatgagttccgatgcttaccatatcaccgcgccgaacgaagaaggccccgcccttgccgttacccgcgcgctgaaagatgccggcatcaatcccgaagacgtggattacgtcaacgcgcacggcacgtccacccccttgggcgatgccaacgaaaccaaagccctcaaacgcgcgttcggcgaacacgcctacaaaaccgtcgtcagctcgaccaaatccatgaccggccacctgctcggcgcggcgggcggcgtggaggccgtgtacagcattttggcgatacacgacggcaaaatcccgccgaccatcaacatttttgaacaagacgttgaagccggctgcgatttggactactgcgccaacgaagcgcgcgacgcggaaatcgacgttgccatttccaactccttcggcttcggcggcaccaacggcacgctggtcttcaaacgcttcaaaggctga

SEQ ID NO: 59297 - DNA, 294 bp, Neisseria meningitidis; identical to SEQ ID NO: 38787

SEQ ID NO: 59298 - DNA, 2043 bp, Neisseria meningitidis
atgatgtcgcccgaaacccagaaacagctcaaaatcaccgatgtttccgccaagaagctcgacaaactcaacctccataccgcgtgggatttggtgttgcacctgccgctgcgttacgaggacgagacgcacattatgccgattaaggacgcgccgattggcgtgccgtgccaggtcgagggcgaggttatccatcaggaagtaacgttcaaaccgcgcaagcagttgattgtccaaatcgccgacggttccggcagcgtcctttttctgcgcttcatccacttttacgccagccatcagaaacagacggcggtcggcaaacgcatccgcgccgtgggcgaaatcaaacacggcttttacggcgacgagatgattcatcccaaaatccgcgatgccgagggcggcggtttggcggaaagcctcacgccggtttacccgaccgtaaacggtttgaaccagcccactttgcgccgtattattcagacggcgttggacgttacgccgctgcacgacacgctgcccgatgccctgctgtgccgtctgaagctgccacacctcgccgaaagcctgcgtcttttgcattcgccgccgccgagtttcacgattcatcagctttcagacggcacgctgcctgcatggcaacggctcaaattcgatgaacttttggcgcaacagctttcgatgcgcttggcgcgacagaagcgtatcggcggcacggcggcggcattgggcggcgacggcacattgacccaagccctgcgccaagccctgccgtttgccctgaccgatgcgcaagaaaaagttgtttccgaaatctgccgcgatatggcgcaaacctacccgatgcaccgcctgctgcagggcgatgtcggcagcggcaaaaccattgtggctgctttgtctgctttgacggctatcgaatccggtgcgcaggtggctgtaatggcgcccactgaaatccttgccgaacagcattttattaaatttaaacaatggctcgaacctttgggcattgaagttgtccgcctttttggcagtttgcgtaaaaaagccaaagacgaagccaaagccaaactcgctgacggcagcgtcaaaatcgccgtcggcacgcacgccctgttttcagacggcgtggcgtttcacaatttgggcttgaccattgtggacgaacagcaccgtttcggcgttgcccaacgcctcgccctcaaaaacaaagggcgcgaagtccatcagctgatgatgtccgccacgcccatcccgcgcacgcttgcgatgagttttttcgccgatttggacgtgtccgtcatcgacgaattgccgcccgggcgcacaccgattaaaacgcgcctcgtcaacaacgtccgccgcgccgaagtcgaaggcttcgtcctcggcacttgccgaaaagggcggcaggcgtattgggtctgcccattgattgaagaaagcgaaaccctgcaactgcaaaccgccgccgaaaccctcgcccggcttcagacggcattgcccgaactcaatatcggactggtacacgggcgcatgaaggccgccgaaaaggccgaagtgatggcgcggttttcttcgggggggctgaacgtcttggtcgccaccaccgtcatcgaagtcggcgtagatgtgcccaatgccgccctgatggtcatcgaacacgccgagcgcatgggcttggcgcagcttcaccaattacgcggacgggtagggcgcggcgcggcggaaagcgtgtgcgtcctcctgtttgccgaacccttgggcgaactcgccaaagcgcggctgaaagtcatctacgaacacaccgacggctttgaaatcgcccgccaagacctcaacatccgcggccccggcgaatttctcggcgcgcgccaaagcggcgtgcctatgctgcgtttcgccaagctcgaagaagacctgcacctcttggaacaagcgcgcgaaaccgccccgatgctgattgaacaaaaccccgaaatcgtcgaagcgcatttggcaaggtggctttccggcagggaagggtatttgggcgtgtga

SEQ ID NO: 59299 - DNA, 567 bp, Neisseria meningitidis; identical to SEQ ID NO: 41858

SEQ ID NO: 59300 - DNA, 519 bp, Neisseria meningitidis; identical to SEQ ID NO: 38951

SEQ ID NO: 59301 - DNA, 237 bp, Neisseria meningitidis; identical to SEQ ID NO: 39540

SEQ ID NO: 59302 - DNA, 777 bp, Neisseria meningitidis; identical to SEQ ID NO: 50723

SEQ ID NO: 59303 - DNA, 567 bp, Neisseria meningitidis
ttgaacatcaaatattcgggcatcgaaaacaggtttgaaaccgccatcctgaagaaaaacggcgtaagatacggcttcgtctccttcgcccccaaccttgccgccgtcaaactgaacgattatgccaaagttagaaaacggattaccaaaaccaaacagaaagccgacatcgtcattgtgatgttccacggcggcgcggaagggaaacaggcggaacacctgccgttcgataccgaaatcttctatggggaaaacaggggcaacgtcgtcgagtttgcacggcttgccgtcgattccggcgcggatgtcgtattcgggcaggggtcgcacgttactcgcgccgtcgaactttaccgcgaccgcttcatctcctacagcggcggcaactttgccacctacggcgcaatcaacacctccggcatcagcggcattgcgccgattttcaaaattatcaccgacaaacagggtaaatttatttccggaactatcatccctattacccaagccgacgataaaatccccaaaatcgaccctgaaaaaccgttatcgggcggattatttatctga

SEQ ID NO: 59304 - DNA, 2364 bp, Neisseria meningitidis
atgcaattctcctactcatggctgaaaacccaagccgataccgaactttcctccgataagctggaacatctgttaacgatgtccggcttggaagtggaagaagccgagactgccgcacctgcctttgcgggcgtggttgttgccgaagtgaaatccgttgaaaaacatccggatgcagaccgtttgaacgttacccgagttgatgcgggtacgggagagttggttcagatcgtgtgcggtgcgccgaatgtgaaagcgggcatcaaagtgccgtgttcgctgccgggtgccgttttgccgggtaatttcaaaatcaagccgaccaaaatgcgcggcgtggtgtcggacgggatgttgtgttccaccgacgaactcggtctgcccgacgacggtgtgaacggcctgcacattctgcctgaagatgcgcccgtcggtaccaatatccgcgaatacttggatttggacgatacgctgtttacgttgaaaattacgcctaaccgcgccgactgcttgagcatcaaaggcattgcgcgcgaagtgtccgcattgacggggtgcgcgttcaggcagcccgaaatccataccgcgccgatcacgggcagtcgaaaacagcccgtgcagattaacgcgcctgccgattgcggccgttttatcagccgcgttattgaaaatgtcaatgcgaaagcggctactcccgattggatgaaacaacgtttggagcgcagcggcatccgcagtatttccgcgctggtggacatcggcaattatgtgatgctggaaatcggtcagccgatgcacgtttttgatgccgacaaactttccggcagcctgcacatccgccgcgcgcgcgaaggggaaacgctggaatgcctgaacgagaaaaccgtttccctgtctgaaaacacgctggtcgtggcggacgaaaaaggcgtgttgagtttggcgggcttaatgggcggcgcggcgagcgcggtttcagacggcacgcaaaatatcgtgctggaagcggcttggtttgcgcccgaaatcatcgccggcaaatcgcgccaatacggtttcggttcggattcgtcgttccgcttcgagcgcggcgtggattaccgtttgcaggcggatgccatggaacgtgctaccgaattggtgttgcagatttgcggcggtgcggcaggcgagatggttgaagcacaaggtaaattgcccgaagccaagcaggtcggactgcgtttggaccgtctgaaaaccgtgttgggcgtggacattcctgccgaacaggtggaaaccattttgcaacacttgggcctgcagcccgagaaaacggcggaaggcttccgcgttaccgcgccgagcttccgttttgacatcgaaattgaggccgatttgattgaagaaatcggacgcgtttacggctatgaaaacatccccgacgattacacgtcaggccgtctgaaaatgctggaactgcccgaaacacgccgcccgcgttttgccgtttacaacgaaatggcggcgcacggctaccgcgaagtggtcagctatgccttcgttgacgagcagtgggaacaagattttgccgccaacgccgaccccatccgcctgcaaaacccgctggcggcgcaatatgccgtgatgcgttccacactcatcggcggcttggtggaaattttgcaaaacaacctgaaccgcaaacaaaaccgcgtgcgcgtgtttgaaatcgcccgcgtgttcggcaaaggttcagacggccggtttgtccaaaacgaacgcatcggcggtctgtggtacggcgcggcaatgcccgaacaatggggtgggaaaacgcgcaatgcggatttttacgacattaaggcagatgtggaaaatctgttgaaaaacaaagcagtcgagttcgttaaaaccggacatcccgccctgcatcccggacgtgccgccaatatcgtttcagacggcaaagtcatcggctttgtcggcgaactgcatccgaaatggctgcaaaaatacgacctgccgcaagcgccgctggtatttgaaatcgatatggcggccgtgttggaatgcgggaaaacgcgctatcgggccgtatcgaaattccagccggtgcgccgcgatttggcgtttgtgatgccggaagctatgagccatgatgatttgctgcttgtcttgaaaggcgcggcaaacaagttggtacaggaaatcagcgtgtttgacgtgtatcgcggcacgggactgcccgaagggatgaagagcgtggcggtcaaagtgattttgcaggatatggaaaacacgctgacggatgaggcggtcgagccgcttatcggaaaactgattggcgcggcaacggcggcaggggcgcggcttcgcagttaa

SEQ ID NO: 59305 - DNA, 696 bp, Neisseria meningitidis; identical to SEQ ID NO: 42672

SEQ ID NO: 59306 - DNA, 408 bp, Neisseria meningitidis; identical to SEQ ID NO: 42367

SEQ ID NO: 59307 - DNA, 132 bp, Neisseria meningitidis; identical to SEQ ID NO: 39343

SEQ ID NO: 59308 - DNA, 1071 bp, Neisseria meningitidis; identical to SEQ ID NO: 42097

SEQ ID NO: 59309 - DNA, 603 bp, Neisseria meningitidis
atgttcaacataccggccgtcgccgtttcctatctgatcggctcactttctttcgccgtcatcgtgtccaaatattacggcatggacgacccgcgcacctacggatcgggcaatccgggggcaaccaatgttttacgcagcggcaaaaaaaaggcggccgtgctgacgctcttgggcgatgccgccaaaggtttggttgccgttttgcttgcacgcgtgcttcaagaaccgctcggtttatccgacagcgcaatcgctgccgtcgcactcgccgcgctggtcggacatatgtggccggtgtttttcggatttaaaggcggcaaaggcgtggcaacggcattgggcgtgcttctggcactctctcccgcaactgccttggtctgcgcgttgatttggcttgtgatggcattcggctttaaagtatcctctcttgccgcattaaccgccacaatcgccgccccccttgccgcactgttttttataccgcatacttcttggattttcgtaaccctcgcaatcgccatattggtgttgctccgccataagagcaacatcctcaacctgattaaaggcaaagaaagcaaaatcggcgaaaaacgctga

SEQ ID NO: 59310 - DNA, 3309 bp, Neisseria meningitidis
atgaatgagggtgaagttgttttaacaccagaacaaatccaaaccttgcgtggttatgctttccgtggcgatacctatggcggttggcgttatttggctagtttgggtgaccgttatgcggatgatgctgctgcaattgtcggtaaggatgcaaacttaaatggtttgaatttatggatgaaaaaaggtgtggaaaacctatgggatgatacggtcggtaaaaaaacccgtttggagaaatttgatcgggttgctttacaacattttaaccaatatacgaaattaatccatagaaattatggtagattacctaatactagtgaaattgaaagaagttactataaagccgttaccgaaaatggtgtttcttctagtgcagctattgatttagttattaatcgttcacttccggatatggcggatggttattgggcattaggtttggggatagaagccgaacgtatccacaatgagcaagcagtaaataatccgaacggtagcgaatgggataatagaaagcagttaatatctgctttagataaaggatttgatggatcttttaaagagaagccttttacttttttacaatctgtgataatggatgtaacaaagttaggtgttgaatatacaatagatggttggcaaaaaattggaggttggggtaatgggataatcaatgatttatataaaagtgttgcaaaaagagagtggactggaatatttgagatcgttaataataacatcaagcaatttagagatctgttcccaaatccggaaggctggatcgatgatggtcaccaatgtttcgctccttgggttaaagaaactaaaaaacgcaatggcaaatatcatgtctacgaccccctcgccctagatttggacggagacggtatagaaaccgttgccaccaaaggctttgcaggtgcattgttcgaccaccgcaatcaaggcatccgcaccgccaccggttgggttgctgccgatgacggtctgcttgtgcgcgatttgaacggcaacggcatcatcgacaacggcgcggaactcttcggcgacaacaccaaactggcagacggttcttttgccaaacacggctacgcggctttggccgaattggattcaaacggcgacaacatcatcaacgcggcagacgccgcattccaaaccctgcgtgtatggcaggatctcaatcaggacggcatttcccaagctaatgaattgcgtacccttgaagaattgggtattcaatctttggatctcgcctataaagatgtaaataaaaatctcggtaacggtaacactttggctcagcaaggcagctataccaaaacagacggtacaaccgcaaaaatgggggatttacttttagcagccgacaatctgcacagccgcttcaaagacaaagtggaactcactgccgaacaggcaaaagccgccaatcttgcgggcattggtcgtctgcgcgatttgcgcgaagctgccgcattgtccggcgatttggccaatatgctgaaagcttattctgccgccgaaactaaagaagcacagttggcattgttagataatttgattcacaaatgggcggaaaccgattcgaactggggcaaaaaatcgccaatgcgactttcaaccgattggacgcaaacggctaatgaaggtattgcactgacaccatcccaagtagcacaactaaaaaagaacgctttagtttccctttctgataaagctaaagcagctattgacgccgcccgcgaccgcattgccgtgcttgatgcctacacggggcaggattccaacacactctattacatgagcgaggaagatgcgcttaatatcgtcaaagtaaccaacgatacatacgaccatctcgccaaaaacatctaccaaaacctgttattccaaacccgtttgcagccatatttgaatcaaatcagtttcaaaatggaaaatgatacgttcactttggattttagtggtcttgttcaagcatttaaccatgtcaaagaaactaatccgcaaaaagcttttgtggatttggccgagatgcttgcatatggcgaacttcgttcttggtatgaaggtcgaagactaatggccgattatgtggaggaggcaaaaaaagcaggtaaatttgaagattaccagaaagtgttgggtcaggagaccgttgcattattagctaaaacatcgggtacgcaagcagatgatatcctgcaaaatgtaggctttggtcataataaaaatgtttctttatatggtaatgacggtaacgacactctgatcggcggtgccggtaatgattacttggagggcggcagcggttcggatacttatgtcttcggcaaaggcttcggtcaggatacggtctataattacgactacgctaccggacgcaaagacatcatccgctttaccgacggtattacagccgatatgctgacttttacccgagagggcaaccatcttcttatcaaggcaaaagacgacagtggacaagtgactgttcagtcctatttccagaacgatggctcaggtgcttaccgtatcgatgagattcatttcgataacggcaaagtactggatgttgccactgtcaaagaactggtacagcaatccaccgacggttcggacagattgtatgcctaccaatccggaaataccttaaatggcggattgggcgatgactatctgtacggtgccgacggggatgacctgctgaatggtgatgcaggcaacgacagtatctacagtggcaatggcaatgatacgctcaatggaggagaaggcaacgacgccctgtacggctataatggtaacgatgtactgaatggtggcgaaggcaatgatcatttgaacggcgaagacggtaacgacactctgatcggcggtgccggtaatgattacttggagggcggcagcggttcggatacttatgtcttcggcaaaggcttcggtcaggatacggtctataattaccatgtggataaaaactctgacactatgcactttaaaggatttaaagcagcagatgttcattttatccgttccggaagtgatttggtgcttagcgcttctgaacaagacaacgtacgtatttccggattcttctatggtgaaaaccatcgtgtagatacatttgtctttgatgatgcagctatcagtaatccagattttgccaagtatattaatgctggcaataatttggtacagtctatgtctgtgttcggttctaatactgctgcgacaggaggaaatgtggatgccaatacacaatccgtacagcagccgttattggtaacgccatctgcataa

SEQ ID NO: 59311 - DNA, 1044 bp, Neisseria meningitidis; identical to SEQ ID NO: 53392

SEQ ID NO: 59312 - DNA, 1677 bp, Neisseria meningitidis
atgagcgtaggtttgctgaggattctggttcaaaaccaggtggttactgttgagcaggccgagcattactacaatgagtcgcaggcgggtaaggaagtgttgccgatgctgttttcagacggtgtcatttcgcccaagtcgcttgcggcattgattgcgagggtgttcagttattcgattcttgatttgcgtcattatccgcgccacagggtgctgatgggggtgttgacggaggagcagatggtggagttccactgtgtgccggttttccgtcggggcgacaaagtattttttgcggtttccgatccgacacagatgccgcaaattcagaaaaccgtttctgccgcagggattgaggttgaattggtcattgtcgaggatgaccagttggcgggtttgctcgattgggtgggttcgcgttcgacatcgctgcttcaggagcttggggaggggcaggaggaagaggaaagccacaccctgtatatcgacaacgaggaggcagaagacggccctgttccgaggtttatccataagactttgtcggatgccttgcgcagcggggcatccgacatccatttcgagttttacgaacacaatgcccgtatccgtttccgtgtggacgggcagctccgcgaggtggttcagccgcccattgcggtaagggggcagcttgcttcccggattaaggtaatgtcgcgtttggacatttccgaaaaacggataccgcaggacggcaggatgcagctgacctttcaaaagggcggcaagcctgtcgatttccgtgtcagcacattgccgacgctgtttggcgaaaaggtcgtgatgcggattttgaattccgatgccgcgtctttgaacattgaccagctcggttttgagccgtttcagaaaaaattgttgttggaagcgattcaccgtccctacgggatggtgctggtaaccggtccgacgggttcgggtaagacggtgtcgctctatacctgtttgaatattttgaatacggagtcggtaaatattgcaacggcggaagaccctgccgagattaacctgccgggcatcaatcaggttaacgtcaatgataagcagggtctgacttttgccgctgctttgaagtctttcctgcgtcaggacccggacatcattatggtcggtgagattcgtgatttggaaactgccgatattgcgattaaggcggcacaaacagggcatatggtgttttccaccctgcacaccaataatgcgccggcgacgttgtcgcgtatgctgaatatgggtgtcgcgccgtttaatattgccagttcggtcagcctgattatggcgcagcgtcttttacgcaggctgtgttcgagctgcaaacaggaagtggaacgcccgtctgcctctgctttgaaggaagtcggcttcaccgatgaggaccttgcaaaagattggaaactttaccgcgccgtcggttgcgaccgttgccgggggcagggttataaggggcgtgcgggcgtgtatgaggttatgcccatcagcgaagaaatgcagcgtgtgattatgaacaacggtacggaagtggatattttggacgttgcctataaggagggtatggtggatttgcgccgggccggtattttgaaagttatgcagggcattacttcattggaagaggtaacggcaaataccaacgattag

SEQ ID NO: 59313 - DNA, 852 bp, Neisseria meningitidis; identical to SEQ ID NO: 50271

SEQ ID NO: 59314 - DNA, 291 bp, Neisseria meningitidis; identical to SEQ ID NO: 39715

SEQ ID NO: 59315 - DNA, 126 bp, Neisseria meningitidis
ttgaaagaggattttattaataatgagcgatatgaaaaaacagaattatatccccaaaaagataaggtaattctatttccaaagtttggtgaatatgatttggtgttaaatccggacattatttaa

SEQ ID NO: 59316 - DNA, 627 bp, Neisseria meningitidis
atgacgcaagaacgtttcccatcattcttcaaccaagccccgaccatcaccgtcagagacccgcttgccgcatttctcggcgcggcgcaagacggcatcctcacttaccgctacgccgatgccgtgcgcctgtgcggacattcctgcccgaccgtcgcgggcgcgtacctgatggttatcaaaggactgaaagccctttacggcgcagagctgcccgaacgcggcagcatcgaagccgccatgcagggagcgcgcgacgaaggcacggtcggcgtaaccgcgtccgtcgtccaactcctcaccggcgcagccccggaaaccggcttcggaggcatcggaatgcagggacgcttcgcccgccgcaacctcttatcctttggtgcaggcgaaatcaacggcacactgaccctgcgccgccgcgataccggcaaaaccgttgccgtcagcctcaacgccgccctgcaaccctttgcgccgcaaatgcgcgacatcatgcccaaagccgtcagcggcagcgcaagcgcagaagaactcgaacgcttcggacaactctggcaggcacgcgttaaagcatttttgaccgaatcggcggacgacccgcagttcgtcatcgtccgcgaagtgtga

SEQ ID NO: 59317 - DNA, 399 bp, Neisseria meningitidis; identical to SEQ ID NO: 41900

SEQ ID NO: 59318 - DNA, 1011 bp, Neisseria meningitidis
atgagcgatacccccgctacccgcgattttggcctgatcgacgggcgtgccgtaaccggctatgtgctgtccaaccggcgtggtacgcgtgtctgcgtgctggacttgggcgggattgtgcaggaattttccgttttggcagacggcgtgcgcgaaaacctcgtggtgtcgttcgacgatgcggcttcctatgcggacaatccgtttcagattaacaagcagatagggcgcgtggccggacgcatccgcggtgcggcgttcgacatcaacggcaggacttaccgcgtggaggccaacgaaggcaggaacgcgctgcacggcggttcgcacgggctggccgttacccgtttcaacgcggtggcggcagacggccgttcggtggtgctgcgcagccgcctgcaacagtcggccgacggttatcccaacgatttggatttggatatttcctaccgcttggacgaggacgaccggcttaccgttagctatcgcgccaccgcgctcggcgacacggtgttcgacccgacgctgcacatttactggcggctggacgcgggcctgcacgatgcggttctgcatattccgcagggcggacatattccggccgatgccgaaaaactgcccgtctcaacggtttcagacgacctcgaagtatttgatttcagccggcccaagccgctggatgccgccgttgccgccctgcgccgcgaaacgggtcgggccggttttgacgacgcttaccgcgtgccgtccgatataggccgtcccgccgctgtgttgcaagccggacgccgccgtcgtatcagcatatacagcgaccgcaatggcttggtcatctttaccgccgccccgcaggatttcgcgcggcacgatgcgggcgtttacgacgcgctggcgaccgaggcgcagacgctgcccgacagcctgaattggcccgagttcggcaatattcgtctgaacaagggtgataccagggaggcgacgattgcttacggcatcgaatccctttcttag

SEQ ID NO: 59319 - DNA, 2304 bp, Neisseria meningitidis; identical to SEQ ID NO: 51290

SEQ ID NO: 59320 - DNA, 450 bp, Neisseria meningitidis; identical to SEQ ID NO: 44603

SEQ ID NO: 59321 - DNA, 1671 bp, Neisseria meningitidis; identical to SEQ ID NO: 51567

SEQ ID NO: 59322 - DNA, 1266 bp, Neisseria meningitidis
atgaacacactccaacgccgcaagacgcatcaagtccgcatcgatcatattaccgtcggttcagaagcacccgtcgttatccaatctatgaccaacaccgacactgccgatgcaaaagccaccgcattgcagattaaggaattgagcgatgccggatccgaaatggtgcgtattaccgtcaacagccccgaagccgcgtccaaagttgccgaaatccgccgccgcttggacgatatgggctatgccacaccgcttatcggcgatttccacttcaacggcgaacgcctgttggcggaatttccagaatgcggcaaagcattgtccaaataccgcatcaatcccggcaatgtcggcaaaggcgtaaaaggcgatgaaaaatttgcctttatgattcggactgctgctgaaaacgataaagccgtccgcatcggcgtaaactggggttctttggatcaaagcctcgccaaacgtatgatggatgccaacctcgcttcttccgcgccgaaaccgcccgaagaagtgacgaaggaagcactgattgtctccgctttggaatctgccgaaaaagccgttctattgggactgcccgaagacaaaatcatcctgtcgtgcaaagtcagcgcggttcaggatttgattcaggtttaccgcgaactgggcagccgttgcgcctatccgctgcatttgggtttgaccgaagccggtatgggcagcaaaggcattgtcgcatcaacggcggcattatccgtcttgcttcaagaaggaatcggcgacaccatccgcatttcactgactccggaacctggcagcccgcgtactcaggaggtcgtcgtcgggcaagagattttacagactatgggattgcgttcgtttacgccgatggttaccgcctgccccggctgcgggcgtaccaccagtaccgtatttcaagagctggcacaagatgttcaaaattacctgcgacaaaaaatgagcgtatggcgtactgcttatccaggcgtggaatccctgaatgttgccgtgatgggctgcgttgtcaatgggcccggagaaagcaaattggccgacatcggcatcagcctgcccggtacgggagaaacacccgtcgcgccggtttatgtggacggggagcgcaaagtcacactgaaaggtgataatattgcaactgaattcctagctattgtagaggaatatgtcaaaaccaactacggcgaaaacggctccaaacgcaaccagaacaaaatcatccctatacagtccctataa

SEQ ID NO: 59323 - DNA, 780 bp, Neisseria meningitidis; identical to SEQ ID NO: 38884

SEQ ID NO: 59324 - DNA, 321 bp, Neisseria meningitidis; identical to SEQ ID NO: 43186

SEQ ID NO: 59325 - DNA, 213 bp, Neisseria meningitidis
atgcctgcaatccgcgtaaaagagaatgaaccctttgaagtcgctatgcgccgtttcaaacgcgccgtagaaaaaaccggcctgctgaccgagctgcgcgcccgcgaagcctacgaaaaaccgactaccgaacgcaaacgcaaaaaagcggcagccgtaaaacgcctgcaaaaacgcctgcgcagccaacaactgccgcccaaaatgtactaa

SEQ ID NO: 59326 - DNA, 210 bp, Neisseria meningitidis; identical to SEQ ID NO: 45301

SEQ ID NO: 59327 - DNA, 879 bp, Neisseria meningitidis
atgaattacgcaaaagaaatcaatgcgttaaacaacagcctttccgatttgaaaggcgacatcaacgtttcgtttgaatttttcccgccgaaaaacgaacaaatggaaacgatgctgtgggattccatccaccgtctgcaaaccctgcatcccaagttcgtatccgtaacctacggcgcaaattccggcgaacgcgaccgcacgcacggcatcgtcaaacgcattaagcaagaaaccggcttggaagccgcgccgcacctgaccggcatcgacgcttctcccgacgaattgcgccaaattgccaaagattattgggacagcggcatccgccgcattgtcgccctgcgcggcgacgagccgcccggttacgagaaaaaaccgttttatgccgaagacttggttaagctattacgctccgtcgccgacttcgacatctctgtagcagcatatcccgaagtgcatcccgaagcgaaatccgcacaagccgacctgattaatttgaaacgcaaaatcgatgcgggcgcgaaccacgtcatcacccaatttttctttgacgtagaacgctacctgcgcttccgcgaccgctgcgtgatgttgggtatcgatgtggaaatcgtccccggtattttgcctgttaccaacttcaagcagctcggtaaaatggctcaagtaaccaacgtcaaaatcccaagctggctgtcgcaaatgtatgaaggtttggacgacgaccaaggtacgcgcaatctggtggcggcaagtatcgccatcgatatggtcaaagtcctgtcccgcgaaggcgtgaaagatttccacttctatacgcttaaccgcagcgagctgacttacgccatctgccatattttaggcgtgcgcccttaa

SEQ ID NO: 59328 - DNA, 1662 bp, Neisseria meningitidis
atgctgacctatactccgcccgatgcccgcccgcccgccaaaacccacgaaaaaccgtggctgctgctgttgatggcgtttgcctggttgtggccgggtgtattttcacatgatttgtggaatcctgccgaacctgccgtctataccgccgtcgaagcactggcaggcagccccacccccttggttgcccatctgttcggtcaaaccgatttcggcataccgcccgtgtatctttgggttgccgccgcgttcaaacatttgctgtcgccgtgggctgccgactcatacgatgccgcacgctttgcaggcgtgtttttcgccgttgtcggactgacttcctgcggctttgccggtttcaactttttgggcagacaccacgggcgcagcgttgttttaatccttatcggctgtatcgggctgattccgaccgtacactttctcaatcccgctgccgccgcctttgccgccgccggactggtgctgcacggttattctttggctcgccggcgcgtgattgccgcctcttttctgctcggtacgggctggacgctgatgtcgttggcagcagcttatccggcagcatttgccctgatgctgcccttgcccgtactgatgtttttccgtccgtggcaaagcaggcgtttgatgttgacggcagtcgcctcacttgcctttgccctgccgcttatgaccgtttacccgctgctcttggcaaaaacgcagcccgcgctgttcgcgcaatggctcgacgatcacgttttcggtacgttcggcggcgtgcggcacgttcagacggcattcagtttgttttactatctgaaaaacctgctttggtttgcactgcccgcgctgccgctggcggtttggacggtttgccgcacgcgcctgttttcgaccgactgggggattttgggcgtcgtctggatgcttgccgttttggtgctgcttgccgtcaatccgcagcgttttcaggataacctcgtctggctgcttccgccgcttgccctgttcggcgcggcgcaactggacagcctgaggcgcggcgcggcggcgtttgtcaactggttcggcattatggcgttcggactgtttgccgtgttcctgtggacgggctttttcgccatgaattacggctggcccgccaagcttgccgaacgcgccgcctacttcagcccgtattacgttcccgacatcgatcccattccgatggcggttgccgtactgttcacacccttgtggctgtgggcgattacccgcaaaaacatacgcggcaggcaggcggttaccaactgggcggcaggcgttaccctgacctgggctttgctgatgacgctgttcctgccgtggctggacgcggcgaaaagccacgcgccggtcgtccggagtatggaggcatcgctttccccggaattaaaacgggagctttcagacggcatcgagtgtatcgacataggcggcggcgacctgcacacgcggattgtttggacgcagtacggcacattgccgcaccgcgtcggcgatgtacaatgccgctaccgtatcgtccgcttgccccaaaatgcggatgcgtcgcaaggctggcagacggtttggcagggtgcgcgcccgcgcaacaaagacagtaagttcgcactgatacggaaaatcggggaaaatatataa

SEQ ID NO: 59329 - DNA, 435 bp, Neisseria meningitidis; identical to SEQ ID NO: 53650

SEQ ID NO: 59330 - DNA, 390 bp, Neisseria meningitidis
ttgaaagcgggaatcaggctgttatccgaaagcggcaaaacccaaaccgtccgcaacatcgttgtcaaaccaaaaccgctcaaagcctacaatctgaccgttgctgactggcatacctacttcgtcaagggcagtcaggcggaaacggaaggggtttgggttcataatgcgtgtccgcctaaaagaacaggaagctccaagaatgaaaaacatggagatggcggtcgaagtcaaatatcagcagaatcacgaattgctgaattaaaaaataaaattattcccggaatgcacaaaaatgaacgattaaagattgagaaaacaatcagaaatattgcaaaaaatgccaatcgaaaagcaaaaggagaagagcatggtcgacacggtcgttaa

SEQ ID NO: 59331 - DNA, 186 bp, Neisseria meningitidis; identical to SEQ ID NO: 37143

SEQ ID NO: 59332 - DNA, 114 bp, Neisseria meningitidis
atgtcccaaaaagctgccgcagaccaactgaatctgcccgactgctccatcttgctgcaatggttgcgcctctaccatttgaatggtattaacggtttaaagcccaaaccctaa

SEQ ID NO: 59333 - DNA, 558 bp, Neisseria meningitidis
atggatgctttaaaattattgacgaaccgccgatcttccaaaaagctgaagcaccccgcccccgatgcggcggagttggaacaaatatttcaggcggcaacccaagttcccgatcacggcaatatgcgccccttccgttttaccgtgattcaaggcgaggtaggattgcaacgttttcgcgatgtgttgaagcaaacggttgccgaattgaatttcggcgacgatgcgatgaaaaaggcggaaaaagtgggcaatatggcgccgatggtcattggtgtaacgtttgcgccgaaccgcgatgtgcctaagccgaaaccggaatgggagcagatgctgacggcgggttgtgcggcgtatgcgctgcaactggcggcaacggcgcaaggtttcgacaatgtctggattacggggatgtgggtcaacagccccctgttgcgtgaggctttcggatgtgcggataaggataaaatcatcgggctgatgatggtcggcacgccgacagaggaagtgcataagcccaagaataccgatttggaagcgtttgtcagccattggtaa

SEQ ID NO: 59334 - DNA, 495 bp, Neisseria meningitidis
atgaaaaagaacatattggaattttgggtcggactgttcgtcctgattggcgcggcggcggttgcctttctcgctttccgcgtggcgggcggcgcggcgtttggcaattccggcaagacttataccgtatatgccgatttcggcgacatcggcggtttgaaggtcaatgcccccgtcaaatccgcaggcgtattggtcgggcgcgtcggcgctatcggacttgacccgaaatcctatcaggcgagggtgcgcctcgatttggacggcaagtatcagttcagcagcgacgtttccgcgcaaatcctgacttcgggacttttgggcgagcagtacatcgggctgcagcagggcggcgacacggaaaaccttgctgccggcgacaccatctccgtaaccagttctgcaatggttctggaaaaccttatcggcaaattcatgacgagttttgccgaaaaaaatgccgacggcggcaatgcggaaaaagccgccgaataa

SEQ ID NO: 59335 - DNA, 360 bp, Neisseria meningitidis; identical to SEQ ID NO: 50468

SEQ ID NO: 59336 - DNA, 339 bp, Neisseria meningitidis
atgaaaaaaatcgaggcgattgtcaaaccgttcaaactcgacgacgtgcgcgaggcgttgacggaaatcggcattacggggatgaccgtcagcgaggtcaaagggttcggcaggcagaaggggcatacggagatttaccggggcgcggaatacgctgtcgatttcctgcccaaggtcaaaatcgagctggtgttggcggatgacgctgtggaacgcgcgattgacgtgattgtcgaggtggcgcgttcgggcaaaatcggcgacggcaagatttttgtgctgccggtcgaggaggcaatccgtatccgcacgggcgaacgttcggacgcggcggtttga

SEQ ID NO: 59337 - DNA, 435 bp, Neisseria meningitidis
atgactgagccgaaacacgaaatgccgacggaagagcaggttgccgcgcgcaaaaaagcaaaagccaaaatccgcaccatccgcatttgggcgtgggtcattttggcgttgctcgctttaaccgccctgctctcccaatgcgcgatgtccaaaccgcaggcaaaacagaaaattgtcgagtcttgcgtgaagaatattccgtttgccgaaaaatggcaaaacgatttgcgggcccgcggtttagattcaaacaatacccgcctcgccgtcgactactgcaaatgtatgtgggagcagcctttggacagattgagcgagaaacagattagatccttcggcaaactcggcgcacaagaacagcttgacctgctcggcggcgcaaatgcctttgaagcacgtgacaagcagtgtgttgccgatttgaaatcagaataa

SEQ ID NO: 59338 - DNA, 1497 bp, Neisseria meningitidis
atgtcgcttgccttggtttacagccgcgccttgagcggtatgaatgcgccgttggtcgaagtggaagcccaccttgccaacggcctgccacatttcaacatcgtcgggctgcccgatacggaagtcaaagaaagtcgcgaccgcgtccgtgccgccattattcaaagcggttttgaattccccgccaaaaaaatcaccgtcaacctcgcccccgccgacctgcccaaagagtcggggcgtttcgatttgccgattgcaatcggcatccttgccgcatcggggcaggttgcgcccgaaaaactggcggaatacgagtttgcgggggaattggcactgtcggggctgttgcgccccgtgcgtggcgcgttggcgatggcgtggcagggtatgcaggcaaaacgtgcatttgttttgcctgaagaaaatgcaggacaagccgccgtgatgcgcggcattaccgtttacggcgtgcgctctttgggcgaagtcgccgcccatttgaacggcatcgaacctttggcgcaaaccgaatgccaagttcctcagatgccgtttgaacatggcggacaacctgatttgtgcgatgtgaaaggtcagcacaccgcgcgccttgctttggaaatcgctgccgcaggcggacacagcctcttgatgatgggtccgccgggaacgggcaagtctatgctctcccaacggctgcccggcatcctaccgccgctgaccgaagacgaattggtagaagtttgggcattgcgttcgctcctgcccaaccaccaacaacaactcgacagcaaccgtcctttccgcagtccgcatcacagcgccagcgcggcggctatggtcggcggcggttcggatccgcgtccgggcgaaatttcattggcgcatcacggcgttttatttttggatgaattgcccgagttcgaccgcaaagttttggaagttttgcgcgaaccgttggaaaacggcgaaatccacatttcccgcgcggcgcgccaagccgtctatcctgccaaattccaacttgttgccgccatgaacccctgcccgtgcggttatctcgggcatcccgtcaaaccctgccgctgcacgcccgaaagcgtcgcgcgttaccgaagcaagatttccggcccgctgctcgaccgcatcgatttgaccatcgaagtcccgagcctgtccgccgccgaactgatgcagcaggaagcaggggaaagcagcgcgtccgttttggaacgcgttatcgccgcccgcgacaaacaatacgcacggcaaggcaaagtgaatgccgctttgagcgtcagcgaactcgattcccaagcccgcattcaaaaagaagcgcaggaagcattgggcagcctgctggaaaaactctccctttccgcccgcagcttccaccgcattatgcgcgtggcgcgtacattggcggatttggcgggcgatgaagaagtcggcagaagccacgtcatgaaagccataggtttccgtcgcgctttatag

SEQ ID NO: 59339 - DNA, 966 bp, Neisseria meningitidis
atgagctacacgcaactgacccaaggcgaacgataccacatccaatacctgtcccgccactgcaccgtcaccgaaatcgccaaacagctgaaccgccacaaaagcaccatcagccgcgaaatcagacggcaccgcacccaagggcagcaatacagcgccgaaaaagcccagcggcaaagccggactatcaaacagcgtaagcgacaaccctataagctcgattcgcagctgattcagcacatcgacccccttatccgccgcaaactcagtcccgaacaagtatgcgcctacctgtgcaaacaccaccagatcacgctccaccacagcaccatttaccgctaccttcgccaagacaaaagcaacggcagcacgttgtggcaacatctcagaatatgcagcaaaccctaccgcaaacgctacggcagcacatggaccagaggcaaagtacccaaccgtgtcggcatagaaaaccgacccgctatcgtcgaccagaaatcccgtatcggcgattgggaagccgacaccattgtcggcaaaggacagaaaagcgcattattgaccttggtcgaacgcgttacccgctacaccatcatctgcaaattggatagcctcaaagccgaagacactgcccgggcagctgttaggacattaaaggcacataaagacagggtgcacaccatcaccatggataacggcaaagagttctaccaacacaccaaaataaccaaagcattgaaagcggagacttatttttgtcgcccttaccattcttgggagaaagggctgaatgagaacaccaacggactcatccggcaatacttccccaaacaaaccgatttccgtaacatcagtgatcgggagatacgcagggttcaagatgagttgaaccaccgaccaagaaaaacacttggctacgaaacgccaagtgttttattcttgaatctgttccaaccactaatacactag

SEQ ID NO: 59340 - DNA, 366 bp, Neisseria meningitidis
atgaacctgattcaacagctcgagcaagaagaaattgcccgcctgaacaaagaaatccccgaattcgcaccgggcgacaccgtagtcgtatccgtacgcgtcgtggaaggtacccgcagccgtctgcaagcctacgaaggcgttgtcattgcacgccgcaaccgtggtctgaacagcaacttcatcgtccgtaaaatttccagcggcgaaggtgtggaacgtactttccaactgtactcccctaccgttgagaaaatcgaagtcaaacgccgtggcgatgtccgccgtgccaaactttactatctgcgcggcctgaccggcaaagctgcacgcatcaaagaaaaactgcctgcacgcaaaggttga

SEQ ID NO: 59341 - DNA, 840 bp, Neisseria meningitidis
atgcaaaaccacgttatcagcttagcttccgccgcagaacgcagggcgcacattgccgataccttcggcaggcacgacattccgtttcagtttttcgacgcactgatgccgtctgaagaactgaatcgggtgatggcggaattggtgccgggattggcaaaacagcacctgttgagcggagtggaaaaagcctgctttatgagccacgtcgtattgtggaagcaggcattggacgaaggcgtaccgtatatcgccgtatttgaggacgacgttttactcggcgaaggcgtggagcagttccttgccgaagatacttggttggaagaacgctttgaccctgattccgcctttatcgtccgcttggaaacgatgtttatgcacgtcctgacctctccctccggcgtggcggattactgcgggcgcgcctttccgctgttggaaagcgaacactgggggacggcgggctatatcatttcccgaaaagcgatgcggtttttcctggacaggtttgccgccctgccgtctgaagggctgcaccccgtcgattggatgatgttcggcaaccctgatgacagggaaggaatgccggtttaccagctcaatcccgccttgtgcgcccaagagctgcattatgccaagtttcacgaccaaaacagcgcattgggcagcctgatcgaacacgaccgcctcctgaaccgcaaacagcaaaggcgcgattcccccgccaacacattcaaacaccgcctgatccgcgccttgaccaaaatcagcagggaaagggaaaaacgccggcaaaggcgcgaacagttaatcggcaagatcattgtgcctttccaataa

SEQ ID NO: 59342 - DNA, 279 bp, Neisseria meningitidis; identical to SEQ ID NO: 37465

SEQ ID NO: 59343 - DNA, 216 bp, Neisseria meningitidis
atggttgcatttggagaaatcggtttgagcggtgaagtccgccccgtcgcacgcgggcaagagcggctcaaagaagcggaaaaactcggcttcaaacgcgccatcgttcccaaagccaatatgccgcgcaacgccaaagagtttccgaacctgaaaatctacggcgtttcgagtttgcaggaagccatcgatatttgccgtgacagcagggaataa

SEQ ID NO: 59344 - DNA, 507 bp, Neisseria meningitidis
atgtttgaacaagaagacgagtggatcagtaaaacccaaatgaaaaagcagatgaacggtttgcaggatttgggtatggaactgaccaagctctcaaacgatacgctgaaaaaaatcggcttggacgaagatttgtacgaagccgtcgttacctataaaaaaattacgtccaacggcgcgctcaagcggcaggcgcaatttatcggcaggctgatgcgcgacacggatcccgcgcccatcgaggcgtttcttgccaagctgcgcggcgacgatgcggcgcacaacgcctttttgcaacgcgtggaacaggcgcgcgtacggctgttggcagacgacggcgcgttgacgcagtttatgtcggattttccgcatgcggacgccggtaaattgcgtaccttgatccgcaacaccaaaaaagagcaggagcaaaacaaaccgccgaaaaatttccgcgccctgtttcaagaattgaaaaccgttatggaaaacggggacgcggaaatttag

SEQ ID NO: 59345 - DNA, 147 bp, Neisseria meningitidis; identical to SEQ ID NO: 42194

SEQ ID NO: 59346 - DNA, 753 bp, Neisseria meningitidis; identical to SEQ ID NO: 51737

SEQ ID NO: 59347 - DNA, 993 bp, Neisseria meningitidis; identical to SEQ ID NO: 55577

SEQ ID NO: 59348 - DNA, 1158 bp, Neisseria meningitidis
atgaaattcgccacgaaagccattcattccagctacgattgcgacgaacacaaccgcgcgctgatgccgccgatttatcaaaacagtatgttcgcgttgcacgagattggcgaaaatgtgccttaccgctactcgcgcctgagcaacccgacccgtcagattttagaagacaccgttgccgatttggaacacggtgcggcaggttttgcgttttccagcggtatggcggggattgatgccgtgtggcgtaccttcctacaaccgggcgataccatcgtcgcggtcgccgatatttacggcggcgcgtatgatttattggtcgatgtttatcaaaaatggggggtgaacgttgtttttgccgatttgggcaatccggataatttggacgaattgctcaaagcgcacaaggtcaaactggtttggctggaaacgccgtccaatccgcttttacgcttggtagacatcaaagcccttgccgcgaaagccaaagcgaccggcgcactggtcggtatcgacaacacctttgccacgccgtatctgcaacagcccttggatatgggttgcgattttgtattccattccgctaccaaatatttgtgcggccattccgacgtattgatgggcatcgtcgttgccaaaaccaaagaactggcgcagcctttgcacgatatgatggtgcataccggcgcggttgccggcccgctggactgctggctggtgttgcgcggcatcaaaacgcttgccctgcgtatggaggcacactgcaaaaacgcactcgaaatcgcgcgccgtctggaagaccatcctgccattgaaaaagtgttccatcccggcctgccgtcgcacgaacattatgaactcgcccaagcgcaaatgcctaaaggcatcggcggcgtggtgacggtttatctcaaaaacgacacgcgcgaagcggcaaacagcgtgattaaaaacatgaaactggtcaaaatggcttccagcctcggcggcgtggaaagtttggtcaaccattgctattcccagtcccacagcggcgtgccgcatgatgtgaaaatggaaatgggcatcagggtcggactgctgcgtttctctgtcggtatcgaagatgtagatgatatttggaacgatatttccgccgcactggatacgactgtataa

SEQ ID NO: 59349 - DNA, 315 bp, Neisseria meningitidis; identical to SEQ ID NO: 38226

SEQ ID NO: 59350 - DNA, 2265 bp, Neisseria meningitidis
gtgagcattagcgcgccgtatgccaatgaaaacagccgcatcctgctgagcaccacggatatcagttcggaaaacggcaaaatcaaactgcaatcctacggcgaccagttctactacgccggacagggtgagctctacaccttcgataaacgcagctataaaaccggtaagtggtacaaactaaaacatgttactgaaatcaaagagcataaaaacgccaaagccgacccggtgagcctcagtgcgtcacaaggtattgaaatcaaatccggcggcaatatcggtgcccacgccaccttgtttgatgcaccccgcggctccgttaaaatcgaagccggacgtgggctggttctctatgccgtggaagatctcaactacgacaaacttgacacccgtaccaagcgcaaatttatcggcattacctacgacaaggtgcacgacaccaccacccacaccatgaaaaccgccctgccctcaagggtagttgcagaatcggccaacctgcaatcaggctgggacgccaaactgcaaggcacccagtttgaaaccacgctgggcggcgcagccatccgtgcaggtgtaggcgatcaggcacgagcagatgccaagattattcttgaaggcatcaaaagtagtgtgcgcactgaaacagtaagcagtagcaaatctgccctctggcagaaacaggccggacgcggcagcaatatcgaaaccttgcaactgccaagtttcacaggctccgttgcgcccgtactctctgcccccggcggctatatcgttgatattccgaaaggcaatctgaaaaccgaaatcgaaaagctggccaaacagcccgaatacgcctacctgaaacagcttcagacggccaagaacgtcgattggaaacaggtgcagcttgtctacgacaagtgggactataaagccgaaggcctgaccggagccggagccgccattatcgccctggcagtagcggcagcaaccggaggcgtcggtgccggtttgatcggtgcagcacagggaaccacatctgccgccatagccaatgcagcatttacctcgctggctacccaagcttccatttcgctggttaataacaaaggcaacgtcggcaaaaccctgaaagaactgggcagaagccgtacggtgaaaaatctggtcgtggctgctgccaccgcaggcgtatccaacaaaatcggcacgtctgctttagccaatgtcagcgacaagcagtgggtcaacaacatgaccgtgaatctggccgatgcgggcagtgccgcgctgattaacaccgccgttaacggcggtagcctgaaagacaatttggaagcgaatatccttgcggctttggtgaataccgcgcatggggaggcggcgagtaagatcaaaggactggatcagcactatgtcgcccacaaaatcgctcatgccgtagcgggctgtgcggctgcagcggcgaataagggcaaatgtcaggacggcgcgatcggtgcggctgtgggtgagattgtcggggaggctttggttaaaaataccgattttagcgatatgaccccggaacaattagatctggaagttaagaaaattaccgcctatgccaaacttgcggcaggtacagttgcaggcgtaacgggaggagatgtcaatactgctgcacaaaccgcacaaaacgcggtagaaaataatgcggttaaagctgttgtaactgctgcaaaagtggtttataaggtagccagaaaaggattaaaaaacgggaaaatcaacgttagagatttaaaacagacgttgaaagacgaaggttataatttagccgacaacctgaccaccttattcgacgaaacattggattggaacgatgccaaagccgttattgatattgtcgtcggaacagagctgaatcgcgctaataaaggggaagcggcacaaaaggtcaaggaagttttagaaaaaaatcgtccttatatccctaataaaggtgctgtaccgaatatgagtacatacatgaaaaataatccttttggaaaacagctggctcaaatttcagaaaagacaacgcttccgacgcagcaagggcagtctgtcttcttggtaaaaagaaaccaagggttattaaaaaccggtgataggttttatttagatggccaacataaaaatcatttagaggtttttgataaaaatgggaactttaagtttgttctaaatatggatggttcgcttaaccaaatgaaaactggggcagcaaaaggtcgtaaattaaacttaaaatag

SEQ ID NO: 59351 - DNA, 846 bp, Neisseria meningitidis
gtgaaccgaactgccttctgctgcctttctctgaccgccgccctgattctgaccgcctgcagcagcggaggcggcggaagcggaggcggcggtgtcgccgccgacatcggcacggggcttgccgatgcactaactgcgccgctcgaccataaagacaaaggtttgaaatccctgacattggaagactctattccccaaaacggaacactaaccctgtcggcgcaaggtgcggaaaaaactttcaaagccggcgacaaagacaacagcctcaacacgggcaaactgaagaacgacaaaatcagccgcttcgactttgtgcaaaaaatcgaagtggacggacaaaccatcacgctggcaagcggcgaatttcaaatatacaaacaggaccactccgccgtcgttgccctacagattgaaaaaatcaacaaccccgacaaaatcgacagcctgataaaccaacgctccttccttgtcagcggtttgggcggagaacataccgccttcaaccaactgcccggcggcaaagccgagtatcacggcaaagcattcagctccgacgacccgaacggcaggctgcactactccattgattttaccaaaaaacagggttacggcagaatcgaacacctgaaaacacccgagcaaaatgtcgagcttgcctccgccgaactcaaagcagatgaaaaatcacacgccgtcattttgggcgacacgcgctacggcagcgaagaaaaaggcacttaccacctcgcccttttcggcgaccgcgcccaagaaatcgccggctcggcaaccgtgaagataggggaaaaggttcacgaaatcggcatcgccggcaaacagtag

SEQ ID NO: 59352 - DNA, 837 bp, Neisseria meningitidis; identical to SEQ ID NO: 43139

SEQ ID NO: 59353 - DNA, 738 bp, Neisseria meningitidis
atgttaagcgcgcgctacctccacctgcacgaagccttgggtttgggtccgatgtggttgaagcggggagccgccgtcctgccgcccaaaaacacacccgcaaccccggcacaggcacgtcctcaaaccgtccgcgccgccccaatccgcccttcccaaccccataacggtcaggcgcggctcgaaacgatgaaagcgttggaaaccgccgccgtacctacgcgcaaacccgcgcctgaaaccggaacgcctctgtccggcgtttcagacggcatcgcccccgttcccgccgcttcgggcataaccaaacttgccgtcgtcagcctgtgtccgccgaccgaggatatggtttacgggcagctgttccacggcaaagcgggtgtcctgcttgacaacatactcaaagccgtaggactggatgccgcttatgtacacaagaccagctgggtgaaaaccgccgccgtcggcaacccgatgccgtctgaacaggccatcgcggatgcgctgggtcaaatcgccagggaactcgacggctgccgcgcccccgccgtccttttcctcgggcaggcttttgtccagcctgaacggcaggcgatgattgaaactttgtgcggcagccgtcccttcttcatcatcgaccatcccgcccggctgttgcgccaacccgaacttaaagcccgcgcctggcaggtgttgaaacagttgaaacgcgccttgcggcaaggcggcggcagttga

SEQ ID NO: 59354 - DNA, 168 bp, Neisseria meningitidis; identical to SEQ ID NO: 50106

SEQ ID NO: 59355 - DNA, 1035 bp, Neisseria meningitidis; identical to SEQ ID NO: 43693

SEQ ID NO: 59356 - DNA, 852 bp, Neisseria meningitidis; identical to SEQ ID NO: 55336

SEQ ID NO: 59357 - DNA, 693 bp, Neisseria meningitidis; identical to SEQ ID NO: 50503

SEQ ID NO: 59358 - DNA, 1101 bp, Neisseria meningitidis
atgacccgtatcgccatcctcggtggcggcctctcgggaaggctaaccgcattgcagcttgcagaacaaggttatcagattgcacttttcgacaaaggcacccgccaaggcgaacacgccgtcgcttatgttgccgccgccatgctcgcgcctgcggcggaagcggtcgaagccacgcctgaagtcatcaggctgggcaggcagagcattccgctttggcgcggcatccgatgccgtctgaacacgcacacgatgatgcaggaaaacggcagcctgattgtgtggcacgggcaggacaagccattatccagcgagttcgtccgccatctcaaacgcggcggcgtagcggatgacgaaatcgtccgttggcgcgccgacgacatcgccgaacgcgaaccgcaactcggcggacgtttttcagacggcatctacctgccgaccgaaggccagctcgacgggcggcaaatattgtctgcacttgccgacgctttggacgaactgaacgtcccttgccattgggaacacgaatgtgcccccgaagacctgcaagcccaatacgactggctgatcgactgccgcggctacggcgcaaaaaccgcttggaaccaacctcccgaatacaccagcaccttgcgtggcatacgcggcgaagtggcgcgggtttacacacccgaaatcacgctcaaccgccccgtgcgcctgctgcacccgcgttatccgctctacatcgccccgaaagaaaaccacatcttcgtcatcggtgcgacccaaatcgaaagcgaaagccaagcccccgtcagcgtgcgttccgggctggaactcttatccgcactctatgccgtccaccccgctttcggcgaagccgacatcctcgaaatcgccaccggcctgcgccccacgctcaaccaccacaaccccgaaatccgttacagcctcgcccgacgcctgattgaaatcaacggccttttccgccacggcttcatgatttcccccgccgtaaccgccgccgccgtcagattggcagtggcactgtttgacggaaaagacgcgcccgaacgtgatgaagaaagcggtttggcgtatatccgaagacaagattaa

SEQ ID NO: 59359 - DNA, 423 bp, Neisseria meningitidis; identical to SEQ ID NO: 51488

SEQ ID NO: 59360 - DNA, 1335 bp, Neisseria meningitidis; identical to SEQ ID NO: 50513

SEQ ID NO: 59361 - DNA, 1176 bp, Neisseria meningitidis; identical to SEQ ID NO: 42387

SEQ ID NO: 59362 - DNA, 894 bp, Neisseria meningitidis; identical to SEQ ID NO: 36738

SEQ ID NO: 59363 - DNA, 720 bp, Neisseria meningitidis; identical to SEQ ID NO: 50595

SEQ ID NO: 59364 - DNA, 747 bp, Neisseria meningitidis
atgaacgttttgatttccaacgacgacggctacctctccgaaggcatcgccgttttggcgcgcgttacggcggaatttgccaacgtcagggtggtcgcgcccgaacgcgacaggagcggggtcagcaattcgctgacactggaacgccctttgcagttgaaacaggcgcaaaacggcttttactatgtcaacggcacgccgaccgactgcatccacatcgggcagtctgtattttcggattttcaggccgattttgtcttttcgggcatcaaccggggcgcgaatatgggggacgacacgctttattcggggacggttgcggcggcaaccgaagcctaccttatgggcatgcccgctgtggcgttttccttaaacgacgcttccggacgctattgggcaaccgcagaaaaggcactgtggacattgttggcgcattttttcaaaacccccccgcagtcccctattttgtggaacatcaatatccccgccgttgcgccggaagatgtgcggggcattaaaatcgcccgtttgggcaggaggcatcacggtcagaacgtcattcccgcgcgcaatccgcgcggcgaacagatttattggataggaccggtcggcgaagtttccgatcgggaagagggaacggatttcggtgaatgcggcgcaggtttcattaccgtaacgccgctgcaaatcgacctgaccgcctatccggacatggcggaaacagcggcgttctggcatgcggactga

SEQ ID NO: 59365 - DNA, 957 bp, Neisseria meningitidis; identical to SEQ ID NO: 58720

SEQ ID NO: 59366 - DNA, 1419 bp, Neisseria meningitidis
atgaatattcacaccctgctctccaaacaatggacgctgccgccattcctgccgaaacggctgctgctgtccctgctgatactgcttgcccccaatgcggtgttttgggttttggcactgctgaccgccaccgcccgcccgattgtcaatttggactaccttcccgccgcgctgctgatcgccctgccttggcgtttcgtcaaaattgccggcgtattggcattttggctggcggttttgtttgacgggctgatgatggtgatccagcttttcccttttatggatctcatcggcgccatcaacctcgtccccttcgtcctgaccgcccccaccccttatcagataatgaccgggctgttgctgctgtatatgctggcgatgccgtttgtgttgcagaaagccgccgccaaaaccgacttccggcacattgccgtctgcgccgccgttgtggcggcagccggctatttcaccggccatttgagttactacgaccgggggccgatggccaatatcttcggcgcaaacaacttctattacgccaaaagtcaggcgatgctctacaccgtcagccagaatgccgactttattaccgccggcctggtcgatcctgtcttcctccccttgggcaatcaacagcgtgccgccacgcatctgaacgagccgaaatctcaaaaaatcctctttatcgtcgccgaatcttgggggctgccggccaatcccgaacttcaaaacgccacttttgccaaactgctggcgcaaaaagaccgtttttcggtttgggaaagcggcagttttcccttcatcggcgcgacggtcgaaggcgaaatgcgcgaactgtgcgcctacggcggtttgcgcgggttcgcactgcgccgcgcgcccgacgaaaaatttgcccgctgcctccccaaccgtttgaaacaagaaggttacgccacctttgcgatgcacggcgcgggcagttcgctttacgaccgcttcagctggtatccgagggcgggctttcaagaaatcaaaaccgccgaaaacctgatcggtaaaaaaacctgcgccattttcggcggcgtgtgcgacagcgagctgttcggcgaagtgtcggcatttttcaaaaaacacagcaaaggattgttttactggatgacgctgaccagccacgccgactatcccgaatccgacattttcaaccacaggctcaaatgcaccgaatacggcctgcccgccgaaaccgacctctgccgcaacttcagcctgcacacccaattcttcgaccaactggcggatttgatccaacgccccgaaatgaaaggcacggaagtcatcatcgtcggcgaccatccgccgcccgtcggcaacctcaatgaaaccttccgctacctcaaacaggggcacgtcgcctggctgcacttcaaaatcaaataa

SEQ ID NO: 59367 - DNA, 696 bp, Neisseria meningitidis
atgaaagcgatgatactggcggcaggacgcggcgagcgtatgcgccctttgaccgataccactccgaagccgctgctcgatgtggcaggtaagcctctaatcggttggcacctatgccgtctgaagcaggcggggtttaccgaaatcgtcatcaaccacgcttggctgggtcggcagatagaagatgctttgggcgacggctcggcttatggcgtgaacatcgcctattcgcccgaacccgcaggcggtttggaaacggcaggcggcatcgcgcaggcattgccgctgttgggtgggcagccgtttttggtggtcaacggcgacgtgctgaccgacatcgattttaccgccgcgtttcagacggcattgtccctgccggaacatatttccgcccatctgtggctggtggaaaatccgccgcacaaccccgacggcgatttttccctgctgcccgacggcagcgtgcggccggaagtaaatggcggcaacggattgacattcagcggcgtgggtatttaccgtcctgaaatgtttgacggaatcgaagcgggcagtgtggcgaaactcgcgcccgtattgcggaacgaaatgcggcaaaaccgcgtgagcggtcagaagcatacgggcttgtggctggatgtcggcacggtatgccgtctgaaagaggctcaagcccttgcaggggcttggaagtga

SEQ ID NO: 59368 - DNA, 741 bp, Neisseria meningitidis
atgctgattgtccgtccgtcgggcagggccgcagaagatgtcgaaacttgcctgaatgccggttggcgcgcggaagtattgagtccggtcgaaatcgaagcagatgctgccggactggaacttttgtccgaacaatatgcccgtgcggatgccgtgttttgggtcagtccgaccgccgttgaaaccgccgtcccgtaccttaacctttcagacggcataaaggcgcagattgccgtagggcagggcagccgccgcgcattggaacgctgtttggtcagaacggtcatcgcgcctgatgacggcaacgacagcgaggcggttttgcgcctgccggtttggaacagtctgcccgaaggtgcgcgcgtattgtttgtgcgcggacacggcgggcgggattttttgatgaatgccttgcaggagaaaggttttcggacggagatggcagaagtctatttcagacggcataaacctttgaactttcaaaatttccaaaccgaaaatattgccgccgcctatattacgtcgaccgagctggtgcgcttgctgttcgggcagcttccgccgcaattttcccgattcttcaaatccttgctatactttacccatcatccgcgcattgcggaggcattgaagcgcgaaggcgtgtgttcggtcgaaaccgtccctacgctggaagccgcgctttcccattcttccatttccgtttcagacggcatggtctttcccggaacctcaaattaa

SEQ ID NO: 59369 - DNA, 495 bp, Neisseria meningitidis; identical to SEQ ID NO: 50988

SEQ ID NO: 59370 - DNA, 1272 bp, Neisseria meningitidis; identical to SEQ ID NO: 51484

SEQ ID NO: 59371 - DNA, 864 bp, Neisseria meningitidis
atgagaatcctattgacaggctcaaaaagccaactggcacgctgcctgcgcgaccgtcttcctgaagactgggaaaccattgcgacggattccgcatccctagatattaccgatgccgatgccgtctgcaacatggtcaaaagtttccaacccgacgctattgtcaacacggctgcctatactgccgtcgacaaagcagaaggcgatgcggcagcggcatttgccgtcaatgcttccgccgtttacaaccttgccttggcagcacatcgcgcccatgcccgattcatccacatctcaaccgactatatctttgacggtaaagggaaaagcccctatcaggaaagcgactttaccaatccttccaatgtatacggacaatccaaaaccgcaggcgagctgctcgcactgtctgccaatcccgacagccttatcctgcggacttcttggctgtttagcgaatacggggacaactttgtccgcacgatgctgaaccttgcgcgggaacgttccccgctgtccgccgtccacaaccaaatcggctgcccgacctatgccggcgacttgtccgccgccatcatccgcctgttgcagcagtccaatcccgttcgcggcatttaccactacgtcggcggcaaatccgtatcctggtacgaatttgcccaacatattttccaagcggcatcgcaacagcagacatccttccccattcccgaattgactgccgtttcagacaaggaatatccgaccgccgcccccaggcccgcatacagcattttggactgccgcaaaatcgaaaacgacttcggcatcaaaccgtcagactggcaaaaagcccttgcacaggtcgtttccaagctgctctga

SEQ ID NO: 59372 - DNA, 1116 bp, Neisseria meningitidis; identical to SEQ ID NO: 50480

SEQ ID NO: 59373 - DNA, 456 bp, Neisseria meningitidis; identical to SEQ ID NO: 59168

SEQ ID NO: 59374 - DNA, 1155 bp, Neisseria meningitidis; identical to SEQ ID NO: 55455

SEQ ID NO: 59375 - DNA, 2427 bp, Neisseria meningitidis
atgtcggcacaaaccgatcccggctacttcttcatgcccaaccacattatcctgataggcgcgagcgaacgtccgtacagcctgggcgaacgcgtactcagcaacctgctgagtacgccctttcaaggaaaaatcacccccgtaaacccgcgccaccacaccatagccgggcttcccgcctacaccagcctcaacaaaatccccggcaatgcagacctgattattgccgttaccctacccgacagttacgacaccctcttcaaaacctgccgcaaaaagcagctccgacacatcatcctcatacaggactgggacagcctgtctgccgcagaactgcacaccgccgaaactgccatccgcaaacaccacggcaacggactcaacatcaccgcctgcaccaccgcaggcatccaactgccctcactcggacttaacatcagtacccaagacggatacgccgcaggccataccgccatactgaccggcaatgccgccgtcagccgccaaatcgacaacatcctgaacaaactccgtcaaggcacatcccgccacatcagcctgcatcccggcatcagccccatcacatccgccgattggctcaaccgcttcggacacagcctgcacaccaaaaccgccgtcctacaccacaaccctgaagaggatcagcgcaaactgttcagcgcaatccgccaatttacccgccatacgccgctgattctccacatcacctgccgcacgacagaaaccgaccgtgccgtactgcactgcctcgcccgacactgcaacttcctcatcagtttcaacgccgacgacctcgaagccgcactgcgcgcccaactgtccgaccttccacccctgtcccgactcgacatcctgtccgacacgcctgccgaatggctgaacgcgcacgcgccaaaaaccctcgccctccactttcccaaccttccccaccacatccgcaacggacacctgaccggcacacccacaccctcaatctgccacgacatcgcctcacgtcagcttgcccgccccgacacccaagccgtcctgaccatcctcagtccctccggacacgaggattacaaaaaaacagcacgcgcccttatccgcctgtccgaacagaccgccaaacccctgctcgtcagcagccccttttcagacggcataacccatttcgacacccccactcaggcaatccgcaccctttcctaccgcaacaccgccgccgccctgaaacaggcacagctcgacattgcaccgccgcagccatgccgtctgaaaacaccgcaaccccaaaacatcaaaaaagcccttgcagcggcaaatccctccctgctcgccgaagccctgcacctccccccctaccggcacactacccataacgccgtccaattccaattcggcagccaccccatttacggcaatattctgaccgtacggtacgcagggcaaaccacggccgcccttcccccgtttaccacacaggacagcctccatatcgcccagtttgccgaattggaagacccgcaaacccttaaccagttccttcacatactgaccaccctttccgaccacaacctgcacatcggcaaaatcaccctcaacctaaacggcggacaatacagcagcgatttcatcttaaagacacccgaaacacacgacacgcccaaacgcaagaacacaggcaaagccgcccaaaccctcgaacatgccgccgcaaaaatgcagagtgccgccgcatacctgaaacacaaaaacccgacagccgccgaatttctccgccacacaagcgaagccgccgcagaactgctcggcagcaaaaccgaaaccggagcagccgtacccaacgtacttgccccctatcccgcagcacaccccaaaacactgtccctaaaaaacaacacgaccgttaccattaccccccttttgcccgaagacgcagaagccaaacagcagttcgtccgcagcctcggtcccgaagcacggtacacacgcttcatgacccacaccaacgaactgcccgcagccacgttggcacgcctgtgcaaccccgattaccactgtgaagccgcatggacggcaaaggatgccgacagcaacatcgtcgccgtcgtccgccacagccgcctgaaccgcaacgaatgcgaattcggcatcacactggcggaacatatgcgcggcagcggactggcacagaaaatgatggaactcatcatccaaaccgccgcacagcaaggctaccggactatgagtgccgacattctcaaaaccaatactcccatgatcaaacttgctgaaaaatcaggatttaccctcaaggaatcggacaccgaaaaaaacctgtaccgcgcatatctgaaccttgcggcagacaaaacaacagaaaaaacaaataaaaacttgcgcaccgaccacaaaataacctaa

SEQ ID NO: 59376 - DNA, 876 bp, Neisseria meningitidis; identical to SEQ ID NO: 43311

SEQ ID NO: 59377 - DNA, 822 bp, Neisseria meningitidis; identical to SEQ ID NO: 42663

SEQ ID NO: 59378 - DNA, 414 bp, Neisseria meningitidis; identical to SEQ ID NO: 41572

SEQ ID NO: 59379 - DNA, 1371 bp, Neisseria meningitidis; identical to SEQ ID NO: 42735

SEQ ID NO: 59380 - DNA, 1407 bp, Neisseria meningitidis
atggaaaaaaacaccctatccgcccgcgcaccatccccttggctgccgcttctgctggcaattgccatttttatgcagatgttggatgcgaccattttaaataccgcactgcctgaaattgccgccgacctgaatgagtcgccattgaacatgcagctggcggttatttcctacacgctgacggttgccctgctgattcctttgagcggttatttggcggacaggttcggaacgaaaaaagtctttttcggttcgattgccgtttttatgctcggatcggcattgtgcgccgcatcgggttcgctgtttgaattgacgctttcccgtgtcgttcagggcatcggcggttcgatgctggttccgataccgcgtctgaccatcttgcgtgtgtacgacaagtccaagctgctcaacgccatcaattatgcggttatgcccgcattaatcggaccggttttagggcctttggcgggcggttatctggtcgaatacgcttcgtggcactggattttcctgctcaacctgcccatcggtcttttgggtttcatattgggacgcaacatcatgcccgatattaaaggcagcaatatctctttagacttcaaaggttatctgattttttctgccgccgcgtgcctcttgttactttcggcagaaagcctgtcgcacgcgctgcctccgtattttgcactgttgccgctgtgcggcggactgctgtttgcacgccgttatttccgacatatgaaaaccgcgtccaaaccgatttattccgccgacctgtttctgatacgcactttccgtctaggactggcgggcaatctgttcagccgtctcggcatcagctcgattccttttctgatgcccctgatgtttcaagtcgctttcggcttcggcgcaagcctgtcgggttggctggtcgcccccgtcgccctgtcttcgctgctggtcaaaccgctgattgcaccgctcatgaaacgtttcggctaccgcacggtactgctttggaacaccaagctgcttgccgccttcatcatgctgctcgccctgcctgatggaaactcgccgctgtggatttggattttcctctcgctggcgatcggcgcgtgcaactccctacagttttctgccatgaacacactgaccctcgccgatttgcgcccgcaacagaccggcagcggcaacagcctgatggcggtcaaccaacagctttccatcagcatgggcattgttgccggcgcattaatccttaaaaactggacatttctgataccggcttcttcaggtctgcattccgccttccgtatgaccctgctcagtatcggcggcattacccttgcctcgtcgttggttttcaagcgtctgcacgtttcagacggtgcaaacctgacacggaacacaccgtcctaa

SEQ ID NO: 59381 - DNA, 2286 bp, Neisseria meningitidis
atgaataccaaactgacaaaaatcatttccggtctctttgtcgcaaccgccgcctttcagacagcatcggcaggaaacattacagacatcaaagtttcctccctgcccaacaaacagaaaatcgtcaaagtcagctttgacaaagagattgtcaacccgaccggcttcgtaacctcctcaccggcccgcatcgccttggactttgaacaaaccggcatttccatggatcaacaggtactcgaatatgccgatcctctgttgagcaaaatcagtgccgcacaaaacagcagccgtgcgcgtctggttctgaatctgaacaaaccgggccaatacaataccgaagtacgcgggaacaaagtttggatattcattaacgaatcggacgataccgtgtccgcccccgcacgccccgccgtaaaagccgcgcctgccgcaccggcaaaacaacaggctgccgcaccgtctaccaagtccgcagtatccgtatccaaaccctttaccccggcaaaacaacaggctgccgcaccgtttaccgagtccgtagtatccgtatccgcaccgttcagcccggcaaaacaacaggcggcggcatcagcaaaacaacagacggcagcaccagcaaaacaacaggcggcagcaccagcaaaacaaaccaatatcgatttccgcaaagacggcaaaaatgccggcattatcgaattggctgcattgggctttgccgggcagcccgacatcagccaacagcacgaccacatcatcgttacgctgaaaaaccataccctgccgaccacgctccaacgcagtttggatgtggcagactttaaaacaccggttcaaaaggttacgctgaaacgcctcaataacgacacccagctgattatcacaacagccggcaactgggaactcgtcaacaaatccgccgcgcccggatactttaccttccaagtcctgccgaaaaaacaaaacctcgagtcaggcggcgtgaacaatgcgcccaaaaccttcacaggccggaaaatctcccttgacttccaagatgtcgaaatccgcaccatcctgcagattttggcaaaagaatccgggatgaacattgttgccagcgactccgtcaacggcaaaatgaccctctccctcaaagacgtaccttgggatcaggctttggatttggttatgcaggcacgcaacctcgatatgcgccaacaagggaacatcgtcaacatcgcgccccgcgacgagctgcttgccaaagacaaagccttcttacaggcggaaaaagacattgccgatctgggtgcgctgtattcacaaaacttccaattgaaatacaaaaatgtggaagaattccgcagcatcctgcgtttggacaatgccgacacaaccggaaaccgcaatacgcttgtcagcggcaggggcagcgtgctgatcgatcccgccaccaataccctgattgttaccgatacccgcagcgtcatcgaaaaattccgcaaactgattgacgaattggacgtacccgcgcaacaagtgatgattgaggcgcgtatcgtcgaagcggcagacggcttctcgcgcgatttgggcgttaaattcggcgcgacaggcaagaaaaagctgaaaaatgatacaagcgcattcggctggggggtaaactccggcttcggcggcgacgataaatggggggccgaaaccaaaatcaacctgccgattaccgctgccgcaaacagcatttcgctggtgcgcgcgatttcctccggtgccttgaatttggaattgtccgcatccgaatcgctttcaaaaaccaaaacgcttgccaatccgcgcgtgctgacccaaaaccgcaaagaggccaaaatcgaatccggttacgaaattcctttcaccgtaacctcaatcgcgaacggcggcagcagcacgaacacggaactcaaaaaagccgtcttggggctgaccgttacgccgaacatcacgcccgacggccaaatcattatgaccgtcaaaatcaacaaggactcgcctgcgcaatgtgcctccggtaatcagacgatcctgtgtatttcgaccaaaaacctgaatacgcaggctatggttgaaaacggcggcacattgattgtcggcggtatttatgaagaagacaacggcaatacgctgaccaaagtccccctgttgggcgacatccccgttatcggcaacctctttaaaacacgcgggaaaaaaaccgaccgccgcgaactgctgattttcattaccccgaggattatgggtacggccggcaacagcctgcgctattga

SEQ ID NO: 59382 - DNA, 876 bp, Neisseria meningitidis; identical to SEQ ID NO: 37005

SEQ ID NO: 59383 - DNA, 1014 bp, Neisseria meningitidis; identical to SEQ ID NO: 36441

SEQ ID NO: 59384 - DNA, 2256 bp, Neisseria meningitidis
atgggacagtacaagaagctgtggtacttgctgtttgccgttctggcggtatgctttaccattcttggctatatgggcagcgaggtttacaaaaaagccccgccttaccctgaacaagtcgtttctgcatccggcaaagtcctgatgacgaaagacgatattttggcaggtcagtctgcatggcagactaccggcggtatggaagtcggctctgtattgggtcacggtgcataccaagctccggactggactgccgactggctgcaccgtgagctggttgcatggttggatctgactgcgcaagaaacttacggcaaaaaatttgacgaagtttctcctgaagaacaagctgttctgaaaacccgtttggctgacgaataccacaaccaaagccgtattaaggaagatggttctgtcgttgtcagcgaaacccgcgtgaaagcgatcgaaagcatcctgccttactaccacggtgtgtacagcgacgatcctaagtttcaaaccactcgcgaacacttcgcaatgaaaaacaatacattgccaagccaagaagcgcgtgaaaaactgttcgacttcttcttctggacttcttggtctgcttcgaccaaccgtcctgacgagaacttcacctacaccaacaactggccgcatgagcctctgatcaacaacgtgccgactactgaaaactatatgtggtctttcaccagcgtggtattgttgctgatgggtatcggcttgctgatgtggggttactctttcttgaccaaacatgaagaggttgaagtacctactgaagatcctatctctaaagtacaactgactccttctcagaaagcgttgggcaaatatgtatttctgactgttgcactgtttgtcgtacaggtattgctgggcggtctgaccgcgcactacaccgtcgaaggccagggtttctacggcattgacgaggcgttgggctttgaaatgtccgactggttcccctacgccctgacccgtacttggcacatccaatccgccatcttctggattgcaaccggctttttgacggcaggtttgttcctcgcgccgattgtcaacggcggtaaagatcccaagttccaacgtgccggcgtaaacttcctctatatcgccctcttcatcgtggtcggcggttcttacgcgggcaacttcttcgcgttgacgcacatccttcccccggaatttaacttctggttcggacaccaaggttacgaatacctcgatttgggacgtttctggcaactcctgctgatggtcggcctgttgttgtggctgttcctgatgttgcgctgcacggtttccgccttcaaagaaaaaggcgtggacaaaaacctgctggcaatctttgtcgcttctatggtcggtgtgggcgtattctacgcaccgggtctgttctatggcgaaaaatccccgattgccgtaatggaatactggcgttggtgggtggttcacctgtgggtggaaggcttctttgaagtatttgccactgccgcctttgcctttgtcttctacaatatgggctttgtccgccgcagtaccgccactgcctctactctggccgctgccgccatctttatgttgggcggcgttccgggtacgctgcaccacctgtacttctccggctctacctccgcctctatggcaatcggcgcctgcttctccgctttggaagtcgtgccgctggtgttgctgggccgtgaagcatacgagcattggtcttaccaacacctgtccgactgggcgaaacgcctgcgttggccgctgatgtgcttcgtggcagtcgccttttggaatatgatcggtgccggtgtattcggtttcctgattaacccgccgatttccctgttctatatccaaggtttgaatacttctgctgttcatgcgcacgccgccttgttcggtgtgtacggtttcttggcattgggcttcgtattgctggttgcccgttatttgaaaccgaacgcgcagtttgacgacaaactgatgacttggggcttctggctgctcaacggcggcttggtcggtatgattgccatcagcctgctgcctgtcggcgcgattcaggcatacgcctccatcacgcacggtctgtggtatgcccgcagcgaagagttcctgcaaatggaaatcctcgataccttgcgttgggtacgtacggcagctgacttggtctttatcggcggtgcaatctgcgttgccatccaagctactaaaatcgtattcggccgcgacaaataa

SEQ ID NO: 59385 - DNA, 597 bp, Neisseria meningitidis
atggcttttattacgcgcttattcaaaagcagtaaatggctgattgtgccgctgatgctccccgcctttcagaatgtggcggcggaggggatagatgtgagccgtgccgaagcgaggataaccgacggcgggcagctctcagtcagcagccgcttccaaaccgagctgcccgaccagctccaacaggcgttgcgcaggggcgtgccgctcaactttaccttaagctggcagctttctgccccgacaatcgcttcttatcggtttaaattggggcaactgattggcgatgacgacaatattgactacaaactgagtttccatccgctgactaaccgctaccgcgttaccgtcggcgcgttttcgacagactacgacactttgggtgcggcattgcgtgcgaccggcgcggttgccaactggaaagtcctgaacaaaggcgcgttgtccggtgcggaagcaggggaaaccaaggcggaaatccgcctgctgctgtccacttcaaaactgcccaagccttttcaaatcaacgcattgacttctcaaaactggcatttggattcgggttggaaacctttaaacattatcgggaacaaataa

SEQ ID NO: 59386 - DNA, 1131 bp, Neisseria meningitidis
atggccaaacatctgccactcgccgtcctgactgctttgctgcttgcagcgtgcggcggttcggacaaaccgcctgccgaaaaaccggcaccggcggaaaaccaaaacgtattgaaaatttacaactggtcggaatacgtcgatccggaaaccgttgccgattttgaaaagaaaaacggcatcaaggttacttatgatgtgtacgacagcgatgaaacgctggaaagcaaggtgctgaccggaaaatccggttacgacattgtcgcgccgtccaatgcgtttgtgggcaggcagattaaggcaggtgcgtatcagaaaatcgataagtcgctgattcccaattataaacacctcaaccccgaaatgatgaggctgatggacggggtcgatcccggccacgaatacgccgtgccgttttattgggggacaaataccttcgccatcaataccgaacgcgtgaaaaaggctttgggtacggacaagctgccggacaaccagtgggatttggtgttcgaccccgaatacacgtccaaactcaaacaatgcggtatcagttatttagacagcgcggcggaaatctatcctatggtgttgaactatttgggtaaaaacccgaacagcagcaatacggaagacatcagggaggcaaccgccctgctcaagaaaaaccgccccaatatcaaacgctttacttcgtccggctttatcgatgatttggcgcgcggcgatacctgcgtaacaatcggtttcggcggcgatttgaacatcgccaaacgccgtgccgaagaagcgggcggcaaggaaaaaatccgcgtgatgatgcccaaagagggcgtggggatttgggtggattctttcgtgattccgaaagatgcgaaaaacgtcgccaacgcgcacaaatacatcaacgacttcctcgacccggaagtgtcggcgaaaaacggcaatttcgttacttatgcgccttcgagcaagccggcgcgtgagctgatggaagacgaatttaaaaacgacaatacgattttcccaaccgaggaggatttgaaaaacagctttatcatggtgcctatccagccggcggcattgaagtttatggtgcgccagtggcaggatgtgaaggcggggaaataa

SEQ ID NO: 59387 - DNA, 1509 bp, Neisseria meningitidis; identical to SEQ ID NO: 43352

SEQ ID NO: 59388 - DNA, 1089 bp, Neisseria meningitidis
atgagcgactacacgcagcagcttcaagataaaaaagaccaccttaaaaccctttttgcaggtttggatgttcctgagtgggaagtgtacgaatctccggacaaacattaccgtatgcgtgccgagttccgtatttggcacgaaggcggtgaaatgttttatgccatgtttgaaaaaggacaaaaggctggcggggcaagcctgatccgttgcgaccgttttgaagcggcttccgaagccgtcaaccgcctgatgccagaattgattgccgttgccgcccaatctgccgaactgagaaaccgttggtatgccgtcgaatttttgtctacgctcagcggggaaatgctggttaccatgatttaccacaaaaggcttgataatgagtggatgcaggcggcgcaagcgttacagcaacagttggatatttccgtcatcgggcggagcaggggacagaaaatagtcttaaaacaggactatgtaacggaaactttgaaggtcggcaaccgggatttccgttatcggcaaattgaaggcagttttacccaaccgaatgccgccgtgtgtcagaaaatgcttgaatgggcctgcggtgcagcagaaggattggatggggatttgctcgaactgtattgcggaaacggcaactttacgcttcctttatctgaaaagtttgaacgtgttttggcaaccgaaatctccaaaacctccatcagcgcggcgcaatggaatatcgaagccaaccgcatcggcaacatcaaaatcgcccgtctgtctgctgaagaatttaccgaagcctataccggaaaacgtgagtttaaacgccttaaggatggcggtattgctttgacggattacgcattttccactattttcgtcgatccgccgcgtgccggtatcgatgaggaaactttgaagctggtgtcgcagtttgacaacatcatctacatttcctgcaatcccgaaacgctgcgtgccaatttggacaccttggtggaaacccatgcggtcgaacgcgccgccctgttcgaccaattcccgtttacgcaccatatcgaaagtggtgtattgttgaaaaagaaaatcctttga

SEQ ID NO: 59389 - DNA, 546 bp, Neisseria meningitidis
atgagcaaaattatttgtctgactgccggacacagtaacaccgacccgggcgcagtcaacggcagcgaccgtgaggcggacttggcgcaggatatgcgcaacattgtggcttcaatcctgcgtaacgattacggcctgaccgtacgcaccgacggcgaaggcaaaggcaatatgcccttgcgcgatgcggtcaagctgattcgcggctcggatgtggcgattgagttccacaccaatgcggcggcgaacaaaacggcgacaggcatcgaagccttgtccacgccgaaaaataaacgctggtgtcaggtgctgggcaaagccgttgccaagaaaaccggctggaaactgcgcggcgaagacggctttaagccggataacgcagggcaacattcgcgcctggcttatgcgcaggcaggcggcattgtgtttgagccgttttttatcagtaacgacactgatttggccttgtttaagacgaccaaatggggcatctgccgcgcgattgcggacgcgattgcgatggaattgggagcggcgaaggtatga

SEQ ID NO: 59390 - DNA, 2691 bp, Neisseria meningitidis
atgtccgacaaccgcctcgacaccgcccgccgccattccctgttccttgcccgccagctcgacaacggcaaactcaagcccgaaatattcctgccgatgttggacaaggtgttgaccgaagcggattttcaagcttttgccgattgggacaaaatccgcgcggaagaaaacgaggaagaattggcgcggcagttgcgcgagttgcgccgttatgtcgtgtcgcagattatcgtgcgcgatataaaccgcatcagcgatttgaacgaagtaacccgcacgattacgctgtttgccgattttgccgtcaatgccgcgctggattttgcctacgcctattatcgggacatgtacggcacgccgatcgggcgttatatcaaatcgccgcagcatttgagcgtggtggcgatgggcaaggcgggcggctatgagttgaacgtgtcttccgacatcgatttgattttcatctatcccgaatcgggcgataccgacggcaggcgcgaacgcggcaatcaggagtttttcaccaaagtcgggcagaaactgattgcgttgttgaacgacattaccgccgatgggcaagtgttccgcgtcgatatgcggctgcggccagacggcgattcgggtgcgctggtgttgagtgaaaccgcgctggagcaatatttgattacgcaggggcgcgaatgggaacgctacgcgtggtgcaaaggccgcgtggttacgccgtatccgaacgacatcaaagcgttggtgcgcccatttgtattccgcaaatatctagattacagcgcgtatgaggcgatgcgtaagctgcaccgccaaatcagcagcgaagtcagcaaaaaaggcatggcggacaacatcaaactcggcgcgggcggcatccgcgaagtcgaatttatcgcccagattttccagatgatacgcggcggacaaatgcgcgcgctgcaactgaaaggcacgcgggaaacgctggaaaaactcgccgaatcgggcattatgccgtctgaaaacgtcgaaaccctgcttgccgcctaccgctttttgcgcgatgtcgaacatcgtttgcaatattgggacgaccggcaaacccaaaccctgccggcttcgcccgaacagcggcaactgcttgccgaaagtatgggatttgatgattacgccgattttttgaatgctttaaatcaacatcggaaccaagtcaaccggttgtttaacgaaattttgagcgaaccggaagaacaaacgcaaagcaacggcgaatggcagtgggtttggcaggacaaacccgacgaagaagggcggcgatgccgtctgaaggcgcacgggttcgatgccgaaaccgtcgccgcaaggctcgaccaaatccgccacggccataaataccgccatctttccgcacacgcccagccgcgtttcgatgcggttgtgccgctgttcgtacaggcggcggcagcgcaaagcaacccgaccgatacattgatgcggctgttggattttctcgaaaacatcagccgccgatccgcctatctcgccttcctcaacgaacatccgcaaaccttggcgcaactggcagagattatgggccaaagttcttgggtggcggcgtatctgaacaaatatccgattttgttggacgaactcatcagcgcgcagcttttggataccgcgtttgattggcaggcgctcgccgccgccctttcagacgacctcaaagcctgcggcggcgatactgaagcgcaaatggacaccctgcgccgcttccagcacgcccaagtcttccgtctcgccgtccaagacctcgccggactgtggacggtagaatccctctccgaccaactctccgccctcgccgacaccatcctcgccgccgccctgctgtgcgcatgggcggacatgcccaaaaaacaccgcgacacaccgcaattcgccgtcgtcggctacggcaaactcggcggtaaagaactcggctacgcctccgacctcgacctcgtctacctctacgacgacccccaccccgacgcaggcgacgtgtacagccgcctcgcccgccgcctgaccaactggctttccgccgccactggcgcaggcagcctctacgaaaccgacctgcgcctgcgccctaatggcgacgccggtttcctcgcccacagcatcgccgcctttgaaaaataccagcgcgaaaacgcctggacgtgggaacaccaatcccttacccgcgcccgcttcatctgcggcacgtccgaaattcagacggccttcgaccgcatccgcaccgaaatcctcaccgccgaacgcgaccaaaccgccttggcaggcgaaatcatcgaaatgcgcgaaaaaatgttccccacccacccgcctgccgacagcaacgtcaaatacgcgcgcggtggcgtggtcgatgtcgaatttatcgtccaatatctgatacttgcccatgcccgaaaatatccgcaacttctcgacaactacggcaacatcgccctcttgaatatcgccgccgactgcagccttatcgacaaaaacctcgccggacaaagccgcaccgcctaccgcttctaccgccagcaacagcacaacaccaaactgcgcgacgcggcaaaaaccgaagtaagcgacgaattactgtcccattacggcaatgtcaggaaattgtggcgggaagtgttcggcgaagaagcggcaaccgcctga

SEQ ID NO: 59391 - DNA, 432 bp, Neisseria meningitidis; identical to SEQ ID NO: 42220

SEQ ID NO: 59392 - DNA, 1269 bp, Neisseria meningitidis
gtgaaaccgctgcgcagactgacaaacctccttgccgcctgcgccgtagcggcggccgcactcatacagcccgccctcgcggcggacttggcgcaagacccgttcattaccgataacgcccaacggcagcactacgaacccggcggcaaataccacctcttcggcgacccgcgcggcagcgtttccgaccgcaccggcaaaatcaacgtcatccaagactatacccaccagatgggcaacctgctcatccaacaggcaaacatcaacggcacaatcggctaccacacccgcttttccggacacggacacgaagaacacgcccccttcgacaaccacgccgccgacagcgcgagcgaagaaaaaggcaacgttgacgaaggctttaccgtgtaccggctcaactgggaaggacacgaacatcatcccgccgatgcctacgacggcccgaagggcggcaattaccccaaacctacgggtgcacgcgacgaatacacctataacgttaacggcgtagcccgcagcatcaaactcaatccgaccgacacccgcgacgtcagacaacgcatatccgacaactacaacaacctcggcagcaatttctccgaccgcgccgatgaagccaacagaaaaatgttcgagcacaatgccaagctcgaccgctggggcaacagcatggagtttatcaacggcgtcgccgccggcgcgctcaacccctttatcagcgcgggcgaagccgttgaccagtggatgcaggaaaaccccaatgccgccgaaaccgtcgaagccctggtcaacgtcctgccgtttgccaaagtcaaaaacctgacaaaggcggcaaaaccggggaaggctgcggttagtggggatttctcagactcctacaagcataacactgcttcaagattatctcagtctgtagatggagaaatgtttcaaacccgcaatgttgattttaaagcaaaatctattgggactaaaattcatgatggagctcaagggaaacatatttcaggacatagaaactacattgaaggtaagagtactttaaatcaaaacattaatcctcaagaattgttgaacggaatacattcaggtgcttatccagttatttctaaaggagcaagaggaaatcctgttgttgattttgggtatcctataggcagcgatgggaaatcaggattaagtaccaattttggtacgattcattcaggtaaaaatggagttcacattgttccggctaaccctaaaaccattaaaaaggtgcaatag

SEQ ID NO: 59393 - DNA, 282 bp, Neisseria meningitidis; identical to SEQ ID NO: 43821

SEQ ID NO: 59394 - DNA, 738 bp, Neisseria meningitidis; identical to SEQ ID NO: 50415

SEQ ID NO: 59395 - DNA, 318 bp, Neisseria meningitidis
atgaacaagccgtttatcactcaggcgcagttggcactttataaatatcagccgtcaagcaagtattttgggcaatcgatggcggttatagcgcaatctgaatttgttgaatttgcgaagattaataagtctgaaaatgttattgattgtttctcttttttctggaatagaagaattaaacatgatatttggctaatctcattttctgataattcagaaatggtaattaaagaatctctgaaagatggtcataaaatatacaaatttgaattttgcgaaattgtcgataattgcaattttgatgatgtattcgtttga

SEQ ID NO: 59396 - DNA, 1311 bp, Neisseria meningitidis
gtggctaatcaacaaacgtcatcaggttcatccaaatttggagatcttaagaaacgtcttttgtttctatttggagcattgattgtttttcgaattggtgcccatatacccgtacctggagttgatgctgttgctttagctaaattatacgaaagcgctggaaacggcatcctgggaatattgaatatgttttccggtgggtcgttagagcgctttagtatatttgcaataggaattatgccatatatttcagcttctattattgtacagctcgcttctgaaattttgccatcattgaaggctttaaaaaaagaaggggaggctggtagaaaggtaattacgaaatatactaggtatggtactgttttgttagcaattcttcaaagtctaggtgttgcatctttcgtatttcagcaaggaattgttgtaacaagttcatttgagtttcatgtttccacggtagtttctttggtaacgggaaccatgtttcttatgtggcttggggagcaaattactgaaaggggtatcgggaacggtatttctttaatcattacggcaggtattgcttcaggtattccttcgggtattgcaaagctggttacactgacgaaccaaggttctatgagcatgcttacggcgttgtttattgtatttggtgccttattattaatttatttggttgtatactttgaaagtgcacagcggaagattcctattcattatgcaaaacgccagtttaatggtagggcgggtagtcaaaatacgcatatgcctttcaagttgaatatggctggtgttattcccccaatttttgcttccagtattattctatttccatctactcttttaggttggtttggttcggctgatacaaatagtgttttgcacaaaatagctggattgttacaacacggtcaattgctgtatatggctttatttgcagcgacagttattttcttttgttatttttatacggctttggtttttagctctaaagaaatggcagagaatttaaaaaagagtggtgcttttgttcctgggattagacctggtgagcagacctctaggtatttagaaaaagttgtattacgtttgacattgtttggagctctttatattacaactatttgtttaattccagagttcttaactacggttttaaatgtacctttttatttgggtggcacgtctttgttgattctagttgttgtaacgatggattttagtacacaaataaattcgtataggcttactcaacagtatgataagttaatgactcgttcagaaatgaaatcattttctcggaaatag

SEQ ID NO: 59397 - DNA, 435 bp, Neisseria meningitidis; identical to SEQ ID NO: 42997

SEQ ID NO: 59398 - DNA, 1086 bp, Neisseria meningitidis; identical to SEQ ID NO: 43799

SEQ ID NO: 59399 - DNA, 246 bp, Neisseria meningitidis
atggtttttgacgatattgccaaacggaaaatccgttttcaaacccgccggggattgttggagttagatttaatcttcggcaggtttatggaaaaagaattcgagcatttgagcgataaagagctgtccgagttttccgaaatccttgaatttcaagatcaagaattgcttgccttgattaacgggcattcggaaacggacaaagggcaccttatcccgatgcttgaaaaaatcagacgggcatga

SEQ ID NO: 59400 - DNA, 2829 bp, Neisseria meningitidis; identical to SEQ ID NO: 50744

SEQ ID NO: 59401 - DNA, 1008 bp, Neisseria meningitidis
atgtatccacttgcccgccgcatcctgtttgcactcgatgccgaaaaagcccaccacttcacgctcgacgcgctctacacggtttataaattgggtctgattcccgtaaccggcaaccgtaccaaacctgtaaaattgatgggtatggatttgcccaaccctgtcggacttgccgccggactcgacaaaaacggcgaatacatcgacgcattgggcgcgctcggctttggtttcatcgaaatcggcacggtaacgcccaaaccgcagcccggcaacccgcagccgcgcctcttccgcgttcccgaacaccaaggcatcatcaaccgcatgggtttcaacaaccacggtatcgacaccatgatacgcaacatcgaaaaaagtaaattcagtggcgtattgggcatcaacatcggtaaaaacgctgtaacaccgattgaaaacgctgccgatgattatttaatctgcctcgaaaaagcctacgcacacgcaagttacattaccgtcaatatttcctcgcccaacactaaaaacctccgcgcgctgcaaggtggcgacgagttgagcgcattgcttgaggctttgaaaaacaaacaggcacagcttgcctctgtacacgggaaatacgttccgctcgccgtcaaaatcgcccccgatttggatgaagcacaaatcgaagacatcgcccacgttgtcaaatccgtcgaaatggacggcatcatcgctaccaataccaccatcgacaaatcaagcctcggcagccatccgctcgcaggcgagcagggcggtttgagcgggctgcccgttcatgaaaaaagtaatcgggtgttgaagctgttggcagaccacatagacggcaagctgccgattatcggcgtaggcggcattatggaaggcagggactcggcagataaaatccgcttgggcgcaactgccgtccaggtgtacagcggattgatatacaaaggtccggcattggtcaaagaatgtttgaaggctttggcgcaatga

SEQ ID NO: 59402 - DNA, 2751 bp, Neisseria meningitidis
atgttatttaacgcaacgcaggccgaagagctgcgcgttgccatcgtcgacggacaaaacctgctggatttggacatcgaaacgctgggcaaagaacagcgcaaaggcaatatctacaaaggcatcattacccgcatcgagccgtcgctggaagcgtgtttcgtggattacggaaccgaccgccacggcttcttgccgtttaaagaagtctcccgctcatacttccaagactacgaaggcggacgcgcgcgcatccaagacgtgctcaaagaaggcatggaagtcatcgtccaagtcgaaaaagacgagcgcggcaacaaaggcgccgcgctgaccaccttcatcagcctcgccggacgctatctggtattgatgccgaacaacccgcgcggcggcggcgtatcccgccgtatcgaaggtgaagagcgtcaagagttgaaagccgccatggcggaactcgacattccgaacggcatgagcatcatcgcccgtaccgccggcatcggccgcagcgcggaagagttggaatgggacttgaactacctcaaacaactctggcaggcgattgaagaagcaggaaaagcgcatcacgacccctacctgctctttatggaaagctcgctgctgatccgagccatccgcgactatttccgccccgacatcggcgagattttggtggacaatcaagaagtttacgaccaagttgccgagttcatgagctacgtcatgccgggcaatataggccgtctgaaactctacgaagaccacacgccgctgttttcccgcttccaaatcgaacaccaaatcgaaagcgcgttttcgcgcagcgtcagcctgccctccggcggcgcgatcgtcatcgaccataccgaagccctcgtctccatcgacgtgaactccgcacgcgccactcgcggcgcagacattgaagacaccgcgttcaaaaccaatatggaagccgccgaagaagtcgcccgacaaatgcgcctgcgcgacttgggcggcttggtcgtcatcgacttcatcgacatggaaaaccccaaacaccagcgcgatgtggaaaacgtcctgcgcgacgcgctcaaaaaagaccgcgcccgcgtgcagatgggcaaactctcccgtttcggacttttagaattgagccgccaacgtttgaaaccggctttgggcgaaagcagccacgtcgcctgtccgcgctgcgccggcaccggcgtgattcggggcatcgaatccaccgccctgcacgttttacgcatcattcaagaagaagcgatgaaggacaacaccggagaagtgcgcgcacaagtgcccgtcgatgtcgccaccttcctgctgaacgaaaaacgcgccgagctgtttgcgatggaagagcgtttggatgtcaacgtcgtcctgattccgaacatccacctcgaaaatccgcactacgaaatcaaccgcatccgcaccgacgacgtagaagaagacggcgaaccgagctacaaacgcgtcgccgagccggaagaagacgaatccgccaaaccgttcggcggcgaaaaagccaaagccgcccgtcccgaacccgccgtcaaaggcgtgcgccacaccagccccgccccgactgccgcccccgagaaaaaaacctcttggtgggacagcttcaaagcatggctcaaacgcattttcggcggcagcgaaacccaagccgcgcccgctgccgaaacctccgaaaaacgcagcacggcaaaccgcagcggcagccgcgccaacaaccgccgccaaaacccgcgccgcagcaaacgcgaaggcagcaaagtagaagtccgcgaagtggcaggcaaaactgccggacaggaagcgcgtgccgacaaagccgaaacgcgcaacaacggcaaccgccgccgcaatgaacgcggcgaccgtgccgccgaacgcgccaacgaagcggaaatccaaagccgcaacgtacagcctgccgcaaccgttgcagatgccgcaccgtccgaaaccgaaatgcaaaccggcaaacgccgccgcaacggcagccgcagcgaacgcagccaaaccgcgccggaaaccgccgccgttgccgaaacagccgttcagacagcggaaaacacgccgtccgaaccgcataccgcagaagacaaaggcagcaagcccaaatccgaacgcaaccgccgcgaacgcgacagccgcgacgccaaagaacgccgcgagcgcaacaatcagcgcgaccgccgtcaaaacggcaaaaaacgcaatatcccgtctgccgccaaaatcgagcagtacctgaatattcacgacaccgccgacaaagtccgttccgccgccgcgcacgttttcggcgaaaccgacgcaaacgcgccgattaccgtcagcattgccgatccggttgcagaaagggatcttccgacagcatctcccgccgtttcaaacggcgacgcaccggtttatgatgcggcggaaaaaatccgccgtgccaccgccgccatcctgcccgaaggcgcgacaccgaaagccgaagcacaggaaatgccgtctgaaaccgcaacctttacggctgcggcggaacaggcacgggaaaccgcacaaaccggcggactcgtcctgatcgaaaccgaccctgccgcattgaaggcatgggcggcacaacccgaagtccaaaccggacgcggtttgcgccgttccgaacagcccaagccgtctgaagtcgcaaccgtccctgccgaagaaatgatccaagtcgaaacccggcaaggctga

SEQ ID NO: 59403 - DNA, 348 bp, Neisseria meningitidis; identical to SEQ ID NO: 43724

SEQ ID NO: 59404 - DNA, 672 bp, Neisseria meningitidis; identical to SEQ ID NO: 43608

SEQ ID NO: 59405 - DNA, 738 bp, Neisseria meningitidis
atgaagcaggttgatttaaacaccgatctcgccgaaggctgcggcagcgacgaagccttgttgcagctgattacttcggccaacatcgcctgcgcccaacacgccggcagcattgccgatattcgggcggcattggcgtatgcccaacaaaacggcgtgcgcatcggagcacaccccggctatcccgatcgggaaaacttcggccgtaccgaaatgaatctgtccgaagccgatttgcgggcgtgtctgaattaccagttgggcgcattgcaggccttgtgccgtgatcagggtttggaaatggcttatgtcaaaccgcacggcgcaatgtacaaccaagcggcgaaaaaccgtgcgctggcggataccgttgcccgaattgtggcggatttcgacccgaaattgaaattgatggcactttccggcagcctgctcttggaagccggaaaagccgcaggcttgggtgtgatttccgaagtattcgccgaccgccgctatatgcccgacggtacgctggttccccgcagccgccccgatgcgcaggtggacagcgacgaagaagccatcgcccaagtattgcagatggtgcgggacgggcaggtcaaagcagtggacggcagcctggttgccgtgcaagccgacagcatctgtctgcacggagacgggccgcacgccgtggtgtttgccgaaaaaatccggcaggaactactggcggcaggcatcaaagtttctgcttga

SEQ ID NO: 59406 - DNA, 1371 bp, Neisseria meningitidis
atgatcaaccccatcgcctcgctttcccctttagacggccgttatacccaatccgttgaagcattgcgcccgattttttccgaatacggcctgatgaaggcgcgcgtcaaagtcgaattaaactggctcaaagccctcgccgccgagccgaagattgccgaagtgccgcccttcagtgccgaaacgcttgccgaaatcgacacggtgattgaaaacttttcattggaagacgcggccgccgtcaaagccatcgaagccaccaccaatcacgatgtcaaagccatcgaatattggctgaaaaaacgttttgccgaagtgcccgaagtcgccgccgtgagtgagttcatccacttcgcctgcaccagcgaagacatcaacaacctgtcccacgctttaatgctgcaagaagcgcgtgaggctgttttgctgcccaaactggcagaaatcatcggcaaactcaccgctatggcgcacgaccttgccgccgtcccgatgatgagccgcacccacggccagcccgccacgccgaccactttgggcaaagaaaccgccaatgtcgtgtaccgcctgcaacgccagtttaaaaacctgcaagcgcaagaattcctcggcaaaatcaacggcgcggtcggcaactacaacgcccatatggttgcttatcccgatgtggattgggaaacccactgccgcaactttgtcgaaatcagcctcggtctgaccttcaacccctacaccatccaaatcgaaccgcacgactatatggcggaattcttccaaaccctcagccgcatcaacacgattctcatcgactttaaccgcgacgtttggggttatatttcattgggttacttcaaacaaaaagtcaaagcgggcgaagtcggttcttccaccatgccgcacaaagtcaaccccatcgactttgaaaactccgaaggaaacctcggtatgtctaacgccgtattgggctttttgtccgaaaaactgccgatttcccgctggcagcgcgacctgaccgacagcaccgtattgcgcaatatgggcgtaggcgtgggctatgccgtattgggtttcgccgcccacctgcgcggtctgaacaagctcgaacccaaccccgccgcgcttgccgccgatttggatgccacttgggagctgctcgccgagccgattcaaaccgtaatgcgccgttacggtgtcgccaatccttacgaaaaactgaaagacctgacgcgcggcaaaggcggcatcacgcccgaagtgctgaaaggctttatcgaatcgttggaaattccggtagaagccaaagcaaaattgcttgagctgactcctgcactgtatgtgggcaaggctgaagcgttggcgaaacggatttga

SEQ ID NO: 59407 - DNA, 1173 bp, Neisseria meningitidis; identical to SEQ ID NO: 58674

SEQ ID NO: 59408 - DNA, 909 bp, Neisseria meningitidis
atgaacacgccccaatccgccatcattcccgaccacgcccaagccggcatctttatcgaagccgacttcgccgccaaccgcctcaacgatattaaagccgcctgccgcgcttcgctcgacgcgttaactgccttgaaagcccgctttccggacgatattttgggtctgaccatcgccttcggcagcaaagcctgggcaacattcggacatacggacgaaggcagtgaaatcaaacccttctccgaaatgggcaacgggcttgcgccgtccacgcagcacgatatgtccatccacatccaatccttccgccaaaacgccgcctacgcgcttgcccaatccgttttgggcgcgttcggcgacagcatatgcgtcgtgtccgaagaacacggtttgcgcctgtatcaggatcgcgggctggacggtttcgtcgacggcacggaaaacccgcagggcgatgaaaatgtccgcgaagtcgccatcatccccgaaggaaaacccgatgcgggcggcagctatgtcctgctgcaaaaatacctgcacgatttgaaaaaatgggatgccgtccccgtcgccgaacaggaggcctcggtcggacgcggcaaggaaaccgacgacgaattcggccgcgatgtccgcctgcccgattcgcacctcggccgcgtcaacctgaaagaaaacggagtcggcctgaaaatcgtccgccgcagcctgcccttcggcaaaatcagcggcgaacacggtttgatgtttaccgcatactgccgcacgctgcacaatatcgaagcgcaattattgagtatgttcggcgacacggacggcaaaaccgacctgctgctccggcacctctccgccgccgtttcgggcggatactactacgcgccgtctgtcgaacgcctgcaaaacctctaa

SEQ ID NO: 59409 - DNA, 414 bp, Neisseria meningitidis
ttgttccttgtgcaaaaactaacagtcccccacacgtacacggcacagggcagcctgcgcgacgcggtttgttatcccgacatcgacaaacagcatccggagctaatcgaagccatgaacacctgccgcttgggttatctggttgataaattagataaaaccgacgactggcaacacaaactctccccgggcgaactgcaacgcgtcgccttcgtccgcgccctgctttccaagcccaaaatcgtcctgctcgacgaagccaccgccgctttggacgaaccgaccgaggccctgctctaccgcgcactgaaacaaaaactgcccgacagcatcatcatcagcatcggccaccgcagcacgctcaacgcgttccacaatatgcacctcgatgtcggcaacgctgcctgcggctga

SEQ ID NO: 59410 - DNA, 1866 bp, Neisseria meningitidis
atgatagaaaaactgactttcggactgttcaaacaagaagacgcgcgcagctttatgcgcctgatggcatacgtccgcccctacaaaatccgcatcgttgccgccctgattgccattttcggcgttgccgccaccgaaagctaccttgccgccttcatcgcccccctgattaaccacggcttttccgcgcccgccgcgccgcccgagctgtctgccgccgccggcatcatttccaccctgcaaaactggcgcgaacagtttacctatatggtttgggggacggaaaacaaaatctggaccgtcccgctcttcctcatcatcctcgtcgtcatccgtggcatctgccgctttaccagcacctatctgatgacttgggtctccgtgatgaccatcagcaaaatccgcaaagatatgtttgccaaaatgctgaccctttcctcccgctaccatcaggaaacgccgtccggcaccgtactgatgaatatgctcaacctgaccgaacagtcggtcagcaacgccagcgacatcttcaccgtcctcacgcgcgacacgatgatcgttaccggcctgaccatcgtcctgctttacctcaactggcagctcagcctcatcgtcgtcctgatgttccccctgctctccctgctctcgcgctactaccgcgaccgtctgaaacacgtcatttccgactcgcaaaaaagcataggcacgatgaacaacgtgattgccgaaacccatcagggacaccgcgtcgtcaagctgttcaacgggcaggcgcaggcggcaaaccggttcgacgcggtcaaccgcaccatcgtccgcctcagcaaaaaaatcacgcaggcaacggcggcacattccccgttcagcgaactgatcgcctcgatcgccctcgccgtcgtcatcttcatcgccctgtggcaaagccaaaacggctacaccaccatcggcgaatttatggcattcatcgtcgcgatgctgcaaatgtacgcccccatcaaaagccttgccaacatcagcatccctatgcagacgatgttcctcgccgccgacggtgtatgtgcatttctcgacaccccgcccgaacaggacaagggcacgctcgcaccgcagcgtgtcgaagggcgcatcagcttccgcaacgtcgatgtcgaataccgttcagacggcatcaaagccctcgacaacttcaacctcgacatcagacaaggcgaacgcgtcgccctggtcggacgttccggcagcggcaaatccaccgtcgtcaacctgctgccccgctttgtcgaaccgtctgccggcaacatctgcatagacggtatcgacatcgccgacatcaaactcgactgcctgcgcgcccaattcgccctcgtctcccaagacgtattcctgtttgacgacaccctgtttgaaaacgtccgatacagccgtcccgacgcgggcgaagccgaagtcctgttcgccctccaaaccgccaacctgcaaagcctgattgacagctccccgctcggactgcaccagcccatcggatcgaacggcagcaacttatccggcggacagcggcaacgcgtcgccattgcccgcgccattttgaaagacgcgccgatattattattggacgaagccaccagcgcattagacaacgaatccgaacgcctcgtccaacaggcgctcgaacgcctgatggaaaaccgcaccggcatcatcgtcgcccaccgcctgaccaccatcgaaggggccgaccgcatcatcgtgatggacgacggcaaaatcatcgaacaaggcacacacgaacaactgatgtcccaaaacggttactacacgatgttacgcaatatctcaaacaaagatgccgccgtccggacggcataa

SEQ ID NO: 59411 - DNA, 1644 bp, Neisseria meningitidis
atggatgcttttacccgtgcatggtatgcgctcgaacgccacaatcaggatgcgcgtcatgtccttttgcgcgaccgctttgcctgcgaacccgaccgttttgagcgtatgcacgagcgtttggacgggatgttgttcgattacagcaaaaaccgtttgggcgaagatacgctgcaactgctctgcaatcttgccgatgcggcggatttggaagggaaaatgcgtgctttgcggacgggtgcgaaagtcaacggcagcgaggggcgtgccgcgctgcatacggctttgcgcctgcccgacggtgcgggtgccgtttatgcggacggcagggacgtgttgcccgaaatccgccgcgagttaaatcgtgcgttgaagtttgcacacagtttggacgacggttcgtatcaggggacaaccggaaaacggattacggattttgtccacatcggcataggcggatccgacctcgggccggcaatgtgcgtgcaggcactcgagccgttcagacggcatatcgccgtccattttgccgccaacgccgatcctgcctgcctggatgaggtcttatgccgtctgaaccccgaaacgacggtgttttgcgttgccagcaagtccttcaaaacgcctgaaaccctgctcaatgcacaggcggtcaaggcttggtatcgtggtgcggggttctcggaatccgaaacagcacgccatttttgcgcggtatcggccgacacagcggcagctgcggctttcggtatcgcggcggaacgcgtgtttgcgatgtacgactgggtgggcggacgctattccgtctggtcgcccgtcggtttgcccgtgatggttgcggtcggcggggcgcgtttccgcgagttgttggcgggggcgcacgcgatggacagccattttttccacacgccgccgcgccgcaacattcccgttctgatggcactgattgccgtgtggtataacaatttccaacacgcggacgggcagaccgccgttccgtacagccacaacctgcgcctgctgccggcgtggctgaaccagctcgatatggagagtttgggcaaaagccgcgcttcagacggcagtcccgccgtgtgcaaaacgggcggcatcgtgttcggcggtgaaggggtcaactgccagcacgcctatttccaactgcttcatcaaggcacgcgcctgattccctgcgactttatcgtcccgatgacggcgcagggcgtggaggacggacgcagccgttttaccgttgccaacgcctttgcccaagcggaagccctgatgaagggcaaaaccttggacgaagcacgcgccgaactggcagatttgcccgaagcggaacgcgaacgcctcgcgccgcacaaagaattccccggcaaccgccccagcaacagcatcctgctcgaacgcctcacgccctacaatctgggtatgctgatggcggcttacgaacacaaaacctttgtgcagggtgtaatttgggacatcaatcccttcgatcagtggggggtggaatacggcaaacagttggcgaaaaccatcatcggcgaactggaaggcggcacgtccgtacacgatgcctcgaccgaagggctgatggcgttttaccgtgaatgccgtctgaaaggcggcggcgcggcataa

SEQ ID NO: 59412 - DNA, 834 bp, Neisseria meningitidis
atgccgcacgccctcgtcctccaatttccctccgccgaaaccctgccttccgacttcccctcacgcctgcccgaacctgattatgctgatgaaaagcgtatgcgttttatcgttgaagaagggttttctttaagcgaaaaagacgcggcgttacttggcagccgtcaaatcgaccacgccgtgttgtcggatatggattttggcgaactcggtttgattgtcagcgatatggattcgacgctgattaccatcgaatgcgtcgatgaaattgcggcaggcgtgggtttaaaagacaaggtagcggaaattaccgagcgttcgatgcgcggagagttggatttcgagcagtcgttgcgcagccgcgttgcgctgttggcgggattggacgaacagattttggcggacgtttatgaaaacgttttgaagctctcgcccggtgcggaattcttgttggacgaatgcaaaaggcacgatgtgaaattcctgctggtgtccggcgggttcacattttttaccgaaaggctgcaacaacgactcggcttcgaataccaacacgccaatgttttggaaattgaaaacggcaggttgaccggtcgtctgaaaggcagaatcatcgacgcgcaggcaaaggcggatttattgcgcgaataccgcagccgcctcggattgcagccgcatcaggtgttggcgatgggcgacggtgcgaacgatattccgatgctcaaagaagcgggcataggcgtggcttaccgtgccaaaccgaaagcgcaggcagccgccgatgcctgtatcaacttcggcggtttggagcgtgtacgcggcctgttcggatag

SEQ ID NO: 59413 - DNA, 867 bp, Neisseria meningitidis; identical to SEQ ID NO: 58789

SEQ ID NO: 59414 - DNA, 702 bp, Neisseria meningitidis; identical to SEQ ID NO: 42609

SEQ ID NO: 59415 - DNA, 621 bp, Neisseria meningitidis; identical to SEQ ID NO: 42375

SEQ ID NO: 59416 - DNA, 1428 bp, Neisseria meningitidis
atgaacgagaactttaccgaatggctgcacggctgggtcggcgccatcaacgatccgatgtggtcatacttggtttatatgcttttgggtacggggcttttcttcaccgtaaccacgggctttgtccaattccgcctgttcgggcgcagcatcaaagaaatgctcggcggccgcaaacagggggacgaccctcacggcatcacgccgtttcaggcatttgtaaccggccttgccagccgcgtgggcgtgggcaatatcgcgggcgtggccatcgccatcaaagtcggcggaccgggcgcggtgttttggatgtgggtaaccgccttaatcggtatgagttcggcgtttgtcgaatcttcgctggcgcagctctttaaagtccgcgactacgacaaccaccatttccggggcggccctgcctactacatcactcaagggctggggcagaaatggctgggcgtgttgttcgccctgagcctgattttctgtttcggctttgtgtttgaagcggttcagaccaataccattgccgataccgtcaaagcggcgtggggttgggagcctcattatgtcggcgtcgccctggtgattttaaccgcgccgattatcttcggcggcatcaggcgcatatctaaagcggcggaaatcgtcgtccccctgatggcggttttgtacctctttatcgcgcttttcatcattttgaccaatattccgatgattccggacgtgttcggtcagattttttcgggcgcgttcaaattcgacgcggcagcaggcggcttactcggcggtctgatttcgcaaacgatgatgatgggcatcaaacgcggcctgtattccaacgaggcgggtatgggttccgcgccgaacgccgccgccgccgccgaagtgaaacaccctgtttcgcaaggtatgattcaaatgctgggcgtgtttgtcgataccatcatcgtttgttcttgcaccgccttcatcatcttgatttaccaacagccttacggcgatttgagcggtgcggcgctgacgcaggcggcgattgtcagccaagtggggcaatggggcgcgggcttcctcgccgtcatcctgtttatgtttgccttttccaccgttatcggcaactatgcctatgccgagtccaacgtccaattcatcaaaagccattggctgattaccgccgttttccgtatgctggttttggcgtgggtctatttcggcgcggttgccaatgtgcctttggtctgggatatggcggatatggcgatgggcattatggcgtggatcaaccttgtcgccatcctgctgctctcgcccttggcgtttatgctgctgcgcgattacaccgccaagctgaaaatgggcaaagaccccgagttcaaactttccgaacatccgggcctgaaacgccgtatcaaatccgacgtttggtaa

SEQ ID NO: 59417 - DNA, 435 bp, Neisseria meningitidis; identical to SEQ ID NO: 45056

SEQ ID NO: 59418 - DNA, 1125 bp, Neisseria meningitidis; identical to SEQ ID NO: 53157

SEQ ID NO: 59419 - DNA, 486 bp, Neisseria meningitidis; identical to SEQ ID NO: 37367

SEQ ID NO: 59420 - DNA, 1311 bp, Neisseria meningitidis
atggacacttcaaaacaaacactgttggacgggatttttaagctgaaggcaaacggtacgacggtgcgtaccgagttgatggcgggtttgacaacttttttgacgatgtgctacatcgttatcgtcaaccctctgattttgggcgagaccggcatggatatgggggcggtattcgtcgctacctgtatcgcgtctgccatcggctgttttgttatgggttttgtcggcaactatccgattgcactcgcaccggggatggggctgaatgcctatttcacctttgccgtcgttaagggtatgggcgtgccttggcaggttgcgttgggtgcggtgttcatctccggtctgatttttatcctgttcagcttttttaaagtcagggaaatgctggtcaacgcactgcctatgggtttgaaaatgtcgattgctgccggtatcggtttgtttttggcactgatttccctgaaaggcgcaggcattatcgttgccaatccggcaaccttggtcggtttgggcgatattcatcagccgtccgcgttgttggcactgttcggttttgctatggtggtcgtattgggacatttccgcgttcaaggcgcaatcatcatcaccatcttgaccattaccgtcattgccagcctgatgggtttgaatgaatttcacggcatcatcggcgaagtaccgagcattgcgccgacttttatgcagatggattttgaaggcctgtttaccgtcagcatggtcagtgtgattttcgtcttcttcttggtcgatctatttgacagtaccggaacgctggtcggcatatcccaccgtgccgggctgctggtggacggtaagctgccccgcctgaaacgcgcactgcttgcagactctaccgccattgtggcaggtgcggctttgggtacttcttccaccacgccttatgtggaaagcgcggcgggcgtatcggcaggcggacggaccggcctgacggcggttaccgtcggcgtattgatgctcgcctgcctgatgttttcacctttggcgaaaagtgttcccgcttttgccaccgcgcccgccctgctttatgtcggcacgcagatgctccgcagtgcgagggatattgattgggacgatatgacggaagccgcacccgcattcctgaccattgtcttcatgccgtttacctattcgattgcagacggcatcgccttcggcttcatcagctatgccgtggttaaacttttatgccgccgcaccaaagacgttccgcctatggtatggattgttgccgtattgtgggcactgaaattctggtatttgggctga

SEQ ID NO: 59421 - DNA, 717 bp, Neisseria meningitidis; identical to SEQ ID NO: 51288

SEQ ID NO: 59422 - DNA, 402 bp, Neisseria meningitidis; identical to SEQ ID NO: 36186

SEQ ID NO: 59423 - DNA, 1302 bp, Neisseria meningitidis; identical to SEQ ID NO: 50407

SEQ ID NO: 59424 - DNA, 606 bp, Neisseria meningitidis
atgaccatctatttcaaaaacggcttttacgacgacacattgggcagcatccccgaaggcgcggttgccgtccgcgccgaagaatacgccgcccttttggcaggacagacgcagggcgggcagattgccgcagattccgacggccgccccgttttaaccccgccgcgcccgtccgaataccacgaatgggacggcaagaaatggaaaatcagcaaagccgccgccgccgcccgtttcgccgaacaaaaaaacgccttggcattccgcctcgcggcaaaggcggacgaactcaaaaacagcctcttggcgggctatccccaagtggaaatcgacagcttttacaggcaggaaaaagaagccctcgcccggcaggcggacaacaacgccccgaccccgatgctggcgcaaatcgccgccgcaaggggcgtggaattggacgttttgattgaaaaagttgtcgaaaaatccgcccgcctggccgttgccgccggcgcggttatcggaaagcgtcagcagctcgaagacaaattgaacgccatcgaaaccgcgccaggattggacgcgctggaaaaggaaatcgaagaatggacgctaaacatcggctga

SEQ ID NO: 59425 - DNA, 834 bp, Neisseria meningitidis; identical to SEQ ID NO: 43709

SEQ ID NO: 59426 - DNA, 789 bp, Neisseria meningitidis
atgatggaaaacggaaaaacagtcccgagatggcgttttgccttgaaaagtgcgggctggcacctcttaatcagcctgtcggttgcagggctggcggcattgctggtttttaaggtttggtatccttatccttatgccgagctgacgggagggctgtcgctttatcagctggtggtggctgtcgatattgtatgtggtccgctgctgactttaattttggcaagcccgaagaaaaagacaaaggcacgcatggtcgatttttccatggtcggcatcatccagctggcggctttggtgtacggtctgcacagcgtttctttggcgcgccctgtgatagaggcgtttgaaaaagacaggattaatgttgtgaccgccgccgaagtggcggttgaagatttgcacaaagcgccggaagggctgcaaagcctgtcgtggttcggcatccgccgcattgcattgaaagaacctgaggatgcggatgagaagaacaagacgctggatttgtccctgaaaggtatcgagccgagtatgcgtcccgaccagtggctgccgtattccgacaaggaagcagaagaaatccgcaaacatctgaaaccgctgaaagtcttggcggatgcgagaaaaacgacggttgcggacattctgaaacaggcaggtctcgccgaaggggaggagctgtattacctgccgtttaccagcagcaggcagaaagagtggatagtcattaccgataaagagggcaacaccaaaggctacgcgccgatagacggcttcatcatcaccccttaa

SEQ ID NO: 59427 - DNA, 987 bp, Neisseria meningitidis; identical to SEQ ID NO: 38696

SEQ ID NO: 59428 - DNA, 300 bp, Neisseria meningitidis
atgaagaaaatgttcgtgctgttctgtatgctgttctcctgcgccttctcccttgcggcggtaaacatcaatgcggcttcgcagcaggagttggaggcgctgccgggcataggcccggcgaaggcgaaggccattgcggaataccgtgcgcaaaacggtgcgttcaagtctgtggacgatttgaccaaggtaaagggcatcggccctgcggtgctggcgaagctgaaggatcaggcttcggtcggcgcgcccgcaccaaaaggcccagccaaaccggtgctgcccgcagtgaaaaaatag

SEQ ID NO: 59429 - DNA, 1332 bp, Neisseria meningitidis
atgagcggatggcataccttattgcaggacgcatcttacaagggcgtcggctttgatattgaggtggtggacgagagcaacggcaaggcattggccgagcatgcgcggccgtttgtgcagggtatcgaccttgaagacgtgggcacgaccgggcggcaggtgcagattaatgcggtgttttggggcaagggctatgcaggccgtctgaaaaagctgctggatgcgctggagcagccgggcggcggcgtgctggtgcaccctgtttgggggcggatgcacaacatgattgcggcatcatggagctaccgacatgaggccgattatgtggattatgcgggcatcgatattactttccgcgaggcggccgaagcgcaggaaatctttgtttttgaaaacgcctttttggtcgagcttgaggcgttgattgctgatatcgacacctaccgcgaggcggctatcggctttgttgatgcggtgttggcggtggatgcgggcgtatcggctttatggggcagcgcgctgggcatttggagtgcggcatcgggtacgtttggcgcggtgcgccgtttgtttgatttggacaaaattgcctttcccgatcggggcggatacagcgcagcggcgtttaaaaacggctcggccaagctgtttgcggatatatcggtcatggtagatactggcatacgccgtgaggcgggtttggccgataatgccatgcaccatgccggttggtcgccgcgacagcggtttgacggggctgcggctgttgccgaccgtgccgccgctatccctgataatttgctgaccggccgcttttcagacggcctgcaaaaccgcctgaaccgtttaaccgccaaacaggtgcagccggtagcgcaggcggtgcgcctgttatccacgtcatcgctgttgtcggtggcaacggcattaatcgaggcgcatggcgaagagatgaccgcgcccgatttgattgaggttaaccgcgccatgcgccgccgtatgcaggccgagattgccgccttacgggcggtgcagacggctgctgccgagtctggtgggctgacggccaacgccgtgtataccgaggcttaccaaacggcagaatccctgcgcgcggcggcaggccgtctgaatgcgttggttgcggcggtcatcaaccaaaagccgccgctgattgtgcgccaagccccaatcgacggtacgatacaccaaatcgcccacgagttttacggcgatatagcccgcgcagcagagctggtgcggctcaatccccatatccaccaccccgcgtttatcaagcgcggcactttggtcaacagctatgcaaaataa

SEQ ID NO: 59430 - DNA, 123 bp, Neisseria meningitidis; identical to SEQ ID NO: 38799

SEQ ID NO: 59431 - DNA, 279 bp, Neisseria meningitidis; identical to SEQ ID NO: 36778

SEQ ID NO: 59432 - DNA, 669 bp, Neisseria meningitidis; identical to SEQ ID NO: 50129

SEQ ID NO: 59433 - DNA, 753 bp, Neisseria meningitidis; identical to SEQ ID NO: 38815

SEQ ID NO: 59434 - DNA, 627 bp, Neisseria meningitidis; identical to SEQ ID NO: 51310

SEQ ID NO: 59435 - DNA, 1275 bp, Neisseria meningitidis
atgccgtctgaaacctcttccccacgcaaagaaaacgaaacagaagtacacattcctgccgctccttttatcgtcaaacagtccggcagcaacgctttggcagtctgcgccctggtattggcggcattgggtttgggtacaagtggttttttgtttgtccaaggacagaatgtcttgaaaaaccaagagctggcattcaaccaaaaaatcgacaaagccgctttgggcgagtcggaaaacgccgccctgctcaaagacaacctcaaccggcaagccgccatacaatcagagctcgaccgtttggacggaaacgtcaaagcaaacggcgaacaaatcttggaaatgcaaaaatcctatcgcgagttgaccaaaggacgcgccgattggctggtggacgaaaccgagaccatactcaatctggcggcgcaacagctggtgttgactggcaatatccaaacggcagtcggcgtattggagcatatcgacagccgcctgtcccgtttcaatcaggcagagcttctgccgatcaagcaggcggtcagcagcgacttggcggaactgaaaaaccgtccctatgtcgatatttccggcacggcattgcgcctcgacaggctggaaatcgccgtatccggactgccgctgattttggacggcgtattgaaaccgagcgtacaggcacgcaacgaagccgtttccgcttcatggtggcagaacgtatgggacaaatccctcggcacattgaaggggctggtcgaaatccgccgtttggaaaacaacgatgccatgctgatttctcccgaacaggcctattttgtgcgtgaaaacctgcgtctccgccttttggatgcgcggactgcattaatgcagcgcaacagcgaagtctatcagggcgatttgaacaatgccgaaaccgccgtcagacagtattttgatgccaaatcccccgccacgcagtcgtggttgaaggaattggcggaattgaaggcgttggatgtgcgcatgacggcggatgacggtttgaaaaacagcctaaatgccgtccgcgcctatcgcgacggtacgcgcatgacgacggcggaaaatcaagaagcggaacaggcgacttccgaaccggcaaacgaaaacacagcttccgaaccggctgccgcatcggatgtgaagaccatagaagcaccgtccctgccttcggaacgcaaaccggaacagcctgcaaaaaaacagcccgtaccggaaaaggcagggcgttcgccgtccgctaaaggagaacgcgcatga

SEQ ID NO: 59436 - DNA, 2106 bp, Neisseria meningitidis; identical to SEQ ID NO: 51912

SEQ ID NO: 59437 - DNA, 1746 bp, Neisseria meningitidis; identical to SEQ ID NO: 50657

SEQ ID NO: 59438 - DNA, 750 bp, Neisseria meningitidis; identical to SEQ ID NO: 50234

SEQ ID NO: 59439 - DNA, 537 bp, Neisseria meningitidis; identical to SEQ ID NO: 43620

SEQ ID NO: 59440 - DNA, 624 bp, Neisseria meningitidis; identical to SEQ ID NO: 43909

SEQ ID NO: 59441 - DNA, 177 bp, Neisseria meningitidis
atggacatcgtatttgcggcagacgacaactatgccgcctacctgtgcgttgcggcaaaaagcgtggaagcggcccatcccgatacggaaatcaggtttcacgtcctcgatgcaggcatcagtgaggcaaaccgggcggcggttgccgccaatttgcgggggggggggggggggtaa

SEQ ID NO: 59442 - DNA, 336 bp, Neisseria meningitidis; identical to SEQ ID NO: 50355

SEQ ID NO: 59443 - DNA, 417 bp, Neisseria meningitidis; identical to SEQ ID NO: 50630

SEQ ID NO: 59444 - DNA, 324 bp, Neisseria meningitidis
gtgaacattttggcatccgaccgaaattatgaattaaatattgaaatatttattgacaatataattcattttcaaataacagatgaatcttataaagtaaaattttcagaatatttatttgaaaataaagaaaaaaatgattgggatagaaatcctgctataaattattttttcgagataatagatgacagttatatggactggttgaaagaagaaagttttgatttttttgaaaagaaatattataaggcttatattttcttttttagcgattctgtaatagaagttatcagctcgacagaacctgtattttattcaaaataa

SEQ ID NO: 59445 - DNA, 177 bp, Neisseria meningitidis
atgaaaagtcgacgtttttttaaagccttattgttgattgccgcgctggtcggcgcgttttatgccggaatgcagacgcaggcgtatctttatgaagatttatgtttagacttgggtggcggcaaaaatccggggagttacccgatttgcgtgattgggaaagtccctgcacgttaa

SEQ ID NO: 59446 - DNA, 126 bp, Neisseria meningitidis; identical to SEQ ID NO: 41141

SEQ ID NO: 59447 - DNA, 1596 bp, Neisseria meningitidis; identical to SEQ ID NO: 51738

SEQ ID NO: 59448 - DNA, 1008 bp, Neisseria meningitidis
atgagcaccttcttccaacaaaccgcgcaagccatgattgccaaacacatcaaccgcttcccgctattgaagttggaccaggtgattgattggcagccgatcgaacagtacctgaaccgtcaaaaaacccgttaccttcgagaccaccgcggccgtcccgcctacccgctgttgtccatgttcaaagccgtcctgctcggacaatggcacagcctctccgatcccgaactcgaacacagcctcattacccgcatcgatttcaacctgttttgtcgttttgacgaactgagcatccccgattacagcaccttatgccgctaccgcaactggctggcgcaagacgacaccctgtccgaactgttggaactgatcaaccgccaactgaccgaaaaaggtttaaaaatagagaaagcatccgctgccgttgttgacgccaccattattcagaccgccggcagcaaacagcgtcagaccatagaagttgacgaagaaggacaagtcagcggccaaaccacaccgagtaaggacagcgatgctcgttggatcaagaaaaacggcctctacaaactcggttacaaacaacatacccgtaccgatggggaaggctatatcgagaaactgcacattacccccgccaatacccatgagtgcaaccacctgtcgcctttgttggagggcattgccgaagatacgaccgtctatgccgacaaaggctacgacagtaaggaaaaccggcaacacctgaaagaacatcggttgctggacggcattatgcgcaaagcccagcgtaaccgtccgctgacggaagcgcaaaccaaacgtaaccgatatttgtcgaaaacccgttatgtggtcgaacaaagctttggtacgctgcaccgtaaattccgctacgcccgggcagcctatttcgggctgattaaagtgagtgcgcaaagccacctaaaggcgatgtgtttaaacctgttgaaagcagctaacaggctaagtgtgcctgttgccgcctaa

SEQ ID NO: 59449 - DNA, 1662 bp, Neisseria meningitidis
atgactgacaacagccctcctccaaacggacacgcccaagcacgcgtccgcaaaaacaacaccttcctctctgccgtctggctggttccgctgatcgcgctgattgccggcggctggctttgggttaaggaaatccgcaacagggggcctgtggttacgctcttgatggacagcgcggaaggcattgaggtcaacaatacggtcatcaaagtattgagcatcgatgtcggacgcgttacccgaatcaaactgcgcgacgaccaaaaaggcgtggaagtaaccgcccaactcaatgcggacgtatccggcctcatccgcagcgatacccagttttgggtggtcaagccgcgtatcgaccaaagcggcgtaaccggtttgggtacgctgctttcgggttcgtacatcgcctttacacccggcaaaagcgacgaggcaaaagacgtgttccaagtgcaggacattccgcccgttaccgccatcgggcaaagcgggctgcgcttgaatttgattggtaaaaacgaccgcatcctcaacgtcaacagccctgttttgtatgaaaactttatggtcgggcaagtcgaaagcgcgcatttcgacccgtccgaccaaagcgtgcattacaccatcttcatccaaagccccaacgacaaactgattcattccgccagccgtttttggctggaaagcggcatcaatatcgaaaccacaggcagcggcatcaaactcaattccgcccctctgcctgccctgctgtcgggcgcgatttcatttgattcgccgaaaaccaaaaacagtaaaaacgtcaaaagcgaagacagcttcacgctttacgacagccgcagcgaagtcgccaacctgcctgacgaccgctcgctgtactacaccgcgtttttcaaacaatccgtgcgcggcctgaccgtcggttcgcccgtcgagtacaaagggctgaatgtcggcgtggtttccgacgttccttatttcgaccgcaacgacagcctgcacctgtttgaaaacggctggatacccgtacgcatccgcattgaaccttcccgtttggaaatcaatgccgacgaacaaagcaaagaacattggaaacaacaatttcagacggccttaaacaaaggcctgaccgccaccatctccagcaacaacctgctgaccggaagcaaaatgattgagttgaacgatcagccttccgcatcacctaagctgcgaccgcataccgtttatgcaggcgataccgttatcgcgacccagggcggcggtttggacgatttgcaggtcaaattggcggatttgctggacaagttcgacaaactgcctttagataagacggttgccgaattgaacggttcgcttgccgagctcaaatccacactcaaatctgccaatgccgccctaagctccatcgacaaactggtcggcaaaccgcagacacaaaacattccgaacgaactgaaccaaaccctgaaagagttgcgcacaaccctgcaaggcgtatcgccgcaatcgcctatctacggcgacgtacaaaatacgctgcaaagtttggacaaaaccttaaaagacgttcaacccgtgattaatactttgaaagaaaaacccaacgcgctgattttcaacagcagcagcaaagaccctatcccgaaaggaagccgataa

SEQ ID NO: 59450 - DNA, 759 bp, Neisseria meningitidis; identical to SEQ ID NO: 42800

SEQ ID NO: 59451 - DNA, 1218 bp, Neisseria meningitidis; identical to SEQ ID NO: 44261

SEQ ID NO: 59452 - DNA, 1590 bp, Neisseria meningitidis
gtggaattgaaattaaaacgtttgattttaatcctaatgttggggatgttttcggttaattcttatgctgaacgttttaagtatcctattggaaattcagatgttagattggatattgatcataaaaaatctgtagttaccgattttcgtgttgatggtcagcgtttttcaggtcgaattatcgaaccttcaataatagaacacgtgccaacaggtgcacgctctcttgaaaaagtccccgttaaatttaccgcatcagtttcccgcgccagcgtattggcgggggtcggcaaacttgcccgcttaggcgcgaaattcagcacaagggcagttccttatgtcggaaccgcccttttagcccatgacgtatacgaaactttcaaagaagacatacaggcacaaggctaccaatacgaccccgaaaccgacaaatttgtaaaaggctacgaatatagtaattgcctttggtacgaagacgaaagacgtattaatagaacctatggctgctacggcgttgacagttcgattatgcgccttatgtccgattacagcagattccccgaagttaaagaattgatggaaagccaaatgtataggctggcacgtccgttttggaattggcataaagaagaactgaataaattaagttctttggattggaataattttgttttaaatagttgcacatttaattggaacggcggagattgttcggtcaataaaggtgatgattacagaaatggggctgatttttcccttatccgcaatccgaaatacaaagaagaaatggatgccaaaaagctggaagagattttatcgttgaaagtcgatgccaatcccgacaaatacataaaggcaaccggttatcccggttattccgaaaaagtagaagtcgcacccggaacaaaagtgaatatgggtcccgtcacggacaggaacgggaatcccgttcaggttgtcgcaacattcggcagggattcgcaaggcaacaccacagtggatgttcaagtaatcccgcgtcccgatttaacccctggaagtgcggaagcaccgaacgcacagccgctgcccgaagtatcgcccgccgaaaaccccgcaaacaacccgaaccccaatgagaaccccggcacgcatcccaatcccgaacccgaccccgatttgaatcccgatgcaaatcccgatacggacggacagcccggcacaagacccgattcccccgccgttccgggacgcacaaacggcagggacggcaaagatggtaaggacggcgaagacggcggccttttgtgcaaattcttccccgacattctcgcttgcgacaggctgcccgagcccaatccggcagaagatttaaatctgccgtctgaaaccgtcaatgtagagtttcagaaatcaggaatctttcaagattccgcacagtgtcccgcacctgtcactttcacagtgactgtgcttgattcaagcaggcagttcgcgttcagctttgagaacgcatgtaccatagccgaacggctaaggtacatgcttctcgcccttgcttgggcggttgccgcctttttttgtatccgcacagtatcccgtgaagtctag

SEQ ID NO: 59453 - DNA, 909 bp, Neisseria meningitidis
atgaatcaaaccgccatcaaccgcgccgatgtgcgtacccgctttatcttcgacgatatgcccgtgcgcgggctgcacgtccgtctggaaaacgtgtggcagcacattgtaaaacagaaaaactatcccgccgccatccgccgcgccttgggcgagctgttggctgccggtgttctgctgtcgggcaacctcaaaaacgaaggcacgctgattgtgcaggttcaggggcaggggcggctgaaaatgctggttgcggaagcgacttccgaccgtaccgtccgtgcgaccgcgcggtgggacgaggcggcagaaatagccgatgacgaaagcctcggcgaccttttgggcggcaacggcgtgttcgtattgacgctgcagcccaaagacggcgaaccctggcagggcgtagtgcctttggaaggcgacggtatcgcgcaaatgttgatgaactatatgaaacgttccgaacagcttgatacgcacatcgtcctgtctgcaagcgatgaagcggcgggcggtctgctggtgcagcgtctgcctgaagcggtgttggatgaagaggcatgggaacacgtcagtacgctggcgcgcacgctgacggcggaggagctggcagaattggatgcgcaacacgttttataccgcctgttccacgaaacgccgccgcgcgtgttcgagccggaaacgtttgaattttcatgcacctgttcgcgcggcaaagtcagcgatatgctgctgatgctgggcggggaagaagtcggcggcgtggtggcggaacaaggcagcatcgaagtcgattgcgacttctgccacagcaaatacgtgtttgacgaaaccgatgtcaatgcgctgttcggggaggatgtggtcggcgttgcccgagagcagacccgacatactgtccaataa

SEQ ID NO: 59454 - DNA, 2526 bp, Neisseria meningitidis
atgaatccaaactcaaaacataacactaactttaccaatcttcttaaaccgtctgatagtgatataaaacaatttgccgcacaacacatccgccacctcaccgacctgctcaaccgctatgcctacgaatactacaccctcgacgcgcccagcgtacccgatgccgaatacgacaaattattccgcgagctcgaagcgttggaattaaaccatcccgaattcaaactgcccgacagcccgacccagcgcgtcggcggcgagcctctggcgggatttgccgaagtacgccacgaagtgccgatgctgtcgctgaccaacgccttttccccgcaagatgaaaacggcgtgttcgaccacgccgaaatgtacgctttcgaccaacgcgtgcgcgacggtttggacggcggcaatcccgaatacgttatcgaacccaaattcgacggcctcgccatcagcctgctctaccgcgacggcgtattggtacaggcggcaacgcgcggcgacggcacaacgggcgaagacgttacccaaaacatcaaaaccgtcgccaacatccccctgcggctgcacggcgaaaatacgcccgaactcatcgaagtacgcggcgaagtactgatgcaaaaagccgattttgtcgccctcaataaaagacaagccgaaaacgggcaaaaaccctttgccaatccgcgcaacgccgccgccggcagcctacgccaactcgattcgcgcatcaccgcgcaacgcaaactgcactttttcccctactccgtcgcccgccagcaagatggtttcgtcgcggaagaacacatccaggaactcgcctatttccaagcactcggcttcagtctgcccaatggcaatttcggctgtttcaaaaatatcgacgaagtattggcgttttacgaacacatgcagcaaaaacgccccgaactgccctacgaaatcgacggcatggtcgtcaaagtcaacagcttggcgcaacagcacgaactcggcttcatctcccgcgcgccgcgttgggcggttgcccacaaattccctgccgaagaagccctgaccattgtcgaagcgattgacgtgcaaatcggcaggacgggcgcggtaacgccggttgcccgattacagcccgtattcgtcggtggcgtaactgttaccaacgccaccctgcacaatcaggacgaagtatcgcgcaaagacgtgcgcgtcggcgataccgtcgtcgtacgccgtgccggagacgtgattcccgaagttgtgcgcgtgatttttgaacgccgcccgatgcgggaaaccgccgttgccgtttcagacggcatcgggcatcggcaggacgatttgtttgccgaaacaccgtccgccaatcaaacccaatccgttccgctccacaagccctaccgcctgccgacccactgccccatctgccgcagcgaaatcgaacgcgaagaaggcgaagccgtcgcccgatgcagcggcggtatgctttgtcaggcacaacgcgcgcaaggcttaatccacttcgcctcgcgcaaagcgatggacatcgacggcttgggtgaaaaacaaatcgaacagcttgtcgcccaagacctcgtccgccacttcgccgacctctaccgcctcgatattccgaccctgcaaaaaatgaaggaagcggcggacaaaaccgttgccgaatcggatcaaatgccgtctgaagacagttcggtcggcgcgtcgggcaaacataaaaaaccaccgaccaagtgggcggaaaacatcctcgcaggcatagaatccggcaaaacgcccgaactcgcgcgcttcctgttcgcgctcggcatccgccacgtcggcgaacgcaccgccaaaacgctggcgcaggcattcggcacattggaacacgtccgccgcgcccccgaacccgtcctcgcctgcctgcccgacatcggtacggtagtggcgcgttccattgcccacttcttcgcccaagccgaacagcaggcgatgatagacgaactgctcgccgcaggcgttgccccgcaaacccaagccgttaccatcccgcccgcccgccacgccgaaccgcaacgctggatcgcccgcctgcccgacttcaaaatcagcgaaaacaaagcccaagccttatgggaactcgccggcaaaagtatagagggtctgcaaaccgacaaagccctccccaccgactggcaggcgtggcgcagcgaaccacaaaacgccgccctgctcgaaaacctgaaaaccttcttcgcgcaaatgccgtctgaagacgaggcggcgcaaggttcagacggcatcaataaagccgtagcaggcaaaacctttgtattaaccggcacgctgcccacgctcaaacgcgaccaagcccaagccctaatcgaagccgcaggcggcaaagtttccggcagcgtttccaaaaaaaccgattacgtcgtcgctggagaagccgcgggcagcaagctggaaaaagccaatgccttgggcgtttccatcctcagcgaagccgaactgcttaccctgctcggctga

SEQ ID NO: 59455 - DNA, 2082 bp, Neisseria meningitidis
atgaaatcactcaaaaccttcctcatttggggcatagtggtactggtcggcgtagcatcctttaccactttggcactcagccgaggcgaacaggtcagcgcggtatggatggttaccgccgccatatccgtttactgcatcgcctaccgtttttacagcctctacatcgccaaccgcgtgatgcggctcgatcctaaccgcctgactccggcagaacgccacaacgacggcttggactacgttccgacgcacaagggcgtattgttcggacaccactttgccgcgattgccggcgcgggccctttggtcggcccggttttggcggcgcaaatgggttacctgcccggtactttgtggattatcttcggcgtggtgtttgccggcgcggtacaggatatgatggtcttgttcgtctctatgcgccgcgacggtaagtctttgggcgatattgtgaaacaggaactcggcactgtccccggcgtgattgcctccatcggtattttgatgattatggtcatcattatggcggtgttggcgttgattgtcgtaaaagcactggttcacagcccttggggtacgttcaccattgccgccactatgccgattgccctgtttatgggtatttacacgcgctatatccgtccgggcaaaatcggcgagatttccatcgtcggctttattttgctgatgctggcggtaatttacggcgaagatgtggcgaaaagttccatcggacattggttcgaccttgacggcatccagctcacttgggcgattatgatttacggctttgtcgcctccgtattgcccgtatggttgctgctcactccgcgcgactatctctccaccttcctgaaaatcggtacgattgcggccttggctttgggcatcgtcatcgtcaatcccactttgcaaatgcctgccgtaacccactttatcgacggttcgggtccggtattctcaggcgcattgttcccgttcctcttcatcaccatcgcctgcggtgcggtttcaggcttccacgcgctgatttcttccggcaccacgccgaaaatgctggaaaacgaaacccacgtccgtatgattggttacggcggtatgttgatggaaagtttcgtagccattatggcgcttgccgccgccgcatcgcttgatcccggcgtgtacttcgccatgaacagccctgccgccctgatcggtacggatgccaacaccgccgccgaagtgattaccaccaagctgcaattccctgtcgatgccgcaacgctgttgcacaccgctaaagaagttggagaaaacaccatcctgtcccgtgccggcggtgcgcccaccctcgcagtcggtatggcgcacattatgagccgcctgattccgggcgaggcgatgatggcgttctggtatcacttcgccctgttgtttgaagccttgttcatcctgaccgccgtcgatgccggtacgcgcgtcgcacgttttatgattcaagacttgggcagcatcttctacaaacctttcggcaacaccgactccatccccgccaacctgattgcgaccttcttcgccgtggcattgtggggctactttctctacaccggcgtaaccgacccgctgggcggcatcaactcgctctggcctttgttcggcatcgccaaccaaatgctggcgggcgtggccttgattatgtgtgccgtggtgctgattaagatgaaacgcgaccgttatgtttgggtggtactcgttcccgccgtcggcgtactgttcgtaacctgctacgccggcctgcaaaaactgttccacagcgatccgcgcatcagcttccttgcccacgccggcaaatacagcgacgcattggctaaaaacgaaatccttgcgcctgccaaagacatcggcgaaatggcgcaaatcatcttcaacgacaagattaatgccggtctgaccatcctcttcttgtcggttgtcgtgattgtcgccgcgtacggtttgcgtaccgccctcaaagcacgcaaagtcggctggccaaccgccaaagaaatccctgcagtgtaccgtgacggcaaacaaccggaggcacaaggtgaagcgtaa

SEQ ID NO: 59456 - DNA, 1410 bp, Neisseria meningitidis; identical to SEQ ID NO: 54261

SEQ ID NO: 59457 - DNA, 498 bp, Neisseria meningitidis; identical to SEQ ID NO: 50377

SEQ ID NO: 59458 - DNA, 534 bp, Neisseria meningitidis; identical to SEQ ID NO: 42780

SEQ ID NO: 59459 - DNA, 555 bp, Neisseria meningitidis; identical to SEQ ID NO: 39520

SEQ ID NO: 59460 - DNA, 8115 bp, Neisseria meningitidis
atgaaccgcaccctgtacaaagttgtatttaacaaacatcgaaactgcatgatagccgttgctgaaaatgccaaacgcgagggcaaaaacacagccgacacccaagctgtaggtattttgccaaatgatattgcgggctttgcgggttttatccattctatctctgttatctcattctccctttcattactgctcggttctgcccttatcctgacttcttcttctgctactgcccaaggtatcgttgccgacaaatccgcacctgcacagcaacagcctaccatcctgcaaacaggtaacggcataccgcaagtcaatattcaaacccctacttcggcaggggtttctgttaatcaatacgcccagtttgatgtgggtaatcgcggggcgattttaaacaacagtcgcagcaacacccaaacacagctaggcggttggattcaaggcaatccttggttggcaaggggcgaagcacgtgtggttgtaaaccaaatcaacagcagccattcttcacaactgaatggctatattgaagtgggcggacgacgtgcagaagtcgttattgccaatccggcagggattgcagtcaatggtggtggttttatcaatgcttcccgtgccactttgacgacaggccaaccgcaatatcaagcaggagaccttagcggctttaagataaggcaaggcaatgttgtaatcgccggacacggtttggatgcacgtgataccgattacacacgtattctcagttatcattccaaaattgatgcacccgtatggggacaagatgttcgtgtcgtcgcgggacaaaacgatgtggccgcaacaggtgatgcacattcgcctattctcaataatgctgctgccaatacgtcaaacaatacagccaacaacggcacacatatccctttatttgcgattgatacaggcaaattaggaggtatgtatgccaacaaaatcaccttgatcagtacggtcgagcaagcaggcattcgtaatcaagggcaatggtttgcctcagccggcaatgtggcagtgaatgctgagggtaaactggtcaacacgggcatgattgcagcgacgggagaaaatcatgcggtttcacttcatgcccgcaatgttcataatagcggtacggttgcctcacaggatgatgccaatattcacagccagacgctggacaattcaggtacggtcttatcctcaggtcgattgactgttcgtaatttaggccgtctgaaaaaccaaaacaacggtacgatccaggctgcccgcttagatatgtcaacaggtggtttggataacacaggtaatattactcaaacaggttcacaagcattggatttggtatctgccggcaaattcgataacagtggcaagattggtgtaagtgacgttccacagaccggtttgaatcccaatccatcagtcataccacagattccgagtactgcaacaggttcaggcagcagcactgtctcggtatctaagcctggttcaaacaatcccgtttcacctacagcacctgcaaaaaactacgccgtaggacgcattcaaacaacaggagcatttgacaatgcaggatcaattaatgcgggtgggcaaattgacattgccgcccaaaacggtttgggaaattcgggtagtctgaatgcggctaaactacgagtatcaggcgattcatttaacaatacggtaaaaggcaaactccaggcacacgatctggctgttaacactcaaactgctaaaaacagcggtcacttattaactcaaaccggcaagattgataaccgtgaactgcataatgccggagaaattgccgccaacaatctgacactcattcattcgggccgcttgagcaatgataaaaaaggcaatattcgagctgcacatttacagcttgataccgccggtttacataatgcaggtaacattcttgccgatagtggaaccgttaccaccaagaataatcttcgcaatacaggaaaagtttctgttgcacgactgaataccgaaggtcagactctagataatacgcgcggacgtatagaggctgaaacggttaacatccaaagtcagcaactgactaaccaaagcggccatattactgctaccgaacaactgactatcaatagtcgaaatgtagacaaccaaaacggcaaactcctatctgcaaaccaagcacaattagctgtttcagacggcctatacaaccaacatggtgaaattgccaccaaccggcagttgtctattcacgataaaaatcaaaacactttggcgttaaacaatgcggatggcacgattcaatctgccggtaatgtatcgctacaagccaaatcactcgccaacaatggcacattaacagccggtaacaaactggatattgctttgacggacgatttcgtcgtagagcgcgacctcactgcaggcaaacaattaaatctaagcataaaaggccgtctgaaaaatacccataccctacaagcaggccatacgctcaaactcaatgccggcaatatagataaccaagttacaggcaaaattattggtggagaacaaacggacatcacatccgaacagcatgttgacaacaggggcttgatcaacagcgacggtttgacccacatcggtgcaggtcaaaccctgaccaacaccgggacaggcaaaatctatggcaaccatattgccctggacgcgcaaatactgcttaaccgggaagaaacgacggaaggcagtaccaaagcgggggcaatagctgcaaggaaacgtttggatattggagcgaaagagattcataaccaagaaggtgccctactatccagcgaaggtatttttgccgtaggtaatcgactggatgaacaacatcatgcggcaggcatggccgatacctttgttaatggcagtgccggtttggaagtacaaggtgatgcattgatgtccgttcggaatatgcagaatatcaataatcactttaaaacagagacatacttagccaaagcggaaaagcaagtccgcgactacaccgtactggggcaaaatacctactatcaggcgggaaaagacggtttattcgacaactcgcaaggacaaaaagaccaaactactgctacgttccatttaaaaaatggttctcgtattgaggccaaccaatggcatgtccgagactaccacatcgagacttataaagaacgcatcatcgaaaaccggccggcacacattactgtgggcggtgatttgactgcctcaggtcaaaattggctgaacaaagacagccggattgtagtaggcgggcgtattatcactgatgatttaaaccagaaagaaattaccaatcaaagtacaacaggcaaaggtcgcacagatgctgtcggcacacagtgggattcagttacaaaaaaaggatggtacagcggtagaaaaagacaacgccgtactgaaagaaaccatactccttaccatgatacccaactatttacccacgacttcgacacgcctgtatccgtcatccaacagaatgccgcctccccttcctttcaacccgccgcatctgcaatcaaactgattgacggagtatccacggcagccgtcaatggtcagcgcatccataccggtaatgtggtctcgttaaataacgctactgttactctgcctaacagcagcctctataccacccatcctgacaataaaggctggttggttgaaaccgatcctcaatttgcagactaccgccgctggttgggcagcgactacatgttgcaacaactgcaattggacaccaatcatctacacaaacggcttggcgacggctactacgaacaaaaacttgttaatgaacaaatccatcagttaacaggctaccgccgactcgacggctacaggagtgatgaagaacaattcaaagctctgatggacaacggccttactgctgccaaaacattcggtctcaccccaggtatcgccttgagtgcagagcaagttgcccgcttaacttcagatatcgtttggatggaaaatcaaaccgtcaccctgtctgacggttcgactcaaaccgtactggttcctaaagtctatgccctggcgcgcaaaggtgatctcaatacctccggtggcctgattagtgccgaacaagtcttacttaaactgcaaaacggcaacctgactaacagcggtaccattgcggggcgacaggccgtactcatccaggcacggaatattaacagcaacggtaacattcaagccgaccaaatcggcttaaaagctgaaaaaagtatcaatatcgacggcgggcaggtacaagcaggcagactgctgactgcccaagcgcaaaatatcaaccttaacggtacaacccaaacttccggtaatgaacgtaacggcaataccgccatcgatcgtatggccggcattaacgtggtcggaagccatactgaacaagtagataacagaacttcagacggcatcctatccctgcatgccagcaacgatatcaacctcaatgcggccaccgtctctaaccaagttaaagacggcactacccaaattaccgccggcaataatctcaacctcggcaccatccgtaccgaacatcgcgaagcctatggtacattagatgacgagaaccatcgccatgtccgccaaagtaccgaagtcggcagcagtatccgcacgcaaaacggcgcactgcttagagccggtaacgacttaaaaatccgccaaggcgaactggaggccgaagaaggcaaaaccgtccttgccgcaggacgtgatgtcactatcagcgaaggacgccaaataaccgaactggatacctcggtaagcggaaaaagcaaaggcatcctttccagtaccaaaacacaggatcgctaccgcttcagtcatgatgaagcagtcggcagcaacatcggcggcggcaaaatgattgttgcagccgggcaggatatcaatgtacgcggcagcaaccttatttctgataagggcattgtcttaaaagcaggacacgacatcgatatttctactgcccataatcgctataccggcaatgaataccacgagagcaaaaaatcaggcgtcatgggtactggcggattgggctttactatcggtaacctgaaaactaccgatgacactgatcgtaccaatattgtccatataggcagcattataggcagcctgaatggagacaccgttacagttgcaggaaaccgctaccgacaaaccggcagtaccgtctccagccccgaggggcgcaataccgtcacagccaaaagcatagatgtagagtccgcaaacaaccagtatgccactgactacgcccatacccaggaacaaaaaggccttaccgtcgccctcaatgtcccggttgtccaatctgcacaaaacttcatacaagcagcccaaaatgtgggcaaaagtaaaaataaacgcgttaatgccatggctgcagccaatgctgcatggcagggttatcaagcagcccaacaaatgcaacaatttgctccaagcagcagtgcgggacaaggtcaaaacaacaatcaaagccccagtatcagtgtgtccatcacctacggcgaacagaaaagtcgtaacgagcaaaaaagacgttacaccgaagcggcagcaagtcaaattatcggcaaagggcaaaccacacttgcggcaacaggaagtggggagcagtccaatatcaatattacaggttccgatgtcatcggccatgcaggtactaccctcattgccgacaaccatatcagactccaatctgccaaacaggacggcagcgagcaaagcaaaaacaaaagcagtggttggaatgcaggcgtagccgtcaaaataggcaacggcatcagttttggaattaccgccggaggaaatatcggtaaaggtaaagagcaagggggaagtactacccaccgccacacccatgtcggcagcacaaccggtaaaactaccatccgcagcggcggggataccaccctcaaaggtgcgcagctcatcggcaaaggcatacaggcagatacgcgcaacctgcatatagaaagtgtacaagatactgaaacctctcagagcaaacagcaaaacggcaatgtccaagttactgtcggttacggattcagtgcaagcggcagttacagccaaagcaaagtcaaagcagaccatgcctccgtaaccgagcaaagcggtatttatgccggagaagacggctatcaaatcaaggtcggaaaccatacagacctcaagggcggtatcatcacctccggcaagagtgccgaagacaaaggaaaaaacctttttcagacggccacccttactgccagcgacattcaaaaccacagccgctacgaaggcaaaagcttcggcataggcggcagtttcgacctgaacggcggctgggacggcacggttaccgacaaacaaggcaggcctaccgacaggataagcctggcagccggctacggcagcgacagcgacagtcaaagcagcatcacaaaaagcggcatcaacacccgcaacatacacatcaccgacgaagcgggacaacttgcccgaacaggcaggactgcaaaagaaaccgaagcgcgtatctacaccggcatcgacaccgaaactgcggatcaacacacaggccgtctgaaaaacagcttcgacaaagacgcggtcgccaaagagatcaacctgcaaagggaagtaacgaaggagttcggcagaaacgccgcccaagccgtagcggccgttgccgacaaactcggtaatacccaaagttacgaacggtatcaggaagcccgaaccctgctggaggccgaactgcaaaacacggacagcaaagccgaaaaagccgccatccgcgcatccctcggccaagtaaacgcctatcttgccgaaaaccaaagccgctacgacacctggaaagaaggcggcataggcaggagcatactgcacggggcggcaggcggactgacgaccggaagcctcggcggcatactggccggcagcggcacttcccttgctgcaccatatttggacaaagcggcggaaaacctcggtccggcgggcaaagcggcggtcaacgcactgggcggggcggtcatcggctatgcggcgggcgggaatgtcggtacggcggcagtgggggcgaatgtcgattggaacaataggcagctgcatccgaaagaaatggcactggcggacaaatatgccgaagccctcaagcgcgaagttgaaaaacgcgaaggcagaaaaatcagcagccaagaagcggcaatgagaatccgcaggcagatactgcgttgggtggacaaaggttcccaagacggctataccgaccaaagcgtcatatcccttatcggaatgaaaggcgaagacaaagccttgggttatacttgggactaccgcgactacggcgcaagaaatccgcaaacctacaacgatccgaagctgtttgaggaataccgccgacaggacaaacccgaataccgcaacctgacctggctgcacagcgggacgaaagacaccaaaatcaggcagggagagcggaaaaacgaagagtttgcactgaacgttgccgaaggactgacgagccttgtcaaccccaatccgaggataaaagtcccgattcttgcaggcatccgcaacctgaaaaacatcaagccgacagttaccggcagcgatcccttattggcgggtgcggggaatatccgtatccctgcaaacggcaatgttgcgaagggggacaggattccggatacggcattggctagcaagggaatcaaacataaaaatcgtaaagatcaactggaaaaaaataaaaaatctggtgaggattttgagatggaaatttatcagaagaaagttaaacaaggctttaaaccgcaaagacagattacagttaaaacaaaaagtggtgtaaaaactaggcttgatattatttcgaaagaaggtggtcttgatgtttgtacagagtgtaaggcttcaataactgcgccacttactaaaaatcagaaaaaagcttttcctgaaattgaaagaacgggagcaacagtggtcggtaagggaaaaccgggctatccaaaggggaccaaaattgaacctactaaagttataattgaaaggaaaagataa

SEQ ID NO: 59461 - DNA, 1185 bp, Neisseria meningitidis; identical to SEQ ID NO: 51983

SEQ ID NO: 59462 - DNA, 2145 bp, Neisseria meningitidis
atgaacaatccattggtgaatcaggctgctatggtgctgcctgtgtttttgttgagtgcttgtctgggcggaggcggcagtttcgatcttgattctgtcgataccgaagccccgcgtcccgcgccaaagtatcaagatgtttcttccgaaaaaccgcaagcccaaaaagaccaaggcggatacggttttgcaatgcgcttcaagcggcggaattggcatccgcaggcaaatcctaaagaagatgagaaaaaactttctgaaaatgattgggaggcgacgggattaccaagtgaccctaaaaacttacccgagcgacagaaatcagttattgataaagtagaaacaggcagcgacagcaatatttattcttccccctatctcacgcaatcaaaccatcaaaatggcagcattaatggcggtgcaaacctgccaaaaaacgaagtaacaaattataaagatttcaaatatgtttattccggctggttttataaacatgctaaacaaaaaattgattttcaaaataaaattgcacaacaaggcgacgacggctatatcttttatcacggcaaagaaccttcccgacaacttcccgcttctggaacagttacctataaaggtgtgtggcattttgcgaccgatacaaaaaagggtcaaaaatttcgtgaaattatccaaccttcaaaaaatcaaggcgacaggtatagcggattttcgggtgatgacggcgaagaatattccaataaaaatgaagtgactttacaaggcggtcaagagggttatggttttacctcaaatttagaagtggatttcaataataagaaattgacgggtaaattgatacgcaataatagagttacaaacgctactgctaacgataaatacaccacccaatactacagccttgaggctcaagtaacaggcaaccgcttcaacggcaaggcaacggcaaccgacaaaccaaaagagaatgaaaccaaacaacatccctttgtttccgactcgtcttctttgagcggcggctttttcggcccgaagggtaaggaattgggtttccgctttttgagcgacgataaaaaagttgccgttgtcggcagcgcgaaaacccaagacaacaccgcaaatggcaatactgcggcggcttcaggcggcgcaggtgcggcagcatcaggcggtgcggcagatatgccgtctgaaaacagtaagctgaccacggttttggatgcggtcgagctgacgcacggcgacacagcaatcaaaaatctcgacaacttcagcaacgccgcccaactggttgtcgacggcattatgattccgctcctgcccaaggattccgaaagcgggaacaatcaagccaatcaaggtacaaacggcggaacagcctttacccgcaaatttgcccacacgccgaaaagcgatgaaaaagacgcccaagcaggtacggcggcgaatggcgatcaagccgcttcaaatacggcaggtgataccaatggcaaaacaaaaacctatgaagtcgaagtctgctgttccaacctcaattatctgaaatacgggttgctgacgcgcaaaactgccggcaatacgggggaaggcggcaacggcagcccaaccgccgccgcccaaacggcacagggtgcacaaagtatgttcctccaaggcgagcgcaccgatgaaaacaagattccaagcgagcaaaacgtcgtttatcgaggcacttggtacgggcatattgccaacgacacaagctggagcggcaatgcttcagataaagagggaggcaacaaggcggactttaccgtgaattttggcgagaaaaaaattaacggaacgttaaccgctgaaaacaggcaggcggcaacctttaccattgagggaacgattcagggcaacggtttttccggtacggcgaaaactgctgactcaggttttgatctcgatcaaagcaataccacccgcacgcctaaggcatatatcacaaacgccaaggtgcagggcggtttttacgggcccaaagccgaagagttgggcggatggtttgcctatccgggcgacagtcaggcgcagccgtccgcttcggggtcaggtacgtcagccgccaacagcgcgaccgtggtattcggtgcgaaacgccaacagcttgtgcaataa

SEQ ID NO: 59463 - DNA, 870 bp, Neisseria meningitidis
atgaaacccatacggaaagccgttttccccgtcgcagggatgggaacccgcttcctgcccgccaccaaggccagcccgaaagaaatgctgcccatcgtcgacaagccgctgatccaatacgccgtagaagaagccgtggaagccggctgcacggaaatggtgtttgttaccggacgcaacaaacgcagcatcgaagaccatttcgacaaggcatacgaactcgaaaccgagttggaaatgcgccataaagacaaattgttggaacacgtccgcaacatcctgccgccgaacattacctgcctctacatccgtcaggcggaagcactgggcttgggacacgccgtcttgtgcgcccgcgccgccatcggagacgaaccctttgccgttatccttgccgacgacctgattgatgcccccaaaggcgcgctcaaacaaatggtcgaagtgtacgggcgcagcggcaacagcattttgggcgtagaaaccgttgaagcatcgcaaaccggctcatacggcatcgtcgaaaccgaacagctcaaacagttccaacgcattatcggcattgtcgaaaaacccaagcccgaagacgcgccctccaaccttgccgtcgtcggacgctacatccttaccccgcgcattttcgacttactgaccggactgccgcgcggcgcgggcaacgaaatccagcttacagacggcatcgccaagctgctcgatcacgaatttgtcctggcgcacccctttgaaggcacgcgctacgactgcggcagcaaactgggctacctcgaagccaccgtcgcctacggtctgaaacaccccgaaaccggcgaacccttccgccgccttttggaaaaataccgcaccgaataa

SEQ ID NO: 59464 - DNA, 339 bp, Neisseria meningitidis; identical to SEQ ID NO: 42934

SEQ ID NO: 59465 - DNA, 792 bp, Neisseria meningitidis; identical to SEQ ID NO: 42176

SEQ ID NO: 59466 - DNA, 705 bp, Neisseria meningitidis
atgttgcgttctattttggcggcttccctgctggcggtatcttttccgacggcggctgaagcattgaattacaatattgtcgaattttctgaatcggcaggtgtagaggtggctcaggatacaatgtccgcacgtttccaagtgacggcggaaggacgggacaaaaatgccgtcaatgctgagtttgttaaaaaattcaacaatttcaccagaaaatcaaaaaatggtagctttaaaaccgaattggtatcgcgcagtgcgatgccgcgctatcaatataccaacggcagacgcattcaaacaggttgggaggagcgtgcggaatttaaggtcgaaggtagggattttgatgagttaaaccgttttattgccgatattcaagcagatgccgcattggaatatacggatttccatgtgtcgcgtgaacgccgaaacgaggtcatcgatcaggtcagtaaagatgctattttgcgtttcaaggcgcgtgccgacaagttgtcgggcatattgggtacgtccggttataaaatcgtcaaattaaatttgggacacatcggcagccatatcgcgggtgggggaactgctcaggcaaaaatgcttcgtgccatgccgatggcggcaagcgtcaatatggagggtgcggattccgccgcgccgggtgtggaggaaatcagcatcagtgtcaatggaacggttcagttctaa

SEQ ID NO: 59467 - DNA, 537 bp, Neisseria meningitidis; identical to SEQ ID NO: 50207

SEQ ID NO: 59468 - DNA, 381 bp, Neisseria meningitidis; identical to SEQ ID NO: 51394

SEQ ID NO: 59469 - DNA, 4179 bp, Neisseria meningitidis
atgagctattcgtttaccgagaaaaaacgtatccgtaagagttttgcaaagcgggaaaatgttttggaagttcctttcttgctggcaacccaaattgattcttatgcgaagtttttgcagctggaaaatgcttttgacaaacgtaccgatgacggtctgcaggcagcatttaattctattttcccgattgtgagccataacggttatgcgcgattggagtttgtgcattacacattgggcgagcctttgttcgatattcccgaatgtcagttgcgcggaatcacttatgcagcccccttgcgcgcgcgtatccgtttggtgattttggataaggaagcatctaaaccgacggtaaaagaagttcgtgaaaacgaagtgtatatgggcgaaattccgttgatgaccccgagcggttcttttgtgattaacggcacagagcgtgtgattgtctcccagttgcaccgttcgcccggcgtattcttcgagcatgacaaaggtaagacgcactcttccggcaaattgttattctccgcccgcatcattccctaccgtggttcatggttggattttgaatttgatccgaaagatttgctgtatttccgtatcgaccgccgccgtaaaatgccggtaacgattttgttgaaggctttgggctacaacaatgagcaaatcttggatattttctacgacaaagaaacgttctatttgtcttcaaacggtgttcaaaccgatttggtcgcaggccgtctgaaaggcgaaactgccaaggtcgatatcttggataaagaaggcaatgtattggttgccaaaggtaagcgtattactgcgaaaaatatccgtgatattaccaatgcaggcctgacccgtttggatgtagaaccggaaagcctgctgggcaaagcattggctgccgatctgattgattcggaaaccggcgaggtattggcttctgccaatgatgaaattacagaagagttgttggccaaatttgatatcaacggcgtaaaagaaattacgaccctttacatcaatgagttggatcagggtgcttatatctccaataccttgcgcacggatgagactgccggccggcaggcggcgcgtgttgcgatttaccgtatgatgcgtccgggcgaaccgcccaccgaagaggcagtcgagcaattgtttaaccgcttgttcttcagtgaagacagctacgatttgtcccgcgtaggtcgtatgaaatttaatacgcgcacatacgaacaaaaactgtccgaagcccaacaaaactcttggtacggccgcctgctgaacgaaacgtttgccggtgctgccgaaaaaggcggttatgtcctgagcgtcgaagatattgtcgcctcgattgcgactttggtcgagttgcgtaacggccatggtgaagttgacgatatcgatcacttgggcaaccgccgagtacgttcggtaggcgagctgactgaaaaccaattccgcagcggtttggcccgtgtggaacgtgctgtaaaagaacgtttgaatcaggcggaatcagaaaacttgatgccgcacgatttgattaatgcaaaacctgtttctgccgctattaaagaattcttcggctccagccaattgagtcagtttatggatcagaccaaccccttgtctgaagtaacccataaacgccgcgtatctgcattgggtccgggcggtttgacccgcgaacgtgccggcttcgaggtacgggacgtgcatccgacccactacggccgcgtatgtccgattgaaacgcctgaaggtccgaacatcggtttgatcaactcattgtccgtttatgcgcgcaccaatgattacggtttcttggaaacgccttaccgccgcgttatcgacggcaaagtaaccgaggaaatcgattacttgtctgccatcgaagaaggccgctatgtgattgcacaggcgaatgccgatttggattcagatggcaatctgattggcgatttggttacctgtcgtgaaaaaggcgaaaccattatggcaacgcccgaccgcgtccaatatatggacgtggcaaccggccaggtggtatccgttgcggcatccctgattccgttcttggaacatgatgacgcgaaccgcgcattgatgggtgccaacatgcaacgtcaggcagtgccttgcttgcgtcctgaaaaaccgatggtcggtaccggtatcgagcgttccgttgccgttgactctgctactgcaatcgttgcccgccgaggcggcgtggtcgagtatgtcgatgccaaccgtgttgtgattcgtgtccatgacgacgaagcgactgccggcgaagtgggtgtcgatatttacaacttggttaaatttacccgttccaaccagtctaccaatatcaatcagcgtcctgccgtcaaagccggcgatgttttgcaacgcggcgatttggtggccgatggcgcgtccaccgatttgggcgaattggctttgggtcaaaatatgaccatcgccttcatgccgtggaacggttacaactacgaagactcgattctgatttccgaaaaagtggctgcggacgaccgctatacttcgattcacattgaggaattgaatgtcgttgcccgcgataccaagctgggtgcggaagacattacccgcgatattccgaacttgtccgagcgtatgcaaaaccgtttggacgaatccggtatcgtttacatcggtgcggaagtagaagccggcgatgtgttggtaggcaaggtaacgcctaaaggcgaaacccagctgacgccggaagaaaaactgctgcgcgccatcttcggtgaaaaagcatctgacgtaaaagatacttcattgcgtatgcctaccggcatgagcggtaccgttatcgacgttcaagtcttcactcgtgaaggtattcaacgcgacaaacgcgcccaatccattatcgattccgagttgaaacgctaccgtttggatttgaacgaccaattgcgtattttcgacaacgacgcattcgaccgtatcgagcgtatgattgtcggtcagaaagccaacggcggcccgatgaagctggccaaaggcagtgaaatcacgaccgaatatctggcgggtctgccgagcaggcacgattggttcgatatccgtctgaccgatgaagatttggccaagcagttggaactgattaaattgagcctgcaacaaaaacgcgaagaagcggatgagttgtatgagatcaagaagaaaaaactgacccaaggcgacgagctgcaaccgggcgtacaaaaaatggtgaaagtatttatcgccatcaaacgccgtctgcaagccggtgacaaaatggcgggtcgccacggtaacaaaggtgtggtatcacgcattctgccggtggaagacatgccttacatggcggacggccgtccggtagacatcgtactgaacccgttgggcgtaccttcccgtatgaacatcggtcagattttggaagttcacttgggttgggcggcaaaaggtatcggtgaacgcatcgaccgtatgctgaaagagcaacgcaaagccagcgagctgcgtgaattcttgaacaaactctacaacggtagcggtaagaaagaagatttggatgccctgactgatgaagaaatcatcgaactggcctccaacctgcgtaaaggtgcatctttcgcctctcctgtattcgacggtgcgaaagagtctgaaatccgcgaaatgttgaacttggcttatccgagcgacgatcctgaggttgaaaaactgggcttcaacgacagtaaaacccaaatcacgctgtatgacggccgttcaggcgaagcatttgaccgcaaggttacagtaggtgtgatgcactatctgaaactgcaccacttggttgacgaaaaaatgcacgcgcgttctaccggtccgtacagtctggttacccagcagcctttgggcggtaaagcccagttcggcggccaacgtttcggcgagatggaggtttgggcattggaagcatacggcgcggcatacacgctgcaagagatgctgactgtgaagtctgacgacgtgaacggccgtaccaaaatgtacgaaaacatcgtcaaaggcgaacacaaaatcgatgccggtatgcccgagtccttcaacgtattggtcaaagagattcgctcactgggcttggatatcgatttggaacgttactaa

SEQ ID NO: 59470 - DNA, 264 bp, Neisseria meningitidis; identical to SEQ ID NO: 40271

SEQ ID NO: 59471 - DNA, 1419 bp, Neisseria meningitidis; identical to SEQ ID NO: 42601

SEQ ID NO: 59472 - DNA, 393 bp, Neisseria meningitidis
atgcccacttccaccaaaccctacgtcctccgcgctctctgcgaatggtgcagcgacaacagcctcacaccgcacatccttgtttgggtcaacgaacacacgcgcgtccccatgcagtacgtccgcgacaacgaaattatgctcaatatcggcgcaaccgccacgcaaaaccttcaaatcgacaacgattggatcagcttttccgcccgtttcagcggacaggcgcacgatatatggatacctgtcggacacgtcctcagccttttcgcacgggagaccagcgaaggtatggggtttgaattggaggagtaccgccccgatacgccgcctgaaaacacccctgccgaaaccgcgccccgacccgccaaaaaaggcttgaaattggtcaaataa

SEQ ID NO: 59473 - DNA, 897 bp, Neisseria meningitidis; identical to SEQ ID NO: 43129

SEQ ID NO: 59474 - DNA, 312 bp, Neisseria meningitidis; identical to SEQ ID NO: 38411

SEQ ID NO: 59475 - DNA, 1134 bp, Neisseria meningitidis
atgtttaaaaaattcaaactggtattgttgtcattttttgcccttgtatttgccttttggctggggacgggtattgcctatgagattaatccgcgttggtttttgagcgatacggcaactgaaatacctgaaaatccgaatgcttttgtggcgaaacttgcccgcctgttccgaaatgccgacagggcggttgtcatcgtgaaggaatcgataaggacggaggaaaatcttgccgaaactgtggatgacggtccgttgcagtcggagaaggattatcttgcactcgctatccggctcagtcgtttgaaagaaaaggcgaaatggtttcacgtaacggagcaggaacatggggaagaggtttggctggattaccatatcggcgagggcggtttggttgcggtttcgcttttgcaacgctcgccggaagcgtttgttaatgccgaatatctgtatcggaacgatcgtccgttttctgtaaatgtgtacggcggagcggctcacggggaaaattatgaaacgacaggagaatatcgggttgtttggcaaccggacggttcggtatttgatgcggcagggcgcgggaaaatcggggaagatgtttatgagcattgcctcgggtgttatcagatggcccaggtatatttggcgaaataccgggatgtcgcgaatgacgagcagaaggtttgggacttccgcgaagagagcaaccggattgcgtcggactcgcgcaattctgtgttttatcagaatatgcgggaattgatgccccgggggatgaaggcgaacagtcttgtggtcggctatgatgcggacggtctgccgcaaaaagtctattggagtttcgacaatgggaaaaaacgccagagtttcgaatattatttgaaaaacggaaatctttttattgcacaatcttcgacggtagcattgaaagcggatggcgtaacggcggatatacagacctatcatgcgcaacagacgtggtatttggatggcgggcggattgtccgcgaagagaaacagggagacagactgcctgattttcctttgaacttggaaaatttggaaaaagaggtgagccgttatacagaggctgcggcgagacgttcgggcggcaggcgcggcctttcttactga

SEQ ID NO: 59476 - DNA, 960 bp, Neisseria meningitidis; identical to SEQ ID NO: 42649

SEQ ID NO: 59477 - DNA, 1344 bp, Neisseria meningitidis; identical to SEQ ID NO: 53425

SEQ ID NO: 59478 - DNA, 1443 bp, Neisseria meningitidis
atgaactggtctgatttgaatttaatgcccgccatgcccgaagtcgcgctgctgtcgctgctggtgttattgttgctggcagacttgtgggtcagtgatgacaaacgccgttggacgcattacggcgcgttggcaacggtggcggttacggctgtggtgcagcttgccgtttgggaacagggcagcacgtcttcgttcaacggcatgtatattgcagacggtatgtcgcgtttggcaaaaatggttttatatgccttgacgtttgccctgtttgtttatgccaagccctacaaccaagtgcgcggtattttcaaaggcgagttttacaccctgtcgctgtttgccctcttgggcatgagcgtgatggtgagcgcggggcattttttaactgcctatatcggtttggaactcttgtcgcttgccctttacgccctgattgccctgcgccgcgattccggctttgccgccgaagccgccttgaaatattttgttttgggcgcgctggcatccggcctgctgctctacggtatttctatggtttacggcgcaaccggttcgctggaatttgccggcgtgctcgcctcttccttcaatgaagaagccaatgaatggctgttgaaactgggtctggtgtttatcgtcgtcgccgttgcgttcaaactcggcgcggtgccgttccatatgtgggtgcccgacgtgtatcacggcgcgcccacttctgttaccgccttggtcggcactgccccgaaagtcgccgccgtcgttttcgctttccgcatcctcgttaccgggctgggaaccgtgcatcatgactggtctctgatgtttgccctgcttgccgccgcctcgctgctggtcggcaaccttgccgccatcatgcagaccaatatcaaacgtatgctcgcctattccaccgtatcgcatatgggctttatcttgttggcgtttatggcaggcgcggtcggctttgcggcgggtctctattacgccattacctacgcgctgatggcggcggcagggttcggcgtgttgatggtgttgtcggatggggacaacgagtgcgaaaacatcagcgatttggcagggttgaaccaacaccgcgtatggcttgcctttttgatgctgctggttatgttctctatggcgggcattccgccgctgatgggcttttacgccaaattcggcgtgattatggcactcttaaaacaaggctatgtttggttgtccgtatttgccgtcgtgatgtcgctgattggcgcgttctactacctgcgcgtggtcaaagtcatctacttcgatgtgcctgatcatgaccagccggtcggcagcaactatgccgccaaatttgttctgacggtcaatgccttcttgctgctcctgtggggcatcatgccgcaaaccgttatcgactggtgcgccaaggcgttggagaacacgctgtaa

SEQ ID NO: 59479 - DNA, 1344 bp, Neisseria meningitidis; identical to SEQ ID NO: 43397

SEQ ID NO: 59480 - DNA, 1083 bp, Neisseria meningitidis
atgcaaaccgcaaacaaaaaaaccatcctcgttaccggcggcgcgggctttatcggctctgccgttgtccgccatatcattcaaaacacccaagattccgtcgtcaacctcgacaaactgacctacgcgggcaatctcgaatcgctgaccgacattgccgataatccccgctacgcttttgagcaagtggatatctgcgaccgcgccgaactcgaccgcatattcgcacaacaccagcctgatgccgtgatgcacttggctgcggaaagtcatgtcgaccgctctatcgattcggcaggcgaatttatccaaaccaatatcgtcggcacattcaacctacttgaagctgcgcgcgcctattggcagcaaatgccgtctgaacagcacgaagccttccgtttccaccatatttccaccgatgaagtctatggcgatttaggcggcacggacgatttgtttaccgaaaccacgccctacgcgccgtccagcccctactctgcctctaaagcgtccagcgaccacctcgtccgcgcgtggttgcgtacttacggcttgccgaccattgtaaccaactgctccaacaactacggtccttaccattttccggaaaaactcattcctttgatgattctgaacgcgcttgacggcaaaccgctgcctgtgtacggcgacggtatgcaaatccgcgactggctgtttgtcgaagaccacgcgcgcgcactgtatcaggttgttaccgaaggtgttgtcggcgaaacctacaatatcggcggccacaatgaaaaagccaatattgaagtcgtcaaaaccatctgcgccctgctggaagaactcgctcccgaaaaaccggccggtgtggcgcgttatgaagatttgattacttatgtgaaagaccgccccggccacgatgtgcgctatgcgattgatgcagcaaaaatcggccgcgagttgggttggcagccgcaggaaacttttgaaagcggcattcgcaaaacagtggaatggtatctggacaacaaaacctggtggcaaaatgtattgaacggcagctatcgtttggaacgtttaggtactggaaaatag

SEQ ID NO: 59481 - DNA, 285 bp, Neisseria meningitidis; identical to SEQ ID NO: 42100

SEQ ID NO: 59482 - DNA, 717 bp, Neisseria meningitidis
gtgttcaataatttccttgcttcgctgccgtttatgacggaaacacgcgccgatatgattgtcagcgcgtttttgcctatggtcaaagccggcttcgcagtatctttgcctttagcgatcgcttctttcgttatcggtatgatgattgcggtagccgtggctttggtgcggattatgcccgccggcggcatcgtgcggaaaatcctgctgaaattggtggaattttatatttccgtcattcgcggtacgccgctgttggttcagcttgtgattgtgttttacggactgccatccgtcggcatctatatcgatccgattcctgccgccatcatcggcttttcgctcaatgtcggcgcatacgcttccgaaaccatacgcgcggcgattttgtccgtaccgaaaggccaatgggaagcaggtttctccatcggcatgacctatatgcagacgttccgccgcatcgtcgcgccgcaggcatttcgcgttgccgtgccgcctttgagcaacgagtttatcggtttgtttaaaaacacctcgctcgcggcagtcgtgacggtaacggaattattccgcgtcgcgcaggaaacggcaaaccgcacttatgactttttgcccgtctatatcgaagccgctttggtttactggtgtttttgtaaagtgctgttcctgattcaggcgcgtttggaaaaacgtttcgaccgctacgtcgccaaataa

SEQ ID NO: 59483 - DNA, 1995 bp, Neisseria meningitidis
atgaaacgacattttatgcctaaaattttacaacaaacaaccttacatcgcttttttcgcgcaaacacgcaccatccgatcagcccgtccgttttgcagcaggctggcgatttgataagatggttatgtttttcagacggcatttcagatttccgtccatgccgtctgaagccgcaaaacccgattggaggaactgttatgaataccgtatcgaattacctgtccgcattgcgcgaagccatgagggcgcaaggcttggatgcactcgtcatcccttccgccgacccccacctgtccgaatacctgcccgagcattggcaggcgcgccgcgaattatcgggctttaccggctcggtcggcacgtttgtcctgaccaccgatgaagcgggcgtatgggtggacagccgctattgggaacaagccgccaaacagctttccggcagcggcattgtgctgcaaaaaagcgggcaagtgccgccgtacaacgaatggctcgcggcaaacttgcccgaaaacgccgccgtcggcatcccttccgatatggtctcgcttaccggcaaacgcactttggcgcaatccctgaccgccaaaaacatccgcatcgaacacccggataatttactgaatcaagtgtggacaaaccgccccgccctccccgccgaaacggtgttcatccacgaccccgactatgtttctgaaaccgccgccgaaaaactcgcccgcgtgcgcgcagttatggcggaaaaaggcgcggattaccacttggtttcctcgcttgacgacatcgcctggctgaccaacctgcgcggcagcgacgtgcctttcaatcccgttttcgtgtccttcctgctgattggcaaagacaacgccgtcctgtttaccgaccgatgccgtctgaacgccgaagccgccgctgcgctgcaaaccgccggcatcacggttgaaccttacgcccaagttgccgacaaactcgcgcaaatcggcggtacgctgctcatcgagccgaataaaaccgccgtcagtacccttgtgcgcctgcccgaaagcgtgcgcctgatcgaaggcatcaacccgtccacgctgttcaaatcctgcaaatccgaagccgacatcgcccgcatccgcgaagcgatggaacacgacggcgcggcgttgtgcggtttcttcgccgagtttgaagacatcatcggcaacggcggcagcctgaccgaaatcgacgtggacaccatgctttaccgccaccgcagcgcacgtccgggctttatttcattgagtttcgacaccatcgcgggcttcaacgccaacggagcactgccgcattacagcgcaacgcccgaaagccacagcaccatcagcggcaacgggcttttgctcatcgactccggcgcgcaatacaaaggcggcacgaccgacatcacccgcgtcgtccctgtcggcacacccaccgccgaacaaaaacgcgacaacaccctcgttctcaaagcccatatcgcgcttgccgaagccgtgttccccgaaaacatcccctcgccgctgattgatgcgatttgccgcaaacccctgtggcaggcgcaatgcgactacggccacggcaccggacacggcgtaggctatttcctcaacgtccacgaaggcccgcagcgcatcgccttcgccgcccccgccacgcccgaaaccgccatgaaaaaaggcatggttacctccatcgaacccggactctaccgcccgggaaaatggggcatccgcattgaaaaccttgccgccaaccaagccgtcgccacccctcaagaaaccgaattcggcagcttcctctgttttgaaaccctgaccctctgccccatcgatacacgcctgatggacaccgccctcatgaccgacggcgaaatcgactgggtcaaccgctaccacgccgaagtccgccgccgcctcgagccgctgaccgaaggcgcggcaaaagcgtggctgatcaaacgcaccgaaccgctggcgcgttaa

SEQ ID NO: 59484 - DNA, 795 bp, Neisseria meningitidis; identical to SEQ ID NO: 43823

SEQ ID NO: 59485 - DNA, 291 bp, Neisseria meningitidis; identical to SEQ ID NO: 43483

SEQ ID NO: 59486 - DNA, 1116 bp, Neisseria meningitidis
atgatttatcaaagaaacctcatcaaagaactctcttttaccgccgtcggcattttcgtcgtcctcttggcggtattggtctccacgcaggcaatcaacctgctcggccgtgccgccgacgggcgtgtcgccatcgatgccgtgttggcattggtcggcttctgggtcatcggtatgacgccgcttttgctggtgttgaccgcatttatcagtacgttgaccgtgttgacccgctactggcgcgacagcgaaatgtcggtctggctatcctgcggattggcattgaaacaatggatacgcccggtgatgcagtttgccgtgccgtttgccgttttggttgccgtcatgcagctttgggtgataccgtgggcagagctacgcagccgcgaatacgctgaaatcctgaagcagaagcaggaattgtctttggtggaggcaggcgggttcaacagtttgggcaagcgcaacggcagggtttattttgtcgaaaccttcgataccgaatccggcatcatgaaaaacctgttcctgcgcgaacaggacaaaaacggcggcgacaacatcatcttcgccaaagaaggtaacttctcgctgaacgacaacaaacgcacgctcgaattgcgccacggctaccgttacagcggcacgcccggacgcgccgactacaatcaggtttccttccaaaaactcaacctgattatcagcaccacgcccaaactcatcgaccccgtttcccaccgccgtaccattccgaccgcccaactgattggcagcagcaacccgcaacatcaggcggaattgatgtggcgcatctcgctgaccgtcagcgtcctcctactctgcctgcttgccgtgccgctttcctatttcaacccgcgcagcggacatacctacaatatcttgattgccatcggtttgtttttaatttaccaaaacgggctgaccctgctttttgaagccgtggaagacggcaaaatccatttttggctcggactgctgcctatgcacattatcatgtttgccgttgcactcatcctgttgcgcgtccgcagtatgcccagccagcccttctggcaggcggttggcaaaagtctgacattgaaaggcggaaaatga

SEQ ID NO: 59487 - DNA, 186 bp, Neisseria meningitidis; identical to SEQ ID NO: 42933

SEQ ID NO: 59488 - DNA, 618 bp, Neisseria meningitidis
atgagccacaaaaaacaagatgccttccaaggattgatcgacgcgctgaaggttttacccaacgttgggccgaaatcggcacagcggatagcgtatcatttgctccaacacaagcgcaaagaggctgaaaaactggtggatgccttgcagacggcattgaagcaggtttaccattgcgcgatgtgcaacacgttttgcgaaggcggattgtgcgatatttgtgccgatgaaacacgcgacgggcggcggctgatggtggtgcatatgcctgccgacgtgtcgaatatggaagcggcaaactgccacgacgggctgtatttcgtcctgatggggcaaatcaatacggcattgggaatggacgtatccgccatcgcattggacaggctggcgcaacggctgggcggcggggaagtcgaagaaatcattattgcaaccgcttttaccgcagaaggcaatgcgacggcgtatgtcctgtccgagttttttaaaaacctgccttacaaagtcagcaggctgtcgcagggcattcccttgggcggcgaattggaatatgtcgatgcgggaacgctggcgcaggcggtgtacgaacgccgcctgattaaagaaggcggggcataa

SEQ ID NO: 59489 - DNA, 1041 bp, Neisseria meningitidis
atgaacacacccatccccttctccgaacggctcatccgctggcaaaaacaacacggtcgccaccacctcccttggcaggtcaaaaacccttattgcgtctggctttccgaaatcatgctccagcaaacgcaggtcgccaccgtgttggactactatccgcgtttcttagaaaaattcccgaccgttcagacgcttgccgccgcgccgcaagacgaagtgttgtcgttgtgggcgggcttgggctattacagccgcgcgcgcaacctgcacaaagccgcgcaacaagtcgtcaggcaattcggcggcacgtttccgtcggagcgcaaagacttggaaaccctctgcggcgtaggcagaagcaccgccgccgccatttgcgccttctccttcaaccgccgcgaaaccattttggacggcaacgtcaaacgcgtactctgccgcgtgttcgcccgcgacggcaatccgcaggacaaaaaatttgaaaactcgctctggacacttgccgaaagcctgctgccgtctgaaaacgccgatatgcctgcctatacacaaggtttgatggatttgggcgcgaccgtgtgcaaacggacgaaacccttgtgccaccaatgcccgatggcggacatctgcgaagcaaaaaagcaaaaccgcaccgccgagctgccgcgcaaaaaaaccgccgccgaagtaccgaccctgccgctttactggctgattgtccgcaaccgggacggcgcgattttgctggaaaaacgccccgccaaaggcatttggggcgggctgtattgcgtgccgtgttttgaaagtttgaacgggctttccgactttgccgccaaattctccctgaccatggcagatatggacgaacaaaccgccctgacccaccgtctgacgcaccggctgctgatgattacgccgtttgaaggacaaatgccgtctgaaagcccttcagacggcatttggataaagccggcgcatttgaaagattacggcctgcccaagcctttggaaatttatttaaacggtaataggttagaataa

SEQ ID NO: 59490 - DNA, 378 bp, Neisseria meningitidis; identical to SEQ ID NO: 42275

SEQ ID NO: 59491 - DNA, 801 bp, Neisseria meningitidis
atgaacgcgttcaacctcatcatcatcggcgacgaaatcttacacggcagcagccaagacaagcatttcgcctttttcaaatccctgctcgaatccaaagggctgaagctcaatcaggtgcaatacctgcccgacgaacccgatttgctggtcaggcaactgcgccgcagcttttcagacggcatgccaactttcgttaccggcggtatcggcgccacgcccgacgaccacacccgccaagccgcagccgctgctttggatttgcccgtcgtccgccattctgaagccgccaagtttatcgaaggcataacccagaaacgcggcgagccgcttgattcgccggaacacgcccaacgcctgaaaatggcagattttcccgaaggcgcggaattggtgcccaatccgtttaacaacatcgccggattttctatccgcgagcattatttcttccccggctttcctgtgatggcgcacccgatggcggaatgggtattggaaacttattacgccgaccgcttcaaccaaaccgaacgcggcagccgcagcgtgtatgtgtttgagcagcccgaatcgcgcattacgccgcttatggagcatatcgagcaaacttatcccggcgtgcgttcgtacagcctgcccagcgtcggttggacgcattcagacggcacgcaggtcaaaccgcacattgagttcggcatcaaagccgaaggagaagccgtcaaccttttggacgcggcgtgggcggaagtgttgcacagcttggaaggattgggagcagagctgaaaaatcgggtaaactga

SEQ ID NO: 59492 - DNA, 1311 bp, Neisseria meningitidis; identical to SEQ ID NO: 46911

SEQ ID NO: 59493 - DNA, 1107 bp, Neisseria meningitidis; identical to SEQ ID NO: 41253

SEQ ID NO: 59494 - DNA, 177 bp, Neisseria meningitidis; identical to SEQ ID NO: 38352

SEQ ID NO: 59495 - DNA, 270 bp, Neisseria meningitidis
ttgaacaccaaagaaattttggaactgaaagcgcgcgcgcaccatctccatcctgttgtgatggtcggtcagcagggtctgacggacgcagtcatcaaggaaaccgatgcggcattgacggcgcatgagctgattaaagtgcgcgtattcggcgacgaccgtgccgaacgtatcgaaatctgcactgccttatgtgaggcggttgacgcgcaacctgttcagcatatcgggaaacttttggtattgtggcgtaagaatatcgaagcctga

SEQ ID NO: 59496 - DNA, 666 bp, Neisseria meningitidis
atggcagtattaagcaaagagcaggttctatccgcatttaaaaaccgcaaatcatgccggcattacgatgcggcacgtaaaatcagtgccgaggattttcagtttattttagaactcgggcgtttgtcgcccagttcggtcggttcggagccttggcagtttgttgtggttcaaaaccccgaaatccgacaggcaatcaagccgttttcttggggtatggcggatgctttggataccgccagtcatttggtggtgtttttggcaaagaaaaatgcccgcttcgacagcccgtttatgttggaaagcctcaaacggcgcggcgttaccgaaccggatgccatggcaaaatctttggcgaggtatcaggcgtttcaagccgacgacatcaagattttggacgattcgcgcgccttgtttgactggtgttgccgccagacctatatcgcgttgggcaacatgatgacgggtgcggcgatggcaggtatcgattcctgcccggtggaaggtttcaactatgccgatatggaacgcgtattgtccgggcagttcggtttgttcgatgcggcagaatggggcgtgtccgttgccgcgacattcggctaccgcgttcaggaaatcgccacgaaagcgcgcaggcccttggaagaaaccgttatttgggcataa

SEQ ID NO: 59497 - DNA, 759 bp, Neisseria meningitidis
atgaaaaaagtcagcgtattgattgttgctagaaatgaagcaaaccacattcgggaatgtattgaaagttgccgtttcgataaagaagttatcgttatcgatgaccacagcaccgacaatactgccgaaattgccgagggtttgggcgcaaaagtcttcagacggcatttgaatggggatttcggagcgcaaaaaacatttgccatcgaacaggcaggcggagaatgggttttcctgattgatgcagacgaacgctgcacgccggaactatctgatgaaatctcaaaaattgtccaaaccggcgattatgccgcctattttgtcgaacgccgcaaccttttccccaaccatcccgccacacacggcgcgatgcgtcccgacagcgtatgccgtctgatgccgaaaaaagacagttcggtgcaaggcaaagtacacgaaaccgtacaaaccccctaccccaaacgccgtctgaagcattttatgtaccattacacgtacgacaactgggaacaatatttcaacaagttcaacaaatatacttccatttcagccgaaaaataccgagagcagggaaagcccgtgcgtttcgttagggacattatcctccgcccgatttgggggtttttcaaaatttatatcctgaacaaagggtttcttgatggaaaaatgggttggattatgtccgtcaaccacagctattacacgatgattaaatatgtcaaactatattatctgtacaaatccggcggaaaattttaa

SEQ ID NO: 59498 - DNA, 156 bp, Neisseria meningitidis; identical to SEQ ID NO: 43525

SEQ ID NO: 59499 - DNA, 1341 bp, Neisseria meningitidis
ttgcacacccttctagcttttatcttcgccatcctgattttggtcagcctgcacgagttcggacactacatcgttgccagattgtgcggtgtcaaagtcgtacgcttttccgtcggcttcggcaaaccgtttttcacccgaaagcgcggcgacaccgaatggtgcctcgccccgattccgttgggcggttacgtcaaaatggtcgacacgcgcgaaggcgaagtatcagaagccgatttaccctacgcttttgacaaacaacaccccgccaagcgcatcgccatcgtcgccgccggcccactgaccaatctcgcactggcggttttgctgtacggactgagcttttccttcggcgtaaccgaactgcgcccctacgtcggcacagtcgaacctgacaccattgccgcccgcgccggcttccaaagcggcgacaaaatacaatccgtcaacggcacacccgttgcagattggggcagcgcgcaaaccgaaatcgtcctcaacctcgaagccggcaaagtcgccgtcggcgttcagacggcatcgggcgcgcaaaccgtccgcaccatcgatgccgcaggcacgccggaagccggtaaaatcgcaaaaaaccaaggctacatcggactgatgccctttaaaatcacaaccgttgccggcggcgtggaaaaaggcagccccgccgaaaaagcaggcctgaaaccgggcgacaggctgactgccgccgacggcaaacccatcgcctcatggcaggaatgggcaaacctgacccgccaaagccccggcaaaaaaatcaccctgaactacgaacgcgccggacaaacccataccgccgacatccgccccgatactgtcgaacagtccgaccacaccctgatcgggcgcgtcggcctccgtccgcagccggacagggcgtgggacgcgcaaatccgccgcagctaccgtccgtctgttatccgcgcattcggcatgggctgggaaaaaaccgtttcccactcgtggacaaccctcaaatttttcggcaaactaatcagcggcaacgcctccgtcagccatatttccgggccgctgaccattgccgacattgccggacagtccgccgaactcggcttgcaaagttatttggaatttttggcactggtcagcatcagcctcggcgtgctgaacctgctgcccgtccccgttttggacggcggccacctcgtgttttatactgccgaatggatacgcggcaaacctttgggcgaacgcgtccaaaacatcggtttgcgcttcgggcttgccctcatgatgctgatgatggcggtcgccttcttcaacgacgttacccggctgctcggttag

SEQ ID NO: 59500 - DNA, 366 bp, Neisseria meningitidis; identical to SEQ ID NO: 37248

SEQ ID NO: 59501 - DNA, 1245 bp, Neisseria meningitidis
atggaacagcagcaaagatacatcagcgtactggatatcggtacgtctaaagtcctcgcactgatcggggaagttcaagatgacgacaaaatcaacatcgtcggtttggggcaggctccttcacggggcttgcgcgcgggcatggtaaccaatatcgatgccaccgtccaagccatcaggcaggcggtcaatgatgccgagctgatggcggataccaaaattacccacgttaccacaggtatcgcaggcaaccacatccgcagtctcaattcgcaaggtgtggttaaaattaaagacggggaagtcacgcaggcagacatcgaccgcgccattgaaacggcaaaggcaatcaatatcccgcccgatcaaaaaattctcgatgccgtggttcaagactacattatcgacacccaacttggcgtgagggagcccatcggtatgagcggtgtgcgtctggatacgcgggtgcacatcattaccggtgcaagtacggcagtgcagaatgtccaaaaatgtatcgagcggtgcggcttgaaaagcgatcaaatcatgcttcagccgttggcaagcgggcaggcggtgctgactgaagatgaaaaagacctcggcgtatgcgtcatcgacattggtggcggaacgaccgatattgccgtttatatgaacggtgccatccgccatacgtccgtcattccggccggtggtaatctgattaccaaagatttgtccaaatcgttgagaacacctctcgatgccgccgagtacattaaaatccattatggcgtgacatcatgcgatacggaaggcttgggtgagatgattgaagttccgggcgtgggtgaccggacatcgcgtcaggtttccagtaaggttttggcagcaatcatcagtgcacgtattcaggagatttttggcgtagtgctgggcgagctgcaaaaatcgggtttccccaaagaagtgctgaatgcgggtatcgttctgaccggcggtgtgtccatgatgaccgggattgtggaatttgccgaaaaaatcttcgatttgcctgtacgcaccggtgcgccccaagaaatgggcggtttgtccgaccgtgtccgcacaccgcgcttttctaccgccatcgggctgcttcatgcagcatgcaagctggaaggaaacttgccgcagccggaaaacggtgcagtgcaagagagggaagggggcggcggtttgttggcaagattgaaacggtggattgaaaacagcttctga

SEQ ID NO: 59502 - DNA, 2625 bp, Neisseria meningitidis
atgaaaacctccgaactgcgccaaaaattcctaaaattttttgaaaccaaaggccacaccgtcgtccgctcttccagcctcgtgccgcacgacgacccgaccctgctgtttaccaacgcgggcatgaaccagtttaaagacgtattcttaggtttcgacaaacgcccgtacagccgcgccaccaccgcgcaaaaatgcgtacgcgcaggcggcaagcacaacgacttggaaaacgtcggctacaccgcccgccaccacaccttctttgaaatgatgggcaacttctccttcggcgactacttcaagcgcgacgcgatccacttcgcttgggaatttctgacttcccccgaatggctcaatatccccaaagacaaactgttggcgaccgtttacgcggaagacgacgaagcctacaacatctggttgaacgaaatcggtatgccgtccgagcgcatcgtccgcatcggcgacaacaaaggcgcgaaatacgcgtccgacaacttctggcaaatgggcgacaccggcccttgcggcccctgctccgaaattttctacgaccacggcgaagaaatctggggcggcattcccggcagtcccgaagaagacggcgaccgctggatcgaaatttggaactgcgtatttatgcagttcaaccgcgacgaacaaggcaatatgaacccgcttcccaaaccttccgtcgataccggtatgggcttggaacgcatggccgccgtcatgcagcatgttcacagcaactacgaaatcgacttgttccaagacctgctcaaagccgttgcccgcgaaaccggcgcagctttcagcatggaagaaccaagcctaaaagtcatcgccgaccacatccgctcctgctcattcctgattgcagacggcgtattgccttccaacgaaggccgcggctacgtattgcgccgcattatccgccgcgccgtgcgccacggttacaaactgggtcaaagcaaaccgttcttccacaaactcgttgccgatttggtcaaagagatgggcggtgcctaccctgagttgaaagagaaacaagcacaaatcgaagaagcgttgaaaaacgaagaaagccgttttgcccaaacgctggaaactggtatggctttgttggaaaacgcgctggccaaaggcggcaaaacactcgacggcgaaatcatcttcaaactctacgatacctacggtttcccctacgacctgactgccgacatggcgcgcgaactgggcatcgaactggacgaagcaggcttcgagcgcgaaatggaagcccaacgcgcacgcgcacgcgccgcccaaagcttcaaagccaacgcccaactgccttatgacggtcaagacaccgagtttaaaggttatagcgaacgccaaaccgaatccaaagtcctcgccctctacaaagacggcgagcaagtcgacgaattgaacgaaggcgacagcggcgcagtcgtcatcgactttaccccgttctatgcagaatccggcggccaagtcggcgatgtcggctatatcttctcaggcgaaaaccgctttgaagtacgcgatacccaaaaaatcaaagcggccgtattcggtcaattcggcgtacaaacttcaggccgtctgaaagtcggcgacagcgttaccgccaaagtggacgacgaaatccgcaatgccaatatgcgcaaccacagcgcaacccacttgatgcacaaagccctgcgcgatgtattgggcagacacgtcgaacaaaaaggctctttggttaccgccgaatccacccgtttcgacatttcccatccccaagcggtaactgccgaagaaatcgccgaagtcgaacgccgcgtcaacgaagccgttttggcgaacgttgccgtcaacgccgccattatgagcatggaagacgcgcaaaaaaccggcgccatgatgctcttcggcgaaaaatatggcgacgaagtacgcgtattgcaaatgggcggtttctctaccgaattgtgcggcggcacgcacgtttcacgcaccggcgacatcggcctcttcaaaatcatcagcgaaggcggtattgccgcaggcgtgcgccgtatcgaagccatcaccggcctgaacgcactcaaatgggcgcaagagcaagagcgtttggtgaaagacatcattgctgaaaccaaagcccaaaccgaaaaagacgtactggcgaaaatccaagcaggcgcggcacacgccaaagcattggaaaaagaattggcacgcgccaaagccgaactcgccgtccacgcaggcgcaaaactcttggacgacgcaaaagacttgggcgcagccaaactcgttgccgcccaaatcgaagccgacgcagccgccctgcgcgaaatcgtaaccgacctgaccggaaaatccgacaacgccgtgattcttttagcggcagtaaacgacggcaaagtctccctgtgcgccggcgtatccaaagccctgaccggcaaagtcaaagcaggcgatctggttaaatttgcagccgaacaagtcggcggcaaaggaggcggcagaccagatttggcacaggcagggggcacggatgccggcaaattgcccgccgtgttggatagcgtgaaagactgggtcggcgcgaagctggtttga

SEQ ID NO: 59503 - DNA, 1776 bp, Neisseria meningitidis; identical to SEQ ID NO: 54581

SEQ ID NO: 59504 - DNA, 216 bp, Neisseria meningitidis; identical to SEQ ID NO: 37181

SEQ ID NO: 59505 - DNA, 438 bp, Neisseria meningitidis
atgatagggcttttaatcatcacacacgaaaccataggcgaagcctaccgcaagctggcacatcattttttcccgggcgggctgcctgaaaacgtccgcatactcggcgtgcagccgacggaagaccaagacgacatcatcaacaacgccattgccgcgcttcaggagtttcccgacaacgacggcgtgctgattatgaccgatattttcggcgcgaccccctgcaatgccgcccgccgcctcgtgcgcgaaaacaaatcggcgattttgaccgggctgaacgcgccgatgatggttaaggccgtccaatattcgccggcggcggaagaccttgccgcctttaccgaatgcgtcagggaggcggcggtaaaaggcattttcgccatcacgtccgcgcccgaagatttggtgtgccggcgcagcggcgatgccgtctga

SEQ ID NO: 59506 - DNA, 1392 bp, Neisseria meningitidis; identical to SEQ ID NO: 44003

SEQ ID NO: 59507 - DNA, 1137 bp, Neisseria meningitidis; identical to SEQ ID NO: 51094

SEQ ID NO: 59508 - DNA, 891 bp, Neisseria meningitidis
atgaacagcccttttcacaacatcggcatcgtaacccgccccaacacgcccgacatccaagacaccgcacacacgctgattacctttttgaagcagcacggctttaccgtctatctcgacgaagtcggcataaaggaaggctgcatctatacccaagacaccgtcggctgccatatcgtcaacaagaccgaactggggcaatactgcgacctggtcgccgttttaggcggagacggcacctttctctccgtcgcccgcgaaatcgccctgcgcgccgttccgattatcggcatcaaccaagggcatttgggcttcctgacccaaattccccgcgaatatatgacggacaagctattgcccgttttagaagggaaataccttgccgaagagcgcatcctgattgaggccgcactcatccgcgaaggcaaaaccgccgaacgcgccatcgccctcaacgatgccgtcctctcccgtggcggcgccggacagatgattgagtttgaagtcttcgtcaatcgggaattcgtctatacccagcgttcggacgggctgattgtctccacccccaccggatcgaccgcctattcgcttgccgccggcggccccatcatgcaggcaggattgcacgccttcacgctcgtccccatctgcccgcaatccatgaccaaccgccccatcgccattccagacacgtccgaaatcgaaatcctcgttacccaaggcggcgacgcgcgcgtccatttcgacggtcaaacccatatcgacgtgcaaaacctcgaccgcatcaccatccgccgctaccgaaaccccttacgcatcctacatccgaccgactaccaatatttcaaaaccctgcgccaaaaactgcactggggcgaacaattggtctga

SEQ ID NO: 59509 - DNA, 1116 bp, Neisseria meningitidis; identical to SEQ ID NO: 42748

SEQ ID NO: 59510 - DNA, 1494 bp, Neisseria meningitidis
atgttgtcaggactccccatccccaaagacatcgcgcgcccgcccgaaacgatattggtcaacatcacgccgcaggaaacgcgcgtagcggtgttggaggaaaacaatatctgcgagctgcacatcgagcgcaacagcgaacacagcctggtcggcaatatctatctgggcgtggtgcgccgcgtgctgcccgggatgcagagcgcgtttatcgacatcggcttggaacgcgcggcgtttttacacatcgtcgatgtcctcgaacaacgccgcaaccccgaagaaacccagcgcatcgaacatatgctgtttgaagggcagtctgttttggtgcaggtcatcaaagacccgatcaacaccaaaggcgcgcggctttccacccaaatctcgctggcggggcgtttcctcgtccatcttccgcaagaagaccacatcggcgtgtcccaacgcatcgaagacgatgccgaacgcagcagcctgcgcgaacgcctcgacaagctcctgccggaaaatgcctgccggggctacatcatccgcaccaacgccgaaaacgccaccgacgaacagctccagtccgacatcgactacctgaccaaagtgtgggaacacatccaagaacaggcgaaaatccggccgccggaaaccctgctttatcaggatttgcccttgagtttgcgcgtattgcgcgatatggtcggctgcgacacgcaaaaaatcctcgtcgattccaccgtaaaccacgggcgcatgacgcgttttgccgaacaatacgtccacggcgcattgggcaggatagaattgttcaaaggcgaacgcccgctgtttgaaacccacaacgtcgagcaggaaatcagccgcgccctgcaaccgcgcgtcaacctcaacttcggcagctacctgattatcgaatccaccgaagcgatgaccacgatagacgtgaacaccggcggcttcgtcggcgcacgcaatttcgatgaaacgattttccgcaccaacctcgaagcctgccacaccatcgcccgcgaattgaggctgcgcaacctcggcggcatcatcatcatcgacttcatcgatatggcgcaggaaagccaccgcgaagccgtgttgcaggagcttgccaaagccctcgccttcgaccgtacccgcgttaccctgcacggttttaccagcctgggactggtcgagctgacgcgcaaacgctcgcgcgaaaacttaaaccaagtcctctgcgaaccctgcccttcctgccaaggcagaggccgtctgaaaacgccgcaaaccgtatgctacgaaatccagcgcgaaatcgtccgcgaagcgcgccgttacgatgccgaaagtttccgcatcctcgccgcccccaacgtcatcgatttgtttttggacgaagaatcgcaatccttggcaatgctgatagatttcatcggcaaaccgatttctctggcagtcgaaaccgcttacacgcaggaacaatacgacatcgttttgatgtaa

SEQ ID NO: 59511 - DNA, 678 bp, Neisseria meningitidis; identical to SEQ ID NO: 42526

SEQ ID NO: 59512 - DNA, 1071 bp, Neisseria meningitidis
gtgtcagccccggaaaccgaaaactgtatttgtctgactgttccgctcgagcttgccggcgggcggttggatgcggtgttggcgaaacttctgcccgactactcgcgcagccgcctgacatcatggattaaagaaggcgcggttattgtaaacgataaaccttcgcaacccaaagacaaaatgataggcggcgagcaaatttgtgtaaccgtccgtccgagtgaggaaaatctggcgtttgttccagagcctatggctttggatatcgtttacgaagacgataccgtcatcgtcgtcaacaaaccggccggactggtggtgcatccggcggcgggcaactggacggggacgctgctcaacggcctgttggcgcattgccccgagctgtcccaaattccgcgcgcgggcatcgtacaccgtttggacaaagaaaccagcgggctgatggtggttgccaaaaccctgtcggcgcaaaattccctcgtgaggcagcttcaagagcgcacggtcaaacgcatctaccgcgccgtcgccaacggcatcgtccccttcgacggtaaaatcgaaacccaaatcggacgcgatccgcacaaccgcctgaaaatggcagtcgtcaaattcggcggcaaaccagccgttacccacgtcaaagtgttggaacgctatcttacccacagctatatcgaatgctcgctcgaaacgggcaggacgcaccaaatccgcgtacatatgcgcgaagccaaccatccgcttgccggcgacccggtttacggcaacccgcgccatccgtgcggcgacacggtgaaagaagccgttaaaagtttgggtgcgcgtcaggcattgcacgcctaccgcttgagttttacccatccggaaagcggcgaaaccgtttcgtttgaggcaccgattccggacgacatatatcatttgttgtccgtcctccgtcttgaagccggtttggattcgtctttgagcaatgaagaagaatggcaggacaaattcggcgcggacgacgacgatgattggaacgaagacgactatgatgtcgaagtggtttatgtaagggagtga

SEQ ID NO: 59513 - DNA, 462 bp, Neisseria meningitidis; identical to SEQ ID NO: 58670

SEQ ID NO: 59514 - DNA, 1485 bp, Neisseria meningitidis
atgtcgaaacctgtttttaagaaaatcgcactttatactttgggtgcaatcagcggcgtggccgtcagtctggcggtgcagggttttgccgccgagaaggacaggcgggataacgaagtcctgccggtgcaatccatccgcacaatggcggaggtttacggtcaaatcaaggcaaactactatcaggacaaacccgatgccgatttgtttgaaggtgcgatgaagggtatggtggccggtttggatccgcattccgaatatatggataaaaaaggttatgccgagataaaggagtccaccagcggcgaatttggcggcttggggatggaaatcgggcaggaagacggttttgtcaaagtggtttcgccgattgaggacacgcctgcggaacgggcgggggtgaaaagcggcgatttcattgtgaaaatcgataatgtttcgacgcgggggatgacagtcagcgaagcggtgaagaaaatgcggggcaagccgggtacgaagattactttgacgctgtcgcgcaaaaatgccgacaagccgatagtcgtcaacctgacccgtgccattattaaagtgaaaagcgtccgccatcacctgatcgaacccgattacggctatatccgcgtgtcgcagttccaagagcggacggtcgaaagcgtcaataccgccgcaaaagagctgctaaaggaaaataaaggaaaaccgctcaaggggctggtgttggatttgcgcgacgaccccggcgggcttttgaacggcgcggtcggcgtgtcggcggcgtttttgccgcctgatgcgctcgttgtcagtacgaaagggcgggaaggtacggaaggctttgcgttaaaggcgcgtcccgaagattatatttttaaagccggcacggatcctttggcgggtattcctgccgagttgaaaaccataccgatgacggtattggtcaattccggttcggcttccgcgtcggagattgtcgcaggtgcattgcaggatcataaacgcgcggttatcgtcggtacgcagagcttcggcaaaggttcggttcagactttgattcctttgtccaacggcagcgcggtcaagctgacaacggcgctgtattatacgccgaacgaccgttctattcaggcgcaggggattgttcccgatgtcgaagtaaaagataaggaacgcatttttgaaagccgcgaggcggatttggtcggacacatcggcaatcctttgggcggcgaggatgtgaacagtgaaacccttgccgtgccgcttgaaaaagatgcggataagcccgctgtaaaagaaaaaggtaaaaagaaaaaggacgaggatttgtcttcaaggcggattcccaaccctgccaaagacgaccagttgcggaaagctttggatttagtcaagtcgcccgagcagtggcagaagtctttggggctggcggcgaaaaagccggtttcaaataaagataagaaagataaaaaagataagaagtag

SEQ ID NO: 59515 - DNA, 1296 bp, Neisseria meningitidis; identical to SEQ ID NO: 50261

SEQ ID NO: 59516 - DNA, 2121 bp, Neisseria meningitidis
atgttcaataaacacgttaagaccttccaatacggcaaccacaccgttactttggaaaccggcgaaatcgcccgccaagccgccgctgccgttaaagtatctatgggcgacaccgtcgttttggttgccgttaccaccaataaagaagtgaaagaaggtcaagacttcttccccctgaccgtcgattacctcgagcgtacttacgccgcaggcaaaatccccggcggcttcttcaaacgcgaaggcaaacaaagcgaaaaagaaatcctgaccagccgtctgatcgaccgtccgattcgtcctttattccctgaaggtttctaccacgacatccaaatcgtagcgatggtggtgtctgtcgatccggaaatcgattccgacattcctgcaatgttgggcgcatctgccgcgctggtgttgagcggcgtaccgtttgccggtccgattggtgcggcacgcgtgggttatgtaaacggcgtgtacgttttgaacccgactaaagccgaattggctaaatcgcaattggacttggtggtcgccggtacgtccaaagccgtgttgatggtggaatccgaagccaaaatcctgcccgaagacgtgatgttgggcgcggtggtttacggccacgatcaaatgcaggcggcgattaacgccatcaatgaatttgccgacgaagtcaatccggaagtttgggattggaaagcacctgaaaccaatgaagaattagttgccaaagtccgcgggattgccggcgaaaccattaaagaagcgttcaaaatccgtcaaaaacaagcgcgttccgccaaattggacgaggcttggaatgcggtaaaagaagccttgattaccgaagaaaccgacactttggtcgccaacgaaatcaaaggcattttcaaacacttggaagccgatgttgtccgcagccaaattttggacggccaaccgcgcatcgacggccgcgacacacgcaccgtccgcccgctgaacatccaaaccggcgtattgccgcgcactcatggttctgccttgtttacccgtggcgaaacccaagctttggcggttgcaactttgggtacttcgcgcgacgagcaaatcattgacgcgctgtccggcgaatacaccgaccgcttcatgctgcactacaactttccgccgtactctaccggagaagtgggtcgcgtaggtgcgccgaaacgccgtgaaatcggtcacggccgtttggctaaacgtgcattgttggccgtattgccgaaacctgaagatttcagctacaccatgcgcgtggtctccgaaattaccgaatccaacggttcttcctctatggcttccgtctgcggcggctgcttgagcctgctgtctgccggcgtgcctttgaaagcacacgttgccggtatcgcgatgggtctgattctagaaggcaacaaatttgccgtcctgaccgacattttgggcgacgaagaccacttgggcgatatggactttaaggtggccggtacgaccgaaggcgttaccgcgctgcaaatggacatcaaaatccaaggcattaccaaagaaattatgcaaatcgctttggcacaggccaaagaagcgcgtctgcacatcttggatcagatgaaagccgccgttgcgggcccgcaagagttgtccgcacacgcgccgcgtttgtttacgatgaaaatcaaccaagacaaaatccgcgaagttatcggtaaaggtggcgaaaccatccgttcgattaccgctgaaaccggtacggaaatcaatattgccgaagacggtacgattaccattgccgcgaccactcaagaagccggcgatgcggcgaaaaaacgcatcgagcagattactgccgaagtggaagtgggcaaagtgtatgaaggcactgtggtgaaaatcctcgacaacaacgtcggcgcgattgtcagcgtgatgccgggcaaagacggtttggtacacatcagccaaatcgcccacgagcgcgtacgcaatgtcggcgactacctgcaagtcggtcaggtggtgaacgtgaaagcattggaagtggacgacagaggccgtgtccgtctgtccatcaaagccctgctggacgcgcctgcccgtgaggaaaatgccgccgagtaa

SEQ ID NO: 59517 - DNA, 2277 bp, Neisseria meningitidis
atgacaacattacatttctcaggcttcccgcgtgtcggcgccttccgcgaattgaaattcgcccaagaaaaatactggcgcaaagaaatcagcgagcaagaattgctggctgttgctaaagacttgcgcgagaaaaactggaaacaccaagctgctgccaacgccgattacgttgccgcaggcgatttcactttctacgaccacatcctcgacctgcaagtcgccaccggcgcgattcccgcccgcttcggcttcgacagccaaaacctgtctttggaacaattcttccaactggcgcgcggtaacaaagaccaattcgctatcgaaatgaccaaatggttcgacaccaactaccactacttggtgcctgaattccacgccaatactgaattcaaagccaacgccaaacactacgtccaacaactgcaagaagcccaagctttgggcttgaaagccaaaccgaccgttgtgggtccgttgactttcctgtgggttggtaaagaaaaaggcgccgttgaattcgaccgtctgagcctgttacctaaactgttgcctgtttacgttgaaatcctgactgctttggttgaagccggtgccgagtggattcaaatcgacgagcctgctttgactgtcgatctgcctaaagaatgggtagaagcctacaaagacgtttacgctactttgagcaaagtaagtgccaaaatcctgctgagcacttacttcggttctgttgccgaacacgccgcattgttgaaatccctgcctgttgacggcctgcacatcgacttggtacgcgctcccgagcaactggacgcatttgccgactacgacaaagttctgtctgcaggcatcatcgacggccgcaacatctggcgcgccaacctgaacaaagttttggaaactgttgagcctctgcaagccaaactgggcgaccgtttgtggatttccagctcttgctctctgctgcacactccatttgacttgtcagttgaagaaaaactgaaagccaacaaaccggacctgtactcttggttggcatttaccctgcaaaaaacccaagaattgcgcgttctgaaagccgcattgaacgaaggtcgcgattccgttgccgaagaactggccgccagccaagctgctgccgattcacgcgccaacagcagcgaaatccaccgtgcagacgttgccaaacgcctggccgatttgcctgccaacgcagaccaacgcaaatctccatttgccgaccgtatcaaagcgcaacaagcatggttgaacctgcctctgctgtcgacgaccaacatcggttctttcccgcaaactaccgaaatccgccaagcacgcgcagccttcaaaaaaggcgaactgtctgccgccgattacgaagccgcgatgaaaaaagaaatcgccttggtggttgaagaacaagaaaaactggatttggacgtactggtacacggcgaagccgagcgtaacgacatggtcgaatacttcggcgaattgttgagcggttttgcattcacccaatacggctgggtacaaagctacggctcacgttgtgttaaaccaccgattatcttcggtgacgtaagccgtcctgaagccatgactgtcgcctggtctacttacgcacaaagcctgaccaaacgcccgatgaaaggtatgttgaccggccctgtaaccattctgcaatggtcttttgtccgcaacgatattcctcgctctaccgtgtgcaaacaaatcgcactggctctgaacgacgaagtattggatctggaaaaagcaggcatcaaagtcatccaaattgacgaacctgccatccgcgaaggcttgccgctgaaacgcgccgattgggatgcctacctgaactgggcgggcgaatccttccgcctgtcctctgccggttgcgaagacagcacacaaatccacactcatatgtgctactccgagttcaacgatatcctgcctgcgattgctgcaatggatgcggacgtgatcaccatcgagacttcacgttccgacatggaactcttgaccgcgttcggcgaattcaaatacccgaacgacatcggcccgggggtttacgacatccacagcccgcgcgtaccgacagaagccgaagtggagcacctgttgcgcaaagccatcgaggttgtaccggttgaacgtctgtgggttaacccggactgcggcctgaaaacacgcggctggaaagaaactctggaacaactccaagtgatgatgaacgtaacccacaaattgcgtgccgaattggcgaaataa

SEQ ID NO: 59518 - DNA, 1170 bp, Neisseria meningitidis
atgacagcacataaaatcctgcccgtcctgctttccatcatcttaggcgtttctcacgcaacggccgcatcgcccgcgcccaacaaaccggcggtacacgccgcccccacgttccaaacacccgaaaccctcacagcggcacacatcgttatcgaccttcaaagcagacagactttatccgccaaaaacatcaatacccctgtcgaaccggcggcactaacccaactgatgaccgcatatttggttttcaaaaacatgaaatcgggaaatatccaatctgaagaaaacttaaaaatacccgaatccgcatgggcttcagaaggaagcagaatgtttgtacgtcccggcgatacggtcagcaccgacaaactcttaaaaggcatgattgcactatccgcaaacgatgccgccctaacccttgccggccggctgggcaacggctcgattgaaaattttgtgcaacaaatgaacaaagaagcccgacgcttgggcatgaagaacactgtattcaaaaacccgacaggcttgagtagagaaggacaggtttccaccgccaaagacctcgcccagctgtctgaagcattgatgcgcgactttccggaatattacccgctgttttccatcaaatctttcaaattcaaaaatatagagcaaaacaaccgcaatatccttttatatagggacaacaatgtaaacggtctgaaagccggacacacagaaagcggcggctacaaccttgccgtgtcatactccggcaacggcaggcacatccttgtcatcacattgggttcggaatcggcggaaacacgcgcatcagacaacagcaagctgctgaactgggcattgcaggccttcgatacgcccaaaatatatccgaaaggcaaaaccgttgcccaaatccaaatttccggaggcagcaaaaaaaccgtccgcgcaggcttcctcaaagaagcctacatcactctgccacataaggaagcgaaaatggcagaacaaattctagaaaccatacagccgattcccgccccggtaaaaaagggacagattttaggaaaaatcaaaatcaggcaaaacggatacaccattaccgaaaaagaaattgtcgcactggaaaatgtagaaaaaagaagccggtggcaaaggctttggatgcgtctgacgggacagtaa

SEQ ID NO: 59519 - DNA, 762 bp, Neisseria meningitidis
atggatgcgaataaagagccgaattgggaaaaacgtttggaaaacctgcgtcagacgcgccgtatgaaggcagtgccgacttacgcgccgctgtcccgcccctctgaaaccggaacggacgcgcctgtgccgaaactggacgatgagagccgagcccgtgtgttgaaggcgtatctgaaaaaatggcaggaggaacacaatgccgccgttgccgattgcggcgaggaagtcgaaaccgacccgatgatcgtccttcaggaaaactggctcaacgcgcaggcttccctgcaaatgtcggtttcggaaaaacacatcgaatcgcggcggagaatccggtttgataccaaaaaagacagtgtcgaatttgaaaccggacagattgaaagcggggaaaacgccgacgaggcagaatccggcacgaatgagccggcggtttcggaaaacggggaaaacgatgcggaagaaacgttgatgcccgtccaactcaatatcctgaacccgaaagccgtcaaccggcgcgaagtgttctgcctgtccgaacaggagctgaccgaacggctgatcaaacgcctgcgcccgcatctgaccgataccgtcaacggtatcatccgtacggcggtgcaaaagcagatggcggtttttacctatcagctccagcagatgctgcacgagcaggcgggtgcggtagtcgaagacgtgttggaacacgatgtccgcaaaatcctcaacgacatcaagtacgagttaaaatacaaacgctga

SEQ ID NO: 59520 - DNA, 1005 bp, Neisseria meningitidis
atgagcattaaagtagcgattaacggtttcggccgcatcggccgcctcgcattgcgtcaaattgaaaaagcccacgacatcgaagtcgtcgccgtcaacgacctgacccctgccgaaatgctgctgcaccttttcaaatacgacagcacacaaggccgtttccaaggtactgccgaattaaaagacgatgccatcgtggtaaacggcaaagagatcaaagttttcgccaatccgaatcccgaagaattgccttggggcgagttgggtgtggatgtcgtcctcgaatgtaccggcttctttaccaataaaaccaaagccgaagcacacatcagggccggcgcgcgcaaagtcgtgatttccgcacccggcggcaatgatgtgaaaaccgtcgtatatggcgtaaaccaagacattttggacggcagcgaaaccgttatctccgccgcttcctgcaccaccaactgccttgccccgatggcggcagtcctgcaaaaagagttcggcgtagtcgaaggtctgatgaccaccatccacgcctacaccggcgaccaaaacacccttgacgcgccgcaccgcaaaggcgatttgcgccgcgcccgagccgccgcgctcaacatcgtgcccaacagcaccggtgccgccaaggccatcggtctggttatccccgaattgaacggcaaactcgacggctccgcccaacgcgtccctgttgccaccggctcgctgaccgaattggtttccatcctcgaacgccctgtaaccaaagaagaaatcaacgccgcgatgaaagcagccgccagcgaatcttacggctacaacgaagatcaaatcgtttcttccgacgttgtcggcatcgaatacggttcgctcttcgatgcgacccaaacccgcgtgatgaccgtgggcggcaaacaattggtgaaaaccgttgcctggtacgacaacgaaatgtcctacacctgccaactcgtccgcactttggaatacttcgcaggcaaaatctaa

SEQ ID NO: 59521 - DNA, 369 bp, Neisseria meningitidis
atgagtaccttcttccagcaaaccgcacaagccatgattgccaaacacatcgaccgcttcccactattgaagttggaccaggtgattgattggcagccgatcgaacagtacctgaatcgtcaaagaacccgttaccttagagaccaccgcggccgtcccgcctatcccctgttgtccatgttcaaagccgtcctgctcggacaatggcacagcctctccgatcccgaactcgaacacagcctcatcacccgcatcgatttcaacctgttttgccgctttgacgaactgagcatccccgattacagcaccttatgccgctaccgcaaccggcggcgcaagacgacaccctgtccgaattgctcaaactga

SEQ ID NO: 59522 - DNA, 1380 bp, Neisseria meningitidis
atggcaaaaacgcttaaaaccctttaccaatgcaccgaatgcggcggcacttcgccgaaatggcagggcaaatgcccgcattgcggcgagtggaacacgcttcaggaaagccttgccgcgcccgagccgaaaaacgcccgtttccaatcttgggcggcggatacctcgaccgtccaatccctctccgccgttactgcgaccgaagtgccgcgcaatccgaccggtatgggcgaactcgaccgcgtattgggcggcggtttggtcgacggtgcggtcatcctgctcggcggcgatcccggcatcggcaaatccacgctgctgttgcaaaccatcgccaaaatggcgcaaagccgcaaagtgctgtacgtttccggcgaggaatccgcccaacaggtcgccctgcgtgcgcaacgtttggaactgcccacagaaggtgtgaacctgcttgccgaaatccgtatggaggcgattcagacggcgttgaaacagcatcagcccgaagttgtcgtcatcgactctatccaaaccatgtattccgaccaaatcacgtccgcccctggctccgtgtcgcaggtgcgcgagtgtgccgcccaactgacgcgcatggcgaaacagatgggcatcgccatgatactggtcggacacgtgaccaaagacggcgcgattgccggcccgcgcgtgctggagcatatggttgataccgtgctgtatttcgagggcgaccaacattccaactaccgcatgatacgcgccatcaaaaaccgcttcggcgcggcaaacgaactgggcgtgttcgcgatgacggaaaacggtttgaaaggtgtgtccaacccgtccgccatcttccttgccagctaccgcgacgacacgcccggttcgtgcgttttggttacgcaggaaggcagccgaccgcttttggttgaaattcaggcattggtcgatgacgcgcacggattcacccccaaacgactcaccgtcggtctcgaacaaaaccgcctcgccatgttgctcgccgtgttaaaccgccacggcggcatcgcctgcttcgatcaggatgtgtttttaaacgccgtcggcggtgtgaaaatcggcgaaccggcggcggatttggcggtcatcctcgcgatgctttccagcttccgcaaccgcccgctgcccgaaaaaatggttgcatttggagaaatcggtttgagcggtgaagtccgccccgtcgcacgcgggcaagagcggctcaaagaagcggaaaaactcggcttcaaacgcgccatcgttcccaaagccaatatgccgcgcaacgccaaagagtttccgaacctgaaaatctacggcgtttcgagtttgcaggaagccatcgatatttgccgtgacagcagggaataa

SEQ ID NO: 59523 - DNA, 1974 bp, Neisseria meningitidis
atgcaccccatcgaaacccccgataagaccttccacgacggcgacggcgtgtccgaattgggcaccatcctgcccgcgtggtggctcaaccaagtgcaatccgagctgctggccgtgctgactgcggccggtatccagccggataagtcgcagcctaatcaattactggcagcactaaataggctggctgtagttatcaccggcgaccaaaccgtcaacggccaaaaaacctttaccgcccaaacccaattccaaagcggcatccatttatccgccaaccagacgaactggaacggcggccacaaagcctacatcggcgcggatgccgacaacgcccacatcgtcttcggcgacaacaccctccgcctgcacggcgcaaacaaccgcatttcctacaacaaccacgacatcttccacaaagccaacaaaccgcgttttgccgaagacatcgaaggcaagccgaacacactgtccggatacggcatcggcaatttcaaagtcgaaaccttccggggcgatttgaacaccctcaaaacagacggcatctattccctgccgacagcgggcggcagctccaacctgcccgttgaaaacactgcctgccatatccaagtcatcgccggcacgcgacacggctggtgcaggcagttgggttatcccgcctacacgtccgacgtgtacgaacgccaccaaacgagcagcgcaaacgacaactggtccgcatggaaaaaactcaattcggacggcatccccgtcggcgcgatcgtatcctttcccaaagccgtccgaaaccccgcaggctatctcaaagccaacggcacgacctttgcgcaaaacaccttccccgacctctaccgcgccctgggcaacagcaaccgcctgcccgatttaagccgtaccgacatcggcatcaccgcgtggtttccgtccgaccaaatcccgaccggctggctggcgtttgacgacatccgcacgcgcgtaaccaaaaccgcttatcccgagctgtaccgcctgctgaccggaaaatacggcagcatccaaaacgtcccgcaggcggaagaccgctttatccgcaacgcgggcaacagcttggcagtcggaacgaagcaggaagacgaaatcaaacggcacgtccacaaagtattttcacactggacaaaccacacagacgcggcagccctcggttacgaagaccacaacgaaaggcagagaagcgcgctcgtatcgacttggacggacggcgatttaaacgacaacggctttttaaccccgcgcctggacagcaaaatggcgacaggcggcgacgaaaaccgccccaaagccctggttttaaaactgtgcatcaaagccgccgacaccttgggcgaagccgtgttttggataaagtcccacggcgaaaccatcaacgccggcgcgctggacgcgggcacgctggcgcaaaacctgcaagacaaagccgaccgcgcccacacccacaccgccgcccaaatccaagggctggacgaaaaaatcagcaccgccgttgccgcgcaattcacacgccaaaccatcggcggcgtggatattgtcagattccccgacggcacaatgatacagaccggcagctacaggttcacacgaagcggcggccccatagaaaacgaagtcgtcttccccgtctcctttgccgacggcaacgtcaaatgcttcgtatccgaacgccattcgggacgcgttaccggcgatcgaaggcaacacaactggctgtttatccgcgcaaaaaaccacgccgccgccattattaccaactggtacgaaggcagttgcgactggatggccatcggcaaagccgcctcgggaaacgccgccagctccccgataggccccgaaatacctgaaaccaacgaagaaccgcaaagagagagtggaagaacatcaaccggactccgaaaccgccgccgccgagacggcttgctcgaggcactgcaagactag

SEQ ID NO: 59524 - DNA, 888 bp, Neisseria meningitidis
atgcagaaatccaaattatcttggttcttgaaactgatgttggcactgtcgctggcgtttctgtatatcccgctggttgttttggtcatctattcgtttaacgaatccaagctggtaaccgtttggggcggcttttcgaccaagtggtacggcgcattgctggaaaacgacaccatcttggaagccgcttggctgtcgctgcggattgccgttgtgtcttcgcttgccgccgtcgttttgggcacgctggcaggctatgcgatggcgcggattaaacgttttcgcggcagtaccttgttcgctggcatgatttccgcacctatggtgatgcccgacgtgattaccggtctgtctatgctgctgctgattattcaggtacagatatttttgcagggcagcgaatggttacaacatctctacttcgatcgtggctttttcaccatcttcctcggacatacgacgctgtgtatggcgtacattaccgttgttatccgttcgcgtctggttgagcttgaccagtcgctcgaagaagccgcaatggatttgggcgcgcgcccgctgaaaatcttttttgtcatcactttgcctttgattgcccctgccatcgcttcaggctttctgctcggcattaccctgtctttggatgatttggtgattacctcattcctctccggccccggttcatccacattgccgcaggtgattttctccaaaatcaagttgggtctcgatcctcagatgaatgtcttggcgaccatcctaatcggcatcatcggaacattggtcatcatcgtcaattattggatgatgaggcaggcaaccaagcgcgaccgagaagcggcagaagcctaccgccaagaaaaattggctgctgagaaagcgcattga

SEQ ID NO: 59525 - DNA, 432 bp, Neisseria meningitidis
atgggcagcaacgcatggctgttttgggcattggcatcggcaggcttcgcctcattgaccgctattttcgccaaaatgggcttgcagggtatagattcagatttcgctaccttcatccgcaccttggtcatcctcgccgctttgttattgtttttaacctacaccggcaaatggcagggcgtgaacggctttacggggcacaactggacattccttatcctatccggccttgctaccggcgcatcttggcttgcctacttcaaagccctgcaactgggtaacgcctcgcaagtcgcccccgtcgacaaattcagcctggtcttggtcgcgctgatggcggtggttttcttggacgaacgcccgaacacgcaggaatggataggcttggggctggtaacggcgggcgtgttggtgctggcgttgaaacgttaa

SEQ ID NO: 59526 - DNA, 192 bp, Neisseria meningitidis
atgaacacgaatcaagatacgattccatttggcggcaaccttgtgatttgctgttcgacgggaaacggcggggacgggcagttttcttgtctgattaccgatcagataccggatttaaatcttgtcagaagcgggcaggcgttcccgatgttcatttatgagtacgaaactagagaaaaaaggaaagcctga

SEQ ID NO: 59527 - DNA, 1086 bp, Neisseria meningitidis; identical to SEQ ID NO: 38486

SEQ ID NO: 59528 - DNA, 657 bp, Neisseria meningitidis
gtgaacaaacggctgttttgcagccgcaacggcttgcgctattacctgttgggcggtttctgtttgagtgtttttccgcttttgctggtgtttacctcatccgtttgggcggtttatcggacgggcgggcaggttttgccgccgcatgtccgggcggatgccgcgctggtgttgggcgccgccgcgtgggacaaacgcccttccccggttttccgcgaacgcatcaaccacgccatcgcgctttatcagagccgcagggtaggcaaaatcatttttaccggcggcaggagtaaaaagggttatatgacggaggcggaagtcgggcggcggtacgcgctcaaacagggggttccggcgcgcaacatcctgtttgaaaacacttcgcgcaacacttatgaaaacctgaacaacatccgtccggttttgcgtgccaacggtattgccagcgtggtgattgtcagcgatccctaccatttggcgcgggcggcggaaatggcggaggatttgggtgtccgcgtttatatgtctgccaccccgaccacgcggtttgatgcgggaaataagaaaaaaatctttatgctgcaagagggatatgcgttgtccctctaccgtttggaaaaatggggcagccgctttttgggatggctgtctgattga

SEQ ID NO: 59529 - DNA, 1518 bp, Neisseria meningitidis
atggtgatttccaacccccgcgaacttgaaaaactcaaagaccggattcccaatctgatcaacatcatccgcgtcgccatcgtttttccgctgatgattatgcacatcctcgggctggaaaccggcagccgtgcgaacctgcacgcttcgtggacggcgtgggcgttttatgtttggctcgccattgcctgctggctgattttcttttccatcatccatccgcattggcaatggcaggctttgaagataccgagtttcagcgccgtgtccgacattaccatgattggcatactgacctacctgttcggcggcatcaactcggggttcggcatcctgatcctgcccttcgtgggcagctcctgcctgctcagttacgggcgttaccccctgctctatgccagctacgccgccatcctgctgatattgaatgcccttgcagacagcaatatcaatatgtatccgctgattttggatgcaaaaaccgtcaccaacaccttcgtcctcgtgaccggctcctatttcgtcgccatgattgcctcgctgtcggtcagatacatcgaccgtgccggcaaacttgcccatgaaaaccacgccgcctaccgccgcatcaggggcttgaaccaaatcgtgctcaaccgcgttcaggaagcggtcgtcatcatcaacgtcgagtatcagaccgtactgttcaataaaaaggcaaaagatctgctccccacgcttgaaatcggacagcataccgccctgttcgaccctattaccgttttatgggacaaggccccttcgcgtactttcgaacgcaatatcgacacgcccgccctgaccgcccgcatccgcgccgtgccgatgaacaaagagcagaacaagctgctcatcctctacatccgcccgcaaagcgaaattcaggcagaagccctgtccgtcaaacttgccgcgctcggacaactgaccgccaacatcgcccacgaaatccgcaaccccatgtccgccatccgccatgcaaacgacctgttgcgcgaaaatatggaagcgggggcggcagatccgttcaacgccaaattgtgcaaaatcatcgacggcaacgtctgccgtatcgacaaaatgctcgaagatatttcctcgctcaacaagcgcaacaaaaccgaacgcgaaaccatcggcctgataccgttttgggaagaattcaaacaagagttcctgctcggccatcccgatgccgccggctgcatccgcctagatatgcagggcaatcacctgactgcctatttcgatcctgcccacctgcggcaaattatgtggaacctcgccaacaacgcgtggcggcacagccgcaaacagcccggctcgatttccgtcaccatccgccccgcgcaaaaaaacaccgtctgtatcctctttgccgaccgcccgaagtgcaggaacacctgttcgaacccttttacaccacggcggcaaacggcaccggcctcgggctgtatgtcgcccgcgaactggcgcacgccaatttcggcgatttga

SEQ ID NO: 59530 - DNA, 780 bp, Neisseria meningitidis; identical to SEQ ID NO: 43687

SEQ ID NO: 59531 - DNA, 183 bp, Neisseria meningitidis; identical to SEQ ID NO: 39725

SEQ ID NO: 59532 - DNA, 774 bp, Neisseria meningitidis; identical to SEQ ID NO: 50303

SEQ ID NO: 59533 - DNA, 1953 bp, Neisseria meningitidis
atgcgctttgcagtcgctttgctcagtctgctgggtattgcatcggttatcggtacggtgttgcagcaaaaccagccgcagacggattatttggtcaaattcggacctttttgggcgcagatttttggttttctgggactgtatgacgtctatgcttcggcatggtttgtcgttatcatgatgtttttggtggtttctaccagtttgtgcctgattcgcaatgtgccgccgttctggcgcgaaatgaagtcttttcgggaaaaggttaaagaaaaatctctggcggcgatgcgccattcttcgctgttggatgtaaaaattgcgcccgaggttgccaaacgttatctggaggtgcagggttttcagggaaaaaccgtcagccgtgagggcgggtcggttctgattgccgccaaaaaaggcacgatgaacaaatggggctatatctttgcccatgttgctttgattgtcatttgcctgggcgggttgatagacagtaacctgctgttgaaactgggtatgctgaccggtcggattgttccggacaatcaggcggtttatgccaaggatttcaagcccgaaagtattttgagtgcgtccaatctctcatttaggggcaacgtcaatatttccgaggggcagagtgcggatgtggttttcctgaatgccgacaacgggatattggttcaggacttgccttttgaagtcaaactgaaaaaattccatatcgatttttacaatacgggtatgccgcgcgattttgccagtgatattgaagtaacggataaggcaaccggtgagaaactcgagcgcaccatccgcgtgaaccatcctttgaccttgcacggcatcacgatttatcaggcgagttttgccgacggcggttcggatttgacattcaaggcgtggaatttgggtgatgcttcgcgcgagcctgtcgtgttgaaggcaacatccatacaccagtttccgttggaaattggcaaacacaaatatcgtcttgagttcgatcagttcacttctatgaatgtggaggacatgagcgagggcgcggaacgggaaaaaagcctgaaatccacgctgaacgatgtccgcgccgttactcaggaaggtaaaaaatacaccaatatcggcccttccattgtttaccgtatccgtgatgcggcagggcaggcggtcgaatataaaaactatatgctgccggttttgcaggaacaggattatttttggattaccggcacgcgcagcggcttgcagcagcaataccgctggctgcgtatccccttggacaagcagttgaaagcggacacctttatggcattgcgtgagtttttgaaagatggggaagggcgcaaacgtctggttgccgacgcaaccaaaggcgcacctgccgaaatccgcgaacaattcatgctggctgcggaaaacacgctgaacatctttgcacaaaaaggctatttgggattggacgaatttattacgtccaatatcccgaaagagcagcaggataagatgcagggttatttctacgaaatgctttacggcgtgatgaacgctgctttggatgaaaccatacgccggtacggcttgcccgaatggcagcaggatgaagcgcggaatcgtttcctgctgcacagtatggatgcgtacacgggtttgaccgaatatcccgcgcctatgctgctgcaacttgatgggttttccgaggtgcgttcgtcgggtttgcagatgacccgttccccgggtgcgcttttggtctatctcggctcggtgctgttggtattgggtacggtattgatgttttatgtgcgcgaaaaacgggcgtgggtattgttttcagacggcaaaatccgttttgccatgtcttcggcccgcagcgaacgggatttgcagaaggaatttccaaaacacgtcgagagtctgcaacggctcggcaaggacttgaatcatgactga

SEQ ID NO: 59534 - DNA, 285 bp, Neisseria meningitidis; identical to SEQ ID NO: 42876

SEQ ID NO: 59535 - DNA, 1869 bp, Neisseria meningitidis
atgcaagctgtccgatacaggcctgaaattgacggattgcgggccgttgccgtgctatccgtcattattttccacctgaataaccgctggctgcccggagggtttttgggggtggacattttctttgtcatctcgggattcctcattaccggcatcattctttctgaaatacagaacggttctttttctttccgggatttttatacccgcaggattaagcggatttaccctgcctttattgcggccgtgtcgctggcttcggtgattgcctctcaaatcttcctttacgaagatttcaaccaaatgcggaaaaccgtggagctttctgcggttttcttgtccaatatttatctggggtttcagcaggggtatttcgatttgagtgccgacgagaaccccgtactgcatatctggtctttggcagtagaggaacagtattacctcctgtatcctcttttgctgatattttgctgcaaaaaaacaaaatcgctacgggtgctgcgtaacatcagcatcatcctatttctgattttgactgccacatcgtttttgccaagcgggttttataccgatattctcaaccaacccaatacttattacctttcgacactgaggtttcccgagctgttggcaggttcgctgctggcggtttacgggcaaacgcaaaacggcagacggcaaacagcaaatggaaaacggcagttgctttcatcactctgcttcggcgcattgcttgcctgcctgttcgtgattgacaaacacaatccgtttatcccgggaatgaccctgctccttccctgcctgctgacggcactgcttatccggagtatgcaatacgggacacttccgacccgcatcctgtcggcaagccccatcgtatttgtcggcaaaatctcttattccctatacctgtaccattggatttttattgctttcgcccattacattacaggcgacaaacagctcggactgcctgccgtatcggcggttgccgcgttgacggccggattttccctgttgagttattatttgattgaacagccgcttagaaaacggaagatgaccttcaaaaaggcatttttctgcctctatctcgccccgtccctgatacttgtcggttacaacctgtacgcaagggggatattgaaacaggaacacctccgcccgttgcccggcgcgccccttgctgcggaaaatcattttccggaaaccgtcctgaccctcggcgactcgcacgccggacacctgcgggggtttctggattatgtcggcagccgggaagggtggaaagccaaaatcctgtccctcgattcggagtgtttggtttgggtagatgagaagctggcagacaacccgttatgtcgaaaataccgggatgaagttgaaaaagccgaagccgttttcattgcccaattctatgatttgaggatgggcggccagcccgtgccgagatttgaagcgcaatccttcctaatacccgggttcccagcccgattcagggaaaccgtcaaaaggatagccgccgtcaaacccgtctatgtttttgcaaacaacacatcaatcagccgttcgcccctgagggaggaaaaattgaaaagatttgccgcaaaccaatatctccgccccattcaggctatgggcgacatcggcaagagcaatcaggcggtctttgatttggttaaagatatccccaatgtgcattgggtggacgcacagaaatacctgcctaaaaacacggtcgaaatacacggctgctatctttacggcgaccaagaccacctgacctatttcggttcttattatatggggcgggaatttcacaaacacgaacgcctgcttaaatcttctcgcgacggcgcattgcagtag

SEQ ID NO: 59536 - DNA, 1128 bp, Neisseria meningitidis
atgagcaactggaaacccgatattccctataacgatttaccacccctgccgccaaaacaggatattgaaagcaaaaccatcctgaaacgttgtatagccgcccgtgcatcccttgcccgtttaaagcaggcggcagaactgataccgaatcaagccatgctgattaacacccttcctgttatggaagcccgtgcaagttcagaaattgaaaacatcgtaaccacaacggataagctgtttcaatccctgcaaatggatacggaacggcaagaccctgccacgaaagaagccctgcaataccgcaccgccctgtttgcaggctatgaatcactgacgagccgccctttatgcacacaaaccgccatcatggtctgcaacgccatcaagcacccctacgaaatggccatccgcaaaacaggcggcacagccctaaaaggaggcaacagcggaaatgttgtctataccccgcccgaaggagaagaaaccatacgcggcaagctggcaaattgggagcggtttattcacgaaagcggcgatttagacccgcttatcatcatggcggcggcacattaccaatttgaagccatccacccgtttacggacggcaacgggcggacggggcgcatattgaacagcctgctattgattgataaagggcttttggatttgcctattttgtatttgagccgctatattatcgaaaacagggcggactattaccgcctgcttttaggcgtaaccgaacggcaggactgggaaagctggataatctacatcttagacggcgtagccgataccgccgattggacggtagcgaaaatagatgcgatacgccgcctgtttgagcagacacggcaacacatacggacacacgcacaaggaatctacacgcacgaactggtaaatcttctgtttgaacagccatatacacgcattgccaacctagaagcggcagggatagccaaacggcagacggcttctaagtatctgaaagagctctcagacataggtgtgctgcaagaaatcgccatcggcagggacaaactattcattcatccgcgcctaatggaactattgcggggagagggcaacagctttacctcattccaatccctcgttaaagcatag

SEQ ID NO: 59537 - DNA, 324 bp, Neisseria meningitidis; identical to SEQ ID NO: 38492

SEQ ID NO: 59538 - DNA, 1395 bp, Neisseria meningitidis
atgaccgtcaaaacccgtttcgcccccagcccaaccggctacctgcacatcggcggcgtacgcaccgccctgttttcttgggcgtttgcccgccatcataaaggcgaattcttattgcgcatcgaagacaccgacttggcgcgctctactgccgaatccgtcaacatcatcctcgacggcatgaaatgggtcggactcgattacgacaacgccggcaacgtcgtgtaccaaacccgccgtttcgaccgctataaagaagtcatcgccgaacttttagaaaaaggcgatgcctactactgctattgcagcaaagaagagttggaagccatgcgcgagaaagccgaaaaagaaggcacggcgacttacgaccgccgctggcggccggaagcaggcaaaaccctgcccgaaatccctgccggcgtgcaacccgtcgtccgcttcaaaacgcctttggatggcgtaaccaagtggacggacttggtcaaaggcgaaatctccatccccaacgaagcactcgacgacctgattatcgcccgcgccgacggcacgccgacctacaacttctgcgttgtcgtagacgactacgacatgggcgttacccacgttatccgcggcgacgaccatgtgaacaacacgccgaaacaaatcaacatcttaaaagccatcgacgcgaacctgcccgaatacggccacctgccgatgattcttaacgaacaaggcaaaaaaatctccaaacgcagcggcgataccgttgccattaccgatttcggcgcgatgggcatcctgcccgaagccatgctcaactatctggcacgtttgggctgggcgcacggcgacgatgagttcttcacgatggaacaatttatcgaatggtttgatttgaaagacgtttctccatctccaagccgcatggatttgaagaaactctactggattaacggcgaacacatcaaaatcacgcccaacggcaaactcgccgaactcgtcaaaccgcgccttgccctgcgcgatattcatgaaaccgaaaaacctgctttggaagacgtgttggcattggtcaaagaccgcgcccaagatttgaacgccttggcagacgaatgtctgtatttctacaaaaaacaagtccctgccgaagccgatgttgccaaacactgggatgacgaagcggcggcacgcatgctgcgcttcgccgaacgcctcgaagggctggaagactggaataccgaagccatccacgacctcttcaaacccttctgcgacgaagaaggcattaaaatgggcaaactcggcatgcccctgcgccttgccgtctgcggtacggcgaaaacccccagcgtcgatgctgtgttggcattaatcggcaaagaagaagtgttgaaacgcatccgcgcttaa

SEQ ID NO: 59539 - DNA, 747 bp, Neisseria meningitidis; identical to SEQ ID NO: 51012

SEQ ID NO: 59540 - DNA, 2790 bp, Neisseria meningitidis
atgaccgattacagtaaaaccgtaaacctgctcgagagcccgtttccgatgcgcggcaatcttgccaagcgcgagcctgcatggctgaaaagctggtacgagcaaaaacgctaccaaaaactgcgcgaaatcgccaaaggccgtccgaaattcatcctacacgacggccctccgtatgccaacggcgacatccacatcggtcatgccgtcaataaaatcctcaaagacatcattatccgcagcaaaactcaagccggttttgacgcgccttatgtgccgggttgggactgtcacggtttgcctatcgaagtaatggtggaaaaactgcacggcaaagatatgcccaaagcgcgtttccgcgaattatgccgcgaatacgccgccgaacaagttgcccgccagaaaaaagactttatccgcttgggcgtgttgggcgattgggaccgtccttacctgactatggattttaaaaccgaagccgataccgtgcgtatgcttggtgaaatctacaaatccggctatctctaccgcggcgcaaaaccggttcagttctgcttggactgcggttcttcgctggcggaagcggaagtggaatacaaagacaaagtatcgcctgcgattgacgtgggctatccgtttaaagacactgccgcgcttgccgccgcattcggtttggcaggcatcgagggcaaagcgtttgccgtcatttggacgactacgccttggacgctgccggcgagccaagccgtatcggcgggcgcggacgtggtttaccaactgattgatacgcccaaaggcaaattggtgctggcgaaagatttggcggaagacactttgaaacgctacggcttttcagacggcattgctattctcgccgaaaccaccggcgacaagctggaaaatctgcacatgaaccatccgttcctcgaacgcgatattcccatgctcaacggcgaacacgttaccaccgatgccggtaccggcttggtacacaccgcccccgcgcacggtttggaagactacgccgtctgcaataaatacggcatcgagctttacaaccccgtcaacgccgaaggccgatacatcggcgaaacgccgcgtgtcgccggtatgcgcgtttgggaggcgaaccccgtcatcctgcaatggttggaagaaaccggcaaccttttggcaagcagtaaaatcgaacacagctacgcccactgctggcggcacaaaacgccgctgatttaccgcgcgacaggtcaatggtttgtcggtatggacaaagccggtgccgacggcaaaaccctgcgcgacaaagccatcaaggccgtggacgacaccgaattcttcccgtcttggggtcgcgcgcgtttggaagccatgattgaaggtcgtcctgactgggtggtttcacgccaacgctattggggcacgccgatgactttctttgttcacaaagaaacgggcgagctgcatccgaactctgccgaacttttggaaaaagttgccctgaaaatcgaagaaaaaggcatcgaagcgtggttctccctcgataagagcgaactcttgagcgcggaagattgcgaaaattacgataaactttctgacacaatggacgtatggttcgactccggctcgacccattattccgttgtgaaacaacgcgaagaattggaatggccggctgatttgtatctcgaaggcagcgaccaacaccgcggctggtttcaatcgtccatgctgaccggctgcgcctcatcaatgggtcgcgcgccgtataaacagctgctgacccatggtttcgttgtcgacggcgaaggcaaaaaaatgtcgaaatccatcggcaacgtcgttgcaccgcaagaggtttataacgaattcggcgcagacatcctgcgcctgtgggcggcatctaccgattacagcggcgaattggcgatttccaaagaaatcctcaaacgcgtaaccgaaagctaccgccgtatccgcaataccttgagctttttgtttgccaacttgagcgactttaatccgattgaagatgccgtgcaacaggcggatatggtggaaatcgaccgctacgccgtggtattggcacgtcagctgcaagagcgtctggcaggcgattactatccgcgttatgccttccactttgccgtaaaagacattgtttctttctgctcggaagacttgggtgcgttctacctcgacatcctgaaagaccgcctctacaccaccaaagcagacagccatgcacgccgcagcgcacaaactgccctgtatcacatcacacgcagtttggttctcttgattgcaccgattttgtgcttcaccggcgaagaagcgtgggacatcatcggcggcggcgaagaagacagcgtcctcttccatacttggcacgagttcccgaccatcaacgaaaaaaccgaagccgaactggtgaaaaaatggacggcaatccgcgaagcccgcgaagcggtaaccgccgccatcgagcctttgcgcgccgacaaaaccgtcggttcgtccttgcaagccgaagccgaaattaccgcgccggaagaaatggccggctatctgaatgctttgggcgaagaattgcgctttgctttgctggtgtctaaagcagaagtgaaagtaggcagcgaacttgccgttgccgctaaagccagtgatggtgaaaaatgcgaacgctgctggcactacacccgcgatgtgggcgcggttgcaggctatgaaaccgtctgcaaacgctgtgcagagaatgtcggcggagaaggcgaaacgcgccattacgcctga

SEQ ID NO: 59541 - DNA, 450 bp, Neisseria meningitidis; identical to SEQ ID NO: 42600

SEQ ID NO: 59542 - DNA, 939 bp, Neisseria meningitidis
gtgtccatccccaccgccacgccgctacccggtgaggtaacgttatcagacgatagcgtcaatatcgtaaacatcaacaccgccggcacaggaagcacatcctccggcatttctattcaacagcgaaaatataacgtaacaagttacggcttcacaagagaagaaaaagcattcatcttcaaaacacctggcggcgcgcaatacaccctttcatcctacgccgaccccatcgtccccagctactcctcccccgatttcaaaattcccgaccgccacgcagggcagcggcttgccgacggcagccgcatctttatctgctgcagcgactccggggcaaccaatcaagcggaaattaccaaacaagattatatgaaattcggggcgtggataggtcccaacggcgaaatcgacctcttcgccggcggcttccccgtcggcaaaacaccggcatcaagcagttattacagcagcacgctcgaaaccgccggcaagggcaaaatcacttatcaggtttggggcatccgcgtcaaagacgggcaatttgttacctcctcttatacgccgccgaaaaacagtagttcttatttgtacaaacctaccaacacccccgtcctttcctttatcaccgccaatttcaacagcaacaaactggcaggcgaaatcatcggcaacagcgattacgggccggatgtgaaaattgaaaacgcaacgattgacggactatccttttccggcaatgccacctccggcggcaaaaccggcaaattggacggcaagttttttggcaagttcgacagcacccgcagcagcgacaccggcataggcggcaaaatcacttttaaagacgaccgctccctcgataccgtattcggcggcgtgatttatgagaaaaaacttgatgacaaaaccagtcaagataccacccatctcacaaaataa

SEQ ID NO: 59543 - DNA, 1416 bp, Neisseria meningitidis
atgaacctgcatgcaaaggacaaaacccagcatcccgaaaacgtcgagctgctcagtgcgcaaaagccgattaccgactttaagggcctgctgaccaccattatttccgccgtcgtctgtttcggcatttaccacatcctgccttacagcccggatgccaataaaggtatcgcgctgctgattttcgttgccgcactttggtttaccgaagccgtccacattaccgtaaccgcactgatggtgccgattctcgccgtcgtactcggtttccccgacatggacatcaaaaaggcgatggctgatttttccaacccgattatctacatttttttcggcggcttcgcgcttgccaccgccctgcatatgcagcggctggaccgtaaaatcgccgtcagcctgctgcgcctgtcgcgcggcaatatgaaagtggcggttttgatgttgttcctcgttaccgcctttctgtccatgtggatcagcaacaccgccaccgccgcgatgatgctgcctctggcaatgggtatgctgagccacctcgaccaggaaaaagaacgcaaaacctacgtcttcgtcctgctcggcatcgcctattgcgccagcatcggcggcttgggcacgctcgtcggctcgccgcccaacctgattgccgccaaagccctaaatctggacttcgtcggctggatgaagctcggcctgccgatgatgctgttgattctgcccttgatgctgctctccctgtacgtcatcctcaaacctaatttgaacgaacgcgtggaaatcaaagccgaatccatcccttggacgctgcaccgcgtgatcgcgctgttgattttccttgccacagccgccgcgtggatattcagctccaaaatcaaaaccgccttcggcatttccaatcccgacaccgttatcgccctgagtgccgccgtcgccgtcgtcgtcttcggcgtggcgcaatggaaggaagtcgcccgcaataccgactggggcgtgttgatgctcttcggcggcggcatcagcctgagcacgctgttgaaaacatccggcgcgtccgaagccttgggacagcaggttgccgccaccttttccggcgcgcccgcatttttgatgatactcatcgtcgccgccttcatcatcttcctgaccgagttcaccagcaacaccgcctccgccgccctgcttgtgcccattttcgccagcatcgccgcgcaaatgggtctgccggaacaagtcttggtattcgtcatcggcatcggcgcatcttgtgccttcatgctgccggttgccacaccgcctaacgcgattgtgttcggcacgggcttaatcaagcaacgcgaaatgatgaatgtcggcatactgctgaacatcctctgcgtagtattggttgctctgtgggcttatgctgtactgatgtaa

SEQ ID NO: 59544 - DNA, 516 bp, Neisseria meningitidis
atgaaaatcaaacaaatcgtcaaaccgggcttggcagtattggcggcgggcgttctgtctgcctgcgcaaccaaaagcaacgtcaaagccgacggcacgaccgacaatccggttttcccgaaaccctattccgtaacgctcgacaacaatcgcggtacattcccgacctatgacgaattggacttgatgcgtcccggtctgaccaaagacgacatctacaaaatcctgggtcgcccgcattacgacgaaggtatgtacggcgtgcgcgaatgggattacctgtttcacttccacacccccggcgtaggtaccgaccctgaaaacacttccggcgtggaagatgttactacctgccaatacaaagtgattttcgataaagacaaatttgcccgcagcttctactggaaccccgtcttcccgaaagatgccgcctgtccgccgcccgcacccaaagccgagccgcaagtcatcatccgcgaaatcgtgcccgccaaacccaaacgcatccgccaataa

SEQ ID NO: 59545 - DNA, 924 bp, Neisseria meningitidis
atgaaaaaacgcaataatcctcttccgctgttgaacggtgtcaaacccagttatttggtgctgccgcatgaaaagcagttttacgggctgccgctgctgcattttctgtgcatccgctttccttttgtgggcgcggacgattggcgcaggcggttgaacagcggttttgtggtcggttcggatggtgcggcgttggacgaacattctttgttcgagccgggtaaggtgatgttttattaccgtgaaaccagccgtgagagcgagccgcgtattccgtttgaagaaaagattttgcatattgatgagcatttgattgtggtggacaagccgcattttctgcccgtcatccccagcgggcgttttttgagggaaacgctgctcacacgtctgcgcctgcgtcctgaattgcagcatttgaatgttgaggacattacgccgctgcaccgcttggacaaggatacggcaggcgtgatgctgctgtcgcataatcctgccacgcgcggggcttatcagacgatgtttcaaaacaaaacggtatggaaaacgtatgaggcacttgcgccgacaaggacggatttgccgtatccgctcgatgtggtttcgcgtttggtgaggggtgagaaattttttacgacgcaagaggcggaaggcgaaccaaacgcacatacgacggtcgaactgattgaaaacaggggggaattcagcctttaccgccttacgccgcataccggcaagaaacaccagttgcgcgtgcatatgatgggtttgggtatgccgctgttgaatgacgcgctctatcccgtgccgtctgaagcgggcagcgaggattatcggaaacctttgaagttattggcaaaaaagattgcgtttgcagatcctttgtcgggtcgggaaagggtgttttgcagtaggttttgcctataa

SEQ ID NO: 59546 - DNA, 336 bp, Neisseria meningitidis; identical to SEQ ID NO: 55220

SEQ ID NO: 59547 - DNA, 1260 bp, Neisseria meningitidis
atgaaacagaccgtcctcaaaaataacctgcaaaacctgcttgaaagcgcagaaaatatcctgttgcttcaaggtcctgtcggcaatttttttctgcgccttgccgactggctgactgcaaacggcaaaaccgtacataaattcaactttaatgcaggcgacgactatttttatccgcccactcaggctcataccgttgtttttaacgacgactacgatgcttttcctgaatttttgcaagaatacatcgttcaatatcacatccgggccgttgtctgctttggcgacacacgcccttatcacgtcattgcaaaacgcattgcaaacgaaaaccaagtcggtttctgggcgtttgaagaaggctatttccgcccctactacatcaccttagaaaaagacggcgtcaacgcattttccccgttgccgcgccgtgccgacttttttcttgaacaattccctaagcttgcccagcaagaatataaagcgccaacgccggtacgcgtcggatttacgcccatggcaaaaaacgccatccgttactatatcgagttgttccgcaatctacgcaaataccccgactacatccaccaccgcgcacccaatgccggccattacctcaaaccgtggtcgctctccatcctcaagcgtttgaactactatattgaagacatccaaatcgccaaacgtgtggaagcaggcaaatacggcaagttttttattgttcccttgcaggtattcaacgacagccaagtccgtatccattgcgactttcccagcgtccgcagcttcctgctccatgttttgagttcatttgccgagcacgcgcctgccgataccaacatcatcatcaagcatcatccgatggaccgcggttttatcgactactggcgcgacattaaacgctttatcaaagaacaccccgaactccaaggccgtgtgatttatgtccatgatgtccccctgcccgttttcctgcgccacggtctcggcatggttaccatcaacagcaccagcggcctgtccggactgattcacaatatgccagttaaggttctcggccgtgcctattatgatattcccggtattactgaccaaaataccttggcagaattttggaatcatccgacaccgcctgacaaagagctgttccatgcctaccgaatgtaccacctcaacgtgacccaaattaacggcaacttctacagtcaggtcttttttcctaacaaaaacacatccgactcttccacaccaacaacctaa

SEQ ID NO: 59548 - DNA, 2586 bp, Neisseria meningitidis; identical to SEQ ID NO: 43570

SEQ ID NO: 59549 - DNA, 708 bp, Neisseria meningitidis
ttggcgcacttttcacaggcacacgtctgcgtagtcggcgtgggcggtgtcggctcgtgggcggtcgaggctttggcgcggacgggcatcggacgtttgactttgattgatttggacaacgttgccgaatcgaatgtcaaccgccagctgcacgccctgaccggcgacttcggcaaagcaaaagttaccgccttgcgcgaacgcattacacaaatcaatccgcaatgcgaagtgtttgaaattgaagatttcgttaccgaagacaatttgccggaatacttcggaaaaggttttgatttcgtcatcgacgcgatcgaccaagtgcgcgtcaaagcagcaatggcggcttattttgtggaacgcaaacaaccgtttgtcctcagcggcggcgcgggcggacaaaaaaatccggcgttaatccaaaccgccgatttgagccgcgtaacccacgacccgctgcttgccaacctgcgctacaccttgcggaaacgctacggctttagccgcgatacgaaagccaaaatgcgcgtgccgtgcgtgttctcaaccgaaaacatcacgccgccgcaatcgggcgtggcgtgttctgccgatgccgcgccgcagggcttgtcgtgcgccggctatggcgcaagtatgctcgttaccgcttcgttcgggctatattgcgcacaggcggcggtggaacacatcgcagacaaaaaataa

SEQ ID NO: 59550 - DNA, 429 bp, Neisseria meningitidis; identical to SEQ ID NO: 54930

SEQ ID NO: 59551 - DNA, 2394 bp, Neisseria meningitidis; identical to SEQ ID NO: 51494

SEQ ID NO: 59552 - DNA, 3963 bp, Neisseria meningitidis
atgtctgtcgttttgcccttgcgcggcgttaccgccctttccgatttccgtgtcgaaaaactcttgcaaaaagccgccgcactcggtctgcccgaagtcaaattaagcagcgaattttggtatttcgtcggcagcgagaaaacactggatgccgcaactgtcgaaaaactgcaagccttactggcagcgcaaagcgttgaaaaaacgccaaaagcgcgcgagggcttgcatttgtttttggtcacgccccgtttgggtacgatttcgccgtgggcttccaaggcgaccaatatcgcggaaaactgcggtttggcaggcatcgagcgcatcgagcgcggcatggcggtgtggctggaaggtgcgcttaccgatgaacagaaacggcaatgggcggcgttgctgcacgaccgcatgaccgaatcggtgctgcccgattttcagacggcatccaaattattccaccatctcgaatccgaaaccttttccaccgttgatgttttaggcggcggtaaagaggctttggtcaaagccaataccgaaatgggtttggcactctccgccgacgaaatcgattatctggttgaaaactatcaggctttgcagcgcaatccgtccgatgttgaattgatgatgttcgcgcaggcaaacagcgaacactgccgccacaaaatcttcaacgccgatttcatcctcaacggcgaaaaacagccgaaatccctgttcggtatgatacgcgacacgcacaacgcgcatcccgaaggcacggtcgtcgcttataaagacaattcgtccgtaattgaaggcgcgaaaatcgagcgtttctatccgaatgcggcggaaaaccaaggttaccgtttccacgaagaagacacgcatatcatcatgaaagtggaaacgcacaaccacccgaccgccatcgcgccgtttgcgggcgcggcaacaggcgcgggcggcgaaatccgcgacgaaggcgcgacgggcaaaggttcgcgtccgaaagcaggcttgaccggctttaccgtctccaacctcaacatccccgacctcaaacagccgtgggaacaagactacggcaagccggaacacatttcctcgccgttggacattatgattgaaggccccatcggcggcgcggcgttcaacaacgaattcggccgccccaacctcttgggctacttccgcacttttgaagagaagtttgacggtcaggttcgcggctatcacaaaccgattatgattgccggcggcttgggcagcattcaggcgcagcagacgcataaagacgaaatccccgaaggcgcattgctgattcaactgggcggcccgggcatgcttatcggcttgggcggcggcgcggcttcttcgatggataccggcacgaacgacgcgtctttagacttcaattccgtacaacgcggcaaccccgaaatcgaacgccgcgcgcaggaagtcatcgaccgctgctggcagctcggcggcaaaaacccgattatctccatccacgacgtgggcgcgggcggtttgtccaacgccttccccgaactcgtcaacgatgccagacgcggcgcagtattcaagctgcgcgaagtgccgcttgaagaacacggcctcaacccgctgcaaatctggtgcaacgaatcgcaagagcgttatgtgttgtcgattttggaaaaagatttggatgctttccgcgccatctgcgaacgcgaacgctgcccgtttgccgtagtcggcacggcgactgacgacggtcatttgaaagtacgcgacgatttgttcgccaacaatcccgtcgatttgccgttgaacgtcttgctcggcaaactgcccaaaaccacgcgcaccgacaaaacggttgcaccgtccaaaaaaccgtttcacgcgggcgatatcgacattaccgaagccgcctaccgcgttttgcgcctgcctgccgtagccgccaaaaacttcctgattaccatcggcgaccgcagcgtcggcggtttgacgcaccgcgaccaaatggtcggcaaatatcaaactccagtagccgactgcgccgtgaccatgatgggcttcaacacctatcgcggtgaagcgatgtctatgggcgaaaaaccgaccgtcgccctgtttgatgcgcctgcttcgggcagaatgtgcgtcggcgaagccatcaccaacatcgcggcggtcaacatcggagacatcggcaacatcaaactctccgccaactggatggcggcgtgcggcaacgaaggcgaagacgaaaaactctaccgcactgtcgaagccgtttccaaagcctgtcaggcattggatttgagcatccccgtgggcaaagacagcctgtcgatgaaaaccgtttggcaggacggcgaggagaaaaaatccgtggtttcaccgttgagcctgattatctcagcgttcgcgcctgtgaaagacgtacgcaagactgttacgcctgagttgaaaaacgtcgaagacagcgtattgttgtttgtcgatttgggcttcggcaaagcgcgtatgggcggttcggcgttcggtcaggtttacaacaacatgagcggcgacgcgcccgatttggacgatacaggtcgtctgaaagccttttacagtgtgattcagcagcttgttgccgaaaacaaactcttggcgtatcacgaccgcagcgacggcggcttgtttgccgttttggtagaaatggcgtttgcggggcggtgcggcttggatatagatttaaatttattgcttgcacaaacatttattaccaaccataccgctctgtctcaatcattgcggactgaagaggtaaaagcgttggctgaatggcaagaaaccattgcccgcacattatttaatgaagagttgggtgctgttatccaagttagaaaacaagatgttgccgatattatcaatttattctatcaacaacagctgcatcataatgtctttgaaatcggtacgttaactgatgagaacacgttaatcatccgcgacgggcaaacgcaccttatttctgacaacctaatcaaactgcaacaaacctggcaagaaaccagccatcaaatccaacgcctgcgcgacaaccctgcctgcgccgacagcgagttcgcactgattggcgacaacgaacgcagcgcattgtttgccgacgtgaagttcgacgtgaacgaagacatcgccgcgccgtttatcaacagcggcgcgaaacccaaaatcgccatcctgcgcgaacagggcgtaaacgggcaaatcgaaatggccgccgcgttcacccgtgccggattcgatgcctacgacgtgcatatgtccgacctgatggcaggccgcttccgccttgccgacttcaaaatgctggcggcgtgcggcggcttcagctacggcgacgtactcggcgcgggcgaaggctgggcgaaatccatcctgttccaccctgctctgcgcgaccagtttgccgccttcttcgccgacccggacacgctgacattgggcgtgtgcaacggctgccaaatggtcagcaaccttgccgaaatcatccccggcacggcaggctggccgaagttcaaacgcaacctgagcgaacagtttgaagcgcgcctgagcatggttcatgtccccaaatccgcgtcgctgattctgaacgaaatgcaaggctccagcctgcccgtcgtcgtcagccacggcgaaggccgcgccgacttcgcgcttcacggcggcaatatttccgccgatttgggcatcgcgctgcaatatgtggacggtcaaaaccaggttacccaaacctatccgctcaaccccaacggctcgccgcaaggcatcgccggcattaccaacgccgacggccgcgtgaccatcatgatgccccaccccgaacgcgtgtaccgcgccgcacaaatgagctggaaaccggaaggctggacggaactgtccggctggtaccgcctctttgccggcgcacgtaaagccttgggctaa

SEQ ID NO: 59553 - DNA, 1215 bp, Neisseria meningitidis
atggataaatttcccaagtctgcaaagctcgatcacgtctgttacgacatacgcgggccggttcacaaaaaagcccttcagttggaagaggagggcaataaaatccttaaactcaatatcggcaaccctgcgccgttcggctttgaagcccctgatgaaatcttggtcgatgtcatccgcaacctgccgacttcgcaaggctattgcgattctaaagggctgtattccgcccgcaaagccattgttcactactatcagaccaaaggtttgcgcgatattacggttgatgatgtctatatcggcaacggcgtgtccgagctgattacgatgtctatgcaggcattgctcgacgacggcgacgaaatcctgattcccgcgcccgactaccctttgtggacggcggcggcaacgcttgcgggcggtacggtacgccattatctgtgcgacgaagaaaacggctggttccccaaccttgccgatatggaagccaaaatcacgcccaaaaccaaagccatcgtcgtcatcaatcccaataatccgacaggcgcggtgtacagcagggaaatcctgttggaaatcgccgaactggcgcgcaagcacggtttgattattttcgccgacgagatttacgataaaatcctttatgacggcgcggttcaccaccacatcgccgcgcttgcccccgaccttttgacggtaacgttcaacggtttgtccaaatcctaccgcgtcgccggcttccgccaaggctggatggtgctcaacgggccgaaacatcacgcaaaaggttacatcgagggtttggatatgctctcgtctatgcgcctgtgtgccaatacgccgatgcagcacgcgattcagacggcattgggcggctatcagagcatcaacgaatttattttgcccggcggacggcttttggaacagcgcaacagggcgtgggaactggtcaaccagatacccggcgtatcctgcgtcaaaccgatgggcgcgatgtatatgttcccaaaaatcgataccgaaatgtaccgtatccacgatgacatgaaattcgtttacgatttgctggtgcgcgaaaaagtcttgctggtacagggaacggggtttaattggattaaacccgaccatttccgcattgtcacgctgccttacgtccatcagattgaagaggcgatgggcaggttggcaagattcctgcaaacctaccgccaataa

SEQ ID NO: 59554 - DNA, 693 bp, Neisseria meningitidis
gtgcaggcggatttagcttatgccgccgaacgcattacccacgattatccgaaaccaaccggtgcaaacaacacaagcacagtaagcgattatttcagaaacatccgtgcgcattccatccacccccgggtgtcggtcggctacgacttcggcggctggagaatagcggcagattatgccagttacagaaaatggaacaacaataaatattccgtaaacacaaaagaggtgcaaagaaacaataacgctggcaactggcaagaactgaagacggaaaatcaggaaaacggcagcttccacgccgtctcttctctcggcttatccgccatttacgatttcaaactcaacgataaattcgataaattcaaaccctatatcggtgcgcgcgtcgcctacggacacgttaaacatcaggttcattcggtgagaaaagaaaccacgactactttcagtaaagcaggggcaggtgctacagagccaggcaaaattatatcaggtccgatctccaaacctgcctatcacgaaagccacagtatcagcagcttgggtcttggtgtcatcgccggtgtcggtttcgacatcacgcccaagctgaccttggacaccggataccgttaccacaactggggacgcttgaaaaacacccgcttcaaaacccacgaagtctcattgggcatgcgctaccacttctga

SEQ ID NO: 59555 - DNA, 891 bp, Neisseria meningitidis
atgtttcccgttttccatctttcaggcgaaagccgccgccggatgcttcaggcggcattgcgttttcctcatgttttcaaagcccgtgcggaagattcgcacaaagggactttcggcacgctcgccgtagtcggcggcgcggtcggcatgagcggcgcgcccgtattggcggcatcggcggcgatgtatctcggctgcggcaaggtgtgggcgggtttcaatcaggatgcgcttccgtttgccgtcattgccggttttcccgaaattatgttggacacggcagacggtttgaccaagcgtcaaggcataaacgcttggatggtaggttgcggcctgggtacggataaagcggcggtcggaacgcttgccggaattttggcggaacacacggacaagcccgtccttttggatgcggacgcgctgaacatattatcaaccgatgccgaaacccgaaatctggcacgcgggtgtaaaaacctgattttaacgccacaccccgccgaagccgcgcgcctgcttggaacgacggttgcacaggttcaggcggatcggacggcggcagtgaggaagataggggcaattttcggcgcaaccgtggttttaaaggggcacaaaacattggttgccgcgtccgatacggaaatctatgtcaacgaaagcggcaacgcgggattggcaacggcgggcagtggcgacgtattgggcggcatcatcggcagtctgctcgcacagggcgtgccggtttttgaagccgcctgcgcgggcgcgtggctgcacggcgcggcggcggatgtcataaaagaatcggcaggcattgcggcagggctgttggcaggggaaatcgccccggcggcaaggtggctgcgtaaccggataactgaaagtatgtaa

SEQ ID NO: 59556 - DNA, 840 bp, Neisseria meningitidis
atgaaacaactccgcgacaacaaagcccaaggctctgcactgtttacccttgtgagcggtatcgttattgttattgcagtcctttatttcctgattaagctggcgggcagcggctcgttcggcgatgtcgatgccactacggaagcagcaacgcagacccgtatccagcctgtcggacaattgacgatgggcgacggcatccccgtcggcgaacgccaaggcgaacagattttcggcaaaatctgtatccaatgccacgcggcggacagcaatgtgccgaacgctccgaaactggaacacaacggcgattgggcgccgcgtatcgcgcaaggcttcgataccttgttccaacacgcgctgaacggctttaacgctatgcctgccaaaggcggtgcggcagacctgaccgatcaggagctcaaacgggcgattacttacatggcgaacaaaagcggcggttctttcccgaatcctgatgaggctgcgcctgccgacaatgccgcttcaggaacagcttctgctcctgccgatagtgcagctccggcagaagcgaaggcagaagacaagggtgcggcagcccctgcggtcggcgttgacggtaaaaaagtcttcgaagcaacctgtcaggtgtgccacggcggttcgattcccggtattcccggcataggcaaaaaagacgattgggcaccgcgtatcaaaaaaggcaaagaaaccttgcacaaacacgcccttgaaggctttaacgcgatgccggccaaaggcggcaatgcaggtttgagcgatgacgaagtcaaagcggctgttgactatatggcaaaccaatccggtgcaaaattctaa

SEQ ID NO: 59557 - DNA, 513 bp, Neisseria meningitidis
atgttaccgaatacactgcgccgcgccgtttatgccggcagtttcgatccgcccacattggggcatctgtggatgatacggcaggcgcaatctatgtttgacgaactcatcgtcgccatcggcattaaccccgacaaacgcagcacctataccgtcgctgaaaggcaggatatgttgtgcgatattactaaaatgtttcccaacgtcagaaccgatgtatttgaaaaccgatttctggtgcattacgcccgtgaggtagatgcaggattcatcgtgcgcggcatccgttctgcttcggattacgaatacgaacgttccatgcgccatatcaacagcgacctcgcccccgaaatatccaccgtattcctcatgccgccgcgcgaaatcgccgaagtgtcgtccactatggtcaaaggactggtcgggccggaaggctggacggaaacgatccaccgctacgtgccgcaagctgtgtacgaaaaaatccttgccgaacatcaacacgaaaattga

SEQ ID NO: 59558 - DNA, 606 bp, Neisseria meningitidis
atgaataccgacttccaaaacatcctcaaacaactgggcaaacaagcccaaaaagaagcggcagaaaaacaggcagccgaaaaaaacaagcaaaaacaagaacaggatttcgatttttcacaagcagtcggacaactctccccattaaaaaaccggcagcaatattatgcgccgcccgacaaaacccccatcaaagtccgtcccaaagacaaccgcgccgacgaagaaaactacttctacatcggcagcacatacaacgacccgcccgccagcttcagcaaaaacggacagggaaaaaacgacatccaacgcctgaaaaacggatactatcccgtcgttaccgatgtcgacctgcacggctacacacaggaagaagcccaaaaagtcctcaacgaattcatcgcattcacccaaaaacgcggcgtatgcggcgaaatcatccacggcagcggattaggttccaaaggctacaaacccgttctgaaaaatatgacccgaaactggctgatgcaacaccccgacatactcgcctacgccgaaccccgggaaggcaacgacggctgcgtccgcatcctgctcaaacgcaaattaaggcagcaagactga

SEQ ID NO: 59559 - DNA, 504 bp, Neisseria meningitidis; identical to SEQ ID NO: 42472

SEQ ID NO: 59560 - DNA, 780 bp, Neisseria meningitidis; identical to SEQ ID NO: 38358

SEQ ID NO: 59561 - DNA, 855 bp, Neisseria meningitidis
atgaaaatcgtcctgattagcgggttgtccggttcgggcaaatccgtcgcactgcgccaaatggaagattcgggttatttctgcgtggacaatttgcctttggaaatgttgcccgcgctggtgtcgtatcatatcgagcgtgcggacgaaaccgaattggcggtcagcgtcgatgtgcgttccggcatagacatcggacaggcgcgggaacagattgcctctctgcgcggactggggcacagggttgaagttttgtttgtcgaggcggaagaaagcgtgttggtccgccggttttccgaaaccaggcgaggccaccctctgagtaatcaggatatgaccttgttggaaagcttaaagaaagaacgggaatggctgttcccgcttaaagaaatcgcctattgtatcgacacttccaagatgaatgcccaacagctccgccatgcagtccggcagtggctgaaggtcgaacgtaccgggctgctggtgattttggagtccttcgggttcaaatacggtgtgccgaacaacgcggattttatgttcgatatgcgcagtctgcccaatccgtattacgatcccgagttgaggccttacaccggtatggacaagcccgtttgggattatttggacggacagccgcttgtgcaggaaatggttgacgacatcgaaaggtttgttacgcattggttaccgcgtttggaggatgaaagcaggagctacgttaccgtcgccatcggttgcacgggaggacagcaccgttcggtctatattgtcgaaaaactcgcccgaaggttgaaagggcgttatgaattgctgatacggcacagacaggcgcaaaacctgtcagaccgctaa

SEQ ID NO: 59562 - DNA, 912 bp, Neisseria meningitidis
  misc_feature 6, 7, 8, 9, 10: 'n' is a, c, g or t
gtgtgnnnnngtattgtcgaacgtgctttggaagagttcggcgcgccgatttatgtgcgccacgaagtcgttcacaacaaattcgtcgtggacaacctgcgtgaaaaaggtgcggtgtttattgaagacttggcggaagtgccgccgggcgcgacactggtttattcggcacacggcgtatcgaaggcggtgcggcaagaagcggcggagcgcggtttccgcgtgtttgatgcgacttgcccgctggtgacgaaagtgcataaggaagtcgcccgactggatgcccaagactgtgaaatcatcatgatcgggcataaggggcacgtcgaggtcgaaggaacgatggggcagcttgcgccgggcaaaatgcttttggtcgaaacggtcggagatgtggcaaaactcgaagtcagaaaccccgacaaactcgcctatgtcagccaaaccacgctctcggtcgatgaaaccaaagacatcatcgccgcgctgaacgcgcgtttccccaatatccgcaatccgcacaaggaagatatctgctatgcgacgaccaaccggcaaaccgccgtcaaagagttggcagaacagtgcgacatcgtgattgtggtcggttcgcccaattcgtccaacagcaaccgcttgcgcgaagtggcggcatcgcgcggaatcgatgcgtatatggtggataatgcaggctacctgcaacgcgcatggtttgagggcaaaaacaaagtcggcgtaacggcaggcgcgtccgcgcccgaagtgttggtgcgggaagtactggcaaccatacgcggatgggggcacgaaaccgtacgcgaaggcgagggtgcggaagaaagcattgtgttcgtcctgcccaaagagttgcgccgcgagggcgaaaccaaacccgatttgtgcaaacgttga

SEQ ID NO: 59563 - DNA, 426 bp, Neisseria meningitidis; identical to SEQ ID NO: 39813

SEQ ID NO: 59564 - DNA, 672 bp, Neisseria meningitidis
atgatgaagacttttaaaaatatattttccgccgccattttgtccgccgccctgccgtgcgcgtatgcggcagggctgccccaatccgccgtgctgcactattccggcagctacggcattcccgccacgatgacatttgaacgcagcggcaatgcttacaaaatcgtttcgacgattaaagtgccgctatacaatatccgtttcgagtccggcggtacggttgtcggcaataccctgcaccctacctactatagagacatacgcaggggcaaactgtatgcggaagccaaattcgccgacggcagcgtaacttacggcaaagcgggcgagagcaaaaccgagcaaagccccaaggctatggatttgttcacgcttgcctggcagttggcggcaaatgacgcgaaactccccccggggctgaaaatcaccaacggcaaaaaactttattccgtcggcggtttgaataaggcgggtacaggaaaatacagcataggcggcgtggaaaccgaagtcgtcaaatatcgggtgcggcgcggcgacgatgcggtaatgtatttcttcgcaccgtccctgaacaatattccggcacaaatcggctataccgacgacggcaaaacctatacgctgaaactcaaatcggtgcagatcaacggccaggcagccaaaccgtaa

SEQ ID NO: 59565 - DNA, 1356 bp, Neisseria meningitidis; identical to SEQ ID NO: 50730

SEQ ID NO: 59566 - DNA, 2028 bp, Neisseria meningitidis
ttgtccctgtctgaatttatagaacgccgaacgtcatttaatccgatggttattttgacgactttgttttttgtgtgtgttttggtggtattggttttaaccgtgccggatcaggtgcagatgtggctcgatcgggcaaaagaagtcatttttaccgagttcagctggttttatgttttaacgttttccatttttctgggtttcctgctgatactctcggtcagcagtttgggaaacatcaggctcggacgggatgaagatgtgccggaattcggcttcctgtcgtggctggcgatgctgtttgcggccgggatgggcgtgggtctgatgtttttcggcgtggcagagccgttgatgcattatttttcggacattacggccggcacgccggaacacaggcagcagcaggcattgctgcacacggtgttccattggggcgttcacgcttggtcggtgtacggtacgattgcattggctttggcttatttcggtttccgctacaagctgccgcttgccctgcgttcttgtttttaccccctgttgaaagaaaaaatttccggaaggttcggcgatgccattgatattatggcgttgcttgctacttttttcggcatcatcaccacattggggttcggggcttcgcaactgggcgccggattgcaggaaatgggctggattgccgaaaacagcttcagcgtgcaggttttgattatcgccgccgtcatgtccctcgccgtcgtttcggcaatatccggcgtggggaagggcgtgaaggtgttgagcgagttgaacctgggccttgcgtttttgctgctgttttttgttttggcggcgggacccactgtttacctgttgtcggcattcggcgacaacatagggaactacctcggaaatctggtgcgcctcagttttaaaacttatgcgtacgaacgggaacacaagccgtggtttgaatcttggacggtgctttattgggcgtggtggtgttcttgggcgccgtttgtgggtttgtttatcgcgcgcatttcaaaggggcgcaccatccgcgagtttgtcttcggggttttgctcatccccggcctgttcggcgttttgtggtttaccgtcttcggcaatacggcgatttggctgaatgacggggttgcggggggaatgctcgaaaagatgacctcctctccggaaacgctgctttttaaattctttaattacctccccctgcccgaattgacgagcatcgtcagcctgctggtcatttctctgttttttgtaacttctgccgattccgggatttatgtcctgaacaatattacctctcgggacaaaggcttgagcgcgccacggtggcaggcggttatgtggggcgtgctgatgtctgccgttgccgttttgctgatgcgctcgggcggactcggcaacctgcagtctatgaccctgattgtttccctgccgtttgccctgctgatgctgataatgtgtttcagcctgtggaaaggcttgagtgcggataagaaatattttgagacccgggttaaccctaccagtgtattttggacgggcggcaagtggaaagaacggctggtgcagataatgagccagacgcaggagcaggatattttaaaattcctcaaacataccgcatcgcccgctatgcacgagttgcaacgggagctttcggaagaatacggcttgagcgtccgggtcgataagatgtttcatcaggacgagcccgcaatcgagtttgtcattcgcaaagagacgatgcgcgattttatgtacgggattaagtctgtcgggcaggatgtatccgatcagttgattaacgacggcaacttgccgcatatccggcaccagacaacttacaaaccttacgcttattttttcgacgggcgcgtcgggtacgatgtgcagtatatgaacaaggacgagctgattgccgacattttgaaaaactacgaacgttatttgatgttgttggatgatgtcggtcaggaactgatggcgcacgagcaggtggaattggcagagtaa

SEQ ID NO: 59567 - DNA, 201 bp, Neisseria meningitidis; identical to SEQ ID NO: 43708

SEQ ID NO: 59568 - DNA, 1248 bp, Neisseria meningitidis; identical to SEQ ID NO: 51657

SEQ ID NO: 59569 - DNA, 771 bp, Neisseria meningitidis
ttggtcaaaacggcagacggctacaaagccattgcccgtatccgaaccggcgaccgcgtcttcgccaaggacgaggcaagcggaaaaacgggatacaaacccgttaccgcccgatacggcaatccgtatcaagaaaccgtttacattgaaatttcagacggcatcggtaaaatacaaacccttgtttccaaccgcatccacccattttattcggacggaaaatggattaaagcggaagatttgaaagcgggaaacaggctgttatccgaaagcggcaaaacccaaactgtccgcaacatcgttgtcaaaccaacaccgctcaaagcctacaatctgaccgttgccgactggcatacttacttcgtcaagggtgataaggcggagacggaaggggtttgggttcataatgattgtccgtatggtagttctggcgcgaaaggtaaaagtggaagtgagagaaatactgctaaacgtggaaccttcagacaagaaacgctaaaaaatgcatgggatttggcagcagatggtagccagcctaattcaaaaaaatgtcctacatgtggtaaagatgtatatggtaatccccataacaaggagaaacgtaatacaaaagatggttgggatggaagtcataatccatcatggagtaaccgtcaacatagttctgatcgtaaggagcaactaaatgattataataaaggagtaagtttagaatgcagacattgcaatcgatccggtggcaacaaggatgaaaggtttaagaaaaaatga

SEQ ID NO: 59570 - DNA, 1143 bp, Neisseria meningitidis
atgaaaaaatccgtattagccgttttggccgcgctgtctctggcagcctgcggcggcagcgaaaaaaacgccgtgcaacctcaagcagacgctgcgtctgctgccaatgccgaagccgctgccaccgatactctgaacatctacaactggtcgaactatgttgacgagagtacggtcgaagactttaaaaaagccaacaatctgaagctgacttacgacttgtacgaaaacaatgaaacgctggaagccaaaatgctgaccggcaaatccggttacgatttggttgtgccgggcatcgccttcctgccgcgccaaatcgaggcgggcgcgtatcaaaaagtcaacaaagacctgattcccaactataaaaacatcgatcccgaactcttgaaaatgctggaaaccgccgacccgggcaaccagtatgccgtcccctatttctccggcgtgaacacgattgcgattacggcgaaaggcaaagagcttttgggcggcaagctgcccgaaaacggctgggatttgctgttcaaacccgaatacacccacaagctgaaatcctgcggcatcgccctgtgggacaccccgagcgaaatgttcccgattttgctgaactacttgggcaaagaccccaaaggttcgaatcctgaagatttgaaggcggcggcggaagtgttgaagtctatccgtccggatgtcaaacgtttcagcccgtccatcatcgacgagctggcgcgcggcgacatctgcctggcggcaggcaacggcggcgatttgaacttggcgaaagcacgttccgaagaagtgaaaaacaacgtcggcatcgaagtgctgaatccgaaaggcatgggcttctggattgagtcttggctgattcccgccgatgcgaaaaacgtcgccaatgcccacaaatacatcaactacacgctcgaccccgaaatcgcggcgaaaaacggcatcgccgtaaccttcgcccccgccagcaaaccggcgcgcgaaaaaatgcctgccgagctggtgaacacccgttccatcttcccgaacgagcaggatatgaaagacggttttgtgatgccgcaaatgagtacggatgcgaaaaaactgtctgtcagcctgtggcagaaaatcaaagtcggcaccaactga

SEQ ID NO: 59571 - DNA, 1404 bp, Neisseria meningitidis
atgaacaatcccgacttaccctatcggcaggccttagaatgcctgtctcaaaaacaatataactttaccgaagtccgccgactgctgacagaagcgttctcggcaggtcatcccgccgccgcattcgagttggcaaaacacctgatggacgcggacagcccctaccaagaccgcgaacaaggtatggaaatgctccgcatcgccgctgaacagggacatccctacgcgcgttacaatctggcatatatccaagaattggaaggcgcacccccggaaaccctgataccgctttacagaccgttggcagaagaaggactgcccgaagcgcaagtccgcctgatgtaccttctgtacgcgtcccgacattttgaagaagccttggaatgggcaaaaacaagcgcaaaaaacaacaacccccacgggcaatacctgcttgcccaatactgccggtacggcacaccgccggattttgaaacggcgcacctgctctaccgaaaagcggcggcacaaggcttgccggaggcacattggcagctcgggctgcaatatcgtttcgggcaagggacgaaagtcgacacggcacaggccgtcaatcatttgcgcgccgccgcacaacaaggatacattcctgcctacaccccacttgccgagctcatcctacctacggctcctgatgaagccgttcactggtttcaacaggccgcacaggaaaatgaccccgatgcccatgccgcacttgccgacatctacctgcaaggcaagcatctggaaagaaaccacaaacttgccctgcatcatgccgaagcagccgccgccgaacgccatcccgaaggtttgcggatactgggcgacatctgccgctacggtttgggcatagcccccgatacggaaaaagcccggcattattatcggcaggcagccgaagccggcagcctttccgcctatcagaaactcatatccgacagcgcgttaaaccatcctgaccaatacggcggcattaaagattccgccatcaggcggcaaagggcagaacggctttatcaaaaagcccaagccctgcattacggattacaatgcgcgcccgaatacgcagccgcgctcaaactctacacagaagccgcagaactcggacacagcaaagcccaaaccaatctgggcagcatgtattacttcggacagggtatgaccgccgactacaatgaagcacgcaaatggtttgaaaaagccgccgcgaaaaaagacagtatggcgttctacaacctcgcctgcatccattacagcggacacggcgtcgagccggacaaagaaaaagcctgccgctacctgcaagaagccataaacaacggatacgggcaaaaaagcgtcctgcaagaactgctgcaacaatggcaaaatgccgtctga

SEQ ID NO: 59572 - DNA, 345 bp, Neisseria meningitidis
atgaataagcaatatccgaaaattaactatatcggtaataaagagaaaatagcttcctggatttgtgaccagcttccgtctgatgtagatacagttgcagatgtatttagtggaggctgttcctttgcctacgaagccaaaaaacgcggctatcgtgtgattactaacgatattttggcaattaattaccaaattgctttagcattaatagaaaacaaccatgaaacattaaatgacgatgatgtcgcaatgattttttcaggcggcccgcatgccggttttatgagtcagcgttatgccgaaaaattctattttcacgatgaataccaacaacttgatttgtaa

SEQ ID NO: 59573 - DNA, 447 bp, Neisseria meningitidis; identical to SEQ ID NO: 50902

SEQ ID NO: 59574 - DNA, 696 bp, Neisseria meningitidis; identical to SEQ ID NO: 50512

SEQ ID NO: 59575 - DNA, 273 bp, Neisseria meningitidis
atggcaagtaaaaaagcaggcggcagcacccgcaacggtcgcgattcagaagccaaacgcttgggcgttaaagcctacggcaacgagctgattcccgcaggttccatcatcgtacgccaacgcggtaccaaattccacgcaggcgacaacgtaggcatgggcaaagaccacactttgttcgccaaagttgacggttatgtcgaattcaaaaccaaaggcgcgctgaaccgtaaaactgtcagcatccgtccttacaccggttctgaagaataa

SEQ ID NO: 59576 - DNA, 588 bp, Neisseria meningitidis; identical to SEQ ID NO: 37602

SEQ ID NO: 59577 - DNA, 1623 bp, Neisseria meningitidis; identical to SEQ ID NO: 43332

SEQ ID NO: 59578 - DNA, 375 bp, Neisseria meningitidis; identical to SEQ ID NO: 45132

SEQ ID NO: 59579 - DNA, 747 bp, Neisseria meningitidis
atggaaaccccgaccaacaccccgcaacgctccctgcgtcaaaacagtatctacctgctgcccaactcctttaccatcgccgcgctgttttccgcgttttacgcaatcacccaatccatgcacggacgttatgaaaccgccgccatcgcggtattcatctctatgttgctggacggtatggacgggcgcgtggcgcggctgaccaacagccaaagcgcgttcggggagcagctcgacagccttgccgatatggtcagcttcggcgttgctcccgctctgattgcctacaaatggcagctttggcagttcggcaaaatcggttattccgtcgccttcatctactgcgcctgcgccgccctgcgcctcgccctgttcaacacgctcatcggcaaagtggacaaacgctggtttatcggcgtacccagtccgactgccgccgcgctgattgtcgggctgatttgggtcaaccacagcgtcgaaaaattccccgccgtccactggtgggcattgggcatcacactgtttgccggcctgtcgatgattgtccaaatccctttttggagttttaaagaaatcaacatccgcagacaagtcccctttgtcggaatgctgcttgccgtcttactgctgcttctggtcacttgggaaccgtcgctcgtcctcttcctgttctttctcggatacagcctgtccggctacattatggcggcacgccgattttggaaaaaatacagaaaggcggattaa

SEQ ID NO: 59580 - DNA, 1467 bp, Neisseria meningitidis
atggctgaagcgacagacgttgtcttggtgggcggcggcattatgagcgcgactttgggcgttttgctcaaagaactcgaaccgtcttgggaaatcaccctgattgaacgcttggaagatgtggcgttggaatcgtcaaacgcgtggaacaacgccggcacggggcattccgcgctgtgcgaattgaactatgcgccgttgggtgcaaatgggattatcgatccggcgcgcgccctcaatattgccgaacagtttcatgtcagccgccagttttgggcgacgttggtcgcggaaggcaagttggaagacaattccttcatcaatgccgtgccgcatatgtctttggtgatgaatgaagaccattgttcttatcttcaaaaacgttatgacgcgtttaaaacccaaaaactttttgaaaatatggaattttccaccgatcggaacaaaatttccgattgggctccgctgatgatgcgcggccgggacgaaaaccaacccgtcgccgccaactactccgccgaaggcacggatgtcgatttcggacggctgacgcgccaaatggtgaaatatttgcagggcaagggcgtaaaaaccgagttcaaccgccacgtcgaagacatcaaacgcgaatccgacggcgcgtgggtgctcaaaaccgccgatacccgcaaccccgacgggcagctcaccctccgtacccgcttcctcttcctcggcgcgggcggcggcgcgctgaccctgctgcaaaaatccggcatccccgaaggcaaaggctacggcggcttccccgtgtccggcttgttcttccgcaacagcacccctgaaaccgccgaacaacacaacgccaaagtgtacgggcaggcttccgtcggcgcgccgccgatgtccgtcccgcacctcgacacacgcaacgtggacggcaaacgccaccttatgttcggcccttacgcaggcttccgttccaacttcctcaagcaaggctcgcttatggatttgccgctgtccatccatatggacaacctctatcctatgctgtgcgccggctgggcgaatatgccgctgaccaaatacctgctgggcgaattgcgtaaaaccaaagaagaacgcttcgcctccctgctggaatactaccccgaggcaaaccccgacgactgggaactcatcaccgcagggcaacgcgtccaaatcattaaaaaagactccgaaaaaggcggcgtgctccagtttggtacggagattgtcgcccacgccgacggctcactcgccgcattgctgggcgcgtcgccgggcgcatcgactgctgtgccgctgatgatccggctgatgcaccaatgcttccccgagcgcgccccgtcttgggaaggccgtctgaaagagctggtaccgggttacggcatcaagttgaacgaaaaccccgaaagggcggatgaaattatcgcctataccgcgaaagtgttggatatttaa

SEQ ID NO: 59581 - DNA, 147 bp, Neisseria meningitidis
atgacctttcagacggcatttgcgccgccgcgtttcgagtatagtggattaactttaaatcaggacaaggcgacgaaaccgcagacagtacagatagtacggcaaggcgaggcaacgccgtactggtttaaatttaatccactataa

SEQ ID NO: 59582 - DNA, 426 bp, Neisseria meningitidis; identical to SEQ ID NO: 43259

SEQ ID NO: 59583 - DNA, 1224 bp, Neisseria meningitidis
atgaaaacggtagtctggattgtcgtcctgtttgccgccgccgtcggactggcactggcttcgggcatttacaccggcgacgtgtatatcgtactcggacagaccatgctcagaatcaacctgcacgcctttgtgttaggttcgctgattgccgtcgtggtgtggtatttcctgttcaaattcattatcggcgtattcaatatccccgaaaagatgcagcgtttcggttcggcgcgtaaaggccgcaaggccgcgcttgccttgaacaaggcgggtttggcgtattttgaagggcgttttgaaaaggcggaactagaagcctcacgcgtgttggtcaacaaagaggccggagacaaccggactttggcattgatgttgggcgcacatgccgccgggcagatggaaaacatcgagctgcgcgaccgttatcttgcggaaatcgccaaactgccggaaaagcagcagctttcccgttatcttttgttggcggaatcggcgttgaaccggcgcgattacgaagcggcggaagccaatcttcatgcggcggcgaagatgaatgccaaccttacgcgcctcgtgcgtctgcaacttcgttacgctttcgacaggggcgacgcgttgcaggttctggcaaaaaccgaaaaactttccaaggcgggcgcgttgggcaaatcggaaatggaacggtatcaaaattgggcataccgccgccagctggcggatgctgccgatgccgccgctttgaaaacctgcctgaagcggattcccgacagcctcaaaaacggggaattgagcgtatcggttgcggaaaagtacgaacgtttgggactgtatgccgatgcggtcaaatgggtcaaacagcattatccgcacaaccgccgccccgagcttttggaagcctttgtcgaaagcgtgcgctttttgggcgaacgcgaacagcagaaagccatcgattttgccgatgcttggctgaaagaacagcccgataacgcgcttctgctgatgtatctcggtcggctcgcctacggccgcaaactttggggcaaggcaaaaggctaccttgaagcgagcattgcattaaagccgagtatttccgcgcgtttggttctggcaaaggttttcgacgaaatcggagaaccgcagaaggcggaggcgcagcgcaacttggttttggaagccgtctccgatgacgaacgtcacgcagcgttagagcagcatagctga

SEQ ID NO: 59584 - DNA, 990 bp, Neisseria meningitidis
atgaaaattaccgttatcggcgcaggttcgtggggtacggcgctcgccctgcacttttcccaacacggcaaccgcgtatccctgtggacgcgcaacgcagaccaagtccgccaaatgcaggaagcgcgtgaaaacaaacgcggactgcccggcttttcctttcccgaaaccttggaagtgtgtgcggatttggcagacgcgctcaaagacagcggacttgtccttatcgtaacctccgttgccggattgagaagcagcgcagagctgctcaaacagtacggcgcgggacacctccccgtcctcgccgcctgcaaaggattcgagcaggatacagggctgctgacctttcaagtattgaaagaagtattgcccgacaataaaaaaatcggcgtactttccggtccgagttttgcacaggaactcgccaaacaactgccctgcgccgtcgtcctcgcctctgaaaaccaagagtggattgaagaactcgtaccgcagctcaacacgaccgtcatgaggctttacggcagtaccgacgttatcggcgtggcagtcggcggcgcggtaaaaaatgttatggcgattgccaccggattgtccgacggtctagagtacgggcttaacgcccgcgccgcactggttacgcgcggattagctgaaatcacccgccttgcctccgcaatgggcgcacagcccaaaaccatgatggggcttgccggtatcggcgacctcatcttgacctgcaccggcgcactttcacgcaaccgccgcgtcggcttgggtttggcagaaggcaaggaactgcatcaggtgctggtcgaaatcggacacgtttccgaaggggtcagcacgatagaagaagtcttcaatactgcctgtaagtaccaaatcgacatgccgattacccaaaccctgctgcaactcatccgtaaggaaatgaccccgcaacaggttgtcgaaagactgatggaacgcagcgcgcgttttgaataa

SEQ ID NO: 59585 - DNA, 240 bp, Neisseria meningitidis; identical to SEQ ID NO: 43044

SEQ ID NO: 59586 - DNA, 417 bp, Neisseria meningitidis; identical to SEQ ID NO: 39610

SEQ ID NO: 59587 - DNA, 720 bp, Neisseria meningitidis
atgacacagcaaatcaaatacaaacgcgtattactgaaactctccggcgaatccctgatgggttccgatccgttcggcatcaatcacgacaccatcgtccaaaccgtcggcgaaattgccgaagtcgttaaaatgggcgtacaggtcggcatcgtcgtgggcggcggcaatattttccggggcgtatccgcccaagcaggcagcatggaccgcgccactgccgattacatgggcatgatggcgaccgtgatgaacgccttggcactcaaagacgcatttgaaactttaggcatcaaagcgcgcgtacaatccgcactgtctatgcagcaaatcgctgaaacttacgcccgtcctaaagccatccaatatttggaagaaggcaaagtcgtgatttttgccgccggtaccggtaacccgttcttcacgaccgacactgccgccgcattgcgcggtgcggaaatgaactgcgacgtgatgctcaaagccaccaacgtcgacggtgtatacaccgcagacccgaaaaaagacccgtccgccacacgctacgaaaccattacttttgacgaagccttgttgaaaaacctcaaagtcatggacgcgaccgctttcgccctctgccgcgaacgcaagctcaatatcgtcgtcttcggcatcgccaaagaaggctcgctcaaacgcgtcattaccggcgaagacgagggaacgctggttcactgctga

SEQ ID NO: 59588 - DNA, 873 bp, Neisseria meningitidis; identical to SEQ ID NO: 51478

SEQ ID NO: 59589 - DNA, 603 bp, Neisseria meningitidis; identical to SEQ ID NO: 43408

SEQ ID NO: 59590 - DNA, 1929 bp, Neisseria meningitidis; identical to SEQ ID NO: 45239

SEQ ID NO: 59591 - DNA, 975 bp, Neisseria meningitidis
atggacacactgacccgattcctccccgaacacctgcaacaaaaccaactgaccgaagcactcggcggcgttttgctgtccgtcgtttccgcctgcaccgaaatcaacgccaaagtccgcctcggcgcactggccggcgtattgggtatggcgggcacgggcaatattcagggcgaagaccagaaaaaactggatgttatcgccaacaacattatgattgacacactcaaagccaaccctgctgttgccggcttggcaagcgaggaagaagacactttcgtaagtgccggtgaaaacggacgctatctcgtcctattcgaccctttagacggatcgtccaatattgatgtcaacatttccgtcggtacaattttctccatccttgaaaaacccgaaggcgcattggcaaccgaatcattccttcaaacgggcagacagcagcttgccgcaggctatatcctctacgggcctcaaacccagctcgtattcacattcggacacggcgtatatatgttcacgcttaatgccgaaaacaaatttgtgctgacaaaagaaaaaccgaaagtacccgaaagtaccaaagaatttgccatcaatatgtccaaccgccgccactggctgccccccgtccaacaatacatcgacgagctcttggcgggcgaaaccggcacgcgcggcaaaaactacaatatgcgctgggtagccagcatggttgccgaaatccaccgcatcctgatgcgcggcggcgtgttcatgtatccgcaagacaaacgcgaccccgccaagcccggaaaactgcgcctgatgtacgaagccaaccctatgagcctgatactcgaacaggcgggcgcatcggcaagcaacgcatatcaagccatgctcgacatacagcccgaaaacctgcaccaacgcgtcgccgtcttcatgggcagcagcgaagaagtcgcctatctcgaccgcctgcacgcaaaatag

SEQ ID NO: 59592 - DNA, 420 bp, Neisseria meningitidis
atggcacaattaccgctatatctgacttctgaaatcaaagactttactgtcggcacgcctaaagttttagaatcattttccaaacatatcccttatggtgtcgtctttgaagacgacggcgacacaggctacttctatgccgcttcgcaagacgggattttagatgccttgcacatctataatgtcgaagatgtatccgacaaacatatccccaatcatgtcttgattttatgggatgatgcctgcaccatagccgaattgtgtgtcaacgactacattcatgccgtctatgattttgtcgaacaggcaggatattgccgcaacggcttccctgaggcacacggagaatgggtgaaagtcgaaaaccgcgtcttggatgatgaattgctggacaaaatcctatcccgagaacctacataa

SEQ ID NO: 59593 - DNA, 1362 bp, Neisseria meningitidis
atgctgaaaaaatggttgaataagatgctgccttccggtcggagcagtaaaaaagcggaaagtaaaacggtcattcctgccgaaagacacaacatccgtgccgaaatgttgagctttgccgccgaaaacgtcatacgccgcctgaaaggggcggggtttcaggcttatgtggtcggcggcgcggtcagggacctgctgctcggcatcgaacccaaggatttcgatgtcgcaaccgatgccacgcccgaacaggtgcacaaactcttccgccgcagccgcatcatcggcaggcgtttccaaatcgttcatgtgatgaacggtgcggaagtgattgaggtaacgacttttcggggcggtgcgaaagtacatcagaatgcacgcggcaggattatgaaagacaatacctacggcagtatcgaagaagatgccatgaggcgcgactttacctgcaacgcgttgtattacgatccggaaaaagaagaaattttggatttccacaacggtatggacgatattgccgaacggaagctggtaatgatcggtaatgccgccgaacggtatcaggaagaccctgtcaggattttaagggcaatccgcctgtcggggaaattgggattcgaattgtcgcaagcgaccgccggaccgattgccgaatcgatatgccgtctgaagcacgaaccggtagcgaggctgtttgacgaaatcatgaaactgctgttttcagggcacgcgcgcgagtgtctgaaacgtttgaacggatttgacataccggacgacatccatccgctgctcaatgccttgcgtgtttcagacggcatcgccggaaaaatgacggtgcttgccctgaaaaataccgatgagcggctgcgtgccgacaaatcggtttcggtcggttttgtattggcggctctgatgtggcccgagttggaacgccattggaaaagcaatctgcaacagggtttgaaacccgcgcccgccctgtccgatgcaatcaatacgatgcgcgaaaccgtcgaacgcggttggggcgtgccgcaacgcttttccgccacgatgcgcgaaatttggatgttccagccgcagtttgaaaatcgcaaaggcgcacgtccgcacaaactgtttgcacaggcgcgtttccgtgccgcctatgatttcctgctcttgcgcgccgaaaccggcaatgcggaccgcgcccttgccgagtggtggacggcgtttcagacggcatcgacggaacagcggacggaaatgaccaaaaacgaggctgccgcccggcacgaaaaaaacgaaggacaggcgaaaaaacgccgccgtcgcaggcgcaaacccaagccgaaggttgtgggaacggattgggaataa

SEQ ID NO: 59594 - DNA, 1380 bp, Neisseria meningitidis
atgctgctcgacctcaaccgcttttccttttccgtcttcctgaaagaaatccgcctgctgaccgcccttgccctgcccatgctgttggcgcaagtcgcacaggtgggcatcggttttgtcgatactgtgatggcgggcggtgcgggcaaggaagacttggcggcggtggctttgggcagcagcgcgtttgccacggtttatattacctttatgggcattatggcggcgctgaacccgatgattgcccagctttacggcgcaggtaaaaccgacgaagtgggcgaaacggggcggcaggggatttggttcgggctgtttttgggcgtgttcggcatggtcttgatgtgggcggcgattacgccgttccgcaactggctgaccttgagcgattatgtggaaggcacaatggcgcagtatatgctgttcaccagcttggcgatgccggcggcaatggtacaccgcgcactgcacgcctacgcctccagcctgaaccgcccgcgcctgattatgttggtcagctttgcggcgtttgtgttgaacgtgccgctgaactatattttcgtttacggcaaattcggtatgcccgctttgggcggcgcaggctgcggactggcgacgatggcggtgttttggttcagcgcgctggcattgtggatttatatcgccaaggaaaatttcttccgcccattcggactgacggcgaaattcggcaaaccggattgggcggtgttcaaacagatttggaaaatcggcgcacccatcgggctgtcttattttttggaagccagcgcgttttcgtttatcgtgtttttgattgcgcctttcggcgaggattatgtggcggcgcagcaggtcggcatcagtttgtcggggattctctatatgattccgcaaagcgtcggctcggcggggacggtgcgcatcggcttttcgcttgggcggcgcgaattttcgcgggcgcgttatatttcgggcgtgtcgctggtgttaggatggatgctcgccgtgattaccgtgctttccttggtattattccgttcgccgctggtaagtatgtacaacaatgatccggcggttttaagcatcgccgccaccgtcttactgttcgccggcttgttccaaccggcagacttcacccaatgtatcgcctcctacgccttgcgcggctacaaagttacaaaggtgccgatgttcatccacgccgccgccttttggggctgcggtctgctgccgggctacctgctcgcctaccgtttcgatatgggcatttacggcttctggacggcattgattgcctcgctcaccatcgccgccatcgccttggtgtggtgcttggaattgtgcagtagggagatggtcagatcgcataaggctgtctga

SEQ ID NO: 59595 - DNA, 819 bp, Neisseria meningitidis; identical to SEQ ID NO: 51623

SEQ ID NO: 59596 - DNA, 186 bp, Neisseria meningitidis; identical to SEQ ID NO: 37303

SEQ ID NO: 59597 - DNA, 336 bp, Neisseria meningitidis
atgttcggaaaagccggattaggcggcctgatgaaacaggcgcagcaaatgcaggaaaatatgaaaaaagcgcaagccaaacttgccgaaaccgaaatcgaaggcgaagcaggcaacggcttggtcaaaatcacaatgacctgcgcgcacgaagtacgcaaaatcgacatcagccccgatttgattcaagaagccgccgacgacaaagaaatgcttgaagacctcatcctcgccgccctcaaatccgcccgtggcaaagccgaagaaaccgcaaacaaaacaatgggcgcattcacgcaaggtctaccccccggagtgggcgacttcttccgctga

SEQ ID NO: 59598 - DNA, 303 bp, Neisseria meningitidis; identical to SEQ ID NO: 37654

SEQ ID NO: 59599 - DNA, 192 bp, Neisseria meningitidis; identical to SEQ ID NO: 37615

SEQ ID NO: 59600 - DNA, 531 bp, Neisseria meningitidis; identical to SEQ ID NO: 39309

SEQ ID NO: 59601 - DNA, 2733 bp, Neisseria meningitidis
atgcacgaacattaccaacccgccgccatcgagcctgcggcgcagaaaaaatgggacgacgcccgtattttcaacgtctccgaagacgcttccaaacccaaatactactgcctctccatgttcccctaccccagcggcaagctgcacatggggcatgtgcgcaactacaccatcggcgacgtattgagccgcttcaaacttttaaacggcttcaacgtcatgcagcctatgggttgggacgcgttcggcatgccggcggaaaacgcggcgatgaaaaacaacgttgcccctgccgcttggacttacgacaacatcgaatacatgaaaacccagctcaaaagcctgggttttgcgattgactgggaacgcgaaaccgcaacctgcaaacccgaatactaccgctgggaacaatggctgtttaccaagctgtttgaaaaaggcatcgtctatcgcaaaaacggcacggtaaactgggatccggtcgaccaaaccgtccttgccaacgagcaagtcatcgacgggcgcggctggcgttcgggcgcgttgatcgaaaaacgcgaaatcccgatgtattacttcaaaatcacggattacgccgaagagctgctcaacgacttggacaagctggaacactggccggaacaagtcaaaaccatgcagcgcaactggatcggcaaatcgcgcggtatgaccgtgcgcttcgccgtttcagacgacagcaaacaaggcttggaaggcgattacgcgaaattcctgcaagtttataccacccgccccgacacgctgatgggtgcgacttatgttgccgttgccgccgagcatccgctggcagccgccgcagccgccgacaaacccgaattgcaggcatttatcgccgaatgcaaagccggttcggttgccgaagctgatatggcgacgatggagaaaaaaggcgtgccgaccggccgctacgtcgtcaacccgcttaacggcgacaagctggaagtgtggattgccaactatgtattgtggggctacggcgacggcgcggtaatggcggttccggcgcacgacgaacgcgatttcgagttcgccgccaaatacagcctgccgaaaaaacaggtcttacaacgcgtaacaatcggactttcgccagagcaagaagaagctatgggttttggtggcggttccggatgtggtgctggttatggtgatggtagtggttccgattcaagagatttgccgtttatgcctaataaatggcaagcatggtatggagtcaaagatgacttcatggtcttaatcaactcaggtgaactggacggcatgaattatcagacagcatttgatgctgtcgccgctaaattacaagctatcggagctggcgaaccgaaaacccaataccgcctgcgcgactggggcatttcgcgccaacgctactggggctgcccgattcccatcgtccattgcgaaaaatgcggcgacgtacccgtccccgccgaccaactgccggtcgttttgcctgaaaacgtcgtacccgacggcatgggttcgcctttggcaaaaatgcccgagttttacgaaaccacctgcccatgctgcggcggcgcggcgaaacgcgaaaccgacaccatggacaccttcatggaatcaagctggtacttcttccgctatatgtcgcccaagttttcagacggcatggtatcggcagaagccgcgaaatactggggcgcggtcgaccaatacatcggcggtatcgaacacgccattttgcacctcctgtacgcgcgtttcttcaccaaactgatgcgcgacgaaggcttggtcaatgttggcgaaccgtttgaacgcctgctgacgcaaggcatggtcgtttgcgaaacctactaccgcgaaaacgacaaaggcggcaaagattggatcaaccccgccgatgtcgagctgacgttcgacgacaaaggccgccctgtttccgccgtcctcaaagccgacggtctgcccgtcgtcatcagcggcacggaaaaaatgtccaaatccaaaaacaacggcgtcgatccgcaagagctgattaacgcctacggcgcggacaccgcccgcctgttcatgatgttcgccgcaccgcccgaacagtccctcgaatggagcgacagcggcgtcgaaggcgcacaccgcttcctgcgtcgtctgtggcgtaccgtttacgaatacctgaaacaaggcgaagcagtcaaagcgttcgcaggcagccaagacggtttgtctaaagaactcaaagacctgcgccacaaactgcacgcgaccactgccaaagtcagcgacgactacggccgccgccagcagttcaacaccgccatcgccgccgtgatggaattgctcaaccaatacgacaaaaccgacaccggcggcgaacaaggccgcgccgtcgcccaagaagtattggaaaccgccgtacgcctgctgtggcccatcgtgccgcacatctgcgaaaccctgtggagcgaattgaacggcgcgaaactgtgggaagcaggctggccgacagttgatgaagccgctttggtcaaatccgaaatcgaagtgatggttcaagtcaacggcaaactacgcggcaaaatcaccgtcgccgccgacgcctccaaagccgacctcgaagccgccgcactcgccaccgaaggcgcggtgaaattcatggaaggcaagcccgcgaagaaaatcatcgtcgtaccgggcagactggtgaacatcgtcgtctaa

SEQ ID NO: 59602 - DNA, 1098 bp, Neisseria meningitidis; identical to SEQ ID NO: 50675

SEQ ID NO: 59603 - DNA, 810 bp, Neisseria meningitidis
atgcacgccctcccccgctacgccgtttttggcaaccccgtcgcccacagcaaatcgccgcaaattcatcaacaatttgcccttcaggaaggcgttgacattgaatacgaacgcatttgcgccgacatcggcggtttcgcgcaggcggtttcgacattttttggaacaggcggttgcggggcaaacgttaccgtaccgttcaaacaggaagcgtttcatctggcggacgagcattccgaccgcgctttggcagcaggtgcggtcaatacgctgattctgttgaaaaacggcaagctgcgtggcgacaataccgacggtatcggtttggccaacgacatcacgcaggtcaaaaacattgccatcgagggcaaaaccattttgcttttgggcgcaggcggcgcggtgcgcggcgtgattccggttttgaaagaacaccgccctgcccgtatcgtcattgccaaccgtacccgcgccaaagccgaggaattggcgcagcttttcggcattgaagccgtcccgatggcggatttaaacggcggttttgatatcatcatcaacggcacgtcgggcggtctaaacggtcagattcccgatattccgcccgatatttttcaaaactgcgcgcttgcctacgatatggtgtacggctgcgcggcaaaaccgtttttggattttgcacgacaatcgggtgcgaaaaaaactgccgacggactgggtatgctagtcggtcaagcggcggcttcctacgccctctggcgcggatttacgcccgatatccgccctgttatcgaatacatgaaagccatgtaa

SEQ ID NO: 59604 - DNA, 1149 bp, Neisseria meningitidis
atgcccctccccctcccctctcccgaagcacggcaattctcgctcaaactgcaaaccctcattgccgaaaaaatcggcaaacacggcaactggattccattttcacgttttatggaattggttttatacgctccgcaatacggctactacaccggcggcagccataaaatcggcaataccggggattttattactgcaccgaccctcacctctctgtttgcacagacactggcacgccaacttcaagaacttctatcccaaacggcgggcaatatctatgaattcggcgcgggaaccggacagcttgccgccgatttgttgggcagcatttcggacggcatcagccgttactatattattgaaatatcgccggagctggcagcacgtcagaaaaacctgattcaagcccgcgcaccggaagcatctcaaaaagttgtccacttgaccgcacttcccgaagcgtttgacggcatcatcatcggcaacgaagtactcgatgccatgcctgtcgaaatcgtccgtaaaaatgaaggcggctcattcgagcatgtcggcgtttgcctagataatgaccgttttacctattcggcacgaccgctgcacgacttacagctatctgccttggcttccctctattttcctcaaacagattatccctacaccagcgaactacatccgcaacaatatgcctttatccgcacccttgcctccagactcgaacacggctgcatgatattcatcgactacggttttgatgcagcgcagtattaccaccctcaacgcaatcaaggtactctgatcggacactaccgacatcacgttatccacaatccttttgacttcatcggattggccgacctgaccgcgcatgtcaactttaccgacattgcccaagccgggacggatgccggattagatttgataggttaccttccccaatcccatttcttattgaacctgggcattaccgagctattggcacagacggggaaaacgaattcggcagcctatatccgtgaagctgctgccgttcagaaactgattgaccagcatgaaatgggcgaactgtttaaagtcatcgcattcggaaaaaatatcggcatcgactgggcaggattccgcttcggcgacatctgccacaaactctaa

SEQ ID NO: 59605 - DNA, 567 bp, Neisseria meningitidis
atgagcatcaagtccgacaaatggatacgccgaatgagcgaagaattcggcatgatcgaccccttcgagccgaaccaaatcaaagaagccgacggcaaacgcatcatctcctacggtacgtccagctacggctacgacatccgctgcgccaacgaatttaaaatcttcaccaacatcaacagcaccatcgtcgatcccaaaaacttcgatcccaaaaacttcgttaccgtcgaagacgactgctgcatcatcccgcccaattccttcgcactggcgcgcacggtcgaatatttccgcatcccgcgcaacgtcctgaccgtctgcttgggcaaatccacctacgcccgctgcggcatcatcgtcaacgttaccccgttcgagccggaatgggaaggctacgttaccctcgagttttccaacaccacccccctgcccgccaaaatctacgcaggcgaaggcgtagcgcaagtcctcttcttcgagagcgacgaagtgtgcgaaacttcatacaaagaccgcaacggcaaatacatgggacaaaccggcgtaaccctgcccaaagcctaa

SEQ ID NO: 59606 - DNA, 132 bp, Neisseria meningitidis; identical to SEQ ID NO: 38518

SEQ ID NO: 59607 - DNA, 1293 bp, Neisseria meningitidis
atgcagttctcagcattcggcgaaaaattcacgcaacacagcggcatcctccaactgatggacgacctcggcgacgcgctcaaaagcgacaagcccgtcaacatgctcggcggcggcaacccggcgcgcattccggaaatcgatcaggcgttcgccgacatattctccaaactggcggcagaacacgccgtcgaaaacatcggcaactactccaatccccaaggcgatgccgtgctgattgacgcgctgaccgccttcctcaaccgcgaatacagctggaatctgaccgccgacaatatcgcgctgaccaacggttcgcaaaacgcgtttttctatcttttcaacctcttcggcggcaaattcaacctttcagacggcacatccgcagaaaaagccattttgttgccgctcgcgcccgaatacatcggctatgccgacgtgcatgtcgaagggcagcacttcgtttccgtcaagcccaaaatcgaaaacgtcgaacacgaaggcgaagcaggcttcttcaaataccgcgtggactttgacgcactggaaaacctgcccgaactcaaagcgggcaaaatcggcgcgatttgctgttcgcgcccgaccaacccgaccggcaatgtgttgaccgacggcgaaatggcgcgtttggacgctttggcgcgtgaacacgggattccgctgattatcgacaacgcctacggaatgccgttccccaacatcatttacagcgacgtaacgctgaattggcatgaaaacatcatcctctgcttcagcctttccaaagtcggcctgccgggcgttcgcaccggcatcatcgtcgccgcgccggaagtggtcaaagccgtcagcagcctgaacgcgattgtgaaccttgcccccacgcgcttcggcgcggccatcgccgccccgctactggaaagcggcgagatgaaacggcttgccgaccaagtcatccggccgttttaccgcaatcaggcgcaaaccgccgtctcgctgctcaagcgcgagctgggcgcgtacccgatgaaaatccacaaacccgaaggcgcgattttcctgtggctctggtttgaaaacctgcccgtttcttcgcaaaccctgtacgaaatgctcaaagccgaaggtacgctgattattccgggcgaacatttcttcgtcggcatcgacacgcaggattacccgcacgcgggcgagtgcatccgcatgagcatcgcgcaggacgctcaaacgctggaaaaaggcattgccgccatcggcaaaaccgtccgaaaactgtacgacaacgtttaa

SEQ ID NO: 59608 - DNA, 294 bp, Neisseria meningitidis; identical to SEQ ID NO: 38053

SEQ ID NO: 59609 - DNA, 1422 bp, Neisseria meningitidis; identical to SEQ ID NO: 38326

SEQ ID NO: 59610 - DNA, 417 bp, Neisseria meningitidis; identical to SEQ ID NO: 51640

SEQ ID NO: 59611 - DNA, 210 bp, Neisseria meningitidis; identical to SEQ ID NO: 39306

SEQ ID NO: 59612 - DNA, 915 bp, Neisseria meningitidis; identical to SEQ ID NO: 51855

SEQ ID NO: 59613 - DNA, 1377 bp, Neisseria meningitidis
atgcacgacaaaacctggtccggacgtttcaacgaacccgtttccgaactcgtcaaacaatacaccgcctccatcagtttcgaccgacggcttgccgaatgggacattcaaggctcgctcgcccacgcgcaaatgttgaaagaaaccggcgtgttggacgaaggcgatttggcagacatccgtcggggtatggcggaaatcctcgaagaaatccgcagcggcaaaatcgaatggtcgctcgatttggaagatgtccatatgaacatcgaacgccgcctgaccgacaaaatcggcgacgcgggcaaacgcctgcacaccggccgcagccgcaacgaccaagtcgccaccgacatccgcctttggctgcgcgaccagattaccgtcatccgaagcctgattcaaagccttcagacggcattgctggatttggcggaacaaaacgccgaaaccgtcatgccaggctttacccacctgcaagtcgcccagcccgtcagcttcggacaccatatgctcgcctacgtcgaaatgctcggacgcgataacgaacggatggcggactgccgccgccgcgtcaaccgtatgccgctcggcgcagccgcccttgccggtacgacttatccgattcggcgcgaaattaccgccaaactgttgggctttgaacaaatctgccaaaactcgctcgatgccgtatccgaccgcgattttgccatcgagttcaccgccgccgcctcgctggttatggttcacctgagccgcctgtctgaagaattgattttgtggatgagtccgcgtttcggctttatcgacatcgccgaccgtttctgcacaggttcgtccatcatgccgcagaagaaaaaccccgacgtgcccgaactcgtgcgcggcaaatccggccgagtcatcggacaccttatcggcttgattaccctgatgaaatcgcagcccttggcgtacaacaaagacaatcaggaagacaaagaacccttgttcgacaccgccgacacgcttatcgacacgttgcggatttacgccgatatgatgcgcggcgtaaccgtcaaacccgacaatatgcgcaccgccgtgatgcagggcttcgctaccgccaccgatttggcagattacttggtaaaaaaaggcatgcctttccgcgatgcccacgaagtcgtcgcccaagccgtgcgccacgccgaccaagcgggtgtcgatttgagcaaactgccgctcgaagtcttacaaggtttcagcgatttgattgccgacgacgtttacggcgtgctgacacccgaaggcagcttaaacgcgcgcaaccacttgggcggtaccgcgcctgaacaagtccgtttccaagtcaaacgctggcgggaaatgttggcttaa

SEQ ID NO: 59614 - DNA, 342 bp, Neisseria meningitidis; identical to SEQ ID NO: 38375

SEQ ID NO: 59615 - DNA, 630 bp, Neisseria meningitidis; identical to SEQ ID NO: 41349

SEQ ID NO: 59616 - DNA, 468 bp, Neisseria meningitidis; identical to SEQ ID NO: 42229

SEQ ID NO: 59617 - DNA, 1131 bp, Neisseria meningitidis
atgattaaaatcagcacccgcttcgatgccggctcggtcgtcgtcaaagacctgaccgatccttccaacatccgcctcgccctgcgtcccgacaacgcctccgattttgcacaatggttctacttccggctgcaaggcgcggcatatcaaaactgcatcatgcattttgaaaacgcggcagaagccgcctacccgaaaggctgggaaggctatcaggcgtgtgcctcatacgaccgccgcaactggttccgcgtaccgacttcctacgaaaacggcgtactgaccgtcaatcatacgccgctgtccaacagcgtgtattacgcctatttcgaaccttactccgaagaacagcatttaaacctcctcggcgacgcgcaaggcagcggcctgtgccgcatcgacgacttgggcagcaccgtgcaagggcgcgacatcaatctgctgaccatcggcaatcaggtcgaaagcgatctgaaaatctggattaccgcccgccagcatccgggcgaaaccatggcggaatggtttgtcgaggggctgctcggcaggctgctcgatccgcaagacccgacagcgcgcaccctgctcgaccgcgccacgttctatatcgtccccaatatgaaccccgacggttcggcactgggcaaccttcgtaccaacgccgccggtgcgaacctcaaccgcgaatgggaaaatccgactttggaaaaaagccccgaagtgttcttcgtgcgcgaaaaaatgctggaaaccggcgtggatttgttcttggacatccacggcgacgaagggctgccctttatctttgttgcaggaactgaaggcgtgccaaactacaatccgcgcatttccgcgttggaaacacagttcaaaaccgcccttttgaacgccagccccgatttccaagacgaatacggttacgaaaaagatgcgcccggtcaggcaaacatgaccttggcaacaaactgggtcggcaaccgtttcaactgccttgcctatacgttggaaatgccgttcaaagacaatgccaacctgcccgacgacgatttcggatggaacggtcaacggtcgttgcgcttgggcgaagccgcgttgtccgccatcctcaacatcatcggcgatttgcgctga

SEQ ID NO: 59618 - DNA, 1311 bp, Neisseria meningitidis
atgagcgtaactgttgaaactttagaaaatctggaacgcaaagtagtgttgtccctgccttggtccgaaatcaacgcagaaaccgataaaaaactgaaacaaacccaacgccgtgcaaaaatcgacggtttccgtccgggtaaagcacctttaaaaatgattgcccaaatgtacggtgcgagcgcacaaaacgacgtgatcaacgagctggtgcaacgccgcttctacgatgttgccgttgcccaagagttgaaagtggcaggcttcccccgttttgaaggcgttgaagaacaagatgataaagaatccctgaaaatcgctgcgattttcgaagtattccccgaagtcgttatcggcgatttgtctgcacaagaagtcgaaaaagtaaccgcttccgtcggcgatgccgaagtggatcaaaccgtagagatcctgcgcaaacaacgcacccgcttcaaccatgtcgaacgcgaagcccaaaacggcgaccgcgtcatcatcgactttgaaggcaaaatcgacggcgaaccttttgccggtggcgcatccaaaaactacgccttcgtattgggcgcaggtcaaatgctgcctgaatttgaagccggcgtagtcggcatgaaggctggcgaaagtaaagacgttaccgtcaatttccctgaagactaccacggtaaagacgttgccggtaaaactgccgtgttcaccattacgctgaacaacgtttccgaagcgactctgcctgaagtcgatgcagattttgcaaaagccttgggtattgcggatggcgacgttgccaaaatgcgcgaagaagtgcagaaaaacgtaagccgcgaagtggaacgccgcgtaaacgaacaaaccaaagaatccgtaatgaacgcgctgctcaaagccgtagagctgaaagcacctgttgctttggtcaatgaagaagccgcacgcttggcaaacgaaatgaaacaaaattttgttaaccaaggtatggctgatgctgccaacttggatctgcctttggatatgttcaaagaacaagccgaacgccgcgtgtctttgggtctgattttggccaaactggttgatgaaaacaaactggaaccgactgaggagcaaatcaaagccgttgtcgccaacttcgcagaaagctacgaagatcctcaagaagtaatcgactggtactacgcagagccttcccgcctgcaagccccgacttctttggcgatagaaagcaacgtcgttgatttcgttttgggtaaagccaaagtaaacgaaaaagctttgtcttttgacgaagtgatgggcgcgcaagcctga

SEQ ID NO: 59619 - DNA, 954 bp, Neisseria meningitidis
atgacacataccgtccacctgcatttagaagaaatcgacaacttggcgttgcagcgtctgtgcggttcttttgacaacaaccttgatttacttgccaaagcactcgatatccacatcagccgccgttttgaacatttcactttcaacggcgcatttgcacacgccggcaaacgcgcactgctcaaactcttggaaacggcgcagacgcgcgacctaaacgacggcgacatcaggcttgccgccgtcgaagcccaaaccgaagatgccggtcatcaagaaaaaaaccatgaccacgcctattatttccgtaccaaacgcggcagcatcggcggcagaacgccacggcagaacggctatatccgcgccctactcaaccacgacatcgtattcggtctcgggccggcaggtacgggcaaaacctatcttgccgtcgccgccgccgtcgatgcgatggaaaaacaccaagtcgaacgcatcattttagtgcggcctgccgtcgaagccggcgagaaactgggcttcctgcccggagacatgacccagaaagtcgatccctaccttcgtccgctttatgatgccctctatgacctgatgggctttgaccgtgtaaccaagctgattgaaaaaggcctgattgaaatcgccccgctcgcctatatgcgcggcaggacgctcaacggcgcatacatcatcctcgacgaagcgcaaaacaccacgcccgaacaaatgaaaatgttcctgacccgcatcggcttcggcgcgaaagccgtcattaccggcgacaccagccaaatcgacctgcccaaaaacatcaaatcgggattaaaagatgcgcgtgagaaactgcacaacgtggaagggctgtatttccacacctttaccggcgaagacgttgtccggcatcctttggtgcaaaaaatcgtcgaagcctacgaatcggcagaacacgactga

SEQ ID NO: 59620 - DNA, 1209 bp, Neisseria meningitidis; identical to SEQ ID NO: 38616

SEQ ID NO: 59621 - DNA, 222 bp, Neisseria meningitidis; identical to SEQ ID NO: 50201

SEQ ID NO: 59622 - DNA, 126 bp, Neisseria meningitidis
atgttacagcttttctatatgagcggcggtggtactgttctaaacattcttttcggcgcgatcgcctttattctgtcattcaaacaaataacaaaactagcaacctcaatcgggaagaaaaaataa

SEQ ID NO: 59623 - DNA, 1311 bp, Neisseria meningitidis; identical to SEQ ID NO: 51606

SEQ ID NO: 59624 - DNA, 972 bp, Neisseria meningitidis; identical to SEQ ID NO: 39558

SEQ ID NO: 59625 - DNA, 423 bp, Neisseria meningitidis
ttgtccgccgtttttattgcaccttacctgacggcatttcacgaacaagaaaaaacattcgaatatgcggaattgaccgttaccgcccccaaccgcagcggacgggcaatcaaactggatgcagacgggcagcattaccggctttcctgctatgggttcgacagtttgtgcacaggcggcaatatcggcagaaccatcagggcagagcaggttaagattgttttaagcgaaacagtcggcaaaggttttttaaacggcgttctgttggaataccgcaacagtggcagtatccataccaataaggagttcgcacatccggaagaccgccttatcaaagtgttggcacaacctgccgttttcagcctgaaactgggtattttgcttttattgcccgccattttcctgcgtttgaaaagaatgtga

SEQ ID NO: 59626 - DNA, 954 bp, Neisseria meningitidis
atgaatcataaaaagatcgttgttttggatgcggatactttgcccggccgggtttttcattttgattttccgcacgagcttgcggtttacggtacgacaggtgcggatgaaacggcagaacgggtgcgcgatgcacatattgtcattactaacaaagtgatgatttctgccgatattattgcggctaatccgcagttggagctgattgccgtcagtgcgaccggcgtgaacaatgtcgatattggggcggcgaaggcggccggtgttgcggtatgcaatgtccgcgcatacggaaacgaatcggttgcggaacacgcctttatgctgatgattgcgttgatgcggaatttgcccgcctatcagcgtgatgttgcggcaggattatgggaaaagtcgccgtttttctgccattacggtgcgccgattcgggatttgaacggcaaaacgctggcggttttcggacgcggcaatatcggacggacgcttgccggatacgcgcaggcattcggtatgggggtggtgtttgccgaacacaaacacgcgtccgctgtgcgtgaaggctatgtttcctttgaagatgcggtacgggctgctgatgtgttgtcgctgcactgtccgctaaacgcccaaactgaaaatatgataggcgaaaacgaattgcggcagatgaagcctggcgcggttttaatcaattgtgggcgcggcgggctggtggatgaaaacgcgctgcttgccgcactcaaatacgggcagatcggcggggctggtgtcgatgttttgacggaggagccgccaaggggcggcaatcccctgctgaatgcacgacttcccaatctgattgttacgccgcataccgcgtgggcgagccgcgaggctttggacaggctgttcgatatattgttggcgaacattcacgcctttgtgaaaggcgaggcgcaaaaccgggtagtttga

SEQ ID NO: 59627 - DNA, 639 bp, Neisseria meningitidis; identical to SEQ ID NO: 50363

SEQ ID NO: 59628 - DNA, 1371 bp, Neisseria meningitidis
atgccgcaaaacactttaaacatcgtcatcctcgccgccggcaaaggcacgcgcatgtattccaaaatgcccaaagtgctgcaccgcatcggcggcaagcccatgctcgggcgcgttatcgacaccgccgccgcgctgaatccgcaaaacatctgcgtcgtcgtcggacacggcaaagagcaagttttggacaccgtcaaacgcgatgtcgtctgggttgaacaaaccgaacaactcggcaccggccacgccgtcaaaaccgccctgccccaccttgccgccgaaggccgcacgctggtgttgtacggcgacgttcctttaattgacgttgaaaccctcaaaaccctgctcgaagccgcaggcaacaaagtcgggctgttgaccgacgtgcccgccgacccgacaggcttggggcgcatcatccgcgacagcaacggcagcgtaaccgccatcgtcgaagaaaaagacgccgataccgcccaaaaagccgtgaaagaaaccaacaccggcatcctcgtcctgcccaacgccaaactggaaaaatggttgaacagcctttccagcaacaatgcccaaggcgaatactatctgaccgacctcatcgccaaagccgttgccgacggcatcaaagtccatcccgtccaagtgcgcacctcctacctcgccgccggcgtgaacaacaaacgccaactcgccgaactcgaacgcatcttccaaaccgaacaggcgcaagaattgctcaaagcaggcgttaccctacgcgacccggcgcgtttcgatttacgaggccgtctgaaacacgggcaggatgtcgtaattgatgtgaactgtatctttgaaggcgaaatcgagctcggcgacaacgtcgaaatcggcgcaaactgcgtcatcaaaaacgccaaaatcggtgcaaacagcaaaatcgcccccttctcccacctcgaaagctgcgaagtcggcgaaaacaaccgaatcggcccatacgcccgcctgcgtccgcaagccaaactggctgacgatgtacacgtcggcaacttcgtcgaaatcaaaaacgccgccatcggcaaaggcaccaaagccaaccacctcacctacatcggcgatgccgaagtcggcagcaaaaccaacttcggcgcaggtacgattattgccaactacgacggcgtgcacaaacacaaaaccgtcatcggcgacgaagtgcgcatcggttcaaactgcgtcttggtctcccccgtcaaaatcggcaacaaagtaaccaccggcgcgggcagcacgattacccgcaatgtcgaagacggcaaactcgccctcgcccgctcccgccaaaccatcatcgacggctgggtgaggcctgaaaaaaacaaacaataa

SEQ ID NO: 59629 - DNA, 603 bp, Neisseria meningitidis
atgaccgacaaaatttctcccgacgcgctgattgaagccgcactgctgacccaaaccgaaccgctgaccgaaaaatctatgcgcgaattgtgtgtgccgccactgtcgcaggacaaactgattgatgtgttggcgcagttgaaaacgcgttggcaggatagggcgttgcaactggtgcatacgcaagagggctggcgttttcagattgttcagacggcattcgagcggctgggcagcctgcaagaacagcgtgcgccgcgctactcccgcgccgtgatggaaacactggcgattatcgcctaccagcagcccgtaacgcgcggcgacatcgagggcatacgcggcgtggcggtgtcgcagaacgtgatgcagaccttgcaggatcgggggtggattgaagtcatcggacatcgggacacattgggaaaacccgcattgtgggcaacaacggcaacgttcctcagcgatttgcgcttggacggtttggaagaacttcctccgctgaccgaactgggcgaactggttttgcccgatttaatggaaatgccgcctacggatgaagaagagccggaagccgtaccgtccgataccctgcccaactga

SEQ ID NO: 59630 - DNA, 531 bp, Neisseria meningitidis
atgaacgcaatccgaactttccaaaaccgcacgcccgaaatccacgaaagctgtatgatagacgaagcgtgcgtcgtcatcggcgaagtgtcgcttgccgaagacgtttctgtgtggccgtgcgccgtgttgcgcggcgatgtgaacagcatcaccgtcggcgcgcgcagcaatatacaggacggcagcgtcctgcacgtttcccacaaaaccgccgccaaacccgaagggtcgccgctggttatcggcgaagacgttaccgtggggcacaaagtgatgctgcacggctgccgtatcggcaaccgcgtcctggtcggcatggggacgacggttctggacgatgccgtgattgaggacgaagtgatgatcggcgcgggcagcctcgtgcctccgcgcaaacgtttggcgggcggctatctttatgtcggttcgccggtcagacaagtgcgcgtgttgaccgatgaggaaaaagcctttttgaagtattccgccgcgcattatgtgaagctgtcgaaacagtacgggatgtga

SEQ ID NO: 59631 - DNA, 495 bp, Neisseria meningitidis
atgaacaacagacattttgccgtcatcgccctgggcagtaatcttgaaaaccctgcccaacaggtacgcgccgcattggacacgctgtcgtcccatcccgatattcggcttcatcaaacctcgtccctgtatgccaccgcccctgtcggctatgacgaccagcccgactttgtcaatgccgtctgcaccgtttccaccgatatggacggcatctcgctgctctccttgctcaaccgtatcgaggcggatttcgggcgcaaacgcagtttccgaaacgcgccgcgcacattggatttggacattatcgactttgacggcatctccagcgacgacccccgcctcaccctgccgcatccgtgcgcacacgaacgcagtttcgtcatacgccctttggcagaaatcctccctgattttgttttaggcaaacacggaaaagttgccgaattgtcaaaacaactgggcaatcaaggtatccgtcttttaccggacaggtaa

SEQ ID NO: 59632 - DNA, 816 bp, Neisseria meningitidis; identical to SEQ ID NO: 51788

SEQ ID NO: 59633 - DNA, 918 bp, Neisseria meningitidis
atgaaaaaaaccaaagtccacctgatttcaggttttctgggaacaggcaaaaccaccgcgctcaaaagtctgatggcgcaaaaagacccgaacgaaaaatgggtcatcatcgtcaacgagttcggcgaaatcggcattgacggcgcggtattgagcgacaacggcatccctgtggcagaaatcgccggcggctgtttgtgttgcaccgccggcccgcaaatgggcgtaaccgtgcagaaaatgctgcgcgacgccaagcccgaccgcctgatgattgaagcaagcggactggcgcacgccgccagtgtcattgatgaactgaaaaccaaaccgctggacagccttttggaaatcggcgcagtctttaccgtcgtcgatccgcgccagttcatcaaccccgattacgcgcagcaggcattgtataaagaccaaatcggcatctgcgacgtattggttgccagcaaaaccgatttatgcacccccgaacagcttgccgaatttcacgacaaagccgcaaaactgttcccgcccaaggctaaagtggtcgaagttcaaaacgcacaactcgatatccaatggcttgacatccccgtcatcgaaaaatcacgctaccgcctcaaagccctgccggacaacacgatgggcttccagtcgcaaggtttcacattccccgccggacgcgatttcgacggtgaaaaattgaccaacttcttcaatgatttgcccaatatgaccgaaggactcgtccgtgccaaaggcgtgttccaagtattgggaacgtgggtgtggctcaactgggtggacgggcaatggggtgcgaaccaagtgtcttggcggcgcgactcgcgttttgaattgattgccaaatcgtttgatgcggatttaatcgaacaaaaactcaaagacgcattggaatag

SEQ ID NO: 59634 - DNA, 702 bp, Neisseria meningitidis
atgactttgaaaacagtagccgttatcggcgcaatggaacaggaaatcgagcttttgcgcgagacgatggaaaatgtcaaagccgtctctttcggcaagtttgccgcttatgaaggcgaattggcgggaaaacgcatggtgcttgcattgagcggcatcggcaaggtcaacgcggcggttgcaacggcttggcttatccatcaattcgcaccggaatgcgtcattaacaccggcagcgcgggcggtttgggcaagggtttgaaagtcggcgatgtcgtggtcggcacagaaatcgcgcaccacgatgtcgatgtaaccgcattcggctatgtttggggacaagtgccgcaactgcccgccgtatttgtttcagacggcctcttggtcggcaaagcaaaacaggcggcggaagtgtttgaaggcgcggcggtagaacaaggcctgattgtcagcggcgaccgcttcgtccacagcagcgaaggcgtggcggaaatccgcaagcacttccccaaagtcaaagcagtggaaatggaagcggcggcgattgcccaaacctgtcatcagttggaaacgcctttcgtcatcatccgcgcggtttccgattcggcggacgaaaaggcagacatcagctttgacgaatttttgaaaacggcggcggcaagttctgcaaaaatggtggcagaaatcgtcaaatctttataa

SEQ ID NO: 59635 - DNA, 615 bp, Neisseria meningitidis; identical to SEQ ID NO: 36682

SEQ ID NO: 59636 - DNA, 549 bp, Neisseria meningitidis; identical to SEQ ID NO: 52975

SEQ ID NO: 59637 - DNA, 2940 bp, Neisseria meningitidis; identical to SEQ ID NO: 43390

SEQ ID NO: 59638 - DNA, 1134 bp, Neisseria meningitidis
atgagcacccccgccctcctcgtcctcgctgacggcagcgtatttcacggcacatcaatcggttacgaaggttcgacttccggcgaagtcgtgttcaatacttcgatgaccggctatcaggaaatcctgaccgacccgtcctactgcaaacaaatcgttaccctcacctacccacacatcggcaacaccggcaccaacgccgaagatgaagaaagccgcagcgtttatgccgccggcctgattatccgcgacctgccgctcttgcacagcaacttccgcgcctccgaaagcctgcacgactatctggtacgcaacaaaaccgtcgccatcgccgacatcgatacccgccgcctgaccacgctgttgcgcgaaaaaggcgcgcaaggcggtgcgattctgaccggtgcggacgccacaatcgaaaaagcgcaagaactcatcgccgcgttcggcagtatggtcggcaaagacttggcaaaagaagtttcctgcacggaaacttacgaatggacggaaggcgaatgggcattgggcaagggtttcgttacccctgacgaacagccttaccacgtcgtcgcctacgatttcggcgtgaaaaccaacatcctgcgtatgctcgcctcgcgcggctgccgcctgaccgtcgtccccgcccaaacgagcgcacaagacgtgttggcactcaatcccgacggcgtgttcctgtccaacggccccggcgaccccgagccttgcacctacgccatcgaagccgtgcaaaaactgatggaaagcggcaaaccgatttttggcatctgcttgggacaccagctcatcagcctcgctatcggcgcgaaaaccctgaaaatgcgcttcagccaccacggtgcgaaccaccctgtgcaagatttggacagcggcaaagtcgtcatcaccagccaaaaccacggttttgccgttgatgccgacaccctgcccgctaacgcacgcattacccacaaatccttgtttgacaacactttgcaaggcatcgagctgaccgacaaacctgtgttctgcttccaaggccaccccgaagccagccccggtccgcaagatgtcggctatttgtttgacaaattcattggcaatatgaaggcggcaaaacgggcataa

SEQ ID NO: 59639 - DNA, 1569 bp, Neisseria meningitidis
atggcaaaaaagaacaataaaactaaaatccaaaagcccgaagctgcattgcagacggacgtggctcaaattacggcgaccggtcgggttatcgccgagcatccgtccaattttattacgccgcaaaagatgcgggccctcttcgaggacgcagaaagcggcgacatccgcgcccaacacgagcttttcgcggacattgaggagcgcgacagcgacatcgcggcaaatatggggacgcgcaaacgcgcgctgctgacgctcaactggcgcgtcgccccgccgcgaaatgcgacgcccgaagaagaaaagctgtccgaccaagcctacgaaatgatggacagcctgcctaccctcgaagacctgattatggatttgatggacgcggtagggcacggattttctgcgttggaggtcgagtgggtattttcagacggcctttacctaccccgaaactttatccaccgcccgcaaagctggttcaaatgggacaaagacaacgggctgctgctgcgtacccgcgaaaatccggaaggcgaagcgttgtggccgctgggctgggtcgttcatacccaaaaatcgcgcagcgtccagcaggcgcgcaacgggcttttccgcacgctttcctggctgtatatgttcaaacactacgccgtccacgattttgccgagtttttggagctgtacggcatgcccatccgtatcggcaaatacggcgcgggcgcaaccaaagaggaaaaaaacaccctgcttcgagcggtggcggaaatcggtcacaacgcggcaggcatcatgccagaaggtatggaaatcgagctgcacaacgctgcaagcggtacgatggcaaccagcaatccgtttttgcagatggccgactggtgcgaaaaatcggcggcgcggctgattttggggcaaacgctaaccagcggtgcggacggaaaatccagcaccaacgcgctgggcaatatccacaacgaggtacgccgcgatttgctggtgtcggacgcaaaacaggtggcgcaaaccatcacaagccaaatcatcggaccgttcctgcaaatcaactatcccaatgccgacccaaaccgcgtgccgaaatttgaatttgacacgcgcgagccgaaagacatcgcggtctttgccgacgctatcccgaaactggtggatgtcggcgtacaaatccccgaaagctgggtgcgcgacaaactggtcattccagatgtgcaggagggtgaggctgtgttggtgcggcaggtaccggacaatccgataaacagaactgcattggcggctttatccgcccacaccgtaccatctaaggctacgggcaggcatcaggaaatattggacggcgcgttggatgacgcgctggttgagcccgatttcaattctcagctcaacccgatggtgcgtcaggcggttgccgcacttaatgcttgcaacagctacgaggaggcagatgccgcactgaatgcgctttatccgaatttggacaacgcgaaactgcgtacctatatgcagcaggccttgtttatcagcgatattttgggacaagaccatgcccgcgcctga

SEQ ID NO: 59640 - DNA, 579 bp, Neisseria meningitidis
atgaaaacttttgccctgatactggccgacggtcaggcgagccgtatgggaggcgaggacaaggggcttgctcttttggggggtaaggcactgatagaccatgtcatcgacagggtcaggccgcaggtcagccatatcgccatcagcaccaaccggaatttggaagaatatgctcgaagaagtccgcatatttttccggacgcacggcagtggcagcatttcggcccgctttcggcattgtgtaccgcagccaacgatttgcagttggcgactgccgactggcttttggttgtgccgtgcgatatgccgtatctgccggacgatttggtggcaaggtttgaaaccgtgtcgaaacgcacaccgttgtgcaatgcgtattatgtggaaacgccgataacgatgcactacaacattatgtatatccgcccgcagattctgcaaagcgcgattccctatctgttttcgggtatgaaaacattaagaagctggttgcagcagcaaagggcgcggtcggtcagattcgagtttgacgggcattttgccgacttgaacacgcaaaccgatttgcaggagggataa

SEQ ID NO: 59641 - DNA, 510 bp, Neisseria meningitidis; identical to SEQ ID NO: 36289

SEQ ID NO: 59642 - DNA, 1386 bp, Neisseria meningitidis
atgatggcaagagacaaccgcatccaaatgtttccgcacgaatggcgcgccagtacgacgctttccggcgtgtacgcgctgcgtatgctgggtatgttcctcgtgctgcccgtattggcggtgtatgccgcctcgctgcccggcgcggaaggcaacaaaacgctggtcgggctggcaatgggcatttacgggctgacacaggctctgctgcaactgcctttgggcatcgcttccgacaagttcgggcgcaagaaaaccatttatgtcgggctgattgtgtttgcagcgggcagcttccttgccgccgccgccgatacgctgcccatgctggtcgccgcacgcgccatacagggtgcgggagcggtcagtgcggcggttaccgcgctgctggcggatttgacgcgcgacggcgtacgtacccgcgcgatggcgatgatcggtttgagtatcggtctgacgttttcggtcagcctcgtcgttgcccctgtgattgccgacgcggtgggcgtacgcggcttgtttctgctgaccggtattttgaccgttgccagtatcggcgtggtggcgtggatgactcccgacccggaggtttccaagctgcacgaagatacgcaggcgcagccttcgcgcataggcgaagttttgaaaaaccgtaggctgctgacgctcgatttcggcattttcgccctgcacgccgcgcaaatggcattgtttaccgcgctgcctttcgcgatgacccagctcggtttggaaaaaatacagcattggaaagtctatctgccctcgaccattacgggcttggtggtgatggttccgctgattatcgtcggcgagacgcgcaacaagctcaaacaggtttttgttttgggtatcgtctgtattgcggcggcgcagctcggtttgctgtccggtatgcgctcggtaggcttgattaccgcttatttggttgtttactttatcggttttaatgtgttggaagcgagcctgccgtctatggtttccaaaatcgcgccgtccgacctgaagggtacggcgatgggcgtgtacaacacgatgcagtcgctcggactgtttgccggcggcgcggcaggcggtttgctgtttcaaaaatacggcttttccggcgtgtttgccttttgcagtatattgatgctgctgtggctggtaattgccgttttatcgcctgcgcccaagcccgtcaaaaacctcagttaccctgtcggcggcgtgtggcaggtcaatcaggaagtgttataccgcgccttgtcggagcttgagggtgtggaagacatcggtttcagtttcgacgggcagaccgtctatctcaaagtgttgcagaagggtttcgatcaggctgccgctgaaaaaatcatcacaggagtttaa

SEQ ID NO: 59643 - DNA, 312 bp, Neisseria meningitidis; identical to SEQ ID NO: 38411

SEQ ID NO: 59644 - DNA, 513 bp, Neisseria meningitidis; identical to SEQ ID NO: 37445

SEQ ID NO: 59645 - DNA, 966 bp, Neisseria meningitidis; identical to SEQ ID NO: 42827

SEQ ID NO: 59646 - DNA, 1305 bp, Neisseria meningitidis; identical to SEQ ID NO: 42210

SEQ ID NO: 59647 - DNA, 1791 bp, Neisseria meningitidis
atggaactgatgactgttttgctgcctttggcggcgttggtgtcgggcgtgttgtttacatggttgctgatgaagggcaggtttcagggcgagtttgccgatttgaacgcgcaactggcggaaaaggcggcaagatgtgattttgtcgaacaggcacacgcagaaattgcatcggaattggccgttttggacgggaaataccgacatttgcaggacgaaaattatgctttgggcaaccgtttttccgcagccgaaaagcagattgcccatttgcaggaaaaagaggcggaatcggttcggctgaagcagtcgtatatcgagttgcaggaaaaggcacagggtttggcggttgaaaacgaacgtttggcaacgcagctcggacaggaacggaaggcgtttgccgaccaatatgccttggaacgccaaatccgccaaagaatcgaaaccgatttggaagaaagccgccaaactgtccgcgacgtgcaaaacgaccttgccgatgtcggcaaccgttttgccgcagccgaaaaacagattgcccatttgcaggaaaaagaggcggaagcggagcggttgaggcagtcgcataccgagttgcaggaaaaggcacagggtttggcggttgaaaacgaacgtttggcaacgcaaatcgaacaggaacgccttgcttctgaagagaagctgtccttactgggcgaggcgcgcaagagcttgagcgatcagtttcaaaatcttgccaacacgattttggaagaaaaaagccgccgttttaccgagcagaaccgcgagcagctccatcaggttttgaacccgctaaacgaacgcatccacggtttcggcgagttggtcaagcaaacctatgataaagaatcgcgcgagcggctgacgttggaaaacgaattgaaacggcttcaaggattgaatgcgcagctgcacagcgaggcaaaggccctgaccaacgcgctgaccggcacgcagaacaaggttcagggtaattggggcgagatgattctggaaacggttttggaaaattccggcctccagaaagggcgcgaatatgtggttcaggcggcatccgtccgaaaagaggaagacggcggcacgcgccgcctccagcccgacgttttggtcaacctgcccgacaacaagcagattgtgattgactccaaggtctcgctgacagcttatgtgcgctacacgcaggcggcggatgcggatacggcggcacgcgaactggcggcacacgttgccagcatccgtgcacacatgaaaggcttgtcgctgaaggattacaccgatttggaaggtgtgaacacattggatttcgtctttatgtttatccctgtcgaaccggcctacctgctggcgttgcagcatgacgcgggattgttccaagagtgtttcgacaaacggattatgctggtcggccccagtacgctgctggcgactttgaggacggtggcgaatatttggcgcaacgaacagcaaaatcagaacgcactggcgattgcggacgaaggcggcaagctgtacgacaagtttgtcggcttcgtacagacgctcgaaagcgtcggcaaaggcatcgatcaggcgcaaagcagttttcagacggcatttaagcaacttgccgaggggcgcgggaatctggtcggccgcgccgagaaactgcgtctgttgggtgtgaaggcaggcaaacagcttcaacgggatttggtcgagcgtgccaacgaacagacggcatttgctttgggcaaaccttcggaacaggaagcggctgacgaagccgaatag

SEQ ID NO: 59648 - DNA, 816 bp, Neisseria meningitidis
atgagaccatatgctactaccatttatcaactttttattttgtttattgggagtgtttttactatgacctcatgtgaacctgtgaatgaaaagacagatcaaaaagcagtaagtgcgcaacaggctaaagaacaaaccagtttcaacaatcccgagccaatgacaggatttgaacatacggttacatttgattttcagggcaccaaaatggttatcccctatggctatcttgcacggtatacgcaagacaatgccacaaaatggctttctgacacgcccgggcaggatgcttactccattaatttgatagagattagcgtctattacaaaaaaaccgaccaaggctgggttcttgagccatacaaccagcaaaacaaagcacactttatccaatttctacgcgacggtttggatagcgtggacgatattgttatccgaaaagatgcgtgtagtttaagcacgactatgggagaaagattgcttacttacggggttaaaaaaatgccatctgcctatcctgaatatgaagcttatgaagataaaagacatattcctgaaaatccatattttcataaactttactatattaaaaaaggagaaaatccggcgattattactcatcggaataatcgaataaaccaaactgaagaagataattatagcactagcgtaggttcctgtattaacggtttcacggtacggtattacccgtttattcgggaaaagcagcagctcacacagcaggagttggtaggttatcaccaacaagtagagcaattggtacagagttttgtaaacaatccaagtaaaaaataa

SEQ ID NO: 59649 - DNA, 1773 bp, Neisseria meningitidis; identical to SEQ ID NO: 44301

SEQ ID NO: 59650 - DNA, 369 bp, Neisseria meningitidis
atgcgtcattacgagatcgtgtttatcgttcatcccgatcaaagcgagcaagtacccgctatggttgaacgttacaaaaccatgattgccgaagcaaacggtaagattcaccgtttggaagactggggtcgccgccagctggcttacccgattaacaaaatccataaagcccattacgttttgatgaacatcgaaaccactcccgaagtggttgaagagctggaaaccgcattccgcttcaatgatgcagtattgcgtcatctgaccatcaaaaccaaacacgccgttaccgaagcatcccctatgttgggtggtgaaaaggctaagaacctgttgagcggtgcgtctgaagaagcggtcgcccaataa

SEQ ID NO: 59651 - DNA, 1098 bp, Neisseria meningitidis; identical to SEQ ID NO: 42648

SEQ ID NO: 59652 - DNA, 786 bp, Neisseria meningitidis; identical to SEQ ID NO: 51588

SEQ ID NO: 59653 - DNA, 1356 bp, Neisseria meningitidis
atgtcggaatatacgcctcaaacagcaaaacaaggtttgcccgcgctggcaaaaagcacgatttggatgctcagtttcggctttctcggcgttcagacggcctttaccctgcaaagctcgcaaatgagccgcatttttcaaacgctaggcgcagacccgcacaatttgggctggtttttcatcctgccgccgctggcggggatgctggtgcagccgattgtcggccattactccgaccgcacttggaagccgcgtttgggcggccgccgtctgccgtatctgctttatggcacgctgattgcggttattgtgatgattttgatgccgaactcgggcagcttcggtttcggctatgcgtcgctggcggctttgtcgttcggcgcgctgatgattgcgctgttggacgtgtcgtcaaatatggcgatgcagccgtttaagatgatggtcggcgacatggtcaacgaggagcagaaaggctacgcctacgggattcaaagtttcttagcgaatacgggcgcggtcgtggcggcgattctgccgtttgtgtttgcgtatatcggtttggcgaacaccgccgagaaaggcgttgtgccgcagaccgtggtcgtggcgttttatgtgggtgcggcgttgctggtgattaccagcgcgttcacgattttcaaagtgaaggaatacgatccggaaacctacgcccgttaccacggcatcgatgtcgccgcgaatcaggaaaaagccaactggttcgaactcttaaaaaccgcgcctaaagcgttttggacggttactctggtacagtttttctgctggttcgccttccaatatatgtggacttactcggcaggcgcgattgcggaaaacgtctggcacaccaccgatgcgtcttccgtaggttatcaggaggcgggcaactggtacggcgttttggcggcggtgcagtcggttgcggcggtgatttgttcgtttgtattggcgaaagtgccgaataaataccataaggcgggttatttcggctgtttggctttgggcgcgctcggctttttctccgttttcttcatcggcaaccaatacgcgctggtgttgtcttataccttaatcggcatcgcttgggcgggcattatcacttatccgctgacgattgtaaccaacgccttgtcgggcaagcatatgggcacttacttgggcctgtttaacggctctatctgtatgcctcaaatcgtcgcttcgctgttgagtttcgtgcttttccctatgctgggcggcttgcaggccactatgttcttggtagggggcgtcgtcctgctgctgggcgcgttttctgtgttcctgattaaagaaacacacggcggggtttga

SEQ ID NO: 59654 - DNA, 852 bp, Neisseria meningitidis
atgaacactttgaaatttaccaaaatgcacggtttgggcaacgattttatggtgattgatgcggtcagtcaggattttacccccgaggacgcgccgattgcggcatgggcggaccgtttccggggcgtgggcttcgaccagcttttggtggtcgggcgttcggaaaccgaaggcgtggatttccgttaccgtattttcaatgccgacggcagcgaggtcgggcaatgcggcaacggagcgcgttgttttgcccgttttgttgcagacaagggtttgaccgataagaaagaaatttgtgttgaaacggcaaatggcgttatttttccgaaattgtccgataacggtatggttacggtcaatatgggcaaaccgaagtttatgccgtctgaaataccgtttgtccccgaatcgggcgagggggatgatgcctgtatttacggggtgcatctcgaatccggcattcagcctgtcagctgcgtcaatatgggcaacccccatgcggtgattgtggtcgatgacgtagaatgcgcgccggtgcgcgaaaccggttcgcttatcgaaccgcacaggcagtttcccgaacgcgtcaacgtcggctttatgcagattgtcagccgaaccgcgattcgtttgcgcgtgttcgagcgcggcgtgggcgaaacccaagcgtgcggtacgggcgcgtgtgcggctgtggtggcgggtatccgtctggggttgttggatgaagggaaaacggtagaggtgattttgccgggcgggactttatatatcgaatgggcctgcggcggcgatgtgatgatgaccggccctgcggaagcggtgtttgaaggcgagttggcgtattcatga

SEQ ID NO: 59655 - DNA, 1419 bp, Neisseria meningitidis
atgtctattaaaaacgccgtaaaattgattgaagaaagcgaagcccgctttgtcgatttgcgctttaccgataccaaaggcaagcagcaccactttaccgtgcctgcgcgcatcgtgttggaagaccccgaagagtggtttgaaaacggtcaggcgtttgacggttcgtctatcggcggctggaaaggcattcaggcttccgatatgcagttgcgtcccgatgcgtctacggccttcgtcgatcctttctatgacgataccaccgttgtttttacctgcgacgtcatcgaccctgccgacggtcagggttacgaccgcgacccgcgctccatcgcacgccgcgccgaggcctatttgaaatcttccggtatcggcgacacggcatacttcggccccgagcctgaattcttcgtcttcgacggcgtagaatttgaaaccgacatgcacaaaacccgttacgaaatcacgtccgaaagcggcgcatgggcaagcggcctgcacatggacggtcaaaacaccggccaccgccctgccgttaaaggcggttacgcgcccgttgctccgattgacgcgggacaagacctgcgctccgcgatggtaaacattttggaagaactcggcatcgaagtcgaagtccaccacagtgaagtcggtaccggcagccaaatggaaatcggcacgcgtttcgccaccttggtcaaacgcgccgaccaaacccaagacatgaaatatgtgattcaaaacgttgcccacaacttcggcaaaacagccacctttatgcccaaaccgattatgggcgacaacggcagcggtatgcacgttcaccaatccatttggaaagacggtcaaaacctgttcgcaggcgacggctatgccggcttgagcgacaccgcgctctactacatcggcggcatcatcaaacacgccaaagccttgaacgcgattaccaatccgtccaccaactcctacaaacgcctcgtgccgcactttgaagcgccgaccaaactggcatactccgccaaaaaccgttccgcttccatccgcattccgtccgtgaacagcagcaaggcgcgccgcatcgaagcgcgtttccccgatccgaccgccaacccgtatttggcatttgccgccctgttgatggcgggtttggacggcattcaaaacaaaatccatccgggcgaccctgccgataaaaacctgtacgatctgccgccggaagaagatgcattggtgccgaccgtttgcgcttctttggaagaagcactggccgccctcaaagccgaccacgaattcctcctgcgcggcggcgtgttcagcaaagactggatcgacagctacatcgctttcaaagaagaagacgtacgccgcatccgcatggcgccgcacccgctggaatttgaaatgtattacagcctgtaa

SEQ ID NO: 59656 - DNA, 492 bp, Neisseria meningitidis; identical to SEQ ID NO: 42417

SEQ ID NO: 59657 - DNA, 990 bp, Neisseria meningitidis; identical to SEQ ID NO: 55944

SEQ ID NO: 59658 - DNA, 1041 bp, Neisseria meningitidis; identical to SEQ ID NO: 53183

SEQ ID NO: 59659 - DNA, 1053 bp, Neisseria meningitidis; identical to SEQ ID NO: 44860

SEQ ID NO: 59660 - DNA, 642 bp, Neisseria meningitidis; identical to SEQ ID NO: 42771

SEQ ID NO: 59661 - DNA, 432 bp, Neisseria meningitidis; identical to SEQ ID NO: 50919

SEQ ID NO: 59662 - DNA, 201 bp, Neisseria meningitidis; identical to SEQ ID NO: 59216

SEQ ID NO: 59663 - DNA, 1236 bp, Neisseria meningitidis
atgactatttcgacaatggcacagacacacgatactcgattacaaaaaactttgctctttcccagtcaacaaggttggaaatctaaaacttttcttaaacctgattcacatattagattagcaaccgtattcagcgggattggtgcggttgaacaggcattccaccgattaaatttaaaccataccattgtttttgcaggagatattgatccatacgttaaaaaaagttatcttggaaactataaattaaatgaagatttttggcataacgacattactcaatttgatgcgagaaagtttagaaatcaagttgatattttagttggaggcagtccttgccaagcattttccatggttggcaaacgtgcaggattagaagatacacgaggaacattattctatgaatttgctcgcgttgtggatgaagtccaaccaaagatatttatttatgaaaatgtaaagggcttgctcaatcatgataatggaaaaacttggaaagttgtaaaaagtgttttttattcacttggttatgacttatatttccaaataatgaatagtaaggattatgggattcctcaacatcgtgagcgtatttttgttgttggctttcatacccctcctataaatggttttcagtttcctgaaaagattgaattagaacatactatgcaagattttttggaggactatactgatagcaaatattttttacgtgaaaagggtgtgaaatttgttaccagttctaaaaatagacaaaaacgttatacacagattaatggagaaattgccttatgccaaaaagcaaatcaacaatttaattggcatggtgattttatttttcaggcagcccgcgaatctgaatttgatgactttatttttgatgtaaataacgttgaggaaaaatattatctttctgaaaaaatcaaaaattatgttttggcaggaggaacaaaaaattttaaaaccagtacggaaactgatttgcctgtagctcgcccattattgcaaactatgcataaaatgcatcgtgccggggttgataattatgttactcataatcgtggacgtattcgtaaattaacacctagggaatgtttgcggctaatgggttttagagatgattttaaaattttagttagtgatactcaaatgtatcgccaagcgggaaacagtattgttgttgatgtattaatcgctatattaaaacaaatggatattacgctttatggagagtaa

SEQ ID NO: 59664 - DNA, 2151 bp, Neisseria meningitidis; identical to SEQ ID NO: 50138

SEQ ID NO: 59665 - DNA, 591 bp, Neisseria meningitidis
ttggtcaaaacggcagacggctacaaagccatcgcccgtatccgagtcggcgaccgcgtctttgccaaggacgaaacaagcggggtaacgggatacaaacccgttaccgcccgatacggcaatccgtaccaagaaaccgtttacattaaagtttcagacggcatcggcaaaacccaaactgtccgcaacatcattgtcaaaccaacaccgctcaaagcctacaatctgaccgttgccgactggcatacttactttgtcaagggcaatcaggcggaaacggaaggggtgtgggttcataatgattgtccgccctataagagaccaaataacgcaacgacaaaagcacaacgagaaagtgtacaaggaaaaccctgcgttgaatacggtaaattagccgaaaaaatgattgccgaccataaaaaaccattagttgtcgagtattatgaaacagggacaattgacaaatctaagatgagagcaattgaatcagtacaaccgcaatgtccgacttgttctgcaaaacaaggggggagattaagccaatattcaaaagaacagaaaaggaaactgagtaatgggaataaaaaatga

SEQ ID NO: 59666 - DNA, 1350 bp, Neisseria meningitidis
atgaaattaccggtgatgtcgcccgaacattcggcgcaacttcaggcgtttgaggcaaaaatcctgtccaatcacgccaaaatcgaggcgtggttccgcacgcagtggagcgtacaccgcccgccgttttacggttcggtcgatatacgcaatgccggttacaaaatttcgtctatcgatatgaatttgttccccggcggcttcaataatctgaatcccaactttatcccgctggcggcggttgccgcgcaagatgcggtgcaacgcgcctgcgaaacggcgaaatccgtattgattattcccgaaaaccacacgcgcaatacgttttacctgcaaaacatttacgccctcggcgagattttgcgttcggcagggtatgaagtgcgcttgggcagcctgaatccggaagtaaccgaaccgaccgaatttgaaactgcattgggcgacaaaatcctgttggaacctttattgcgtacccgcgaccgcgtccatcttgcagacggcttttcgccttgcgtggttttgttgaacaacgatttgtctgccggcattcccgacatcctcaaaggcatcagccaaaccgttttgccgccgttgcacggcggttggacgacgcgccgcaaaacaaatcatttcggcgcgtacaaccaagttaccgccgaatttgccaagttaatcggcatcgacgaatggcaaattaacccttattttgaaaaaatcggcggtttggacttccaagggcgtgaaggcgaagacgcgttggcggaagcggtagaacgtgtgctggcgaaaattcaagccaaatacgacgaatcgggcattaccgacaaacctttcgtcatcgtcaaagccgatgccggcacttacggcatgggcgtgatgagcgtcaaattcgccgacgaagtgcgcggattgaaccgtaaaaaccgcaataaaatggcgaaagtcaaagaaggcttggaagtcagcgaagtgattgtccaagaagggatttatacttatgaaaccttaaacggcgcggtgtgcgaacccgtcgtctatatgatggaccgcttcgtcatcggcggctttttccgcgtacacgaagggcgcggtgcggacgaaaacctcaacgccggcggtatggtgtttgttccgctgtccaacagcatccccaccggcaacggcgacaactcccaagaagctcccgaagcctgcaagcgcgtattcgaacaatgggactcgctgggtatgccgcgctctgaaaaagactgcgacgtggacaacgaacacaaccgcctctacgtttacggcgtaatggcacgcctgtcgcttctggcggcgtccatcgagttggaagaaacggcgtaa

SEQ ID NO: 59667 - DNA, 216 bp, Neisseria meningitidis
gtgtttaagctcggcgtttatacctgtctcggactgtttgccggctgggtgctgctgctgatcgtgcaactctggttttcttttctcgaagcggaattgttcttcaaaatcacactgactatggcggggctgtttgtcatcatcctcgccgccctgctggtattcggccagtatttttccgaaaagaaaatgaaagacgacgggtttatcaactga

SEQ ID NO: 59668 - DNA, 783 bp, Neisseria meningitidis
atggaatcactgactgccataaataaatcgcgcattcggcaggctttccaaaaagcattaaacgattatgaccggcacgccttaatccaacaaaaaatgacgattaatctaatggcgcatttgcaagattatttgccggatatgccattggaaaacgtgttggaattgggctgcggctcaggaatgttgagtgccttgctgcaaaaacagatttcagcgaattattggttatttaatgatttgtgcgatgtgcagccccaactggctgaaaaactgccgcaatcctttgatttttattgcggcgatgcggaaaactttccttttcaacgacaatttgacttaatcgcaagcgcatctgccgtgcaatggtttcatcaacccgacgcttttatcgcccattgcaaaacaggcttgaaagcaaacggattattggcggttgcaacctttggcaaagacaatttaaaagaagcccgccaaattacaaatataggcttaaattacccgactttatcccaatggcagacttggttagccaaagattttgagcttttatggtgtgaggattttaaggtaatactagactttgatacgccgttagatgtactcaaacaccttaaatatacaggcgtaacagccacgaaccaaaaaaattggacaagaaaaaatctcaatggatttattggcgattacttgtcggcgttcagtatgccgtcgggcaaagtgcgcctgacttatcatccgttattttttatcgcgcgctactctgcggcgggcaggcaataa

SEQ ID NO: 59669 - DNA, 3216 bp, Neisseria meningitidis
atgcccaaacgtaccgacctaaaatccatccttatcatcggcgccggccctatcgttatcggtcaggcctgcgaatttgactattcgggcgcacaggcctgcaaagccttgcgtgaagaaggctataaagtcattttggtgaattccaaccccgccacgattatgaccgaccccgaaatggcggatgttacctacatcgagccgattatgtggcagacggtggaaaaaattattgccaaagagcgtcctgacgcgattctgcctaccatgggtggtcagactgcgctgaactgtgcgctggatttggcgcgcaacggcgtgctggcgaaatacaatgtcgagctgatcggcgcgaccgaagacgccatcgacaaagcagaagaccgtggccgctttaaggaggcgatggagaaaatcggcctctcctgcccgaaatcttttgtctgccacacgatgaacgaagctttggcggcgcaagaacaggtcggcttccctaccctgattcgtccttctttcaccatgggcggttcgggcggcggcattgcctacaataaagacgagtttttggcgatttgcgaacgcggtttcgatgcgtcgcccacgcacgagctgttgattgagcagtccgttctcggctggaaagagtacgagatggaagtggtgcgcgataagaacgacaactgcatcatcatctgctcgattgaaaacttcgacccgatgggcgtgcatacaggcgactcgattacggttgcgccggcgcaaacgctgacggacaaggaataccaaatcatgcgcaacgcttcgttggcagtgttgcgtgaaatcggcgtggataccggcggctcgaacgtgcagtttgcggtgaaccctgaaaacggcgagatgattgtgattgagatgaacccgcgcgtgagccgttcgtccgcgctggcttccaaggcgacgggtttcccgattgcgaaggtggcggcgaagctggcggtcggctttacgctggacgagttgcgcaacgacatcaccggcggtcgcacgcccgcgtcgttcgagccttccatcgactatgtcgtgaccaaaatcccgcgttttgcgtttgaaaaattccccgccgcagacgaccgcctgaccacgcagatgaaatcggtgggcgaagtgatggcgatgggccgcaccattcaagaaagtttccaaaaagccctgcgcggcttggaaacgggcttgtgcggcttcaatccgagaagctccgacaaagcggaaatccgccgcgaactggcaaaccccggccccgaacgtatgctgtttgtggcagacgcatgccgcgcgggcttcacgctggaagaaatccacgaaatctgcgccatcgacccttggttcctggcgcaaatcgaagacttgatgaaggaagaaaaagcggtttcagacggcattttgagtgatttggatttcgccgccctacgccgtctgaaacgcaaaggcttctccgacaaacgtttggcacaattgttgaacgtaagcgaaaaagaagttcgcgaacaccgctacgcgctgaagctgcatccggtttacaaacgcgtcgatacctgcgccgccgagttcgccaccgaaaccgcctacctctattccacttacgaagaggaatgcgaagcgcgtccttccgaccgcaaaaaagtgatgattctcggcggcggcccgaaccgcatcggtcagggcatcgagtttgactactgctgcgttcacgccgcgctcgccctgcgcgaatccggttttgaaacgattatggtcaactgcaacccagaaaccgtgtccaccgacttcgacaccagcgaccgcctctatttcgagccgctgacattggaagacgtgttggaaatcgtccgcaccgaaaacccgtggggcgtgattgtgcattacggcggtcaaaccccgctcaaactcgccaacgcgctggttgaaaacggcgtaaacatcatcggcacatccgccgacagcatcgacgccgccgaagaccgcgaacgcttccaaaaagtgttgaacgacttaggtctgcgccaaccgcccaaccgcatcgcccacaacgaagaagaagcactcgtcaaagccgaagaaatcggctatccgctggtcgtgcgcccgtcttatgttttgggcggacgcgcgatgcagattgtccactctgccgaagccttgcaaaaatacatgcgcgaagccgtgcaggtttccgaagacagccccgtgttgctcgatttcttcctcaacaacgcgattgaagtggatgtggactgcgtttcagacggcaaagacgtggttatcggcggcatcatgcagcacgtcgaacaggcgggcatccactccggcgactccggctgctcgctgccgccctactccttaagcgaagaaatccaagacgaaatccgccgccaaaccaaagcgatggcgtacgcgctgggcgtggtcggactgatgaacgtgcagtttgccgtgcaggacggcgtagtgttcgtattggaagtgaacccgcgcgccagccgcaccgtgcccttcgtctccaaagccaccggcgtgccgctcgccaaagtcggcgcgcgctgcatggcaggcatttccctgaaagaacaaggcgtggaaaaagaagttgtccccgatttctatgccgttaaagaagccgtgttcccattcatcaaattcccgggcgtggatacgattttgggaccggaaatgcgctccaccggcgaagtcatgggcgtgggcgcaagtttcggcgaagcctactacaaagcccaactcggcgcgggcgaacgcctcaacccgaccggcaaaatcttcctctccgtgcgcgaagaagacaaagaacgcgtcatcaaaaccgccaaaaacttccaagcattaggctacggcatctgcgccacacgcggcacggcgcaatacctgaccgaacacgggctgattgtgcagaccatcaataaagtccccgaaggccgcccgcacatcggcgacgcgctgaaaaacggcgaaatcgcactggtcgtgaacaccgtttccagcgatccgcaatccgtgtccgacagccacatcatccgccaaagcgcattgcagcaacgcgtgccgcaatacaccaccaccgccggcggcgaagcgatgagcgaaggcgcgaaaagccgagaccatctgggcgtgtacagcgttcaagagttgcacgggcgtttgaaaaaccgcaactga

SEQ ID NO: 59670 - DNA, 225 bp, Neisseria meningitidis
atgaacaagccgtttatcactcaggcgcagttggcactttataaatatcagccgtcaagcaagtattttgggcaatcgatggcggttatagcgcaatctgaatttgttgaatttgcgaagattaataagtctgaaaatgttattgattgtttctcttttttctggaatagaagaattaaacatgatatttggctaatctcattttctgatattcagaaatggtaa

SEQ ID NO: 59671 - DNA, 1542 bp, Neisseria meningitidis
atgaagtttttagaccgtgaggcaagcattgccaagccgggtttcaaccgttggctcgtaccgcccgcagcattggcggtacaccttgccatcgggcagatttacgcctattccgtattcaacgcgccgctgaccaaacttatcggcataaccgaatcggcggccggagattggaagctgacgaccgtaggttggattttcagtatcgcactcgcgatgctgggcgcgtcggccgccctgttcggtacgtggatggaacgggtagggccgcgcaaagccatatttgccgccgcctgctgcttcagcctgggcttcttcgtatccgcattcggcgtgcgtacgcacaacctcttcctgctctatttgggcaacggcgtcatcggcggcgtaggcttgggtttgggctacatcgggccggtttccacactgatgaaatggtttcccgacaagccgggtatggcgaccggtttggcgattatgggtttcggtggcggcgcaatgctggcctcgccgctttccgtatcactgatgaacaccttttcaaacgctgcttcggtcggggttgccgaaaccttcgccgtattgggtctgctttacctcgcactgatgatgttcggcgcgtttaccatccgcgtacctgccgacggctggaaacctgaaggctataccgcgccgaaaacgcaaaacaagctggtcagcagcaatcatgtcaacgtgtcccaagccatgaaaacgccgcagttttggctgttgttctgggtattgtgcctgaacgtaactgccggcatcggcgtattgggtcaggcatccgtgatgattcaggaactcttttccgaaacctccataggcaggcaggcagcagtcggcgcaggtgcggcggcaggcttcgtcagcctcttgagcctgtttaacatgggcggacgctttttgtggtcgagcgtttccgacaaaatcggacgcaaaaacacctacaccatcttcttcgtactcggttcgctgctgtatttcgccgttccctccatcggcgagggcggcagcaaagccctgttcatcatcggcttttgcgtgattatttccatgtacggcggcggatttgccgccattcccgcctacctgaaagacctgttcggcacctatcaggtcggcgcgattcacggacgcatcctgctggcctggtcaaccgccgccgtcatcggcccggtactggtcaattacatacgccaaagccaaatcgacagcggcataccggcggcacaggcatacagcgtaaccatgtacatcatggcgtgcctgctgattatcggtttgttgtgcaacctcgccgtcaaatccgtacacgaaaaacaccacgaaaaagacatcaaaaccgccgcacacagcggcaaccccgatgacgaaaccgccatatccgacgcttaccttgtgggcgaaaaagtttccggcggcggcatatcggtctggtggcgttgggcattggccgtcataccgctcgcctacggcgtggtgatggtctttgtcaaagcactcgaccttttctcctga

SEQ ID NO: 59672 - DNA, 987 bp, Neisseria meningitidis; identical to SEQ ID NO: 42422

SEQ ID NO: 59673 - DNA, 1398 bp, Neisseria meningitidis
atgactgtccgtatcgaacacgatttattgggcgaccgcgagattcccgccgaagtatattggggcatccacaccctgcgcgccattgaaaactttaaaatttccacacaaaaaatttctgacgtgccgcagtttgtccgcagtatggtgatggtgaaaaaggcgacggcacaggcaaacggtaagttgggcgcggtcaagcccgaaatcgccgccgccattgaaaaggcttgcgacgaagttctgctgaacaaccgctgcctcgaccaattcccgtccgatgtgtatcagggcggtgcgggaacttcggttaatatgaacaccaacgaagtcatcgccaacctcgcattggaagccttgggatacgaaaaaggccgctacgacatcgtcaatccgatggatcacgtcaatgccagccaatcgaccaacgatgcctatcccacgggcttccgccttgccgtgtattacagcatcggcgaattgctcgacaaactggccgtcctgaaaaacgcctttgccgccaaagccgaagcgtttaaagacgttttgaaaatgggccgcacccagcttcaagatgccgtgccaatgactacaggacaagaattccaatctttccaagtgttgttggaagaggaaatcctcaacctcgaccgcacgcgccaactgcttttagaagtcaatttgggcgcaacggcaatcggcacgggcgtgaacacgcccaaaggctacgccgaactggtggtcaaaaaactctccgaagtcagcggcttgccttgcaaactgaccgaaaacctgattgaggcgacctccgactgcggcgcatatgtgatggtacacggcgcattgaagcgcacggcggtcaaactctccaaaatctgcaacgacttgcgcctgctctcttccggcccgcgtgccggcttgaaagaaatcaacctgcccgaattacaggccggttcttccattatgcctgccaaagtcaatcccgtgattcccgaagtggtcaaccaagtctgcttcaaagtcatcggcaacgatacgacgattaccttcgccgccgaagccgggcaactgcaattaaacgtgatggagccggtcatcgcccaatgtatgtttgaaacgatttccctcttgggcaatgctgcggtcaacctcgccgaaaaatgcgtcaaaggcattacggtcaaccgcgaaatctgcgagcgttacgttttcaactccatcggtttggtcacttatctgaatccgtacatcggccaccacaacggcgacttggtcggcaaaatctgcgcccagaccggcaaaggcgtacgcgaggttgttttggaacgcggcctgttgagcgaagaagaactcaaccgcatcctctctcctgaaaacctgatgaacccccatctgtaa

SEQ ID NO: 59674 - DNA, 3210 bp, Neisseria meningitidis
atgttttatctgtatcaatccaaccgtcttgaaacgctggcggcactgtttgcccgcattcaaaaagtcaaaccgctgaaatcggttttacagcccgaacagattattgtgcagagtcaggggatgcgccgctacctcaatacctgcctcgcccgcgatttgggcgtggcggcgaatttgtcgttcagcctgcccgccggtctgacgtggaagctgatgaaaaaactgattcccggtattccggaactcagcccgtttgcgcctgaagtgatgcgctggcggctgttggatttgttccgcagcgaggcatttcggaatacggcagaatttgaagatgtgaggaatgtgctgcaagactatctaggcagcggcgaatcggcagattatcagcttgcgggacagcttgcggacatattcgaccaataccttgtctatcgtccgcagtggatagacgcgtggcagcagggcaggatactcagtttgggcgacgatgaaatctggcagtccaaactgtggcgttatcttgatgacggcaggcagagcgcgccgcaccgtgttgcgttgtgggaaaagctgttggaatctttgagcagtgataagctgcccgagcgttatttcgtgttcggcatttccacgatggcgccgatgtatttgcagcttttgcacaagctgtccgaacattgcgatgtgttcgtgtttgcactcaatccgagtgggatgtattggggcaacgtcatcgaagcggcgcaaatcctcaaaggcggcggcgatcccgatttaactcaggcagggcatccgctgctcgcctcattgggcaagcaggggcgcgactttttcgactttttgaacgaaatggaaatagaaggagaaacgccggtatttgaagaaggcgggcgcgatacgcttttgcacgccctgcaaaccgatattcaaaacctgaaaatgccgtctgaaaatgtgggaagcgtcaacacgggcgacggctcgatacgcatcgtctccgcacacagccccttgcgcgaattgcagatactcaaagacaagctgttgaaaattctgcatgaacatcccgattggcagccgcatgatatcgccgtattaaccccgaacatcgaatcctatacgccttttatcgaagccgtgttcggacaggcgcagcccggtgcgcaggcattgccgtattccgtttcagacgtgaaaatcagccgccgacaaccgtttttttatacattggaatgcctgtccgacttgttggaaagccgatttgaagtcgataaagtgctcgcgcttttggaaaccgcgcccgtattgcgccgtttcggactgactgaggacgatttgccgcttttgcacgatatggttgccgatttgaacgttcactggggtttggacggagaaatgcgcggcggcacggatcagctgttcacctggaagcaggcggtagaacgcatgatattgggctggatgctgcccgaaggcggcaacccgatgtggcaggatgtcagcgcgtggtatgccgacgtgaaccaaaccgccctgttcggacgttttgccgccttcctcgaaaccctgacggatattgtacggatatggcggcagcccgcaacggttgatgaatgggtaggacgttgccgaggtttgcttaaaacattgttccaagccgaagccgatgaccaaaaggcagtccaaaacctcgaaaacgaatgggtcaaatggcaggcggaaaccgaattggcgcaattttccggacagttgccgccgcacaccgttatccgccacatccgccgctttctcgacagcgaaagcgaggcaggctttttacgcggcggcatcaccttttgcagtatggtgccgatgcggagcctgccctttaaagtcatctgtctgttgggtttgaacgacggagattttccccgcaataccaaagccgccgtattcgacctgattgctaaacatcccgccaaaggcgaccgcgcccgccgcgacgacgaccgctacctcttcctcgaagccctcatcagcgcgcgtgaaatcctgtacctgtcctacatcgggcgcgacatccgcaaagacgaagaactggctccgtcttctttgttgggcgaactcatcgataccgttgccgctatggcgggcatcggtagccgccaacttgcacaaaactggatagaacagcatccgctgcaagccttctcgcgccgatatttccaagaaggcggacgttcagacggcatattcggcacgcgtaccgactacgccgccgcgctcggacaaacgcccgaaccgccgcaaccctttttcgaccaatccgtagaaaacgccgaacctgttgccgaaatcggacaggacgaatttatccgtttctggcgcaatcccgtcaaagtatggcttcagcagcagcttgcgtggagcgaaccccatatcggcgaagcctgggagcctgccgaacccttcgagccgcaacacgccgatcaaatcgccgaaatctacatcgaagcacggcgcgaaggacgggattttgcccaaaccgccgcccgcatcggggcggaaagcctcctgccgtcgggagagttgggcagactttggcagcaggacttccaaaccgctgccaaacaaatcgacacggcggttttaaacagccccaaactgccaccgctttcatatgccataccgtcggacgggcaaatcctgaaaggcagcttgggcaatctgtaccgctgcggacaagtgttttacgcctacggcaaacccaacgcgccgcaacgtatcgcttttctgctggaacacctgatattttgcgccgttatgccgtctgaagccgaaacgcggcaaacctttatcgtccaatccggagaaaccgaaatattggcggaaatcgcgcaagacagggcattgcagctattgtcggaatggatggcgtttttcaatatcgggcaaaaccgcccgctgccgttttttgccaagacctcgcttgccgctgccgaagcgtttgcccaaaaacaagattgggaagccgccctgaaaaaagcccaaaccgcctattacggcaacaaagtcagcaaagggcagaaagactataccgaagtcgccctcgtgttcggcaacgcaagccaaaacccactcgaacaacccctgtttgaaaacctcgcccgcctgcttgccgacacgtttgccgcagcggaaaaaaaggaagaggccggagcagcctga

SEQ ID NO: 59675 - DNA, 324 bp, Neisseria meningitidis; identical to SEQ ID NO: 37053

SEQ ID NO: 59676 - DNA, 924 bp, Neisseria meningitidis
atggatattgaaaccttccttgcaggggaacgcgccgccggcggataccgttgcggcttcgtggcgattgtcggtcgtccgaacgtgggcaaatcaacgctgatgaaccatctcatcggtcagaaaatcagcatcaccagcaaaaaggcgcagacgacgcgcaaccgcgtaacggggatttataccgacgataccgcgcagttcgtgtttgtcgatacgcccggctttcaaaccgaccaccgcaacgcgctcaacgacaggctgaatcaaaacgttaccgaggcgcttggcggcgtggatgtggtggttttcgtcgtggaagcgatgcgctttaccgatgccgaccgtgtcgtgttgaaacaactgcccaagcacacgccggtcattttagtggtcaacaaaatcgacaaggacaaggcgaaagaccgttacgcgctggaggcgtttgttgcccaagtgcgcgccgaatttgaatttgcggcggcggaggcggtcagtgcgaaacacggattgcggattgccaacctgttggagctgctcaagccgtatctgcccgaaagcgtgccgatgtatcccgaagatatggttacggacaaatcggcgcgttttttagcgatggaaatcgtgcgtgaaaaattgttccgctatttgggcgaggaattgccttatgcgatgaacgtcgaagtggagcagtttgaagaggaagacggtttgaaccgcatctatatcgccgttttggtcgataaggaaagccaaaaggcgattttaatcggcaaaggcggagaacgtttgaagaaaatttccaccgaagcgcggttggatatggaaaaactgtttgataccaaagtatttttgaaggtctgggtcaaagtcaaatccggttgggcggacgacatccgcttcctgcgcgagctgggtttgtag

SEQ ID NO: 59677 - DNA, 507 bp, Neisseria meningitidis; identical to SEQ ID NO: 42171

SEQ ID NO: 59678 - DNA, 2391 bp, Neisseria meningitidis
atgactgaacaaaaacacgaagaatacggcgccgacagcattcaggtgctcgaaggcttggaagcggtacgcaaacgccccggcatgtacatcggcgacacgcaggacggcagcggtctgcaccatatggtgtttgaagtattggacaacgccattgacgaagcactcgccggacattgcgacaaaatcacggtaacgatacacgccgaccattccgtcagcgtcgccgacaacgggcgcggtatgcccaccggcatccacccgaaagaaggacgctccgccgccgaagtcatcatgaccgtattgcacgcgggcggtaaattcgacaacaacagctacaaaatctccggcggcctgcacggcgtgggcgtgtccgtcgtcaacgcgctgtccgactgggtaacgctgaccatctaccgcgacggcaaagaacacttcgtccgcttcgtgcgcggcgaaaccgaagagccgctgaacgttgtcggcgattccgataaaaaaggcacgaccgtgcgcttcctcgccagtacggaaaccttcggcaacgtcgaatacagcttcgacatccttgccaaacgcatccgcgaactttccttcctgaacaacggcgtggacatcgaattgaccgacgagcgcgacggcaaacacgaaagcttcgccctttccggcggcgtggctggattcgtgcaatacatgaaccgcaaaaaaacgcccttgcacgaaaaaatcttctacgcgttcggcgagaaagacggcatgagcgtcgaatgcgcgatgcaatggaacgacagctatcaggaaagcgtgcagtgcttcaccaacaacatccctcagcgcgacggcggtacgcacctgaccgcgttgcgccaagtgatgacgcgcaccatcaacagctacatcgaaaccaacgaagtcgccaaaaaagccaaagtggaaaccgccggcgacgatatgcgcgaaggtttgacctgcgtgttgtccgtcaaactgcccgaccccaaattttcgtcccaaaccaaagacaaactggtttccggcgaaatcggtcccgtcgtcaacgaagtcatcagccaagccctgaccgacttcctcgaagaaaaccctgccgaagccaaaatcatcaccggcaaaatcgtcgatgccgcccgcgcgcgcgaagccgcccgcaaagcccgcgaaatcacccgccgcaaaggcgtgatggacggtttgggcctgccgggcaaactcgccgactgccaagaaaaagaccccgcattgtcagaactttatctggtcgagggcgattctgcaggcggttccgccatgcaggggcgcgaccgcaaattccaagcgattttgccgcttaagggcaagattttgaacgtcgaaaaagcgcgctttgaaaaaatgctcgccagtcaggaagtagccgctttgattaccgcgttgggcgcgggcatcggcaaagaagagttcaaccccgaaaaactgcgttaccaccgcatcatcatcatgaccgatgccgacgtggacggcgcgcacatccgcaccctgcttttgaccttcttctaccgccaaatgcccgaactggtcgagcgcggctacatctatatcgcccagccgcctttgtataaagcgaaatacggcaaacaggaacgttacctcaaggacgagttggaaaaagaccaatggctgctcggtcttgccttggaaaaagccaaaatcgtttcagacggccgcaccatcgaaggctcagaacttgccgacaccgccaaacaattcctgttggcgaaaaccgtcatcgaacaggaaagccgcatcattgacgaactcgtcctgcatgccatgctacatgcttcgccggtcgatctcagcacagcagaaagcgcagaccgctccgttgccgaattgaacggcctcttggacgaaaaagaagtcgcgctcgaacgtatcgaaggccacgaaggacaccagttcatcaaaatcacacgcaagctgcacggcaatgtggtggtgagctacctcgagcctaagttcctcaacagcaaagcctatcaaacccttacccaaaccgccgccgcacttaaaggcatggtcggcaaaggggcgaagctctacaaaggcgacaacgaatacgacatcgacagctttgaaggcgctttggacatcttgatgagcgttgcccaaaaaggtatgtccatccaacgatacaaaggcttgggcgagatgaaccccgaacagctgtgggaaaccacgatggatcccgccgtgcgccgcctgttgaaagtgcgcatcgaagatgccattgccgccgacgaagtattcgttaccctgatgggcgacgaggtcgaaccgcgccgcgcctttatcgaaaacaacgcgctgattgcccaaaatatcgacgcataa

SEQ ID NO: 59679 - DNA, 1581 bp, Neisseria meningitidis
atgtccgtcatcaaacgcgccctgatcagcctgtccgacaaggcaggcgcggtcgaatttgcccaaaccctgaccaagctcggtgtcgaaatcctctccaccggcggcacggcgaaactgcttgccgatgcgggcgttcccgtgattgaagtcgccgactataccggcttccccgaaatgctcgacggccgcgtgaaaacgctgcatccgaaaatccacggcggtattttgggtcggcgcgatttgggcgaacacgtcgccaagatggaagaacacggcatcggcaatatcgaccttgtgtgcgtcaacctttatcccttcgccgccaccatcgccaaaccaaactgcacactggaagacgcgattgaaaacatcgacatcggcggcccgaccatggtgcgttctgccgcaaaaaactggaaacacgtcgccatcgttaccgacaccgccgacttccccgccatcgccgccgaactcgaagccaacaacggcgcgttgagcgacaaaacccgcttcaacctgtcgcgcaaagcgttcagccacaccgcccaatacgacggcatgatttccaactacctgacctcgctttcagacgacatcttgagcggcacgcccgaaatcggtgaattcccgagccagttcaaccaaagctggattaaagtgcaagacatgcgctacggcgaaaacccgcatcagcgcgccgcgttctaccgcgatattgaccccgccgcaggcagcctttccgcctacaaacaactgcaaggcaaagaattgtcttacaacaacatcgccgatgccgatgccgcatgggaagccgtcaaatcctttgacgcgccagcctgcgtgatcgtcaaacacgccaatccgtgcggcgtcgccgttgcagccgatacattgaccgcctacaaactcgcctacgtcaccgacaccaccagcgcgttcggcggcatcatcgccttcaaccgcgaagtggacggcgaaaccgtcaaacagattaccgacaaccagtttatggaagtcttgatggcgccgaagtttaccgccgaagccctcgaaatcgccgccgccaagaaaaacgtgcgcgtattggaagtgccgcttgaggcaggcgcaaaccgcttcgaactcaaacgcgtcggcggcggactgttggtacaaacgcccgacatctgccgcatcagccgcgccgatttgaaagtcgtctccaaacgccaaccgaccgagcaggaatggaacgatttgctgttcgtctggaacgtcgcaaaatacgtcaaatccaacgccatcgtgttcggcaaaggcggacaaacctacggcatcggtgcaggccaaatgagccgcgtggacagcacccgcatcaccgcccgcaaagcgcaggacgccaatttcgacctcaacggcgcgtgtgccgcctccgatgccttcttccccttccgcgacggcgtggatgtgattgccgaacagggcattaaagccatcatccatccggcaggttcgatgcgcgatcaagaagtcttcgacgcggcagacgaacacggcattgcgatggtggtaaccggcatccgccacttccgccattaa

SEQ ID NO: 59680 - DNA, 618 bp, Neisseria meningitidis; identical to SEQ ID NO: 43073

SEQ ID NO: 59681 - DNA, 1035 bp, Neisseria meningitidis
atgagcctgcctgcaatggatgccggtatttatctcgaagaaaccgccccgcgcgccctgatcgaacacaacaatattttggataattcggtcggcgtatatctgcatggttctgccgatgcgatggtgcgggagaataaaatcgtcggcgacgcgactttgcgcgtgaacgagcgcggcaatggcgttaccgtttggaacgcgcccggcgcgcaggtcgtcggcaacgatatttccaaagggcgggacggcattttttccaataccagcacgcacaacacctataaaaacaaccgcttcagcgatttgcgtttcgccgtccactatatgtacaccaacgacagcgaaatcagcggcaatatttccgtgggcaacaatatgggctatgtgctgatgttttccgagcggctcaaagtgtttgacaatatcgccgtcggcagccgcgaccaaggcatcatgctcaactatgtcaactattccgatattcacgacaacattatcaacaaagcgggcaagtgcgtttttgcctacaatgccaactacgataaactgtccgccaatcattttgaaaactgccaaatcggcatacactttaccgccgccatcgaaggcacgtcactgcacgacaattcctttatcaacaacgaaagccaggtcaaatacgtcagcacgcgctttctcgactggagcgagggcggacacggcaactattggagcgacaacagcgcgttcgatttgaacggcgacggcttcggcgacagcgcgtaccggcccaacggcatcatcgaccaaatcatctggcgcgcgcccgtatcgcgtctcttgatgaacagtcccgcaatcagcatcgtcaaatgggcgcaggcgcagtttcccgccgttctgcctggcggcgtggtggacagcaaaccgctgatgaagccttatgcccccaaaattcaaacccgttatcaggcgatgaaggacgagctactcaaagaagtcgaaacgcggcagtcggaatggggcagggcggaaaacggttctttgaactag

SEQ ID NO: 59682 - DNA, 3420 bp, Neisseria meningitidis; identical to SEQ ID NO: 51110

SEQ ID NO: 59683 - DNA, 1224 bp, Neisseria meningitidis
atgtcgggcaatgcctcctctccttcatcttcctccgccatcgggctgatttggttcggcgcggcggtctcgattgccgaaatcagcacgggtacgctgcttgcgcctttgggctggcagcgcggtctggcggctctacttttgggtcatgccgtcggcggcgcgctgttttttgcggcggcgtatatcggcgcactgaccggacgcagctcgatggaaagcgtgcgcctgtcgttcggcaaacgcggttcagtgctgttttccgtggcgaatatgctgcaactggccggctggacggcggtgatgatttacgccggcgcaacggtcagctccgctttgggcaaagtgttgtgggacggcgaatcttttgtctggtgggcattggcaaacggcgcgctgattgtgctgtggctggttttcggcgcacgcaaaacaggcgggctgaaaaccgtttcgatgctgctgatgctgttggcggttctgtggctgagtgccgaagtcttttccacggcaggcagcaccgccgcacaggtttcagacggcatgagcttcggaacggcagtcgagctgtccgccgtgatgccgctttcctggctgccgcttgccgccgactacacgcgccacgcgcgccgcccgtttgcggcaaccctgacagcaacgctcgcctacacgctgaccggctgctggatgtatgccttgggtttggcagcggcgttgttcaccggagaaaccgacgtggcaaaaatcctgctgggcgcaggtttgggtgcggcaggcattttggcggtcgtcctgtcgaccgttaccaccacttttctcgatgcctactccgccggcgtaagtgccaacaatatttccgccaaactttcggaaacacccatcgccgttgccgtcgccgttgtcggcacactgcttgccgtcctcctgcccgttaccgaatatgaaaacttcctgctgcttatcggctcggtatttgcgccgatggcggcggttttgattgccgactttttcgtcttgaaacggcgtgaggagattgaaggctttgactttgccggactggttctgtggctggcgggcttcatcctctaccgcttcctgctctcgtccggctgggaaagcagcatcggtctgaccgcccccgtaatgtctgccgttgccattgccaccgtactggtgcgccttttctttaaaaaaacccaatctttacaaaggaacccgtcatga

SEQ ID NO: 59684 - DNA, 573 bp, Neisseria meningitidis; identical to SEQ ID NO: 53316

SEQ ID NO: 59685 - DNA, 663 bp, Neisseria meningitidis; identical to SEQ ID NO: 53364

SEQ ID NO: 59686 - DNA, 765 bp, Neisseria meningitidis
atgtgttcctgccttgttgtcaaaaataccgttatcggaagcggacgcaccaaaatcgccgtgccgcttgtcgcccgcgatgccgccgtactttccgccgtacttgaccaaatcaaaaacctgcccttcgatatcgtcgagttccgcgccgactttttggaatgcgcgggcagcatcggcgaagtattgcgccacacgcagaccgtccgcgacgcgctgcccgacaagccgctgctgtttacgttcagacggcatggcgaaggcggcgcgttcccgtgttcggacggttattattttgaactgctcgacgcgctgatcgaaagccgcctgcccgacatcatcgacatcgagctgtttgccggcgaaaccgccgtccggcgcgccgtggcggatgctcaaaaaaacggcatcgccgccctgctctgcaatcatgagtttcaccgcacgccgccgcaagaagaaatcgtatgccgtctgaaacagatggaggactgcggcgcggacatctgcaaaattgcggtgatgccgcaaagcgcggaagatgtgctgactttgctttccgccacgctcgaagcgaaacggcttgccgccaaaccggttgttacgatgtcgatggggcagacgggtgcggtcagccgccttgccggacaggtgttcggctcaagcatcacgttcggttcgggaacgcaaaactccgcgccggggcaaatcggcgtatccgccctccgtgcggcactcgactgtctcgaaagcggcgcagactga

SEQ ID NO: 59687 - DNA, 735 bp, Neisseria meningitidis; identical to SEQ ID NO: 40755

SEQ ID NO: 59688 - DNA, 750 bp, Neisseria meningitidis
atgcttatccaggcagttaccattttccccgaaatgttcgacagcattacccgctacggcgtaacgggacgcgcgaacagacagggaatctggcagtttgaagcagtcaatccccgaaagtttgccgacaacagattgggctacatcgacgaccgcccgttcggcggcggcccgggaatgattatgatggctccgccgcttcatgcggcaatagaacacgccaaaacacaatcctcccaagctgcaaaagtcatctacctcagcccccaagggaaaccgctgacacaccaaaaagcggtagaactggcagaacttccgcatctgattctgctgtgcggacggtatgagggcatagacgaaagactgctgcaaagcagcgtcgatgaagaaatcagcatcggagacttcgttgtttccggcggagagcttcccgccatgatgctgatggatgcggtattgaggctcgtacccggcgtattgggcgatatgcagtctgccgaacaggattcgttctcaagcggcattttggactgcccccactacaccaaacccttagaatttcaaggtatggctgttccggaagtattgcgttccggcaatcatggcttgatagcggaatggcggttggaacaatcgctgcgccgcaccttggagcgcagacccgatcttttggaaaagcgcgttttaatcccaaaggaatcccgcctcttagaaaccatccggcaagagcaacgggaaatccaatcataa

SEQ ID NO: 59689 - DNA, 2382 bp, Neisseria meningitidis
ttgttcgaccaccgcaatcaaggcatccgcaccgccaccggttgggtttctgccgatgacggtctgcttgtgcgcgatttgaacggcaacggcatcatcgacaacggcacggaactcttcggcgacaacaccaaactggcagacggttcttttgccaaacacggctatgcagctttggccgaattggattcaaacggcgacaacatcatcaacgcggcagacgccgcattccaaaccctgcgtgtatggcaggatctcaatcaggacggcatttcccaaaccaacgaactccgcacccttgaagaattgggtattcaatctttggatctcgcctataaagatgtaaataaaaatctcggtaacggtaacactttggctcagcaaggcagctataccaaaacagacggtacaaccgcaaaaatgggggatttacttttagcagccgacaatctgcacagccgcttcaaagacaaagtggaactcactgccgaacaggcaaaagccgccaatcttgcgggcattggtcgtctgcgcgatttgcgcgaagctgccgcattgtccggcgatttggccaatatgctgaaagcttattctgccgccgaaactaaagaagcacagttggcattgttagataatttgattcacaaatgggcggaaaccgattcgaactggggcaaaaaatcgccaatgcgactttcaaccgattggacgcaaacggctaatgaaggtattgcactgacaccatcccaagtagcacaactaaaaaagaacgctttagtttccctttctgataaagctaaagcagctattgacgccgcccgcgaccgcattgccgtgcttgatgcctacacggggcaggattccaacacactctattacatgagcgaggaagatgcgcttaatatcgtcaaagtaaccaacgatacatacgaccatctcgccaaaaacatctaccaaaacctgttattccaaacccgtttgcagccatatttgaatcaaatcagtttcaaaatggaaaatgatacgttcactttggattttagtggtcttgttcaagcatttaaccatgtcaaagaaactaatccgcaaaaagcttttgtggatttggccgagatgcttgcatatggcgaacttcgttcttggtatgaaggtcgaagactaatggccgattatgtggaggaggcaaaaaaagcaggtaaatttgaagattaccagaaagtgttgggtcaggagaccgttgcattattagctaaaacatcgggtacgcaagcagatgatatcctgcaaaatgtaggctttggtcataataaaaatgtttctttatatggtaatgacggtaacgacactctgatcggcggtgccggtaatgattacttggagggcggcagcggttcggatacttatgtcttcggcaaaggcttcggtcaggatacggtctataattacgactacgctaccggacgcaaagacatcatccgctttaccgacggtattacagccgatatgctgacttttacccgagagggcaaccatcttcttatcaaggcaaaagacgacagtggacaagtgactgttcagtcctatttccagaacgatggctcaggtgcttaccgtatcgatgagattcatttcgataacggcaaagtactggatgttgccactgtcaaagaactggtacagcaatccaccgacggttcggacagattgtatgcctaccaatccggaaataccttaaatggcggattgggcgatgactatctgtacggtgccgacggggatgacctgctgaatggtgatgcaggcaacgacagtatctacagtggcaatggcaatgatacgctcaatggaggagaaggcaacgacgccctgtacggctataatggtaacgatgtactgaatggtggcgaaggcaatgatcatttgaacggcgaagacggtaacgacactctgatcggcggtgccggtaatgattacttggagggcggcagcggttcggatacttatgtcttcggcaaaggcttcggtcaggatacggtctataattaccatgtggataaaaactctgacactatgcactttaaaggatttaaagcagcagatgttcattttatccgttccggaagtgatttggtgcttagcgcttctgaacaagacaacgtacgtatttccggattcttctatggtgaaaaccatcgtgtagatacatttgtctttgatgatgcagctatcagtaatccagattttgccaagtatattaatgctggcaataatttggtacagtctatgtctgtgttcggttctaatactgctgcgacaggaggaaatgtggatgccaatacacaatccgtacagcagccgttattggtaacgccatctgcataa

SEQ ID NO: 59690 - DNA, 369 bp, Neisseria meningitidis; identical to SEQ ID NO: 52043

SEQ ID NO: 59691 - DNA, 1512 bp, Neisseria meningitidis
atgagcgaacaaaaccatccgcaaaccgagccgcagttggacgaaaaccaaatcatcgccctgcgccgcgaaaaactgcacaacatccgccaacagcgcaacgcctatcccaacgacttcaaacgcgacagcttcgccgccgatttgcacgcccaatacggcgaaatcggcaaagaagaactcgatccgcaaggcattcccgtcaaagtggccggccgcatgatgctgaagcgtcaaatgggcaaggcgagctttgccactattcaagacgtgtccggacaaatccagctttatctgaacaacaaaggcgtgagccaagaagttttggacgacttcaaccattgggatttgggcgacatcgtcggcgcggaaggcactttgttcaaaaccaaccacggcgaactgaccgtacgcgtgtccggcatccgcctgctgtccaaatccctgcgtccgctgcccgacaaacacaaaggtttgagcgatcaggaaaccaaataccgccaacgctatgtcgatttgattgccaacgaagaatcgcgcaatacctttatcaaacgcagccaaatcatccaatccgtgcgtaattttatggtgggcgagcattatctcgaagtcgaaaccccgatgatgcacccgattcccggcggcgcgacggcaaaacccttcgttactcatcacaatgccttagatattccgctttacctgcgtatcgcgcctgagctgtatttgaaacgcctggttgtcggcggcttggaacgcgtgtttgaaatcaaccgcagcttccgcaacgaaggcatgtccgtgcgccacaaccccgaatttacgatgattgaattttacgaagccttctccgactacgaacgtatgatgcagatggcggaagacatcatccgcaacgcatcgcgcacagtaaacggtacggcaaacatcacttacaatggcaaagaagtcgatttggaaagcccgttcgagcgtctgaccatcctcgaagccatcaaaaaatacaatccgcactacaccgacgagcagttgaacgatacggaatggctgaaaaaagaaatcgtcaaacacggtgaaagcctgccgccgtccccgggcatcggcagcctgcaactcgcgctgtttgaaggttgcgccgagggcaagctgtggaacccgacctttattgtcgattacccggtcgaagtttccccgttggcacgcgcttcggatacgaaacaaggtctgaccgaacgcttcgagcttttcgttgtcggccgcgaactggcaaacggctattccgagttgaacgaccccgaagaccaagccgaacgcttcaaagcgcaagtggcgcaaaaagacgcgggcgacgacgaagcgatgcactacgatgccgactacatccgcgcgatggaattcggtttgccgccgaccggcggttgcggcatcggcatcgaccgcttagtgatgctgctgaccgattcgcaaaccatccgcgatgtgattctgtttccgcagatgcgccccgagtaa

SEQ ID NO: 59692 - DNA, 1764 bp, Neisseria meningitidis; identical to SEQ ID NO: 50856

SEQ ID NO: 59693 - DNA, 711 bp, Neisseria meningitidis
atgaatgcagccatcgaacacgtccaagccgtcgccttcgatttggacggcacactgtgcgattccgtccccgaccttgccgccgccgcagaagcgatgttggaacaactcggtatgaaaccgctgcccgccaaagtggtcgaaagctatgtgggcgacggcatcggcaaactggttcaccgcgtcctctccaacgaccgcgaccgcgaagccgattccgaactgtgggaaaaaggtttcgtatcctatatgaaatactaccgcgaccatttgagtgtcttcacccgcccctatcccgaaaccgaagccgggctggcattgctcaaatctttgggcatcccgctggcagtcattaccaataaaaacgaaatccttgccgccgaactgttgaaacagctcggacttgccgactacttcagcctgatactcggcggcgacagcctgcccgaaaaaaaacccagccccctgccgctgcggcacgccgccgaagttttgggtatcgatgttgcaaacatggttatggtcggcgactcgcgcaacgacatcatcgccgccaaagccgccggttgcctgagtgtcggcgttaccttcggttacggcgatatgacgctgctctcgcaagacgatgcgacccgccccgactggattatcggctcgctgcccgaaatttacgaaaacctgcaaccgcagaaaaataaagacgaagaataa

SEQ ID NO: 59694 - DNA, 921 bp, Neisseria meningitidis; identical to SEQ ID NO: 50268

SEQ ID NO: 59695 - DNA, 1134 bp, Neisseria meningitidis; identical to SEQ ID NO: 43834

SEQ ID NO: 59696 - DNA, 2838 bp, Neisseria meningitidis
atgttagacaaatacaatccagccgaaatcgaatccaaacattatcaaaactgggaagagcagggctatttccaacctgatatggatttgaccaaaccgtctttctccatccaactgccgccgcccaatgtaaccggcacgctgcacatgggtcatgccttcaaccaaaccattatggacggcctgacccgctactaccgtatgaaaggctgcaacaccgcctggattccgggcaccgaccacgcgggcatcgccacgcaaatcgtggtcgagcgtcagcttgccgcgcaaaacgtgtcccgtcatgacttgggtcgtgaaaaattcttggaaaaagtgtgggaatggaaagaagtttccggcggcacgattacgcagcagatgcgccgtgtgggctgttctgccgactggacgcgcgagtatttcacaatggacgatgtacgcgccgaaaccgtgaccgaagtgttcgtacgcctgtatgaacagggcttgatttatcgcggcaaacgcttggtaaactgggatccagtgctcggtacggcggtgtcggatttggaagtagaaagcgtggaagaacaaggctctatgtggcacatccgctatccgctggcggacaatcctgccgaagccgtcatcgtcgccaccacccgtcccgaaacgctgttgggcgacgtggccgttgccgtcaatcccgaagacgaacgttatacccatttgattggcaaggaattaatcctgccgctgaccggtcgtaccattcccgtgattgtcgacgaatacgttgaaaaagatttcggcacaggctgcgtgaaaatcacgcctgcacatgacttcaacgactacgaagtcggcaaacgtcacgacacgcgcctgattaacgtgttcgatttggaagccaaagtgttggcaaacgccgaagtgttcaacttcaaaggcgaagcgcaaccaggttttgccctgcctgaaaaatacgctggcttggaccgctttgccgcgcgcaaacaaatggttgccgacttacaggaacaaggcttgttggtcgaaatcaaaccgcacacgctgatgacgccgaaaggcgaccgcacaggttcggtgattgagccgatgctgaccagccaatggtttgtcgctatgtccgccacgccaaacggcggcgagcctgacagcgaattcaaaggcttgagcctcgccgacaaagccaaaaaagccgtcgacagcggcgcggtacgctttatccctgaaaactgggtcaatacctacaaccaatggatgaacaacatccaagactggtgtatttcgcgccaactgtggtgggggcatcaaatccccgcgtggtacgacgaaacaggcaatgtgtacgtcgcccgcaatcaggctgaagccgaaaaacaagccggcaaaacaggcttgacccgcgaagaagacgtattggacacttggttctcctccgcgctcgtgccgttttccacgctcggctggccgtctgaaaccgacgaactcaaagccttcctgccgtccaacgtcttggtaaccggctacgaaatcatcttcttctgggtggcgcgcatgattatgatgaccacccactttaccggcaaagtaccgtttaaagacgtgtacatccacggcatcgtgcgcgaccacgaaggcaaaaaaatgtccaaatccgaaggcaacgtcatcgatcctgtggatttgattgacggcatcggcttggacaagctgctggtaaaacgtaccaccggcctgcgcaaacccgaaaccgcgccgaaagtggaagaagcctcgagaaaactcttccccgaaggcattccgagtatgggcgcggacgctttgcgcttcaccatggcgagctacgccagcttggggcgcagcgtgaacttcgacttcaaacgcgccgaaggctaccgcaacttctgcaacaaaatctggaacgccaccaacttcgtcttgatgaacaccgaaaaccaagactgcggctacggcgcaaccgccactgagccgcgcggctattccttccccgatatgtggattgtagaccgtctgaatcagaccatcgagcaagtaacgcaagcctacgaaacctaccgctttgatttggcagcggaaaccctgtacagcttcatgtggaacgactattgcgactggtatttagaacttgccaaagtgcagcttcaaaccggctgcgccagccgccaacgcgccacacgccataccttattgcgcgtactcgaagccgccctgcgcctgctgcacccgattatcccgttcatcaccgaagaactgtggcaaaccgtcgctcctatgtgcgacgcgaaaaccgccgacagcgtcatgctcgcccgcttccccgaagccgacagcggcgagattgttcagacggcattcgagcaaatgaccgtgttgcaggatttgattggcgcagtccgcaacctgcgcggcgaaatgggcatccagcccaacgtaaaagccccgctgtttgtcgaaagcacggacgacttggcggactacctcaaatacctgccgatgatgacccgcctgaccgaagcacagcaagtcgccaccctgcccgaaagcgaagacgcgcccgtcgccgtctgcaacggcgcgcgcctgatgctgaaagtcgagatcgacaaggccgccgagaccgcccgcttgggcaaagaagccgagaagctgcaaaaagccttggacaaactcaatgccaaactctccaaacccggctacaccgaaaaagcccccgcgcatctggtggaaaaagacaaagccgatttggcggaattggaagacaaaatggcgaaagttcaaacgcagttggcgaagttgaaagactga

SEQ ID NO: 59697 - DNA, 1152 bp, Neisseria meningitidis
atgcagacatggcagcttccggaacatatcgccgacgtactgcccacgaacgcgcggcagcttgaaagcgcgagggagcagttgttggcactgttccgcgtacacggttatgaactggtacagcctccgctgatggagtacgcacattccctgctgacgcatatcgatgcggggctttccctgaaaaccattttggtaacggacaggctcagcggcaggcagttgggcatacgcgccgacatcacgccgcaggtggcgcgtatcgatgcccatcttttatccgccaaccaagggattaaccggttgtgttatgccggtccggtgttgcacgcgcagtccgacggtctgctgaatatgcgcgaacccttgcaggcaggggcggaaatgtacggttttgccgacatccgtggcgacatcgagctgatagacctgatgctgaaaagcatgaaaattgccgatatgggcaaagtgctgctttcgctggggcatatcggcatatttcgcgccttgtccgatgcggcgcatttggatgcggggcagtctgcaacgctgcttgccttgatgcaggataaagataccgagacggtcgaagcgcaggtcaaggcttggaagctggacggtatgtgggcaaaagcattctcgctgctgccgcgcctgtacggcgggcgtgaagtgttgtccgacgcgcgcggacggttgccggatttgtcggcggtcggcggcgcgttgggcgaattgcaggcggtgtgcgacgcattccccgattgtgaaatccatatcgacttgtccgagctgcgcgtcgacaattaccacacgggcttgctgtatgccgcctatgccgccgatttccacgacgcggtcgcgcgcggcgggcgttatgacggattgggcggatatttcggcagggcgcgcccggcaacgggattcagtttcgacttgcgcagctttatcgggcgtttgcccgccatcgaacggcagcccgccgtgttggtcgatgcggaagatgccgaagcggcgcacgaagcggtcgaagccttgcgtgaacaagggcagtgtgtcgtaatcgattacggtatcggacacaatgtttcggaagagcttgcaggccgtctgaaaaagacggacggcgtttggcaggtcgtgaaacgctaa

SEQ ID NO: 59698 - DNA, 957 bp, Neisseria meningitidis; identical to SEQ ID NO: 55310

SEQ ID NO: 59699 - DNA, 567 bp, Neisseria meningitidis
ttgttattgcccttcgccacgctggcattgtgcaccaacgcttttgccgccccgcccagcgacgcgtcgttggcgcgttggctggatacgcagaattttgaccgggatatagaaaaaaatatgattgagggctttaatgccggatttaaaccgtatgcggacaaagcccttgccgaaatgccggaagcgaaaaaagatcaggcggcaaaagcctttaaccgctatcgtgagaatgttttgaaagatttgattacgcccgaagtgaaacaggctgtccgcaatactttattgaagaatgcccgtgagatatacacgcaagaagaaattgacggcatgattgccttttacggttcgcctgtcggtcagtccgtcgttgccaaaaatccgcgcttaatcaagaaatcgatgagtgaaatagcagtatcttggactgcattgtcagggaaaatcgcgcgacatcatctgcccgcgtttacggaagagttgcggcgcatcatctgcggcggtaaaaatcccgatgcgggctgtaaacaagccggacaggttgggaaaaggcatcagaaataa

SEQ ID NO: 59700 - DNA, 855 bp, Neisseria meningitidis
atgtcggcacaactgatcaatggtaaagaagtttcgcaaaaacgcctgcaggcggttgccgaagcggtggcgcaacgccaacaggacaatctgcacacgccttgcctggccgtggttttggtcggtggcgaccctgccagcgcggtttatgtccgcaacaagaaaactgcctgccaaaaatgcggcatcaaatcactgtcttacgagctgcccgaatcaacatcgcaggaagaactgctggcactggtcgaccgcctgaatgccgattccgaagtggacggtattctggttcagctgccactgccgaagcacctcgacagccaggcggttttggaacgtatttcgccggataaggacgtggacggcttccatccttacaatgtcggcaggcttgcagtcaaaatgccgctaatgcgcccgtgtacgcccaagggcgtgatgacgcttttggaagcttacggcattgatccgaaggggaaaaaagcggtcgtggtcggcgcgtcgaatatcgtcggccgcccgcaggcgttggaattgctgctggcgcgcgcaacggtaacggtctgccacagcgcaaccgaaaatctggcagacgaggttgccggagccgatattttggtggtcggcgtgggcattccgaactttgtcaaaggcgaatggatcaaacccggcgcggtcgttatcgatgtgggcatcaaccgtttggacgacggcagcctgtgcggcgacgtggaatttgaaacggcaaaagaacgggcggcgatgattacgcccgttcccggcggcgtgggtccgatgacgattgccacattgatggaaaacaccctgcacgcggcttcactgcacgatgcttga

SEQ ID NO: 59701 - DNA, 585 bp, Neisseria meningitidis; identical to SEQ ID NO: 53237

SEQ ID NO: 59702 - DNA, 1569 bp, Neisseria meningitidis
atgaaacaccgtactttcttttccctttgcgccaagttcggctgcctgcttgcgctgggtgcttgttcgcccaaaatcgtcgatgccggagccgcgaccgtgccgcacactttatccactttgaaaaccgcagacaaccgccccgccagtgtttacttgaaaaaagacaaaccgacgctgattaaattttgggcgagctggtgtcctttgtgtctgtccgaattgggacagaccgaaaaatgggcgcaagatgcaaaattcagctccgccaacctgattaccgtcgcctccccgggctttttgcacgagaaaaaagacggcgacttccaaaaatggtatgccggtttgaattatcccaagctgcccgtcgtaaccgacaacggcggcacgatcgcccaaagcctgaatatcagcgtttacccctcgtgggcgttaatcggtaaagacggcgacgtgcagcgcatcgtcaaaggcagcatcaacgaagcgcaggcgttggcgttaatccgcgacccgaatgccgatttgggcagcttgaaacattcgttctacaaacccgacactcagaaaaaggattcaaaaatcatgaacacgcgcaccatttacctcgccggcggctgcttctggggcttggaagcctatttccaacgcatcgacggcgtggttgacgcggtatccggctacgccaacggcaacacgaaaaatccgagctatgaagacgtgtcctaccgccatacgggccacgccgaaaccgtcaaagtgacctacgatgccgacaaactcagcctagacgacatcctgcaatatttcttccgcgtcgttgatccgaccagcctcaacaaacagggcaacgacaccggtacgcaataccgcagcggcgtgtactacaccgaccccgccgaaaaagccgtcatcgccgccgccctcaaacgcgagcagcaaaaataccaactgcccctcgttgttgaaaacgagccgctgaaaaacttctacgatgccgaggaataccatcaggactacttgattaaaaaccccaacggctactgccacatcgacatccgcaaagctgacgaaccgctgccgggcaaaaccaagaccgccccgcaaggcaaaggcttcgacgcggcaacgtataaaaaaccgagtgacgccgaactcaaacgcaccctgaccgaagagcaataccaagttacccaaaacagcgcgaccgaatatgccttcagccacgaatacgaccatttgttcaaacccggcatttatgtggacgttgtcagcggcgaacctttgttcagctccgccgacaaatatgattccggctgcggctggccgagcttcacgcgcccgattgatgcaaaatccgttaccgaacacgatgatttcagctacaacatgcgccgcaccgaagtgcgcagccacgccgccgactcgcatttgggacacgtcttccccgacggcccgcgcgacaaaggcggactgcgctactgcatcaacggcgcgagcttgaaattcatcccgctggaacaaatggacgcggcaggctatggcgcgttgaaaggtaaagtgaaataa

SEQ ID NO: 59703 - DNA, 423 bp, Neisseria meningitidis; identical to SEQ ID NO: 38711

SEQ ID NO: 59704 - DNA, 1977 bp, Neisseria meningitidis
atgtcccgaatcgccgccctgcccgaccatcttgtcaaccaaatcgccgccggcgaagtggtcgaacgccctgccaacgccttgaaagaaatcgttgaaaacagtatcgatgcaggcgcaacggcgattgaagtcgagctggcgggcggcggcatccgcctgattcgcgtcagcgacaacggcggcggcatccaccccgacgacatcgaacttgcgctccaccgccacgccaccagcaaaatcaaaaccttaaacgatttggaacacgtcgccagtatgggctttcgcggcgaaggtttggcaagcatcgcctccgtcagccgcctgaccctgaccagccgtcagaacgacagttcgcacgcgacccaagtcaaagccgaagacggcaaactcagcagccccaccgccgccgcccaccccgtcggcaccaccatcgaagccgccgaactcttcttcaacacccccgcacggcgcaagttcctcaaatccgaaaacaccgaatacgcccactgcgccaccatgctcgaacgcctcgcgctggcgcatccgcacattgccttctcgctcaaacgcgacggcaaacaagtgttcaaactccctgcacaaagcctgcatgaacggattgccgccattgtcggcgaagactttcagacggcatcattgggaatcgacagcggcaacggcgcgctgcggctctatggtgcgattgccaaaccgactttcgccaaaggtaaaaccgacaaacaatactgcttcgtcaaccatcgcttcgtgcgcgacaaagtgatgctccacgccgtcaagcaggcataccgcgacgtattgcacaacgcactcactcccgccttcgtcctctttctcgacctgccgcccgaagccgtggatgtcaacgtccacccgaccaaaaccgaaatccgcttccgcgacagtcagcaggtgcaccaacttgtgttccacacgctcaacaaagcccttgccgacacacgcgccaacctgaccgaaagcgtcggcaacgcaggcgaagtgttgcatgacattaccggcgttgtctccaccccaatgccgtctgaaaacgacagcgaaaatctgtttgatagcgtatccaactacccgacaggcaacaaatcagatacacacaatgcctttggttcatcaggcaaaaccgcgcccatgccctatcagtccgcatatgcgccgcaacaacgcagcctgtccctgcgcgaaagccgcgcggcaatgaatacttacgccgaactttacaaaaaaaccgacgacatcgaccttgagttaagccgattcgagcaggcacgtttcggcaatatgccgtctgaaacgcctgctccccaaacagatacgccgctttcagacggcatcccgtcccaatccgaactgccgccgctcggttttgccattgcccaattacttggcatctacattcttgcccaagccgaagacagcctgttgctcatcgatatgcacgccgccgccgaacgcgtcaactacgaaaaaatgaaacgccaacgtcaggaaaacggcaacctgcaaagccaacgcctgcttattcccgtaacctttgccgcgtcccacgaagaatgcgccgcccttgccgattatgccgaaacgctggcaggcttcgggctggaattatccgatatgggcggcaacaccctcgccgtccgtgcagttcccgccatgctcggcaaagccgatgtcgtctcgctcgccaaagacgtattaaacgaactcgcccaagtcggcagcagccaaaccatcgaggaacacgaaaaccgcatcctcgccacgatgtcctgccacggctcgatccgcgccggccgccggcttaccctgccggaaatgaacgcgctcctgcgcgatatggaaaacacaccgcgcagcaaccaatgcaaccacggccgtccgacttgggtcaaactgactttgaaagaattggacgcactgttcttgcgcggacagtaa

SEQ ID NO: 59705 - DNA, 312 bp, Neisseria meningitidis; identical to SEQ ID NO: 37456

SEQ ID NO: 59706 - DNA, 492 bp, Neisseria meningitidis; identical to SEQ ID NO: 50230

SEQ ID NO: 59707 - DNA, 201 bp, Neisseria meningitidis
  misc_feature 178, 179, 180, 181, 182: 'n' is a, c, g or t
atgaaaaagtctttgattgctttatgtgttgcccattgtgcaaagttgaaaaacgattttggcgtaccaccgttacctgaaatcaaaatcacgccaagccctgttcgggtaggctctttgaaacaacatccgagcctgcgcttgggtaaatcaggcgtggcggctgctaaacgtgcgnnnnncacacacttaattaattaa

SEQ ID NO: 59708 - DNA, 426 bp, Neisseria meningitidis; identical to SEQ ID NO: 36185

SEQ ID NO: 59709 - DNA, 483 bp, Neisseria meningitidis
atgaaatacttgaatcttgccgcaatcacccttgccgccacatttgccgcacataccgcctcggcagacgaactggccggatggaaagacaacaccccgcaaagcctgcaatcactcaaagcccccgtacgcatcgtcaacctttgggcaacctggtgcggtccgtgccgaaaagagatgcctgccatgtccaaatggtacaaagcgcagaaaaaaggcagcgtcgatatggtcggcatcgcgctcgacacatccgacaatatcggcaacttcctcaaacaaactcctgtttcctacccgatttggcgttacaccggggcgaacagccgaaactttatgaaaacctacggaaacactgtcggcgtactgccctttaccgtcgtcgaagcaccgaaatgcggatacaggcagaccattacaggggaggcaaacgaaaaaagcctgaccgacgccgtcaaactcgcccattcaaaatgccgttaa

SEQ ID NO: 59710 - DNA, 279 bp, Neisseria meningitidis
atgccggccgtcgatttgatccgcgaacgcctgcagacgctcgatccgctggtgttggaaatcggcgatgagagccatctgcacaaaggacacgcgggcaataccggcggcggacattatgccgttttggtcgttagcggccgttttgaaggcgtaagccgcctgaaccgccaaaaaacggtcaaatcgctgctcaaagatttgttttcaggcggcatgattcacgcgctcggcatccgggcggctacccctgacgagtatttccatacggcggactga

SEQ ID NO: 59711 - DNA, 888 bp, Neisseria meningitidis; identical to SEQ ID NO: 43589

SEQ ID NO: 59712 - DNA, 1521 bp, Neisseria meningitidis
atgcagctgatcgactattcacattcatttttctcggttgtgccaccctttttggcactggcacttgccgtcattacccgccgcgtactgctgtctttaggcatcggtattctggtcggcgttgcctttttggtcggcggcaaccccgtcgacggtctgacacacctgaaagacatggtcgtcggcttggcttggtcagacggcgattggtcgctgggcaaaccaaaaatcttggttttcctgatacttttgggtatttttacttccctgctgacctactccggcagcaatcaggcgtttgccgactgggcaaaacggcacattaaaaaccggcgcggcgcgaaaatgctgaccgcctgcctcgtgtttgtaacctttatcgacgactatttccacagtctcgccgtcggtgcgattgcccgccccgttaccgacaagtttaaagtttcccgcgccaaactcgcctacatcctcgactccactgccgcgcctatgtgcgtgctgatgcccgtttcaagctggggcgcgtcgattatcgccacgcttgccggactgctcgttacctacaaaatcaccgaatacacgccgatggggacgtttgtcgccatgagcctgatgaactattacgcactgtttgccctgattatggtgttcgtcgtcgcatggttctccttcgacatcggctcgatggcacgtttcgaacaagccgcgttgaacgaagcccacgatgaaactgccgtttcagacggcagctggggcagggtttacgcattgattattcccgttttggccttaatcgcctcaacggtttccgccatgatctacaccggtgcacaggcaagcgaaaccttcagcattttgggggcatttgaaaataccgacgtgaacacttcgctggtattcggcggcacttgcggcgtccttgccgtcgttctctgcacgctcggcacgattaaaaccgccgactatcccaaagccgtttggcagggtgcgaaatctatgttcggcgcaatcgccattttaatcctcgcttggctcatcagtacggttgtcggcgaaatgcacaccggcgattacctctccacactggttgcgggcaacatccatcccggcttcctgcccgtcatcctcttcctgctcgccagcgtgatggcgtttgccacaggcacaagctgggggacgttcggcattatgctgccgattgccgccgccatggcggtcaaagtcgatccctcactgattatcccgtgtatgtccccagtaatggcgggggcggtatgcggcgaccactgttcgcccatctccgacacgaccatcctgtcgtccacaggcgcgcgctgcaaccacatcgaccacgttacctcgcaactgccttacgccttaaccgttgccgccgccgccgcatcgggctacctcgcattgggtctgacaaaatccgcgctgttgggctttggcacgacaggcattgtattggcggtgctgatttttctgttgaaagataaaaaacgcgccaacgcctga

SEQ ID NO: 59713 - DNA, 648 bp, Neisseria meningitidis; identical to SEQ ID NO: 38134

SEQ ID NO: 59714 - DNA, 534 bp, Neisseria meningitidis; identical to SEQ ID NO: 51873

SEQ ID NO: 59715 - DNA, 789 bp, Neisseria meningitidis; identical to SEQ ID NO: 50360

SEQ ID NO: 59716 - DNA, 3834 bp, Neisseria meningitidis
atgaccacgactaccgccccgcagcgtattcgggaaattccctataactatacttcttataccgaccgcgaaatcgtcatccgactgttgggcaacgaagcgtggcagattctgcaagacttgcgcggacagcgtaaaactggacgttcggcgcggatgctgtttgaagtgttgggcgatatttgggtggtcgtgcgcaatccgtatctggtcgatgatttgctggagcatccgaaacgccgcgccgcgttgatacgcgaaatgcgccaccgcctgaacgaaatccgcaaacgccgcgacgataatcggcaagtggatgtcttggttgccgcagcagaaaaagcagtcgagcgttttgatagcagttttgatgaaaccagccaaaagcggcggcagattttggagcgtttgagcaaaatcaccaagccgcacaatattatgtttgacggattggcgcgggtaacgcacgttaccgatgcaaccgactggcgcgtcgaatatccgtttgtcgtcgtcaatcctgataccgaggcagagatcgcgcctttggtgcgcgccttaatcgagctggatttggttattatcccgcgcggcggcggtacgggttataccggcggcgcgattcctttggacgcgatgagcgcggtcatcaatacggaaaagctggataaacataatggcgtggagtttgtcgaactggcgggcttggatggcaaacatccgattatccattgcggcgcgggcgtggtaacgcggcgggtggaagaaaccgcgcatcaggcaggtttggtgttcgccgtcgatccgacttccgccgatgcgtcctgtgtgggcggtaatgtggcgatgaacgcgggcggtaaaaaagccgtgctgtgggggacggcgttggacaacctcgcctactggcagatggtcaacccgcagggcgaatggctgcgcatcgagcgcgtgcgccacaatttcggcaaaatccacgacgaagaaaccgccgtgttcgacgttcacacgctggattcagacggcctcaatatcgttaaaaccgaacgtttggaaattcccggccacaaatttcgcaaagtcggtttgggcaaagacgttaccgacaaattcttgagcggcctgcccggcgtacagaaagaaggcacggacggcatcatcaccggcgttgctttcgtgttgcacaaaatgccgaaatacacgcgcactgtgtgtatggagtttttcggcacggtcgccaccgctacgccttctatcgtcgaaatccgcgatttcctgctcgcccacgacagcgttcggctggcaggtttggaacatttggactggcgttacgtccgcgccgtcggctacgcaaccaaagcggcgggcaagggacggccgaaaatggtcttgctggcggacgtggtttccgacgacgaagccgccgtagaggcagccgccgaacacatttgcgaacttgcccgcgcccgcgatggcgaaggctttatcgccgtgtctcccgaagcgcgcaaaaccttttggctcgaccgcagccgcaccgccgccatcgccaagcacaccaacgcctttaaaattaacgaagacgtggtcatcccgctcgaaaggctcggcgagtattcggacggcatcgaacgcatcaacattgagctttccatccaaaacaagctcaaactctgtgccgccttggagcaatatctttcgggcaaactccccatcgacaaaatgggcactgacctgccgaccgccgaactgttgggcgaacgcggcaaacacgccctagcccacgtttccgccgtcaaaacgcgttgggaatggctgctcgccaatctcgacacgccgcttgccgactacaaagcccgctacggcgcagccgtccacgccgcacccgaagccaaaaacaatgaaagctgctttattgccttccgcgatttccgcctgcgcgtgtctgtcaaagcggacgtaatgaagccgcttgccgaaatcttcagcggcaaaactgacaccaaaattatccaaggcttaggcaaaatccatgccaaaaccgtacgcagccgcgtcttcgtcgccctgcacatgcacgccggcgacggcaacgttcacaccaatattccggtcaattcagacgatgccgacatgcttcagactgcctatcgttcggtcgaacgcattatgaaaatcgcccgttcgctcggcggcgtgatttccggcgaacacggcatcggcattaccaagctcgaatttttgaccgatgaagatttgcaaccgttttggaactacaaaaaccaagtcgatccgaaacacaccttcaaccgtcacaaactgatgaaaggctcggacttaagcaacgcctatacgccatccttcgagcttttaggtgcggaatcgttgattatggaaaaatcagacctcggtaccatcgccgattccgtcaaagactgcctgcgctgcggcaaatgcaaacccgtctgctctactcacgttccgcgtgccaacctgctgtacagtccgcgcaacaaaatcctcggcgtgggcttgctgaccgaagccttcttatacgaagaacaaacccgccgaggcgtttccgtcaaacactttgaagaactcatggacatcggcgaccactgcaccgtgtgccaccgctgcgtcaaaccctgccctgtcaacatcgacttcggcgacgttaccgtagccgtccgcaactaccttgccgattccggccacaaacgctttgcgccggcggcttcaatgggtatggcattcctaaacgcgaccggtcctaaaaccatcaaagccctgcgcgccgcgatgatacagaccggcttccccgcgcagaactttgcctacaaaatcggcaagcttcttccgatcggcactaaaaagcaaaaagccgaacccaaagccactgtcggcaaagccccgattaaagaacaggttatccatttcatcaaccgccccctgcccaaaaacgtacccgccaaaacaccgcgctccttattgggcatcgaagacggcaaaagcatccccatcatccgtaatccggcttctccggaagatgccgaagccgtgttctacttccccggctgcggttcggaacgcctgttcagccaaatcgggcttgccgtccaagctatgctctggcacgtcggcgtacaaaccgttctgccgcccggctatatgtgttgcggctatccgcaagacgcgggcggcaataaggcaaaagccgaagaaatgagcaccaacaaccgcgtggctttccaccgtatggcgaacaccctcaactacctcgacatcaaaaccgtcgtcgtcagttgcggcacttgttatgaccagctcgaaaaataccgcttcgaggaaatcttccctggctgccgcatcatcgacatccacgaatacctgctcgaaaaaggcgtgaaactcgacggcgtgaaaggtcagcaatacctctaccacgacccctgccacacgcccatcaaaaccatgaacgccacccaaatggccagcagcctgatggggcagaaagtcgttttaagcgaccgctgctgcggcgaatccggtatgtttgcagtcaaacgaccagacatcgccactcaggtcaagttccgcaaacaagaggaaatcgagaaaaacctcaaagagctgccgcagggcgaacccgtcaaaatgctgacctcctgccccgcctgcctgcaaggcttgagccgctacgccgacgacaacaatatgcctgccgactacatcgtcatcgaaatggcgaaatacatcctcggcgaaaactggctggatgagtttgtaaaaaaagccaacaacggcggtgtagagaaagtgttgctgtaa

SEQ ID NO: 59717 - DNA, 1059 bp, Neisseria meningitidis; identical to SEQ ID NO: 50773

SEQ ID NO: 59718 - DNA, 648 bp, Neisseria meningitidis; identical to SEQ ID NO: 40909

SEQ ID NO: 59719 - DNA, 273 bp, Neisseria meningitidis; identical to SEQ ID NO: 43828

SEQ ID NO: 59720 - DNA, 903 bp, Neisseria meningitidis; identical to SEQ ID NO: 50213

SEQ ID NO: 59721 - DNA, 1017 bp, Neisseria meningitidis
atgtatcggaaactcattgcgctgccgtttgccctgctgcttgccgcttgcggcagggaagaaccgcccaaggcattggaatgcgccaaccccgccgtgttgcaaggcatacgcggcaatattcaggaaacgctcacgcaggaagcgcgttctttcgcgcgcgaagacggcaggcagtttgtcgatgccgacaaaattatcgccgccgcctacggtttggcgttttctttggaacacgcttcggaaacgcaggaaggcgggcgcacgttctgtatcgccgatttgaacattaccgtgccgtctgaaacgcttgccgatgccaaggcaaacagccccctgctgtacggggaaaccgctttgtcggatattgtgcggcagaagacgggcggcaatgtcgagtttaaagacggcgtattgacggcagccgtccgcttcctgcccgtcaaagacggtcagacggcatttgtcgacaacacggtcggtatggcggcgcaaacgctgtctgtcgcgttgctgccttacggcgtgaagagcatcgtgatgatagacggcaaggcggtaaaaaaagaagacgcggtcaggattttgagcggaaaagcccgtgaagaagaaccgtccaaacccacgcccgaagacattttggaacacaatgccgccgccagcgatgcagacgtaccccaagccgcagaaggcgcgcccgaaccggaaatcctgcatcctgacgacggcgagcgtgccgataccgttaccgtatcacggggcgaagtggaagaggcgcgcgtacaaaaccagcgtgcggaatccgaaattaccaaactttggggaggactcgataccgacgtgcaaaaagagttggtcggcgaacaacgcaagtgggcgcaggaaaaaatcagcaactgccgacaagccgccgcgcaggcagaccggcaggaatacgccgaatacctcaagctgcaatgcgacacgcggatgacgcgcgaacggatacagtatcttcgcggctattccatcgattag

SEQ ID NO: 59722 - DNA, 1776 bp, Neisseria meningitidis; identical to SEQ ID NO: 43694

SEQ ID NO: 59723 - DNA, 2664 bp, Neisseria meningitidis
gtgagcattagcgcaccgtatgccaatgagaacagtcgcatcctgctcagcaccacggatatcagttcggaaaacggcaaaatcaaaattcaatcttacggtgaccaatattactatgcgagacagagcgaactctatacctttgaacgccgcagctacaaaaccggcaaatggtacaaccgcaaacacattaccgaagtcaaagaacacaaaaacgccaagcccgacgcagtaaccctcagcgcatcccaaggcatcgacatcaaatctggtggcagcatcgacgcctacgccaccgcattcgatgcccccaaaggcagcattaacatcgaagccgggcggaaattgacactctatgccgtagaagagctcaactacgacaaactagacagccaaaaaaggcgcagatttctcggcatcagctacagcaaagcacacgacaccaccacccaagtcatgaaaaccgcgctgccctcaagggtagttgcagaatcagccaacctccaatcgggctgggataccaaactgcaaggcacacagtttgaaaccacactgggtggcgcaaccatacgcgcaggcgtaggtgagcaggcacgggcagatgccaagattatcctcgaaggcatcaaaaccacgatccacaacgaaaccgtgagcagcagcaaatctgctctatggcaaaaacaggcaggacggggcagtaacatcgaaaccttgcaattgccgagtttcaccggtcccgttgcgcccgtactgtccgcacccggcggttacattgtcgatattcccaaaggcaatctgaaaaccgaaatcgaaaagctggccaaacagcccgaatacgcctacctgaaacagcttcagacggccaagaacgtcgattggaaacaggtgcagctggcctacgacaaatgggactataaacaggaaggcttgaccggagccggtgcagcgattgtggtgattattgtaaccgctctaacttatggatacggagcggctgcagcgggtagcgtaactgccgcaggaagtagtacagccgcagctgcaacaacgacagcggcagcaactaccactgtttctactgcagctgccatgcaaaccgcagctttagcctccttgtatagccaagcagctgtagccatcatcaataataaaggcgatgtaggcaaagcattaaaagatctcggcaccagtgatacggtcaagcagattgttacttccgcactgacggcgggtgcattaaaccagatgggcgcagatattgcccaattgaacagcaaggtaagaaccgaactgttcagcagtacgggcaatcaaaccattgccaaccttggaggcagattggccaccaacctcagcaatgcaggtatctcagctggtatcaataccgccgttaacggcggcagcttgaaagacaacttaggcaatgccgcattgggagcattggttaatagcttccaaggggaagccgccagcaaaatcaaaacaaccttcagcgacgattatgttgccaaacagttcgcccacgctttggcgggttgtgttagcggactggtacagggaaaatgtaaagatggggcaattggcgcagcagttggggaaatcgtagctgaatccatacttggcggcagaaaccctgctacactcagcgatgcagaaaagcataaagttatcagttactcgaagattattgcgggcagcgtggcggcactcaacggcggcgatgtgaatactgcggcgaatgcggctgaggtagctgtggtgaataatgctttgaattttgacagtacccctaccaatgcgaaaaagcatcaaccgcagaagcccgacaaaaccgcactggaaaaaatcatccaaagtattatgcctgcacatgcggcaggtgcgatgactaatccgcaggataaggatgctgccatttggataagcaatatccgtaatggcatcacaggcccgattgtgattaccagctatggagtttatgcagcaggttggacagctccgctgatcggtacagctggtaaagcagctatcagcacctgtatggctaatccttctggttgtactgtcatggttacgcaggctgctgaagcgggcgcgggaatcgtcacgggtgcggtaacggtaggcaacgcttgggaagctccagtaggagcgttgtcgaaagcgaaggcggctaagcaagctgctcctaaagaaacaataaacaatttggcaaatttagccaaagcagaacagcagattttattccgtattgcccaacgcgatacgcaactggatgcatggaagacgggatttaacaatagagtaaggaaaggagcaggcttgcttgatgcaagtaatattccgataaccattaacggaaaaaccatcaaacctgtacaagccataagcttaaagggagcacccgtttacagcggcgtaagcgaacaggagatttttgcgctttatcggcagatgactggccagaatccgaattttagagttttgcctgacggaagattagcaaatggcattatcagtactggagaatgggcaggaacaaaaattgcattaagaaatttttcaaaaacagagaattcaactcaagcacgatggacattagatttgcagaatcctccatcatttattaaaggtactaaattggagcttaaattccaataa

SEQ ID NO: 59724 - DNA, 441 bp, Neisseria meningitidis; identical to SEQ ID NO: 42980

SEQ ID NO: 59725 - DNA, 864 bp, Neisseria meningitidis
atgaaaaccttactgccctttttcggcgtggtgcgcgtcagcggcgaagaccgccaaaccttcctgcacggacagctttccaacgacatcaaccaccttcagaccgggcaggcgtgttatgcgacttacaacacgcccaaaggccgcgtcatcgccaatatgattgtcgtcaaccgaggcggcgatttgctgctgattatggcgcaagacctgcttgaagcaacggtcaaacgtttgcggatgtttgtgttacgcgccaaagccgtttttgaaatccttgaagattacgccgtcggcgcggaattagaagcatccgccgaaccgcttgccgcgcaagaacccagcctcgcctttaccgccgaatgcggttcagacggcatctgttccgtcgtcctgccacatcggggcattttgcacatcgcccccaaaaacgccttgccgccttatgatgccgccgccgaaaacgcgtggcggctgcacgaaatccgtagcggttatccgtggatatgcgcggctaccaaagaaaccgccgtcgcccaaatgctcaaccagcacatcatcggcggcgtacacttcaaaaaaggctgctatccgggacaggaaatcattgcccgtgcccagtatcgggggcaggtcaaacgcggcttggcggtattgtcgggaaattcggccgtcgaagcaggaaccctgctgacggcggacggcgaagaggccggcatcgtactcgacagcgttcaagattcggaaaactttaccgcccttaccgtgattaaattctccgccgcacaaaaaacactgaccgtcccaaacggcggtatcttcaaagcggttcatctcttctttaaaaccgaaaatgcagaataa

SEQ ID NO: 59726 - DNA, 1281 bp, Neisseria meningitidis; identical to SEQ ID NO: 50822

SEQ ID NO: 59727 - DNA, 237 bp, Neisseria meningitidis
atgaaaaaatccctgtttgccgctgctttgttgtctttggtcctggcagcctgcggcggtgaaaaagccgctgaagctcccgctaccgaagcacctgccgccgaagctcccgctactgaagcacctgccgccgaagctcccactgctgaagctgccgctaccgaagcacctgccgctgaagctgccgcttctgaggctcctgccgctgaagctcctgctgccgaagctgcaaaataa

SEQ ID NO: 59728 - DNA, 600 bp, Neisseria meningitidis
atggcgttaaaaacatcaaacttggaacacgcaatgctggttcatcccgaagctatgagtgtcggcgcgcttgccgacaaaatccgcaaaatcgaaaactggccgcaaaaaggcatcttattccacgacatcacgcccgtccttcaaagcgcggaatacttccgccttttggttgatttattggtttaccgctatatggatcagaaaatcgacatcgttgccggtttggacgcgcgcggcttcattatcggcgcggcactcgcctaccagctcaacgtcggtttcgtccccatccgcaaaaaaggcaagctgccttttgaaaccgtatcgcaaagctacgcgctcgaatacggggaagctgcggtggaaatccacaccgatgccgtcaaactcggttcgcgcgtgctgctggtcgatgatttggttgccacgggcggcacgatgcttgccggactggaactgatccgcaaactcggcggagaaattgtcgaagccgccgccattttggaatttaccgaccttcaaggcggcaagaatatccgtgcaagcggcgcgcccttatttaccctgcttcaaaacgaaggctgtatgaagggctga

SEQ ID NO: 59729 - DNA, 564 bp, Neisseria meningitidis
atgcgccatttggaaaacaacggttatgcgaacgttgccgggttggaacgcatcctcgctgtcaaaaccgacaattacaaagaaaaagaaaacctgctccatgaaattttcagcaaaagcaggataggcgataccgaattgttcgccgtggacgaaaaccttgtgaaacgtttgtttttatcgcttcgcggcgaaatcgtgttcccgaaaaacgaaacggcggaatcggaatttgaaaaaagcgtccacgaacgcaggcaggaagggaatgccggatccggccgcaaacaactgcttgatttggtacggcgcggacaccgggaatacccttacgcgctgcctcggcttttggcgggtgcggcgtcctacaagccgaaaaaatcgaaaatccgcctttttaaagaagcatatttcggcaaaagcggcacgaggctgaccgacgaaattgcagacggcatccatatttacacctgtttttcgcgggcggatttggaaaaagcctattccgaatatttggaatttttcaaatccgaatcggatgccgaaggcagaaaaccacgctaa

SEQ ID NO: 59730 - DNA, 381 bp, Neisseria meningitidis
atggaaaatagatttaaaaaaatcgttaaggatatttttagttttgcccaatttgtttccgaagcggaaaataaaattcctaaccaatcctctcgttattacgactgctggtgggaattggaagtcttgaatgcttccgcattggaagattgggaaatatcgggaaagcctaaaaaatgggagaaatggacagaaaaatatcagaccgaagcattacagttagtcaagaatctatttgccgaagaagttcctgaaaataatatagtttgcgatatttctcattttttgcattttgccgattgggcagaagccgacattcccaatcaatcacgttcatatgccgaatattggtgggaaatggaaagatcaatatcaatttga

SEQ ID NO: 59731 - DNA, 2850 bp, Neisseria meningitidis
atgtgcaaccatcgtccccaacattcgcacgacaacgacaccatccgcatacgcggcgcgcgcacgcataatttgaaaaacatcgatttggacattccgcgccacaagctggtggtggtaacaggattgtcgggcagcggcaaatcgtcgctggcatttgatactttatatgccgaaggtcaacgccgttatgtcgagagcctttccgcctatgcgcggcagtttttgcagatgatggacaaacccgatgtcgatttgattgaaggtctgtcgcccgcgatttccatcgagcaaaaatccaccagccacaatccgcgttccaccgtcggcacggtaacggaaatccacgactatctgcgccttttgtacgcccgcgtcggtacgccgtattgccccgaacacaatctgccgctatccagccaaaccgtatctcagatggtcgatgccgtattaaaactgccggaagatacgcgcgtgatgattcttgcgccggcagttcgtgagcgtaagggcgagtttgtcgacttctttgccgacttgcaggcgcaaggctttgcccgtgtgtgcgtggacggcgaagtttatcagcttgacgaagtgccgaagctggaaaaaaacatcaaacacaatatcgacgtggtcatcgaccgcgtgaaagtgaaggcggacatcaagcagcggctggcggaaagttttgaaaccgcactgcgccacggcaacgagcgcgcgctggcgatggaaatggaaagcggcgaagaacattggttttccgcgcgtttcgcctgtcccgtatgttcatacagcctgcccgaattagagccgcgcctgttttcgttcaacaacccgatgggctcctgcccaacttgcgacggcttgggcaacaccaacttcttcgatcccgaaaaagtggtcgcgcatcccgaattgtcgctggcaacgggcgcgattgacggctgggacaagcgcaaccaattctatttccaaatgattcagtcgctggcgcggcattacggtttcgatgtgcaggctgcttgggaaacgctgcctgaaaaagtcaaaaaagtcgtgctgcacggctcgggcaaggaagtcattgatttcacctacctatccgaacgcggcaccaccttcaaccgcagccacgccttcgaaggcatcattcccaatctcgaacgccgctaccgcgaaaccgacagcgaaaccgtgcgcgaaaaattgcgcgaataccagaaccaccgcgcctgcccgagctgcggtggtgcacgtttgcgcaaagaagcccgctacgtttacgtcagcggcgaaccgctgcacgaagtttccgcctggccgctcaccaaaacccaccaattctttgaaacactggatttagacggcaacaaaaaacaaatcgccgaaaaaatcctcaaagaaatcaccgaacgcctcggcttcctgattaacgtcgggctggattacctgaatttaagccgctccgccgaaaccctctccggcggcgaagcccagcgcatccgcctcgccagccaaatcggcagcggcctgaccggcgtgatgtatgtactggacgaaccctccatcggcctgcaccagcgtgacaatgaccgcctgctggccaccctcaaacgactgcgcgatttgggcaacagcgtgattgtggtcgaacacgacgaagacgccatccgcgaagccgatttcgtggtcgatatgggccccggcgcaggcgaacacggcggcaacgtactgattgccgacacgcccgaaaacgtcgcccaatgcgaaaactccgttaccggacaatacctcagcggcaaaaaatccattgccgtgccgtctgaacgcacgcccgtcaatcccgaccggatgctcgtcctcaaaggcgcacgcggcaacaatctcaaaaacgttacccttgagctgccgctcggtttgattacctgcatcaccggcgtatccggcagcggcaaatccaccctgattaacgacaccctcgccaaaattaccgcccgcgaactcaaccgcgcccaagaagaacccgccccatacgacgacatccgcggcctcgaacacctcgacaaagtcatcaacgtcgaccaatcccccatcggccgcaccccgcgctccaaccccgccacctacaccggcctgttcacccccatccgcgaactcttcgccggcatccccctctcgcgcgaacgcggctacaacgtcggccgcttttccttcaacgtcaaaggcggccgctgcgaagcctgccaaggcgacggcgtgattaaagtcgaaatgcacttcctgcccgacgtgtacgtcccctgcgaagtctgccacggcaaacgctacaaccgcgaaaccctcgaaatccaatacaaaggcaaaaacatcagccaagtcctcgacatgaccgtcgaagaagcccgcgaatttttcgatgccgtccccaccgtatcgcgcaaactgcaaaccctgatggacgtaggcctaggctacatccgcctcggtcagtccgccaccaccctctccggcggcgaagcccagcgcgtcaaactcgccttggaactctccaaacgcgacaccggcagaacgctctacatcctcgacgaacccaccaccggcctacacttcgccgacatcgccctgctgctggaagtcataggccgtctgaaaggcaaaggcaactcgatagtgattatcgagcataatctggatgtgattaaaacagcggattggattgtggacttggggccggaaggcggagatggcggggggaggattattgctaaaggtagtcctgaacaggtggcgaaagttaaggggagttatactgggaagtatttgaaggtggttttgaggtaa

SEQ ID NO: 59732 - DNA, 642 bp, Neisseria meningitidis
atgaccgatttccgccaagatttccttaaattctccctcgcccaaaatgtcttaaaattcggcgaattcaccaccaaggcaggacggcagtcgccttatttcttcaatgccggcctctttaacgacggcttgtccacgctgcaactggcaaaattttacgcacaatccatcattgaaagcggcatccaattcgatatgctgttcggccccgcctacaaaggcattattttggcggcggcaaccgcgatgatgctggcggaaaaaggcgtaaacgtcccgtttgcctacaaccgcaaagaagccaaagaccacggcgaaggcggcgtgttggtcggcgcgccgcttaaagggcgcgtgctgattatcgacgatgtgatttccgccggcacatccgtacgcgaatcaatcaaactgattgaagcggagggtgcaacccccgccggtgtcgccatcgcgctcgaccgcatggaaaaaggcacgggtgaattgagcgcggttcaggaagtggaaaaacaatacggcctgcccgtcgcccccatcgccagcctgaacgatttgtttattctgttgcaaaacaaccccgaattcggacagttcctcgaacccgtccgagcctaccgtcggcagtacggcgtagaataa

SEQ ID NO: 59733 - DNA, 225 bp, Neisseria meningitidis
ttggttttttggttgcagcgtttgaaatacccgttgttgctttgtattgcggatatgctgctgtaccggttgttgggcggcgcggaaatcgaatgcggccgttgtcctgtaccgccgatgacggattggcagcattttttgctggcgatgggaacggtgtcggcttgggtggcggtgatttgggcatatctgattattgaaagtgaaaaaaacggaagatattga

SEQ ID NO: 59734 - DNA, 234 bp, Neisseria meningitidis
atgaaccgccgaaaaatctatctgttgtctgttgccctgttcacactggcatttatgctgctcgtcctcttgggtgcttatctgctgaccgtcggcaacaaagccttcgccgtcgcctcctttcttttcgcattcggcgcgctgttcgggcaaatcggcgcactcgccctctatttgcggcacaaatccctacacgccgcccaatccgccacaaaggaaaaccgctatgtctga

SEQ ID NO: 59735 - DNA, 1002 bp, Neisseria meningitidis
atgcagtttccttaccgcaatgttccggcttcgcgtatgcgccgtatgcgcagggacgatttttcacgccgcctgatgcgcgaacacacgctgaccgccgatgatttgatttatccggtgttcgtattagaggggtcggcgcgcgaggaggatgtgccttctatgccgggcgtgaagcgtcagagtttggacaggttgctgtttacggcggaggaagcgtcaaatttgggaatacccatgctggcactgttccctgtcgttacgacaaataagacagaatgtgcgcaggaggcgtataaccctgaaggactggtgccgacagccgtccgagccttgcgcgagaggtttcccgaactgggcattatgacggatgtcgcgctcgatccttatacggttcacggtcaggacggactgacggacgaaaacggttacgtgatgaatgatgaaaccgtagaagtcttggtgaaacaggctttatgtcatgcagaggcgggtgcgcaggtcgttgctccttccgatatgatggatgggcgtatcggcgccatccgcgaggctttggaggataccggacatatccatacgcggattatggcatattccgccaaatatgcttctgcattctatggtcctttccgtgatgcggtaggcagttcgggcaatttgggcaaggcagataaaaagacctatcagatggatcctgcaaataccgatgaggcgctgaatgaagtggcgctcgatattcgggaaggtgcggatatggtgatggtgaagcccggtttaccgtatttggacgttgtccgccgcgtgaaggacgagttcggtgtgccgacttatgcctatcaggtttcgggagaatacgcgatgttgcaggcagcgattgccaacggctggctggatggcggcaaagtggttttggaaagcctgctggcattcaaacgcgcgggtgcggacgggattttgacctattacgccattgaggcggccaagatgctgaagcgttga

SEQ ID NO: 59736 - DNA, 822 bp, Neisseria meningitidis; identical to SEQ ID NO: 50445

SEQ ID NO: 59737 - DNA, 351 bp, Neisseria meningitidis; identical to SEQ ID NO: 41719

SEQ ID NO: 59738 - DNA, 168 bp, Neisseria meningitidis; identical to SEQ ID NO: 37435

SEQ ID NO: 59739 - DNA, 378 bp, Neisseria meningitidis; identical to SEQ ID NO: 53475

SEQ ID NO: 59740 - DNA, 1077 bp, Neisseria meningitidis
atgatttgccgaaaacctatcggacacacaccatattttgatatgaataaaacaatctgccgcactgctgcactattgataagcggtttttcatacgcaaacaccgtcattcccgatgtctcccccgtcgcacaaggtcaacatgtcttcattaacatccctcagcaacgcctgttcctctacaccgacggcaaactgaccaaggtttatcccgttgcagtaggtcgggcgatgacgcaaaccaatctaggcgaacataaaatcggtgcgaaagcctataaccctgtttggtacatccccaaatccatacagaaagaacgcggcgacggcgtaaaaaccatagccgccggcccggacaaccctttggggccggtttttgtccgcttaggcgaccccaaactcggtttgggtatacacgggaccaatgcgccggccagcgtccccggggttcggagtcacggctgcgtccgcatgaaatcgcccgacgcgctcgagtttgccaaaaccatcgccagcggctcgcccgcctccgtcatctatcaaatggcgggtctcaatgaagatgcggatcgcaacctgtggcttgccgccttccgcgacccttacggtaagaacaaccttgacatcgcctctctgaaaaaaagtattgcgcaatgggcaaaaacacagggtaaaaccatcgcgcccgagaaagtcgatgctgtactcaaagaccgcaccggatcggccgtctgcctgacctgcggcaaaaacggcaagatgaagatgccgctcaaatcgctggcgtggatacagggttcttcctcatacagccaagctgaagtcattgaacaaactgaggaaaccaactctgccgaaatatccgagacacgcacgcccgaagtgcctgatgtacacacgcccgaggcacaaccgcatttaaatacccaatccgacggcacgccgactgcctataccgaaccggctgccgattcatcgccgcaagtagaaacacctgatcaggctgcttccgagccggttgatgtattattttcaatagatgtgatacggcagggaaatttgcgtttaggtaattga

SEQ ID NO: 59741 - DNA, 756 bp, Neisseria meningitidis; identical to SEQ ID NO: 55668

SEQ ID NO: 59742 - DNA, 1413 bp, Neisseria meningitidis; identical to SEQ ID NO: 38542

SEQ ID NO: 59743 - DNA, 204 bp, Neisseria meningitidis; identical to SEQ ID NO: 38753

SEQ ID NO: 59744 - DNA, 600 bp, Neisseria meningitidis; identical to SEQ ID NO: 38221

SEQ ID NO: 59745 - DNA, 1215 bp, Neisseria meningitidis; identical to SEQ ID NO: 58753

SEQ ID NO: 59746 - DNA, 852 bp, Neisseria meningitidis; identical to SEQ ID NO: 50814

SEQ ID NO: 59747 - DNA, 582 bp, Neisseria meningitidis; identical to SEQ ID NO: 39245

SEQ ID NO: 59748 - DNA, 249 bp, Neisseria meningitidis
  misc_feature 226, 227, 228, 229, 230: 'n' is a, c, g or t
atggctaaggaaaaattcgaacgtagcaaaccgcacgtaaacgttggcaccatcggtcacgttgaccatggtaaaaccaccctgactgccgctttgactactattttggctaaaaaattcggcggtgctgcaaaagcttacgaccaaatcgacaacgcacccgaagaaaaagcacgcggtattaccattaacacctcgcacgtggaatacgaaaccgaaacccgcnnnnncacacacttaattaattaa

SEQ ID NO: 59749 - DNA, 204 bp, Neisseria meningitidis; identical to SEQ ID NO: 42415

SEQ ID NO: 59750 - DNA, 159 bp, Neisseria meningitidis; identical to SEQ ID NO: 43881

SEQ ID NO: 59751 - DNA, 303 bp, Neisseria meningitidis; identical to SEQ ID NO: 44727

SEQ ID NO: 59752 - DNA, 1443 bp, Neisseria meningitidis
atgcatccgacctattccgccgtacaggcgcggctgctcgaagccaaccgcctttcccccgaactgctcgccaaaagcctgtgcatcatcggcgcgcaccacgtcgattacgccgacatctactgccagcgcaccgcttatgaaagctggcatttggaagagggcatcgtcaaatcgggcagcttccaaatcaatcagggcgtgggcgtgcgcgccgtttcgggcgacaaaaccgcctttgcctacgccgacagcctgtgcatcgattcgataaaccgttccgcccgcgccgtccgcgcgattggggcggcaggcggcaaggtgtccgccaaaatgccgtctgaaacgcgcggcaagccggtttgttccgcgtccgaccccattgccggcctcgattccgccgccaaagtcgcgctgttgaacaaagtggaagcaatcgccaaagccgccgatccgcgcatcgtgcaagtgatggccggtttgacctgcgaatacgatatggtttacctcgcccgtctggacggcaaacacgccgccgacatccgcccgatggtgcgcctgaacgttaccgttatcgccaaacagggcgaacgccgcgaacagggcagcgcgggcggcggcggacgctacgacttggcttatttcgatgaaaacttggtgcggcagtttgtcgatgccgccgtcaaacaggcactcaccaacctcgaatcccgccccgcgcccgccggcgaaatgaccgtcgttttgggcaacggctggccgggcgtgttgctgcacgaagcggtcggacacggtttggaaggcgatttcaaccgcaagggaaccagcgtcttttccggcagaataggcgagcgcgtcgccgccaaaggcgttaccgtcgtcgatcagggtgatattgccggccggcgcggttcgctcaacatcgacgacgaaggcaacgaaacccgccgcaccgtattgattgaagacggcattttagtcggctatatgcaggacgaaaccaatgcccgcctgacgggtacgcagtccaccggcaacggccgccgcgaaagttacgcttccgcccctatgccgcgcatgaccaatacctttatggaaaacggcagctatgagccggaagaaatcatcgcgtccatcgacaagggcatttacgccgtcaactttggcggcggacaagtggacattaccagcggcaagttcgtgttcagtgcgtccgaagcgtggtgggtggaaggcggcaggctgcaatatcccgtcaaaggcgcgaccatcatcggcaacggccccgaagtgctgaaacacgtttccatgataggcaacgatactgcgctcgacagcggtgtcggcgtgtgcggcaaagaagggcagagcgtccccgtcggcgtggggcaaccgactttgcggattgatgccggactgaccgtcggcggcagcgcaatctga

SEQ ID NO: 59753 - DNA, 438 bp, Neisseria meningitidis
atgcccgtgaaaaaagttgaaaaaaacatcttggtgctgcacggcgcggacaaaatgttcgagctggtcgataaggttgaggattacccgaactttctgccgtggtacagcaaaaccgaggtcatcggacgcaacggcaacgaactgaaggcgcggctgtttatggactatatgcacgttcgccaatcattcgccacgcacaaccgcaacattccgggcagggaaatccgtatggaactgctcgaaggtccgttcaaaaccttacgtggaacgtggaaatttatcgatttgggcgacgatatgtgcaaaatcgaattcaatttggaatacgatttttccaatgccgttttgtccgccttaatttcccccgtcttcaaccacctttccgccacgctggtcgaagcgttcgtcaaagaggcagaccgccgttatgcttga

SEQ ID NO: 59754 - DNA, 258 bp, Neisseria meningitidis; identical to SEQ ID NO: 40560

SEQ ID NO: 59755 - DNA, 1392 bp, Neisseria meningitidis; identical to SEQ ID NO: 38504

SEQ ID NO: 59756 - DNA, 1146 bp, Neisseria meningitidis; identical to SEQ ID NO: 51752

SEQ ID NO: 59757 - DNA, 402 bp, Neisseria meningitidis; identical to SEQ ID NO: 55387

SEQ ID NO: 59758 - DNA, 657 bp, Neisseria meningitidis
atgaacagacaaaaagtcatcgccatcgacggcccgggcgcatcgggcaaaggcacggtcgccgcccgcgtcgccgccgcattgggatacgattatctcgataccggcgcgctctaccgcctgaccgccctatatgcacaaaaacaaggcgtggaatggcacgatgaagaaaatgtttccgcacttgccgaaaaactgcccgccgtattttcaggcagccgcatcctgctcgacggcgaagacgtttcagacggcatccggacagaagccatcggcatgggcgcatccgcagtcgcacagttgcctaaagtccgcgccgcactgctgcaacgccaacgcgattttctgaccgaaaaaggactggttgccgacggacgggataccggatcggtcgtcttcccccaggccgaactcaaaatttttctgacagccgaatccaaaatcagggccgaacgccgcgccaaacaaatcggcatcccctgcgaaggtttggcattcgagcgcatcctgtccgacatcgaagccagagacgaggcagaccgaaaccgcaaggttgcccccctgaaacaacaacccgatgccctgcttttggatacgagccgcctgactatagaagaaactgtaaaaaaagtgcttgattggtatcgtaaagtttaa

SEQ ID NO: 59759 - DNA, 1350 bp, Neisseria meningitidis; identical to SEQ ID NO: 44843

SEQ ID NO: 59760 - DNA, 483 bp, Neisseria meningitidis
atgacacaacaacgccaactgccttcccacgaactcattatgtccgaactgatgatgccggacaccgccaatttcagcggcaacgtacacggcggcgaactcctgctcctgctcgaccaagtcgcctattcctgcgccagccgttacagcggcaattattgcgttaccctgtcggttgacaaagtcctgtttaaagaacccatccacatcggcgatttggttaccttttacgccgctgtcaactacacgggacgcacctcgatggaaatcggcatccgtgtcgaagcacaaaacatccgcaccggcgaaatccgccataccaacagctgctacttcacgatggttgcggtcaaagacggcaaacccgtccctgtccctccgctggaaatcctgaccgaccgccaacgctgccgctacgaaaaagccaaaaaacgcagagacatcagcctgcaagcctctgaagacatgtcctgcggctgctga

SEQ ID NO: 59761 - DNA, 210 bp, Neisseria meningitidis; identical to SEQ ID NO: 43717

SEQ ID NO: 59762 - DNA, 624 bp, Neisseria meningitidis; identical to SEQ ID NO: 42844

SEQ ID NO: 59763 - DNA, 162 bp, Neisseria meningitidis; identical to SEQ ID NO: 50967

SEQ ID NO: 59764 - DNA, 915 bp, Neisseria meningitidis; identical to SEQ ID NO: 40510

SEQ ID NO: 59765 - DNA, 639 bp, Neisseria meningitidis; identical to SEQ ID NO: 50306

SEQ ID NO: 59766 - DNA, 1422 bp, Neisseria meningitidis; identical to SEQ ID NO: 43087

SEQ ID NO: 59767 - DNA, 1578 bp, Neisseria meningitidis
atgcgcgccaaccccaaaacacaggcaatgccgtctgaaaccatatccctgatgaaaacacgcagcctaatttcccttttatgcctccttctctgttcatgttcttcatggttgcccccactggaagaacggacggaaagccgtcatttcaatacttccaaacccgtccgcttggacaacatcctgcaaatccggcacacccctcataccaacgggctatccgatatctatctgttgaacgacccccacgaagcctttgccgcacgcgccgcccttatcgaatctgccgaacacagcctcgatttgcaatactacatctggcgcaacgacatttccggccgactgctgttcaacctgatgtaccttgccgcagaacgcggcgtgcgcgtacgcctgctgttggacgacaacaacacgcgcggattggacgacctcctgctcgccctcgacagccatcccaatatcgaagtgcgcctgttcaaccccttcgtcttacgaaaatggcgcgcactcggctacctgaccgacttcccccgcctcaaccgccgcatgcacaacaaatcctttaccgccgacaaccgcgccaccatactcggcggacgcaatatcggcgacgaatacttcaaagtcggtgaagacaccgttttcgccgacctggacatcctcgccaccggcagcgtcgtcggcgaagtatcgcacgacttcgaccgctactgggcaagccattccgcccacaacgccacgcgcatcatccgcagcggcaacatcggcaagggtcttcaagcactcggatacaacgacgaaacgtccagacacgcgctcctgcgctaccgcgaaaccgtcgaacagtcgcccctctaccaaaaaatacagacaggacgcatcgactggcagagcgtccaaacccgcctgatcagcgacgaccctgcaaaaggactcgaccgcgatcgccgcaaaccgccgattgccgtgcggctgcaagacgcgctcaaacagcccgaaaaaagcgtctatctggtttcaccctatttcgtccccacaaaatccggcacagacgcactagcaaaactggtgcaggacggcatagacgttaccgttctgaccaactcgctacaggcgaccgacgttgccgccgtccattccggctatgtcaaataccgaaaaccgctgctcaaagccggcatcaaactctacgagctgcaacccaaccatgccgtccccgccacaaaagacaaaggcctgaccggcagctccgtaaccagcctgcacgccaaaaccttcattgtggacggcaaacgcatcttcatcggttcgttcaacctcgacccccgttccgcgcgtctcaacaccgaaatgggcgttgttatcgaaagccccaaaatcgcagaacagatggagcgcacccttgccgataccacacccgaatacgcctaccgcgttaccctcgacaggcacaaccgcctgcaatggcatgatcccgccacccgaaaaacctacccgaacgaacccgaagccaaactttggaaacgcatcgccgcaaaaatcctatccctgctgcccatagaaagtttattatag

SEQ ID NO: 59768 - DNA, 684 bp, Neisseria meningitidis
atgcaacacgacgtttacgactacaccgcgcatacggtttctaaaaacaccgtcctgcagaaaacctaccgcctgctcggattttcattcattccggctgccgcaggcgcggcacttgccgccaatgccggtttcaatttttacgccgccttcggttcgcgctggatagggtttgccgtcgtgttggcgtttttctacggtatgatccacttcatcgagaaaaaccgttacagcaataccggcgttgccctgctgatggtattcacattcggtatgggcgtattgatcggccccgtgctgcaatacgcgctccatattgccgacggtgcgaaaatcgtcggcattgccgccgcgatgaccgccgccgtctttttaacgatgtccgctttggcgcgccgaacccggctcgatatgaacgcgctcggacgcttcctgaccgtaggtgcggtcattctgatggtcgccgtggttgccaatctgtttttgggtattcccgcactcgccctgaccatttccgccggttttgtcttgttcagttccttaatgattatgtggcaggtacgcaccgtcatcgacggcggcgaagacagccacatcagcgcggcactgacactgtttatctcgctttacaacatcttcagcagcctgctcaacatcctgttgtctttaaacggcgaggattga

SEQ ID NO: 59769 - DNA, 4170 bp, Neisseria meningitidis
atgaccgataccgcaccgacagataccgatccgaccgaaaacggcacgcgcaaaatgccgtctgaacaccgccccaccccgccggcaaaaaaacgccgcccgctgctgaagctgtcggcggcactgctgtctgtcctgattttggcagtatgtttcctcggctggctcgccggtacggaagcgggtttgcgcttcgggctgtaccaaatcccgtcttggttcggtgtaaacatttcctcccaaaatctcaaaggcacgctgctcgacggcttcgacggcgacaactggtcgatagaaaccgagggggcagaccttaaaatcagccgcttccgcttcgcgtggaaaccgtccgaactgatgcgccgcagcctgcacattaccgaaatttccgccggcgacatcgccatcgttaccaaaccgactccgcctaaagaagaacgcccgccgctcagccttcccgacagcatagacctgcccgccgccgtctatctcgaacgcttcgagacgggcaaaatcagcgtcggcaaaacttttgacaaacaaaccgtctatctcgaacgcctcaacgcggcataccgttacgaccgcaaaggacaccgccttgacctgaaggccgccgacacgccgtggagcagttcgtcggggtcagcctcggtcggcttgaaaaaaccgtttgccctcgataccgccatttacaccaaaggcggactcgaaggcaaaaccatacacagtacggctcggctgagcggcagcctgaaggatgtgcgcgccgaactggcgatcgacggcggcaatatccgcctctcgggaaaatccgtcatccacccgtttgccgaatcattggataaaacattggaagaagtactggtcaaagggttcaacatcaatccggccgccttcgtgccttccctgcccgatgccggactgaatttcgacctgaccgccatcccgtcgttttcagacggcatcgcgctggaaggttcgctcgatttggaaaacaccaaagccggctttgccgaccgcaacggcatccccgtccgtcaggttttaggcggctttgtcatccggcaggacggcacggtgcatatcggcaatacgtccgccgccctgctcggacggggcggcatcaggctgtcgggcaaaatcgacaccgaaaaagacatcctcgatttaaatataggcatcaactccgtcggcgcggaagacgtactgcaaaccgcgttcaaaggcaggttggacggcagcatcggcatcggtggcacgaccgcctcgcccaaaatctcttggcaactcggcatcggcacggcgcgcacggacggcagcctcgccattgcaagcgaccccgcaaacggacagcggaaactggtgctcgacaccgtcaacatcgccgccgggcaaggcagcctgaccgcgcaaggctatctcgagctgtttaaagaccgcctgctcaagctggacatccgttcccgcgcattcgacccttcgcgcatcaatccgcaacttccggcaggcaatatcaacggctcaataaaccttgccggcgaactggcaaaagagaaattcacaggcaaaatgcggtttttacccggcacgttcaacggcgtaccgattgccggcagtgccgacattgtttacgagtcccgccaccttccgcgtgccgccgtcgatttgcggctggggcggaacattattaaaacagacggcggcttcggcaaaaaaggcgaccggctcaacctcaacatcaccgcacccgatttatcccgtttcggtttcggactcgcggggtctttaaatgtacgcggacacctttccggcgatttggacggcggcatccgaacctttgaaaccgacctttccggcgcggcgcgcaacctgcacatcggcaaggcggcagacatccgttcgctcgatttcacgctcaaaggttcgcccgacacaagccgcccgatacgcgccgacatcaaaggcagccgcctttcgctgtcgggcggagcggcggttgtcgataccgccgacctgatgctggacggcacgggcgtgcagcaccgcatccgcacacacgccgccatgacgctggatggcaaaccgttcaaattcgatttggacgcttcaggcggcatcaacagggaacttaccctatggaagggcagcatcggcattctcgacatcggcggcgcattcaacctcaagctgcaaaaccgtatgacgctcgaagccggtgcggaacgcgtggcggcaagtgcggcaaattggcaggcaatgggcggcagcctcaacctgcaacacttttcttgggataaaaaaaccggcatatcggcaaaaggcggcgcacacggtctgcatatcgccgagttgcacaatttcttcaaaccgcccttcgaacacaatctggttttaaacggcgactgggatgtcgcctacgggcgcaacgcgcgcggctacctcaatatcagccggcaaagcggcgatgccgtattgcccggcgggcaggctttgggtttgaacgcattttccctgaaaacgcgctttcaaaacgaccgtatcggaatcctgcttgacggcggcgcgcgtttcgggcggattaacgccgatttgggcatcgccaacgccttcggcggcaatatggcaaatgcaccgctcggcggcaggattaccgcctcccttcccgacttgggcgcattgaagccctttctgcccgccgccgcgcaaaacattaccggcagcctgaatgccgccgcgcaaatcggcggacgggtaggctctccgtccgtcaatgccgccgtcaacggcagcagcaactacgggaaaatcaacggcaacatcaccgtcgggcaaagccgctctttcgataccgcgcctttgggcggcaggctcaacctgaccgttgccgatgccgaagtattccgcaacttcctaccggtcggacaaaccgtcaaaggcagcctgaatgccgccgtaaccctcggcggcagcatcgccgatccgcacttgggcggcagcatcaacggcgacaaactctattaccgcaaccaaacccaaggcatcatcttggacaacggctcgctgcgttcgcatatcgcgggcaggaaatgggtaatcgacagcctgaaattccggcacgaagggacggcggaactctccggtacggtcggtatggaaaacagcggacccgatgtcgatatcggcgcggtgttcgacaaataccgcatcctgtcccgccccaaccgccgcctgacggtttccggcaacacccgcctgcgctattcgccgcaaaaaggcatatccgttaccgggatgattaaaacggatcaggggctgttcggttcgcaaaaatcctcgatgccgtccgtcggcgacgatgtcgtcgtattaggcgaagtcaaaaaagaggcggcggcaccgctccccgtcaatatgaacctgactttagacctcaatgacggcatccgcttcgccggctacggcgcggacgttaccataggcggcaaactgaccctgaccgcccaatcgggcggaagcgtgcggggcgtgggcacggtccgcgtcatcaaagggcgttataaggcatacgggcaggatttggacattaccaaaggcacggtctcctttgtcggcccgctcaacgaccccaacctcaacatccgcgccgaacgccgcctttcccccgtcggtgcgggcgtggaaatattgggcagcctcaacagtccgcgcattacgctgacggcaaacgaaccgatgagtgaaaaagacaagctctcctggctcatcctcaaccgcgccggcagcggcagcagcggcgacaatgccgccctgtccgcagccgccggcgcgctgcttgccgggcaaatcaacgaccgcatcgggctggtggatgatttgggctttaccagcaagcgcagccgcaacgcgcaaaccggcgaactcaaccccgccgaacaggtgctgaccgtcggcaaacaactgaccggcaaactctacatcggctacgaatacagcatctccagcgcggaacagtccgtcaaactgatttaccggctgacccgcgccatacaggcggttgcccgtatcggcagccgttcgtcgggcggcgagctgacatacaccatacgtttcgaccgcttctccggttcggacaaaaaagactccgccggaaacagcaaaggaaaataa

SEQ ID NO: 59770 - DNA, 276 bp, Neisseria meningitidis; identical to SEQ ID NO: 50119

SEQ ID NO: 59771 - DNA, 1587 bp, Neisseria meningitidis
atggcacttttcctcagcatattccccatcgtcctgctgatttggctgatggtgaaaaaaaacagtatgccctcctacgtcgcgctgccgattaccgcagtgctgatttacgccatcaaacttttctacttcgacgatgcgggcatgctgctcaacgccaccgccgcttccggcctcgtcaaaacgctcacgccgattaccgtgattttcggcgcgattatgttcaaccgtatgatggaaaccacgggctgcatcgatgtcatccgcaaatggctggcgaccatcagccccaaccccgtagcgcaactgatgattatcggctgggcttttgcctttatgattgaaggcgcatccggcttcggcacgcctgccgcgattgccgcgccgattctgatgagcttgggcttcaacccgttgaaagtggcgattttcactttggtgatgaactccgtccccgtctctttcggcgcggtcggtacgccgacctggttcggtttcgcaccgctgaacctgagtgccgaagacatcctcgccatcggcaggcagaccggcgtaatgcacttcttcgcaggtttcgtcatccccgtcatcggcttgggcttcatcgtaccttggtctgaaatccgcaaaaacttgggcttcgtcgccattgccgtcttctcctgcaccattccttatgtcgcattggcgatggtcaacgaagaattcccgtcgctcgtcgccggcgcgatcggcctgatggtgtccgtattcgccgccaaccaaggctggggcttgagcaaagaccacgccaaagacccgaatgccgaaaaagtgccgttcgcccaagtcgccaaagcactcgcccctttgggtatgctgatcggcatgctggtggttacgcgcatcaaacagctcggcatcaaaggcattttgaccagcaaagaagaatggttcagcttccaactgccgtttgatttgtccaaaatcaccgtcagcgactccctgacgattaccttcggcaatattttcggacaagatgtcagcgcgtcttaccaaacgctgtacgtcccggcttggattccgtttgtgctgaccgtttggatttgcatcctgctgtataaaaccaaattcaaagatgcctggacgatttattccgtaactttcaatcaaaccaaaaaaccgctgcttgccctgatgggcgcgctgattatggttcagctgatgctggtcggcggcgacaattcgatggtgaaaatcatcggtaaggaatttgccgcaatggcgggcgaacactgggtttatttctcgccgtatctgggcgcgatcggtgcgttcttctccggttccaacaccgtgtccaacctgaccttcggcccgattcagcagcaaatcgccttggataccggcctgtccgttaccctgattctggcgttgcagtccgtcggcggcgcgatgggcaatatggtgtgcctcaacaacatcatcgccgtatgtaccgtattggatgtgaaaaattccgaaggtgcgattatcaagaaaaccgttatcccgatggcgatttacggcgtgattgccgtcgtcgcggcaatgattttcttcctctag

SEQ ID NO: 59772 - DNA, 465 bp, Neisseria meningitidis
atgcaaggcaatcaagctgttgttgattatatgaacgaattgctgtctggcgagctggcggcacgcgaccaatactttatccactcccgcctctactccgaatggggctacaccaaactttttgaacgtctcaatcacgagatggaagaagaaaccacacacgccgaagacttcatccgacgcatcctgatgctgggcggtacgccgaaaatggcgcgcgccgagctgaatatcggcacggacgtggtttcctgcctcaaagccgacctgcaaaccgaatacgaagtgcgcgacgctttgaaaaaaggcatcaaactgtgcgaagaggcgcaagactatgtcagccgcgatttgatggtcgcccaactgaaagataccgaagaagaccacgcccactggctggaacagcagcttcgcctgatcgagttaattggcgaaggcaactactaccaaagccaactgtaa

SEQ ID NO: 59773 - DNA, 1497 bp, Neisseria meningitidis
atgcaagtaaatattcagattccctatatactgcccagatgcgtgcgtgctgaagacaccccctacgcttgctatttgaaacagctccaagtcaccaaagacgtcaactggaaccaggtacaactggcgtacgacaaatgggactataaacaggaaggcttaaccggagccggagcagcgattattgcgctggctgttaccgtggttactgcgggcgcgggagccggagccgcactgggcttaaacggcgcggccgcagcggcaaccgatgccgcattcgcctcgctggccagccaggcttccgtatcgctcatcaacaacaaaggcaatatcggtaacaccctgaaagagctgggcagaagcagcacggtgaaaaatctgatggttgccgtcgctaccgcaggcgtagccgacaaaatcggtgcttcggcactgaacaatgtcagcgataagcagtggatcaacaacctgaccgtcaacctggccaatgcgggcagtgccgcactgattaataccgctgtcaacggcggcagcctgaaagacaatctggaagcgaatatccttgcggctttggtgaatactgcgcatggagaggcagcaagtaaaatcaaacagttggatcagcactacattgcccataagattgcccatgccatagcgggctgtgcggcagcggcggcgaataagggcaagtgtcaagatggtgcgatcggtgcggcggtcggtgaaatccttggcgaaaccctactggacggcagagaccctggcagcctgaatgtgaaggacagggcaaaaatcattgctaaggcgaagctggcagcaggggcggttgcggcgttgagtaagggggatgtgagtacggcggcgaatgcggctgctgtggcggtagagaataattctttaaatgatatacaggatcgtttgttgagtggaaattatgctttatgtatgagtgcaggaggagcagaaagcttttgtgagtcttatcgaccactgggcttgccacactttgtaagtgtttcaggagaaatgaaattacctaataaattcgggaatcgtatggttaatggaaaattaattattaacactagaaatggcaatgtatatttctctgtaggtaaaatatggagtactgtaaaatcaacaaaatcaaatataagtggggtatctgtcggttgggttttaaatgtttcccctaatgattatttaaaagaagcatctatgaatgatttcagaaatagtaatcaaaataaagcctatgcagaaatgatttcccagactttggtaggtgagagtgttggtggtagtctttgtctgacaagagcctgcttttcggtaagttcaacaatatctaaatctaaatctccttttaaagattcaaaaattattggggaaatcggtttgggaagtggtgttgctgcaggagtagaaaaaacaatatacataggtaacataaaagatattgataaatttattagtgcaaacataaaaaaatag

SEQ ID NO: 59774 - DNA, 957 bp, Neisseria meningitidis; identical to SEQ ID NO: 42418

SEQ ID NO: 59775 - DNA, 702 bp, Neisseria meningitidis
atgttccgcatcgtcaaatggctgattgccctgcccgtcggcatctttatctttttcaatgcctatgtgtacggcaacatcattacctaccgcgccgtcgcgccccatcggactgcctttatgtcgatgcggatgaagcagtttgaacaggaaggtcgcgatgtcgcactggattaccgctggatgccctacaaccgcatctcggtcaacctgaaaaaagccctgattgcttccgaagatgcccgtttcgccgggcacggcggcttcgattggggtggcattcaaaacgccatcaggcgcaaccggaacagcggcaaagtgaaggcgggcggttcgaccatcagccagcagcttgccaaaaacctgtttttaaacgaaagccgcagctatatccgcaaaggcgaagaagcggcgattaccgcgatgatggaagccgttaccgataaagacaggattttcgaactgtatctgaattcaatcgagtggcactacggggtgtttggcgcggaagccgcgtcccggtatttttatcaaatacccgccgccaaactgagcaaacagcaggcggcgaaactgactgcccgcgtccccgccccgctctactacgccgaccatccgaaaagcaaacggctccgcaacaaaaccaatatcgtgctcagacgcatgggttcggcagagttgcctgaaagcgacacggactga

SEQ ID NO: 59776 - DNA, 423 bp, Neisseria meningitidis; identical to SEQ ID NO: 51372

SEQ ID NO: 59777 - DNA, 138 bp, Neisseria meningitidis; identical to SEQ ID NO: 43740

SEQ ID NO: 59778 - DNA, 312 bp, Neisseria meningitidis; identical to SEQ ID NO: 38411

SEQ ID NO: 59779 - DNA, 1065 bp, Neisseria meningitidis; identical to SEQ ID NO: 43605

SEQ ID NO: 59780 - DNA, 333 bp, Neisseria meningitidis; identical to SEQ ID NO: 50786

SEQ ID NO: 59781 - DNA, 1914 bp, Neisseria meningitidis; identical to SEQ ID NO: 51302

SEQ ID NO: 59782 - DNA, 2439 bp, Neisseria meningitidis
atgacagaaaaatcccataaaaaaacagcaaaaggcagggcgggaagcccgtccccaacgtccgcacgcaacaagaaagccgacaacggcgcacggggcaataaagtttccgagcggctcaaggcggtcaaagagttgcagaaaaccgaaaccaaaaaggcgcgtcccgaacatgtcgtcaaccttatcggcgacgcactgtggctgatgggtttggcggcaaccttgtatttggcgatttccctgatcagtttcgatatgggcgatccgtcttggtcgcacagttcgccggttgtggaagatgtcgccaattggggcggactgttcggcgcgtatgttgccgatgtcggctattatcttttcggctggtcgttctggtggtggatagcggctgcctgcgtcatgctgtataaaaattttcgtctgcacgcaaaacagacggaaaacgaggcatacaaccacaaaatcgctgccgccgcgctgtttgtcctgacggtcttcagccccgtcttggagtattttgtgctgggcggaaaatatgccgactccctgcctgtcggagcaggcggtatggtcggcatacgcgtcggcgcagtgtttgcgtggctgctggggaaatcgggcagcctgctgattatcttggttgttctgctgttgtcgttgtccctgctggtgcagatttcatggctggaatttttgaacggtgcgggcagggcggttcaaaaccgcctgagtgccttatccggcaaggtcatggctttaggaaaacgccggccgaatagcaaaacagacggtgtcgatacccaaaatacacggcgcatggtaaaagaagccaagaatattacggccaaacccgttgccttgcccgaaggcagcagcagcaaccgcaaatccgtcgcggtttccgtcgcgccgtcgcccaaaattcaggtttctctgtttgaagatgacgaacctcggcaggcgggcgaataccacaagcctacattgaacctattgcggattcctgacagcgaacccgtcagcatcaatcccgccgaattggagcgcactgccgaactgatcgaatccaaactggcagaattcggcatcggcgtacaagtcgtatccgccacatccggccccgtcatcacgcgctacgaaatcgaacccgcgcaaggtgttaaaggcagccaaattgttgccttgtcgaaagatttggcacgctctatgtcgctgcagtccgtgcgtattgtcgaaaccatcgcaggtaaaaacacgatgggcatcgagttgcccaacgataaacgccaagacgtgatgttgagcgaaatcttgtcctcgcccgtgtttgccggagccaaatccaagctgaccgtcgcgctgggcaaagacattgccggtatccccgttgtcggcgacttggcgaaaatgccgcaccttttggtcgccggtatgactggttcgggcaagtccgtcggcgtgaacggcatgattatgtctatgcttttcaaagctacgcccgacgaagtccgctttatcatgatagacccgaaaatgcttgagttgagcatttacgacggcattccgcacctgctctgtcccgtcgtgaccgatatgcgcgaagcggggcaggcgttgaactggtgcgtcgccgaaatggaaaaacgctaccgcctgctttcccacgccggtgtacgcaatctggaaggcttcaaccaaaaagtcgaagccgcaaaagcggcaggcaagccgctgctcaatccgttcagcctgacccccgacagccccgagcctttggaaaaactgccgatgatcgtggtcgttatcgacgaacttgccgacctgatgatgaccgaacgcaaagctgtcgagcagcaaatcgcccgtctcgcccaaaaagcgcgcgccgccggtatccatatgattgtcgccacccaacgtcccagcgtcgatgtcgttaccggcctgattaaagccaacatcccgacgcgtatggcgtttaccgtgcaaagcaaaatcgacagccgtaccatcctcgaccaaatgggcgcggacgaactgctcaaatatggcgattcgctgttcctccagcccggcagtgccgaaccgacccgcctgcaaggcgcgtttgtttcagacgacgaagtacatcaagtcgtcaactacgtcaaatcgcaagccccagccgactatattgaaggtctgctcagcggcgaggccgcgctggaaactgccaatatcgttaatccgaatgcagacagcgacgaattgttcgatcaggcagtcgcctatgttttggaaagcaaaaaaacctccatttcgtctttgcagcggcagttgcgtatcggctataaccgcgcggcaaacctgatggaggcactggaaaatgcgggtgtcgtttctcccgccgacctcaacggcagccgtaaaattttggcgcacaaggaccatttgtag

SEQ ID NO: 59783 - DNA, 1635 bp, Neisseria meningitidis
atggcagcaaaagacgtacaattcggcaatgaagtccgtcaaaaaatggtaaacggcgtgaacattctggcaaacgccgtgcgcgtaaccctgggtcccaaaggccgcaacgtggtggttgaccgcgctttcggcggcccgcacattaccaaagacggcgtaaccgtcgctaaagaaatcgaactgaaagacaagtttgaaaatatgggcgcgcaaatggtaaaagaagtcgcgtccaaaaccaacgacgtggcgggcgacggtacgactaccgccaccgtactggcgcaatccatcgttgccgaaggtatgaaatacgttaccgccggtatgaacccgaccgacctgaaacgcggtatcgacaaagccgtcgccgctttggttgaagagctgaaaaacatcgccaaaccttgcgacacttctaaagaaatcgcccaagtcggctctatttccgccaactctgacgaacaagtcggcgcgattattgccgaagcgatggaaaaagtcggcaaagaaggcgtgattaccgttgaagacggcaaatctttggaaaacgagctggacgtggttgaaggtatgcagttcgaccgcggctacctgtctccttacttcatcaacgacgctgaaaaacaaatcgctgctttggacaatccgtttgtattgttgttcgacaaaaaaatcagcaatatccgcgatttgttgcctgttttggaacaagtggccaaagccagccgcccgctcttgattatcgctgaagacgtggaaggcgaagccttggcgactttggtggtgaacaacatccgcggcatcctgaaaaccgtggccgtgaaagcaccgggctttggcgaccgtcgcaaagccatgttgcaagacatcgccattttgaccggtggccaagtgatttcggaagaagtgggcttgtctttggaaaaagccactttggaagatttgggtcaagccaaacgcattgaaatcggcaaagaaaacaccaccattattgatggcttcggtgatgccgcccaaatcgaaggccgtgtggcggaaatccgtcagcaaatcgaagtggccaccagcgactacgatcgtgaaaaactgcaagagcgcgtggccaaattggccggcggtgtggcggtgattaaagtcggtgccgcaaccgaagtggaaatgaaagagaagaaagaccgcgtagaagacgcgctgcacgcgacccgtgccgccgttgaagaaggcgtggtcgcaggcggcggcgtagccctgttgcgcgcccgtgccgctctggaaaacctgcacaccggcaatgcagaccaagacgcaggcgtacaaatcgtcttgcgcgccgttgagtctccgctgcgccaaatcgttgccaacgcaggcggcgaacccagcgtggttgtgaacaaagtgttggaaggcaaaggcaactatggttacaacgctggcagcggcgaatacggcgacatgatcgaaatgggcgtactcgaccccgccaaagtaacccgttccgcgctgcaacacgccgcgtctatcgccggcctgatgctgaccacagactgcatgattgctgaaatccctgaagacaaaccggctatgcctgatatgggcggcatgggtggtatgggcggcatgatgtaa

SEQ ID NO: 59784 - DNA, 198 bp, Neisseria meningitidis; identical to SEQ ID NO: 36305

SEQ ID NO: 59785 - DNA, 171 bp, Neisseria meningitidis
atgaaatacggcgtattttttgcggcggcaaccgccctcctgctttccgcctgcggttacaaaggcgacctctacctgcccaaagaaggcgacaaggcgcgtttcggcgtaatccaaaccggtttgcagcttcaaggcaaaccgcaatccgcccctccaacccaaaaatga

SEQ ID NO: 59786 - DNA, 1188 bp, Neisseria meningitidis; identical to SEQ ID NO: 37286

SEQ ID NO: 59787 - DNA, 564 bp, Neisseria meningitidis
atgaaaatactcgctttattaattgccgctacctgtgctttatctgcgtgtggcagccaatctgaagaacaaccggcatctgcacaaccccaagagcaggcacaatccgaattaaaaaccatgccggtaagctataccgactatcaatcagcagccaataaagggctgaatgaccaaaaaaccggtctgacccttcctgaacatgttgtccctatcgacaatgcggaaggaaagaatctgctgcatgacttttcagacggcctcacaatcttaaccgttgataccgataaagccgacaaaattactgctgtccgagtagtctggaatacagatgcaatgcctcaaaaagcggaaaaactgtccaaagctgccgcagccttgattgcggcaaccgctccggaagaccgcacaatgctgcgtgataccggcgaccaaatcgaaatggcgattgacagccataatgcgcaaaaagagccaacccgagaatgggcgcgtggtgggattgcttataaagtcactgttaccaatttacggagcgtggttttgacggcaaaagctgagtaa

SEQ ID NO: 59788 - DNA, 666 bp, Neisseria meningitidis; identical to SEQ ID NO: 43628

SEQ ID NO: 59789 - DNA, 402 bp, Neisseria meningitidis; identical to SEQ ID NO: 53833

SEQ ID NO: 59790 - DNA, 1608 bp, Neisseria meningitidis
atgagtatcgtagaaatcaaagtccccgatatcggcggtcacgaaaacgtcgacatcatcgccgtagaagttaaagcgggcgacaccatcgccgttgacgacaccctgattacactggaaaccgacaaagccacgatggatgtgcctgccgatgcggccggtgtcgtgaaagaagtaaaagtcaaagtcggcgacaaaatctccgaaggcggcgtaattttgaccgttgaaaccggtgccgccgctgccgaagccgctcctgctgctgccgaagcacaacctgcacctgctgccgcacccgttgccgcaggcggtgcaaccgttcaagtagccgttcccgacatcggcggccataccgatgtggatgtaatcgccgtcgagatcaaagtcggcgataccgttgccgaagacgacacgctgattactttggaaaccgacaaagcaacgatggacgtaccttgtaccgctgccggtgtcgttaaagccgtattcttaaaagtcggcgacaaagtgtccgaaggtactgccattatcgaagtagaaaccgccggctctgccgcagcagcccctgctcaagccgctcaagctgccgcaccggctgccgctccgcctccgactgctgccgccgcacccgccgccgcgcctgcaccttctgcacctgccgctgccaaaatcgacgaggccgctttcgccaaagcacacgccggcccttccgcacgcaaactggcgcgcgaattgggcgtggatttgggccaagtcaaaggtaccggcttgaaaggccgtatcgtgggcgacgacatcaaagcctttgtgaaatccgtaatgcagggtggcgcggcaaaacctgccgcagccggcgcatctttgggcagcagtctggacttgctgccgtggcctaaagtggacttctccaaattcggcaatgtcgaagttaaagaattgtcccgcattaagaaaatctccggtcaaaacctgtctcgcaactgggtggtgattccccacgttaccgtacacgaagaagcagatatgaccgagctggaagaattccgcaaacaactgaacaaagaatgggaacgcgaaggcgtgaaactgtcaccgttggcgttcatcatcaaagcctccgtttccgcgctgaaagccttccccgaattcaacgcttctctggacggcgacaacctggtgctgaaaaactacttcaacatcggtttcgcagccgatacgccgaacggcttggttgttcccgtcatcaaagacgtggatcaaaaaggcttgaaacaaatcagccaagagctgaccgaattgtccaaaaaagcccgcgaaggcaagctcaaaccgcaagaaatgcaaggcgcgtgctttaccatttccagcttgggcggtatcggcggcacaggcttcacgccgattgtaaacgctcccgaagtcgccatcttgggcgtgtgcaaatcccaaatcaaaccgatttggaacggcaaagagtttgccccgcgcctgatgtgcccgttgagcctgtccttcgaccaccgcgtcatcgacggtgcggccggtatgcgctttaccgtattcttggcgaagctgttgaaagacttccgccgcattaccctgtaa

SEQ ID NO: 59791 - DNA, 762 bp, Neisseria meningitidis
  misc_feature 747, 748, 749, 750, 751: 'n' is a, c, g or t
ttgcagaaagtcgtgcgccatatcgcgcaaaccgaaattatgccgcgttttttgaatacgccgtcccaccgcaaggaagacggttcgatgttgagcgaggcggacattgccgcgcagacggcttttgccgccgcgttgccgcttctgatcgattgcccgatgttgggcgaggaaatgtcgcgacaggaacagtcggctctgtgggaacaatattcgggggaaaaggggctgtggattgtcgatccgatagacgggacaaacaattttgtcaacgggctgccgcattttgccgtgtcggtggcgtttgtccgcaacgggcgcgccgaattgggcgtaatctacaatccggtcagcggcgaatgtttttatgctgaacgcgggcagggtgcgtttttaaacgggacacgcctgcctttgcgtctcgtggataagaagttgaatgaggcaatcgcgggcgtggaaatcaaatatctgcgttcgggcaaactgtccagccgcatgagtacgctcgcgccttttggaacgatacggagtatgggcagcagtacgttggactggtgttatctggcgtgcgggcgttatgatgtttatgtccacggcgggcagaagctgtgggattatgccgccggcgcgttgattttcgaggaggcgggcggcaggctgacgactttggaaggcgacgggttttggagtggtgaacacgtgttcaaacgctcggtcgtcgccgcgctcgaaccgaagctgttnnnnncacacacttaa

SEQ ID NO: 59792 - DNA, 291 bp, Neisseria meningitidis; identical to SEQ ID NO: 42259

SEQ ID NO: 59793 - DNA, 1311 bp, Neisseria meningitidis; identical to SEQ ID NO: 43413

SEQ ID NO: 59794 - DNA, 1116 bp, Neisseria meningitidis; identical to SEQ ID NO: 37027

SEQ ID NO: 59795 - DNA, 774 bp, Neisseria meningitidis; identical to SEQ ID NO: 42606

SEQ ID NO: 59796 - DNA, 843 bp, Neisseria meningitidis; identical to SEQ ID NO: 42158

SEQ ID NO: 59797 - DNA, 483 bp, Neisseria meningitidis; identical to SEQ ID NO: 38977

SEQ ID NO: 59798 - DNA, 390 bp, Neisseria meningitidis
atgtggaaaatcataaaagaggatagtgatgatttagaatttgcaattaaatgcttattctctcaatctattgatttaaatgaattcaaattatggattgaacaagtaatacgagatatgcccatcgaggacatccctttttatatttttgacttggcggattttgatggaggaattgccgatattgacaatattgtaggttttgtttcgagttacagcctatcaaaatcgaaaaaaaatgccttgacaggcattgccttcttaagggggatagatgtctatgatccgcctatttcaaaagaaaaagcattaaaagccttaaagaaacatcctgaaatttatcagaagtttcagcatttctttccgtttgtagaactgcccccgctttaa

SEQ ID NO: 59799 - DNA, 1011 bp, Neisseria meningitidis; identical to SEQ ID NO: 43278

SEQ ID NO: 59800 - DNA, 873 bp, Neisseria meningitidis; identical to SEQ ID NO: 43062

SEQ ID NO: 59801 - DNA, 261 bp, Neisseria meningitidis
ttgacgaaggcggtacgccgaaaaaatgtgcaaacccccaaaatatgctatgcattccgaacgccctccgcatacgggcaataccttgccgacgcgggattcgactacctcagcttcgccaacaaccacagcaacgacttcggcgcgcaaggcatcacggcaacggcggcgagcggcagctcttttacatactcgattgcgctaaagccgctgccgataacgaggccaaaattgcggaaaataccgccatcgcccagataa

SEQ ID NO: 59802 - DNA, 780 bp, Neisseria meningitidis
atgcatatcatcgattcgcactgccacctcaattttgaaggtttgaaagaacgcctgcccgaagttttgtccaacatggaagcaaacggcgtggggcaggcgctcgccatcagcgtcagcagggaaagttttgccgaagtatccgctatcgccgaagtttatgaacatatttactgcacaataggcgtacatcccgacagcaaggaagccgaagaattttctattgcggaaatggttgctgcagccgcccatccgaaagtggtcggcattggcgagacgggtttggattattactggtgcaaaggcgatttgtcctggcaacacaaacgctttgcagaccacatcgaagcagccaatcaaaccggactgcccgttatcgtccatacgcgtgatgcggcggcggacaccttgtctatcctgaaagaatgccgggttaattcgggcgttatccactgtttttccgaagacatcggttttgcccgtgcagcaatggatttggggctttatatttctttctcgggaatcgttacctttaaaaacgcacccttggttcaggaggcggcgaaatacgttccggacgaccgcattttagtggaaaccgatgcgccgttcctcgcccccgtacccaagcgcggcaggcagaacgaaccggctttcgtgcgttatactgccgaacatatcgccaaattgcggaaccaaacattggaacaggttgcggcatatacgacggaaaacttttaccagctgtttaaaaaagtacccgatatgcgggccgtctga

SEQ ID NO: 59803 - DNA, 501 bp, Neisseria meningitidis
atggcggatttgcagaaaacttttcaaacttcgttccgtgatgcgatggcatcctgtgcggcaggcgttcatgtcatcacgacagacggtgcggcagggcgttacggcattacaatgacggcggttgcgccggttaccgacgagccgccgaccgtgatgctgtgcatcaaccggagtgcgcgaatcattccgatcctgtcggaaaacggcagcctctgcatcaatacgctggcggacgaacatcaggatgttgccgaacattttgccggattgaccggcctgtcgcccgaagagcggtttgcctaccacatctggcatcgcggcaaaacgggacaacttgaaatagagggcgcgttggcgcacctgcacgggcatattgtcggcaaacatgaaatcggcacgcattttgtgttttacgtcaggctcgacgaaatcaaaaactgcgggtgcaaacgccccgcgctgctgtatttcagacggcagtttaggtctttagactga

SEQ ID NO: 59804 - DNA, 768 bp, Neisseria meningitidis; identical to SEQ ID NO: 43234

SEQ ID NO: 59805 - DNA, 1647 bp, Neisseria meningitidis
atgaaacaatccgcccgaataaaaaatatgaatcagacattaaaaaatacattgggcatttgcgcgcttttagccttttgttttggcgcggccatcgcatcaggttatcacttggaatatgaatacggctaccgttattctgccgtgggtgctttggcttcggttgtatttttattattattggcacgcggtttcccgcgcgtttcttcagttgttttactgatttacgtcggcacaaccgccctatatttgccggtcggctggctgtatggtgcgccgtcttatcagatagtcggttcgatattggaaagcaatcctgccgaggcgcgtgaatttgtcggcaatcttcccgggtcgctttattttgtgcaggcattatttttcatttttggcttgacagtttggagatattgtgtatcggggggggtatttgctgacgtaaaaaactataaacgccgcagcaaaatatggctgactatattattgactttgattttgtcctgcgcggtgatggataaaatcgccagcgataaagatttgcgagaacctgatgccggcctgttgttgaatattttcgacctgtattacgatttggcttccgcgccggcacaatatgccgccaagcgcgcccacattttggaagcagcaaaaaaagcgtcaacatggcatatccgtcatgttgcgcccaagtataaaaattatgttgtggttatcggtgagagcgcgcgttcggattatatgaatgtttacggtttcccattgcccgatacgccttttttgagtcagaccaaagggctgttgataaacggttaccaatcgaccgcccacgcgacgaatctttcgctgccgcagactttggggctgccgggagaaccgaacaataacatcgtcagcttggcgaagcaggcgggttttcggacggcgtggctgtctaatcaaggaatgttggggcattttgccaacgaaatttccacctatgccctacgcagcgattatccgtggtttacccaaaggggtgattatggcaaaagcgcggggttgagcgaccgccttttgttgccggcgttcaaacgggttttgataggaaatgcaggcacgaagcctcggctgattgtgatgcacctgatgggttcgcacagtgatttttgcacacgtttggataaggatgcgcggcggtttcagtatcaaactgaaaaaatatcctgctatgtttccaccatcgcgcaaaccgataaatttttagaagatacagttaagatattgaatgaaaataaagaaagctggtctttggtttacttttccgaccacggtttgatgcatgtcggtaaaggcggcgagcgaacgttgacacatggtgcgtggaagcgtcaaagctacggcgtgccgctggttaaaatttcgtccgatgacacgcggcgcgaaatgattaaagtgaggcgcagcgcgtttaattttttacgcggattcggcagttggacgggtatcgaaaccgacgagttgcccgatgacggctatgatttttgggggaatgttcccgatgtgcagggcgaaggcaataaccttgcctttatcgacggactgcccgacgaccccgcgccgtggtatgcgggaaaaggcaaatcgactaaaaatacgtctaaaaaatga

SEQ ID NO: 59806 - DNA, 924 bp, Neisseria meningitidis
atgctgcaaagaactttggcgaaatccatcagcgttaccggagtcgggctgcattccggcgaacgggtcgcactgaccctgcaccccgcgcctgaaaacagcgggatttccttccgccgtaccgatttggacggcgagatgggcgaacaaatcaaactgaccccttatttgatcaacgatacccgcctttcctccaccatcgttaccgacaaaggcgtgcgcgtcggcacgatcgaacacattatgtccgcgctgtccgcctacggtatcgacaacgcgctgattgagctgaacgcgcccgaaatcccgattatggacggctccagcctgccgtttatttaccttttgcaagatgcgggcgtggtcgatcaaaaggcgcaaaagcgttttttgaaaatcctcaagcctgtcgaaatcaaagaagcgggcaaatgggtgcgctttacgccgtatgacggctttaaggtaacgctgaccatcgaattcgaccatccggttttcaaccgcagctcgcccacttttgaaatcgatttcgccggcaaatcctacatcgacgaaatcgcgcgcgcgcgcactttcggctttatgcacgaagtggaaatgatgcgcgcccacaatctgggtttgggcggcaatttgaacaacgccatcgtgattgacgacacggatgtcctgaatcctgaaggcttgcgctatcccgatgagtttgtgcgccacaaaatccttgatgccatcggtgatttgtatatcgtcggacatccgattgtcggcgcatttgaaggctacaaatcgggacacgccatcaacaacgcactcttgcgcgcggttttggcagacgaaacggcttacgaccgggtggaatttgccgacagcgatgatttgcccgacgcatttcacgagctgaacatcagaacttgtggataa

SEQ ID NO: 59807 - DNA, 171 bp, Neisseria meningitidis; identical to SEQ ID NO: 42894

SEQ ID NO: 59808 - DNA, 459 bp, Neisseria meningitidis; identical to SEQ ID NO: 41438

SEQ ID NO: 59809 - DNA, 1383 bp, Neisseria meningitidis
atggcaaatattgcccgcgacatcttcaaagcctacgacatccgaggcattgtcggcaaaaccctgactgacgatgccgcctatctcatcggcagggccatcgccgccaaagccgccgaaaaaggcatgacccgcatcgcgctcggacgcgacggacgcttgagcggtcccgaactgatggagcacatccaacgcggctttaccgacagcggcatcggcgtactcaacgtcggcatggtcgccactcctatgctctattttgccgccatcaacgaatgcggcggcagcggcgtgatgattaccggcagccacaatccgcctgattacaacggtttcaaaatgatgctcggcggcgacacgctcgcaggcgaagccattcaagaacttttagctattgttgagaaagatggttttgttgccgccgacaaacaaggcaacgtaaccgaaaaagacatctccggcgaataccacaaccacatcgtcggccacatcaaactcaaacgcccgatgaaaatcgtgattgacgcgggcaacggcgtgggcggcgcgtttgccggcaaactctataaaggcttgggcaacgaagtaaccgagcttttctgcgacgtggacggcactttccccaaccaccatcccgacccatccaaaccgaaaaacctgcaagatttgattgccgcgctgaaaaacggtgatgccgaaatcggcttggcgtttgacggcgatgccgaccgcttgggtgtggtcaccaaagacggcaacattatttatcccgaccgccaactgatgctgttcgcccaagacgttttgaaccgcaatcccggcgcgaaagtcattttcgacgtgaagtccacccgcctgcttgcgccttggattaaagaacacggcggcaaagccataatggaaaaaaccggccacagctttatcaaatccgccatgaaagaaaccggcgcgccggttgccggcgaaatgagcggacacatcttcttcaaagaacgctggttcggcttcgacgacggtctgtacgccggcgcacgcctcttggaaatcctgtctgcctccgataatccgtccgaagtgttaaacaacctgccgcaaagcatttccacgcccgaactcaacatcgccctgcccgaaggcagcaacggccatcaggttatcgacgaactcgccgccaaagccgaatttgaaggcgcaaccgaaatcatcaccatcgacggtctgcgcgttgaatttcccgacggcttcggtctgatgcgtgcttccaataccacgccgattctggtgttgcgttttgaggcggatacgcaagcagccatcgagcggattcaaaaccaattcaaagccgtcatcgaaagcaatccgaatctaatctggcctctgtaa

SEQ ID NO: 59810 - DNA, 726 bp, Neisseria meningitidis; identical to SEQ ID NO: 50615

SEQ ID NO: 59811 - DNA, 1185 bp, Neisseria meningitidis; identical to SEQ ID NO: 42541

SEQ ID NO: 59812 - DNA, 489 bp, Neisseria meningitidis; identical to SEQ ID NO: 39373

SEQ ID NO: 59813 - DNA, 1581 bp, Neisseria meningitidis
gtggaattgaaattaaaacgtttgattttaatcctaatgttggggatgttttcggttaattcttatgccgaacgttctaagtatcacattggaaattcaaatgttagattggatattgatcatacaaaatctgtagttaccgattttcgtgttgatggtcagcgtttttcaggtcgaattatcgaaccttcaataatagaacacgtgccaacaggtgcacgctctcttgaaaaagtccccgttaaatttaccgcatcagtttcccgcgccgccgtcttgtcaggagtcggcaaacttgtccgccaaggcgcgaaattcagcacaagggcagtcccttatgtagggacagcccttttagcccacgacgtatacgaaactttcaaagaagacatacaggcacgaggctaccaatacgacaccgaaaccgacaaatttgtaaaaggctacgaatatagtaattgcctttggtacgaagacgaaagacgtattaatagaacctatggctgctacggcgttgacagttccattatgcgccttatgtccgattacagcagattccccgaagtcaaagaattgatggaaagccgaatggaaaggcttgcccgtccgtattgggaaaagttaaggaatcgtcctgatatgtattattttaaaaactacaattttaaacgttgttatttcggattgaacggcggagattgtttagttgctaaaggtgatgatggtagaacttttatcagtttctcacttcaaggaaattcaaaatacaaagaagaaatggatgccaaaaagctggaagagattttatcgttgaaagtcgatgccaatcccgacaaatacataaaggcaaccggatatcccggttattccgaaaaagtagaagtagcacccggaacaaaagtgaatatgggtcccgtcacggacaggaacgggaatcccgttcaggttgtcgcaacattcggcagggattcgcaaggcaacaccacggtggatgttcaagtaatcccgcgtcccgacttgacccccggaagcgcggaagcaccgaacgcacagccgctgcccgaagtatcgcccgccgaaaaccccgcaaacaacccgaaccccaatgagaaccccggcacgagccccaatcccgaacccgaccccgatttgaatcccgatgcaaatcccgatacggacggacagcccggcacaagacccgattcccccgccgttccgggacgcacaaacggcagggacggcaaagacggaaaggacggcaaagatggcggccttttgtgcaaattcttccccgacattctcgcttgcgacaggctgcccgagtccaatccggcagaagatttaaatctgccgtctgaaaccgtcaatgtagagtttcagaaatcaggaatctttcaagattccgcacagtgtcccgcacctgtcactttcacagtgactgtgcttgattcaagcaggcagttcgcgttcagctttgagaacgcatgtaccatagccgaacggctaaggtacatgcttctcgcccttgcttgggcggttgccgcctttttttgtatccgcacagtatctcgtgaagtctag

SEQ ID NO: 59814 - DNA, 1179 bp, Neisseria meningitidis; identical to SEQ ID NO: 50285

SEQ ID NO: 59815 - DNA, 816 bp, Neisseria meningitidis
gtggcaaaaattattgtagtaacttcaggtaagggcggtgtcggtaaaacgactaccagtgccagtattgcgacaggtttggcattacgcggatataaaactgcggtaattgattttgatgtgggtttgcgtaacctcgacctcattatgggttgcgagcgtcgtgtcgtttatgacctgatcaatgtcattcagggggaggcgacgctcaaccaggctttgattaaagataaaaattgtgaaaacctgtttattttgccggcttcccagactcgggataaagacgctttgacacgcgagggcgtagaaaaagtgatgcaggagctgtccggcaagaaaatgggctttgagtatattatttgcgactctcctgccggtattgagcagggtgcattgatggcgttgtattttgctgatgaagccattgtaacgaccaatcccgaggtttccagtgtgcgtgactccgacaggattttgggaattttgcaaagcaaatcccataaggcagagcaaggcggttcggttaaagaacatctgttgattacgcgttattctcccgaacgtgtggcaaaaggcgaaatgctgtctgtacaggatatttgcgatattctgcatattcctttgctgggtgtgattcctgaatcccaaaacgtcttgcaggcatccaattccggagaaccggtcatccatcaggacagcgtggcggcttccgaggcatataaggacgttattgcccgtcttttgggcgagaaccgtgaaatgcgtttcttggaagctgagaaaaaaagcttcttcaaacgtctgtttggaggataa

SEQ ID NO: 59816 - DNA, 372 bp, Neisseria meningitidis; identical to SEQ ID NO: 43386

SEQ ID NO: 59817 - DNA, 435 bp, Neisseria meningitidis; identical to SEQ ID NO: 38693

SEQ ID NO: 59818 - DNA, 2457 bp, Neisseria meningitidis
atgaaaaaaacctgtttccactgcgggctggatgttcccgaaaacctgcatctgaccgtccgctacgaaggcgaagaccgagaaacctgctgcgccggctgtcaggcggtcgcacaaagcattattgacgcgggcttgggcagttattacaaacaacgcaccgccgacgcgcaaaaaaccgagctgccgccccaagaaatcctcgaccaaatccgcctgtacgacctgcccgaagtccagtccgactttgtggaaacccacggcggcacgcgcgaggcggttttaatgctcggcggcatcacctgcgccgcctgcgtctggctgatcgaacagcagcttttgcgtacagacggcatcgtccgcatcgacctcaattacagcacgcaccgctgccgcgtcgtctgggacgacggcaaaatccgcctttccgatattctgttgaaaatccggcagataggctacaccgccgcaccctatgacgcgcaaaaaatcgaagccgccaaccaaaaagaacgcaaacaatacatcgtccgcctcgccgttgccgggctggggatgatgcagacgatgatgttcgcgctgccgacctacctttacggcggcgatatcgaacccgatttcctgcaaatcctccattggggcggctttttaatggtgctgcccgtcgtattttattgcgccgtcccgttttatcaaggcgcgttgcgcgacctgaaaaaccgtcgggtcggtatggacacgccgattaccgtcgccatcattatgacctttatcgccggcgtttacagccttgcgacaaatgcggggcaggggatgtatttcgaatccatcgcgatgctgctgtttttcctgctgggcggacgctttatggaacacattgcctgccgtaaggcaggcgatgccgccgagaggctggtgaagctgattcctgcgttttgccatcatatgcccgattaccccgatacgcaggaaacctgcgaggcagctgtcgtcaaattgaaggcgggcgatatcgtgctggtcaaaccgggcgaaaccatccccgttgacggcacggtgctggaaggaagcagtgccgtcaacgaatctatgctgaccggcgagagcctgcccgtcgccaaaatgccgtctgaaaaagtaaccgccggcacactcaacacgcaaagccccctgattatacgcaccgaccgcaccggcggcggcacgcgactgtcgcacatcgtccgcctgctcgaccgcgccttagcgcaaaaaccgcgcactgccgagttggcggaacaatacgcctcgtctttcatattcggcgaactcctgcttgccgtccccgtcttcatcggctggacgctgtacgccgacgcgcacaccgcattgtggattaccgtcgccctgctggtcattacctgcccctgcgccttatcgcttgccacgccgaccgcgctggcagcttctaccggtacgctggcgcgcgaaggtattttaatcggcggaaagcaggcaatcgaaaccctcgcccaaaccaccgacatcattttcgacaaaacaggcacgctgacccaaggcaatcccgccgtccgccggattgaactgctcggcagcatgaccgaagcccaagtgctggcagtggcgcaaagtttggaacagcagtccgaacacccgctcgcgcgcgccatcctcaactgccgcatttcaggcggcagcgtccccgacattgctattaaacaacgcctcaaccgcatcggcgaaggcgtgggcgcgcaactgaccgtcaacggcgaaacacaggtttgggcattgggcagggcatcctatgtcgccgaaatttcaggtaaagaaccgcaaacagaaggcggcggcagcgcggtttacctcggcagtcaaagcggtttccaagccgtgttctacctgaccgaccccttgaaagacagcgcggcggaggcggtgcggcagttggcaggcaaaaacctgaccctgcacatcctcagcggcgaccgcgaaaccgccgttgccgaaaccgcccgcgccctgggtatcacgcactaccgcgcccaagccatgcccgaggacaaactggaatacgtcaaagccttgcaaaaagaagggaaaaaagtgctgatgataggcgacggcatcaacgacgcgcccgttttggcgcaggcagacgtatccgccgccgcagcgggcgggacggatattgcgagggacggcgcggacattgtgttattgaacgaagatttgcgtaccgtcgcccacctgctcgatcaggcgcggcgcacccgccatattatccggcaaaacctgatatgggcgggcgcgtacaatatcattgccgtaccgcttgccgttttgggctatgtccaaccgtggatagccgcactgggtatgagcttcagttcgctggcggttttgggcaacaccctgcgccttcacaaacgggaggaaatgccgtccgaacaatga

SEQ ID NO: 59819 - DNA, 285 bp, Neisseria meningitidis
  misc_feature 8, 9, 10, 11, 12: 'n' is a, c, g or t
gtgtgtgnnnnnattaacaaaaatcaggacaaggcgacgaagccgcagacagtacaaatagtacggcaaggcgaggcaacgccgtactggtttttgttaatccactatacatggcattgcatcggcactgatgaaaacattcacagtgatgcaaaagtcgaatatcttcaggacggcagtttccgtggcgatgctatactcaaaatcgatgatgacggcaatatcttggcataccgtgttgtcggctcagggaaatggcgttttgaaaacaatgcctgcgcctag

SEQ ID NO: 59820 - DNA, 303 bp, Neisseria meningitidis; identical to SEQ ID NO: 36626

SEQ ID NO: 59821 - DNA, 384 bp, Neisseria meningitidis; identical to SEQ ID NO: 38324

SEQ ID NO: 59822 - DNA, 216 bp, Neisseria meningitidis; identical to SEQ ID NO: 37416

SEQ ID NO: 59823 - DNA, 597 bp, Neisseria meningitidis; identical to SEQ ID NO: 52255

SEQ ID NO: 59824 - DNA, 378 bp, Neisseria meningitidis; identical to SEQ ID NO: 37228

SEQ ID NO: 59825 - DNA, 756 bp, Neisseria meningitidis; identical to SEQ ID NO: 40584

SEQ ID NO: 59826 - DNA, 282 bp, Neisseria meningitidis; identical to SEQ ID NO: 53293

SEQ ID NO: 59827 - DNA, 459 bp, Neisseria meningitidis; identical to SEQ ID NO: 37616

SEQ ID NO: 59828 - DNA, 867 bp, Neisseria meningitidis; identical to SEQ ID NO: 43238

SEQ ID NO: 59829 - DNA, 840 bp, Neisseria meningitidis
atgctggtcgcttttttaattatgttgcgcgagggtattgaagccgcgctcattgtcggcatcgttgccggttttctgaaacagtccggacattccaaactgatgcctaaggtctggttcggggtcgtccttgcttctttgatgtgtttggggctggggtacggcatccattcggcaacgggcgagattccccagaagcagcaggagttcgtcgtcggcattatcggtttggttgccgttgccatgctgacttatatgattttatggatgaaaaaggcggcgcgttcgatgaagcggcagcttcaggattctgtgcaggcggctttgaaccgtggcagcggtcaaggatgggccttggtcggtatggcgtttcttgccgtggcgcgcgaaggtctggagagtgtttttttcctgcttgccgtattcaaacagagcccgacgtggcagatgccggccggcgcggtagcgggggttttggctgccgccgtgattggcgcgttgatttatcagggcgggatgcgcctgaatctggcgaagttttttcgttggacgggggcgtttttgattgccgttgccgccggcctgcttgccggctcgctgcgcgcgctgcatgaggcaggtatttggaacgcgcttcaggatattgtgttcgactcatcaaaatatttgcacgaagacagcccgttgggcgtgctgctcggcggatttttcggctataccgaccatccgacgcagggcgaggccttggtttggctgctgtaccttattcccgtcataacttggtttttgtgcggcagcaggccgtctgaaactttaacccgtaaagaggagctgaaatga

SEQ ID NO: 59830 - DNA, 438 bp, Neisseria meningitidis; identical to SEQ ID NO: 43498

SEQ ID NO: 59831 - DNA, 843 bp, Neisseria meningitidis; identical to SEQ ID NO: 42369

SEQ ID NO: 59832 - DNA, 966 bp, Neisseria meningitidis
atgagctacacgcaactgacccagggcgaacgataccacatccaatacctgtcccgccactgcaccgttaccgaaatcgccaaacagctgaaccgccacaaaagcaccatcagccgcgaaatcagacggcaccgcacccaagggcagcaatacagcgccgaaaaagcccagcggcaaagccagactatcaaacagcgtaagcgacaaccctataagctcgattcgcagctgattcagcacatcgacccccttatccgccgcaaactcagtcccgaacaagtatgcgcctacctgtgcaaacaccaccagatcacgctccaccacagcaccatttaccgctaccttcgccaagacaaaagcaacggcagcacgttgtggcaacatctcagaatatgcagcaaaccctaccgcaaacgctacggcagcacatggaccagaggcaaagtacccaaccgtgtcggcatagaaaaccgacccgctatcgtcgaccagaaatcccgtatcggcgattgggaagccgacaccattgtcggcaaaggacagaaaagcgcattattgaccttggtcgaacgcgttacccgctacaccatcatctgcaaattggatagcctcaaagccgaagacactgcccgggcagctgttaggacattaaaggcacataaagacagggtgcacaccatcaccatggataacggcaaagagttctaccaacacaccaaaataaccaaagcattgaaagcggagacttatttttgtcgcccttaccattcttgggagaaagggctgaatgagaacaccaacggactcatccggcaatacttccccaaacaaaccgatttccgtaacatcagtgatcgggagatacgcagggttcaagatgagttgaaccaccgaccaagaaaaacacttggctacgaaacgccaagtgttttattcttgaatctgttccaaccactaatacactag

SEQ ID NO: 59833 - DNA, 201 bp, Neisseria meningitidis; identical to SEQ ID NO: 37363

SEQ ID NO: 59834 - DNA, 1050 bp, Neisseria meningitidis; identical to SEQ ID NO: 42725

SEQ ID NO: 59835 - DNA, 864 bp, Neisseria meningitidis; identical to SEQ ID NO: 51352

SEQ ID NO: 59836 - DNA, 1557 bp, Neisseria meningitidis
atgacattagcagagttttggccgctgtgcctccgccgtcttcacgatatgttgcctcaagggcagtttgcgcaatggattgcgccccttaccgttggtgaggagggtggcgtatgggtggtgtacggcaagaaccagtttgcctgcaatatgctcaagagccagtttgccggaaaaatagaagcggtgagggaagagttggctgccggccgttccgccttcgtattcaaaccgggagaaggcgtgcgttatgagatggcggcggttgaaggtgctgtcgaacctgccgagccgtccttgcatgcggtgtcggagggaatgcccgtgcaggaggttctgttggacgagctgccgtctgaagagcctgtcaaacccgctgcgtcgaaaacggcggcggatattttggcggaacgtatgaaaaacctgccgcacgagccgcgtcaggctgccgggtctgcttcccggccggaatcggtggcagttgccaaagcacggacggacgtgcagcgcgatgcggaagaggcgcgttacgagcagaccaacctgtctccggattacacgtttgatacgttggtagaaggtaagggcaaccgccttgcggcggctgcggcgcaggcgattgcggaaagcccggggcagagttacaacccgttcttcctctatggcagcacgggtttgggcaaaacccaccttgtgcaggcggtcggcaacgagctgctgaaaaaccgtcccgatgccaaagtgcgctatatgcattcggatgactatatccgcagctttatgaaggcggttcgcaacaacacttacgacgtgttcaagcagcaatacaagcaatacgacctgctgattatcgacgacatccagttcatcaaaggcaaagaccgtacgatggaagagtttttctatctgtacaaccatttccacaacgagaaaaaacagctcatcctcacttgcgatgtgttgcctgcgaaaatcgaaggcatggacgaccgcctcaaatcccgtttttcatggggactgactttggaactcgagccgcccgaattggaaatgcgcatcgccattttgcagaaaaaggcggaagcggcgggcatcagtatcgaagacgaagccgcgctgttcattgccaatctgatccgttccaacgtgcgcgagcttgaaggcgcgtttaatcgtgtcggagcgagcagccgctttatgaaccgtcccgtcatcgacatcgatttggcgcgtaccgctttgcaggacattattgccgagaagcacaaagtcatcaccgccgacatcatcatcgatgcggtggcgaaatattaccgcatcaaaatcagcgatgtgctcggtaagaaacggacacgaaacattgcccgtccgcgccaggtggcgatgagcctgaccaaagaactgactactttgagcctgccgtctatcggcgattcgtttggtgggcgcgaccatacgaccgttatgcacggcatcagggcagtggcgaaactgcgcgaagaagatccggaattggctcaggattatgaaaagctgctgattctgattcaaaactga

SEQ ID NO: 59837 - DNA, 1149 bp, Neisseria meningitidis
atgaatactcctccttttgtctgttggattttttgcaaggtcatcgacaatttcggcgacatcggcgtttcgtggcggctcgcccgtgttttgcaccgcgaactcggttggcaggtgcatttgtggacggacgatgtgtccgccttgcgtgcgctttgccctgatttgcccgatgttccctgcgttcatcaggatattcatgtccgcacttggcattccgatgcggcagatattgataccgcgcctgttcccgatgtcgtcatcgaaacttttgcctgcgacctgcccgaaaatgtgctgcacattatccgccgacacaagccgctttggctgaattgggaatatttgagcgcggaggaaagcaatgaaaggctgcatctgatgccttcgccgcaggagggtgttcaaaaatatttttggtttatgggtttcagcgaaaaaagcggcgggttgatacgcgaacgtgattactgcgaagccgtccgtttcgatagcggagccttgcgcaagaggctgatgcttcccgaaaaaaacgcccccgaatggctgcttttcggctatcggagcgatgtttgggcaaagtggctggaaatgtggcgacaggcaggcagtccgttgacactgttgctggcgggggcgcaaattatcgacagcctcaaacaaaacggcgttattccgcaagatgccctgcaaaacgacggcgatgtttttcagacggcatccgtccgcctcgtcaaaatccctttcgtgccgcaacaggacttcgacaaactgctgcaccttgccgactgcgccgtcatccgcggcgaagacagtttcgtgcgtgcccagcttgccggaaaacccttcttttggcacatctatccgcaagacgagaatgtccatctcgacaaactccacgccttttgggataaggcacacggtttctacacgcccgaaaccgcatcggcacaccgctgcctttcagacgacctaaacggcggaggggctttatccgccacgcaacgcctcgaatgttggcaaatcctgcaacaacatcaaaacggctggcggcaaggcgcggaggattggagccgttatcttttcgggcagccttccgcatccgaaaaactcgccgcctttgtttcaaagcatcaaaaaatacgctag

SEQ ID NO: 59838 - DNA, 795 bp, Neisseria meningitidis; identical to SEQ ID NO: 51204

SEQ ID NO: 59839 - DNA, 369 bp, Neisseria meningitidis; identical to SEQ ID NO: 39308

SEQ ID NO: 59840 - DNA, 258 bp, Neisseria meningitidis
atgaaagagtttcccgatttagaaaaacacctgatcatgctggaagtcgccgttcaagacttggaagacaggtcacttgccgattctttcgtactttcctggctgctccagcggattacccgtcaagagccgacttcgattgagcaggttcgcagtttccttcaagcgcaggcaaaaacgtttgagcctgattccgttcagcgggaacaccttgaatctttgcttgagctcgttgaatccgcccaagagctcgcttga

SEQ ID NO: 59841 - DNA, 1083 bp, Neisseria meningitidis
atgtttttatggctcgcacatttcagcaactggttaaccggtctgaatatttttcaatacaccacattccgcgccgtcatggcggcgttgaccgccttagcgttttccctgatgttcggcccgtggacgatacgcaggctgaccgcgctcaaatgcgggcaggcagtgcgtaccgacggtccgcaaacccacctcgtcaaaaacggcacgccgacgatgggcggttcgctgattctgaccgccattaccgtgtccaccctgttgtggggcaactgggcgaacccgtatatctggattctcttgggcgtactgcttgccaccggtgcgctcggtttttacgacgactggcgcaaagtcgtctataaagaccccaacggcgtgtccgccaaattcaaaatggtgtggcagtcaagcgttgccattatcgccggtttggcattgttttaccttgccgccaattccgccaacaatattttgattgtcccgttcttcaaacaaatcgccctgccgctgggcgtggtcggctttttggtgttgtcttacctgaccatcgtcggcacatccaatgccgtcaacctcaccgacggcttggacggccttgcgaccttccccgtcgtcctcgttgccgccggcctcgccatcttcgcctacgtcagcggacactaccaattttcccaatacctccagcttccctatgtcgccggtgcgaacgaagtcgctatattctgtaccgccatgtgcggcgcgtgcctcggtttcttgtggtttaacgcctatcccgcgcaagtctttatgggcgatgtcggtgcattggcattgggtgccgcgctcggtaccgtcgccgtcatcgtccgccaagagtttgtcctcgtcattatgggcggattatttgtcgtagaagccgtatccgttatgcttcaggtcggctggtataagaaaaccaaaaaacgcatcttcctgatggcgcccatccatcaccactacgaacaaaaaggctggaaagaaacccaagtcgtcgtccgcttttggattattaccatcgtcttggtgttgatcggtttgagtaccctcaaaatccgctga

SEQ ID NO: 59842 - DNA, 630 bp, Neisseria meningitidis
atgaacctttttcaaaacgccaaattcttcacgacggtaaaccatctcaaagacctgccggacacaccgctcgaaattgcctttgtcggcaggagcaatgccggaaaatccagtgccatcaataccctgaccaaccatgtccgtcttgcctacgtttcaaaaacacccggacggacgcagcatatcaacttcttcgagctgcagaacggcaattttatggtcgatttgcccggctacggttatgcccaagtccccgaagcagtacgcgcacattggttcaatctgctcggcgactatctgcaacagcgcaaacagcttatcgggctggttttgattatggatgcccgccatcctttaaaagaactcgacatccgtatgctggattttttccacacgaccggcagaccggttcacatcctgctgtcaaaagccgacaaattatccaaaaacgaacagataaaaaccctgtcccaagtcaaaaaactgctcaaaccttattccgacaggcaaaacatcagcgtacagctgttttccagcctgaaaaaacaaggtattgacgaggccaaccgaactgtcggaagctggtttgacgcagcagatgccgccgcttcctctccaaaggaaaactga

SEQ ID NO: 59843 - DNA, 672 bp, Neisseria meningitidis; identical to SEQ ID NO: 51881

SEQ ID NO: 59844 - DNA, 564 bp, Neisseria meningitidis; identical to SEQ ID NO: 54577

SEQ ID NO: 59845 - DNA, 597 bp, Neisseria meningitidis; identical to SEQ ID NO: 38176

SEQ ID NO: 59846 - DNA, 561 bp, Neisseria meningitidis; identical to SEQ ID NO: 43439

SEQ ID NO: 59847 - DNA, 1197 bp, Neisseria meningitidis; identical to SEQ ID NO: 42563

SEQ ID NO: 59848 - DNA, 1503 bp, Neisseria meningitidis; identical to SEQ ID NO: 50475

SEQ ID NO: 59849 - DNA, 966 bp, Neisseria meningitidis
atgagctacacgcaactgacccaaggcgaacgataccacatccaatacctgtcccgccactgcaccgtcaccgaaatcgccaaacagcttaaccgccacaaaagcaccatcagccgcgaaatcagacggcaccgcacccaagggcagcaatacagcgccgaaaaagcccagcggcaaagccggactatcaaacagcgtaagcgacaaccctataagctcgattcgcagctgattcagcacatcgacacccttatccgccgcaaactcagtcccgaacaagtatgcgcctacctgtgcaaacaccaccggatcacgctccaccacagcaccatttaccgctaccttcgccaagacaaaagcaacggcagcacgttgtggcaacatctcagaatatgcagcaaaccctaccgcaaacgctacggcagcacatggaccagaggcaaagtccccaaccgtgtcggcatagaaaaccgacccgctatcgtcgaccagaaatcccgtatcggcgattgggaagccgacaccattgtcggcaaaggacagaaaagcgcattattgaccttggtcgaacgcgttacccgctacaccatcatctgcaaattggatagcctcaaagccgaagacactgcccgggcagctgttaggacattaaaggcacataaagacagggtgcacaccatcaccatggataacggcaaagagttctaccaacacaccaaaataaccaaagcattgaaagcggagacttatttttgtcgtccttaccattcttgggagaaagggctgaatgagaacaccaacggactcatccggcaatacttccccaaacaaaccgatttccgtaacatcagtgatcgggagatacgcagggttcaagatgagttgaaccaccgaccaagaaaaacacttggctacgaaacgccaagtgttttattcttgaatctgttccaaccactaatacactag

SEQ ID NO: 59850 - DNA, 855 bp, Neisseria meningitidis; identical to SEQ ID NO: 50372

SEQ ID NO: 59851 - DNA, 615 bp, Neisseria meningitidis
ttgataccgtatcagatacccaaaaacaaagcactgcaaaaactgattaaccttaaaaatcaattacatcaacatcagaagcaaattaaaaaccgtcttcatagcactgaagaagacttcataaggaacatacatcaagacttgatagataccatacaggacaagatggaacaggtaaaaatagccatatccgaacaaatcaaaaaacaaacggacaataaccattaccgcaatcttcaaaccatcccgagcataggcaaagacaccgcatcagttctttatgcgcaactgacagaaaaacattttaaaaccgcaaaccagtttgtatcctatgccggattaagtcccgccatcatacaatcagggacaagcgtaagaggtcggggcagattgagccgatacggaaacagacgattaaaaagtacgctgtatatgcccgccctttgtgcttaccgttttaacgcatttccgaaattaataaataatctgaaaaaagcgggtaagccaaagatggtaatcatcgttgccatcatgcgcaaactggcgaagctcgcctattacattgttaaaaccggccagccttacgatgcggaaagacaccgattgaatcaataa

SEQ ID NO: 59852 - DNA, 726 bp, Neisseria meningitidis; identical to SEQ ID NO: 51772

SEQ ID NO: 59853 - DNA, 780 bp, Neisseria meningitidis; identical to SEQ ID NO: 36766

SEQ ID NO: 59854 - DNA, 687 bp, Neisseria meningitidis
atggcaggcttaacatttgaacaaaccgtttccaacatcatcggtatgaaaggcgaaatcgtccgcgcattgggcgaaaccttcgtaatggtcggtttgtccaccacattcgccgtcgttttcggcacgttgctgggcgtgttgctcttcgtaacctccagccgccaactgcattacaacaagccggtaaatttcctgctcgacaacctcgtcaacctcatgcgcgccttccccttcgtcattttgatgattgcgatgatacccgccacacgcgccattgtcggcagcaccatcggtccagttgccgcctcgctggtattgagcgtgtcgggattgttttattttgcccgactggtggaacaaaacctgcgcgaagtccccaaaggcgtgattgaagccgccgccgcgatgggtgcgcctccgattgccatcgtctgcaaagtcctcttgaacgaagcgcgcgcgggcatggtttccagcattaccgtgcttgccatcgggcttttgtcatacagcgcggcggcagggatgataggcggcggcggcttgggcgacctcgccatccgctacggctactaccgctaccaaaccgaagtcatcgtcttcatcgtcgccctcctcgtgctgctcgttatcctgattcaaagcatcggcaacgcgttggcgcggaaactcgacaaacgttga

SEQ ID NO: 59855 - DNA, 771 bp, Neisseria meningitidis; identical to SEQ ID NO: 52904

SEQ ID NO: 59856 - DNA, 123 bp, Neisseria meningitidis; identical to SEQ ID NO: 50914

SEQ ID NO: 59857 - DNA, 2781 bp, Neisseria meningitidis; identical to SEQ ID NO: 52165

SEQ ID NO: 59858 - DNA, 324 bp, Neisseria meningitidis
atgatgaccgaaagcgagtttatccgcgcgagcgaagcattatttgaacacatcgaagaccaaatcgacgaaaacggctgggatttcgactgccggtttgccggaaacgtcctgaccatcgaagccggagacggcacgcaaatcatcgtcaaccgccacacgcccaatcaggaattgtggattgccgccaaaagcggcggctaccatttcgccgagcaaaacggcaaatggctggcaacgcgagacagccgcgatttttatgatgttttaaacgaagccctgagcgcggcttcgggcgaagcggtaaagattgccgaattgtaa

SEQ ID NO: 59859 - DNA, 288 bp, Neisseria meningitidis
atgaacaaagaaatagtcggtattttctttataccgatgggcatcatcagcatgtgtatggccgcattgtggcagatgtatgtgatgatgaccgaaacttatacgctcaaccgtttcaaagataaagaattggtttggcgcgtggcattgttgtttatcagtttcagccttgccgtttatctgctctgcccgaattcgcgtaaaaaaggcatcgtcttttttattctcgggggaggcggtgcagccatgtatctgctggcgcggatgtggttgcctttcagcaagtga

SEQ ID NO: 59860 - DNA, 120 bp, Neisseria meningitidis; identical to SEQ ID NO: 43584

SEQ ID NO: 59861 - DNA, 1251 bp, Neisseria meningitidis; identical to SEQ ID NO: 51358

SEQ ID NO: 59862 - DNA, 345 bp, Neisseria meningitidis; identical to SEQ ID NO: 50572

SEQ ID NO: 59863 - DNA, 807 bp, Neisseria meningitidis
atgtggcattgggacattatcttaatcctgcttgccgtaggcagtgcggcaggttttattgccggcctgttcggcgtaggcggcggcacgctgattgtccctgtcgttttatgggtgcttgatttgcagggtttggcacaacatccttacgcgcaacacctcgccgtcggcacatccttcgccgtcatggtcttcaccgccttttccagtatgttggggcagcacaaaaaacgggcggtcgactggaaaaccgtatttgcgatgatgccgggtatgatattcggcgtattcacgggcgcactctccgcaaaatatatccccgcgttcgggcttcaaattttcttcatcctgtttttaaccgccgtcgcattcaaaacactgcataccggccctcagacggcatcccgcccgctgcccggactgcccggactgactgcggtttccacactgttcggcgcaatgtcgagctgggtcggcataggcggcggttcactttccgtccctttcttaatccactgcggcttccccgcccataaagccatcggcacatcatccggccttgcctggccgattgcactctctggcgcaatatcgtatctgatcaacggtctgaatattgcaggattacccgaagggtcgctgggcttcctttacctgcccgccgtcgccgtcctcagcgcggcaaccattgcctttgccccgctcggtgtcaaaaccgcccacaaactttcttctgccaaactcaaaaaatccttcggcattatgttgcttttgattgccggaaaaatgctgtacaacctgctttaa

SEQ ID NO: 59864 - DNA, 1197 bp, Neisseria meningitidis
atggcgaaaatcattacgccgctgtcggcaaatcaggttaaaaatgcgaagccgcgcgataagctgtataagttgtcagacgggggcgagctggctttgtgggtctacccgacgggcgggcggagttggaagctgtcgtttgtgcaggatggaaggcagcagacaatttcgctggggcggtatcctgatttttcgctggccgatgcgcgggaatggcgggaggaggtgcgccgaaaacgggcgcacggggaaaatgtcgtcaataagaaggtgcgggcggattttgcttttgagaaggtggcgcgtgattggtttgtgcgttggtcgaaggggcggtctgaaaagtatgccggacaggttatgcggaattttgagcggtgggtttttccggctatcggcaatcttgatattcgtcaaatcaggacggcggatgtggtcggctgtctgcgtgtgatggaggcgcgcggtatcgttgatacgttgcgcaaaacgaaaaacagtctgaagatggtgtttgcgtttgcggtcggttcgggaatgatggaaatcaaccctgtcgcgcaaatcggttcgggtgtgtttgaacgggcgaaaacggggaatatggcggcgttgagtccgtctgaattgccgcgcctgattgattttttggagcagcgcaatgaatttgcggtttatgcgggcagggtgcgtatccatcctgtaacgcggctttgtatctattggctgctgttgacaatgacgcggattcaggaggcggcgttgatggagtggtcggagttggacggggaggtttggcgtatccccgccgaacggaaaaaggagcggcgggggcatgatgtgccgctgtcgcgggcgatgcagtgggtgttggatcaggcgcgggcgttgaatgtgaacgggcggtttgtgtttgaaagtgtgaattttcaagggcatatcaataaggaaagtccgcgcgtggcgatgcagcgggcggggctggatacgacggcgcacggtttgcgctcgcttgcgcgtacttatttgcgcgaggttctgaaggtggataatgatgtggcggaaaagctgcttgcccattcgttggggacgaggacgcaaacggcttacaaccgctcggagctttgggaggagcgtaaggatgcgctggaacggtgggggaatgatgttttgaggcttgccaaaaacggaaaatga

SEQ ID NO: 59865 - DNA, 504 bp, Neisseria meningitidis; identical to SEQ ID NO: 44607

SEQ ID NO: 59866 - DNA, 291 bp, Neisseria meningitidis; identical to SEQ ID NO: 42317

SEQ ID NO: 59867 - DNA, 183 bp, Neisseria meningitidis; identical to SEQ ID NO: 54662

SEQ ID NO: 59868 - DNA, 969 bp, Neisseria meningitidis
  misc_feature 6, 7, 8, 9, 10: 'n' is a, c, g or t
gtgtgnnnnnacacgcaactgacccaaggcgaacgataccacatccaatacctgtcccgccactgcaccgtcaccgaaatcgccaaacagcttaaccgccacaaaagcaccatcagccgcgaaatcagacggcaccgcacccaagggcagcaatacagcgccgaaaaagcccagcggcaaagccagactatcaaacagcgtaagcgacaaccctataagctcgattcgcagctgattcagcacatcgacacccttatccgccgcaaactcagtcccgaacaagtatgcgcctacctgtgcaaacaccaccagatcacgctccaccacagcaccatttaccgctaccttcgccaagacaaaagcaacggcagcacgttgtggcaacatctcagaatatgcagcaaaccctaccgcaaacgctacggcagcacatggaccagaggcaaagtacccaaccgtgtcggcatagaaaaccgacccgctatcgtcgaccagaaatcccgtatcggcgattgggaagccgacaccattgtcggcaaaggacagaaaagcgcattattgaccttggtcgaacgcgttacccgctacaccatcatctgcaaattggatagcctcaaagccgaagacactgcccgggcagctgttaggacattaaaggcacataaagacagggtgcacaccatcaccatggataacggcaaagagttctaccaacacaccaaaataaccaaagcattgaaagcggagacttatttttgtcgcccttaccattcttgggagaaagggctgaatgagaacaccaacggactcatccggcaatacttccccaaacaaaccgatttccgtaacatcagtgatcgggagatacgcagggttcaagatgagttgaaccaccgaccaagaaaaacacttggctacgaaacgccaagtgttttattcttgaatctgttccaaccactaatacactag

SEQ ID NO: 59869 - DNA, 693 bp, Neisseria meningitidis; identical to SEQ ID NO: 51823

SEQ ID NO: 59870 - DNA, 180 bp, Neisseria meningitidis; identical to SEQ ID NO: 43299

SEQ ID NO: 59871 - DNA, 477 bp, Neisseria meningitidis; identical to SEQ ID NO: 50456

SEQ ID NO: 59872 - DNA, 951 bp, Neisseria meningitidis; identical to SEQ ID NO: 43030

SEQ ID NO: 59873 - DNA, 1536 bp, Neisseria meningitidis
atgaatttgcctattcaaaaattcatgatgctgtttgcagcagcaatatcgttgctgcaaatccccattagtcatgcgaacggtttggatgcccgtttgcgcgatgatatgcaggcaaaacactacgaaccgggtggtaaataccatctgtttggtaatgctcgcggcagtgttaaaaatcgggtttacgccgtccaaacatttgatgcaactgcggtcggccccatactgcctattacacacgaacggacaggatttgaaggcattatcggttatgaaacccatttttcaggacatggacatgaagtacacagtccgttcgataatcatgattcaaaaagcacttctgatttcagcggcggcgtagacggtggttttaccgtttaccaacttcatcggacagggtcggaaatccatccggaggatggatatgacgggccgcaaggcagcgattatccgccccccggaggagcaagggatatatacagctactatgtcaaaggaacttcaacaaaaacaaagagtaatattgttccccgagccccattttcagaccgctggctaaaagaaaatgccggtgccgcctctggttttttcagccgtgctgatgaagcaggaaaactgatatgggaaagcgaccccaataaaaattggtgggctaaccgtatggatgatattcgcggcatcgtccaaggtgcggttaatccttttttaatgggttttcaaggagtagggattggggcaattacagacagtgcagtaagcccggtcacagatacagccgcgcagcagactctacaaggtattaatcatttaggaaatttaagtcccgaagcacaacttgcggctgcaaccgcattacaagacagtgcttttgcggtaaaagacggtatcaattccgccagacaatgggctgatgcccatccgaatataactgcaacagcccaaactgcccttgccgtagcagaggccgcaggtacggtttggcgcggtaaaaaagtaaaccttaacccgaccaagtgggattgggttaaaaataccggctataaaacacctgctgcccgacctatgcagactttagatggggaaatggccggtgggaataagccagcgaagcaagctactcctaatggcaaagctggcgtttctacacaacaatctttgcaaaatagtctcgttccacaaaaaaattatacgcatactacctataatggtggatcagctattacagatggtaaatatattactgaccctctcagtatggtacgacacaaacctgatgcatctagtctagacaagatagatagcaaaagtttatttaaatcagatgttgatgcggaaaaagctacattagatgctgctagatatgcagataaacataatttatgggatagtcaaaataaggcaaaagttccaacgaacgacgtagttggctatacagacggaaaaccgacacatataattaacatttatcgtagaaagccgaataaagatgggtttagacctgtgcatggaacaccaggtaaggaacgttga

SEQ ID NO: 59874 - DNA, 621 bp, Neisseria meningitidis
atgctgaaacaggctgtaacaggtatgaccaagcaagagcgcatcacgacgcaagcctacaatgagatgaccaaatccgtggcaggttcaaacagcatagtccttaacgatgtccaaggcgatacgaccatcaacaaccatcatacgcatacgcacaaccgcagcgttgccgacggcaaagcactgtcgatgaggctcacaccccgtcctttgttgtcagaccgtcaggcggcggctttcgcccgtacaggcaaactcacgggcagtttcgacttgtttgcatcggtggtcgccccttcacaatatacgtttgccgttgccatgcccgacacgtccatgtcgccggttatcgaaaaaggggatttgctggtggtcgagccgcgtatgcgccctgcggacgaagacatcgtgctgattgaactgtccgacaagcggctggtcgtcgcgcaccttgttatcgatattgcgggcaggatgctgatttatcagacgggcaggccgtctgaagcctttgacctgcccgaaggcagcgtgattttcggtgtggtgctggaggtcaaaaaacggtttatgtccgccgcacaggcgagaaggcgtgttgattcggattaccgcccctga

SEQ ID NO: 59875 - DNA, 999 bp, Neisseria meningitidis; identical to SEQ ID NO: 43774

SEQ ID NO: 59876 - DNA, 288 bp, Neisseria meningitidis; identical to SEQ ID NO: 36916

SEQ ID NO: 59877 - DNA, 360 bp, Neisseria meningitidis; identical to SEQ ID NO: 44577

SEQ ID NO: 59878 - DNA, 1188 bp, Neisseria meningitidis; identical to SEQ ID NO: 50463

SEQ ID NO: 59879 - DNA, 729 bp, Neisseria meningitidis; identical to SEQ ID NO: 50903

SEQ ID NO: 59880 - DNA, 564 bp, Neisseria meningitidis
atgaccgatttagaaaccaaacgccttgaaacacaggcgatgcttgaaaacgctgatcttttgttcgaccaaggccaatgccgtgccgcactgcaaaaagtggcggacgagattacgcgcgatttgggcggcaaatatccgctgctgctgcccgtgatgggcggcgcggtggtgtttacggggcagttgctgccgctgttgcgttttcccttagattttgattatgttcacgtttcccgttacggcgacaagctggagggcggcgcgttcaactggaagcgtatgcccgatgcggaacaaatccggggcaggcacgtcgttgtgttggacgatattttggacgaagggcatacgatgtccgccattcaaaccaaacttttggaaatgggtgcggcaagctgccgtgcggcggtgttcgccaacaagctgattgacaaacccaagcctatccgagccgattatgtcggactggatgtgccgaaccgttatgttttcggttacggcatggatgcggcgggctgctggcgcaatctgggcgagatttacgcattgggcggaaaataa

SEQ ID NO: 59881 - DNA, 477 bp, Neisseria meningitidis; identical to SEQ ID NO: 53843

SEQ ID NO: 59882 - DNA, 3018 bp, Neisseria meningitidis
atgatcgttattttgttgcttgcgcttgccggcttgttttttgtccgcgcacaatccgaacgcgagtggatgcgcgaggtttctgcgtggcaggaaaagaaaggggaaaaacaggcggagctgcctgaaatcaaagacggtatgcccgattttcccgaacttgccctgatgcttttccatgccgtcaaaacggcagtgtattggctgttcgtcggtgtcgtccgtttctgccgaaactatctggcgcacgaatccgaaccggataggcctgttccgcctgcttctgcaaaccgtgcggatgttccgaacgcatccgacggatattcagacagtggaaacgggacggaagaagcggaaacggaagcagcagaagctgcggaggaagaggctgccgatacggaagacattgcaactgccgtaatcgacaaccgccgcatcccattcgaccggagtattgctgaagggttgatgccgtctgaaagcgaaatttcgcccgtccgtccggtttttaaggaaatcactttggaagaagcaacgcgtgctttaaacagcgcggctttaagggaaacgaaaaaacgctatatcgatgcatttgagaaaaacgaaacagcggtccccaaagtccgcgtgtccgataccccgatggaagggctgcagattatcggtttggacgaccctgtgcttcaacgcacgtattcccgtatgttcgatgcggacaaagaagcgttttccgagtctgcggattacggatttgagccgtattttgagaagcagcatccgtctgccttttctgcagtcaaagccgaaaatgcacggaatgcgccgttccgccgtcatgcagggcaggcggaggcaaaatccccggatgtttcccaaggacagtccgtttcagacggcacagccgtccgcgatgcctgccgccgcgtttccgtcaatttgaaagaaccgaacaaggcaacggtttctgcggaggcgcggatttcgcgcctgattccggaaagtcggacggttgtcgggaaacgggatgtcgaaatgccgtctgaaaccgaaaatgttttcacggaaaccgtttcatctgtgggatacggcggtccggtttatgatgaaactgccgatatccatattgaagaacctgccgcgcccgatgcttgggtggtcgaaccacccgaagtgccgaaagttcccatgcccgcaatcgatattccgccgccgcctcccgtatcggaaatctacaaccgtacctatgagccgccgacaggattcgagcaggcgcaacgcagccgcattgctgaaaccgaccatcttgccgatgatgttttgaatggaggttggcaggaggaaaccgccgctattgcagatgacggcagtgaaggtgcggcagagcggtcaaacgggcaatatctgtcggaaaccgaagcgttcgggcatgacagtcaggcgatttgtccgtttgaagatgtgccgtctgaacgcccgtcctgccgggtatcggatacggaagcggatgaaggggcgttccaatctgaagaaaccgatgcggtatacgaacacctgccgacaaccgacctgcttctgccgccgctgttcaatcccgaggcgacgcaaaccgaagaagaactgttggaaaacagcatcaccatcgaagaaaaattggcggagttcaaagtcaaggtcaaggttgtcgattcttattccggccccgtgattacgcgttatgaaatcgaacccgatgtcggcgtgcgcggcaattccgttctaaatctggaaaaagacttggcgcgttcgctcggcgtggcttccatccgcgttgtcgaaaccatccccggcaaaacctgtatgggtttggaacttccgaacccgaaacgccaaatgatacgcctgagcgaaatcttcaattcgcccgagtttgccgaatccaaatccaagctgacgctcgcgctcggtcaggacatcaccggacagcccgtcgtaaccgacttgggcaaagcaccgcatttgttggttgccggcacgaccggttcgggcaaatcggtgggtgtcaacgcgatgattctgtctatgcttttcaaagccgcgccggaagacgtgcgtatgattatgatcgatccgaaaatgctggaattgagcatttacgaaggcatcccgcacctgctcgcccctgtcgttaccgatatgaagctggcggcaaacgcgctgaactggtgtgttaacgaaatggaaaaacgctaccgcctgatgagctttatgggcgtacgcaatcttgcgggcttcaaccaaaaaatcgccgaagccgcagcaaggggagaaaaaatcggcaatccgttcagcctcatgcccgacgatcccgaacctttggaaaaactgccgtttatcgtggtcgtggtcgatgagtttgccgacctgatgatgacggcaggcaagaaaatcgaagaactgattgcccgcctcgcccaaaaagcccgcgcggcaggcatccatttgattcttgccacacaacgccccagtgtcgatgtcatcacgggtctgattaaggcgaacatcccgacgcgtatcgcgttccaagtgtccagcaaaatcgacagccgcacgattctcgaccaaatgggcgcggaaaacctgctcggtcagggcgatatgctgttcctgccgccgggtactgcctatccgcagcgcgttcacggcgcgtttgcctcggatgaagaggtgcaccgcgtggtcgaatatttgaaacagtttggcgagccggactatgttgacgatattttgagcggcggcggcagcgaagagctgcccggcatcgggcgcagcggcgacggcgaaaccgatccgatgtatgatgaagccgtatccgttgtcctgaaaacgcgcaaagccagtatttcgggcgtacagcgcgccttgcgcatcggctacaaccgcgccgcgcgtctgattgaccagatggaggcggaaggcattgtgtccgcaccggaacacaacggcaaccgtacgattctcgtccccttggacaatgcttga

SEQ ID NO: 59883 - DNA, 846 bp, Neisseria meningitidis; identical to SEQ ID NO: 39184

SEQ ID NO: 59884 - DNA, 1467 bp, Neisseria meningitidis; identical to SEQ ID NO: 42324

SEQ ID NO: 59885 - DNA, 474 bp, Neisseria meningitidis
atggaacaaaaagggtttacattgattgagatgatgatagtcgtcgcgatactcggcattatcagcgtcattgccataccttcttatcaaagttatattgaaaaaggctatcagtcccagctttatacggagatggtcggtatcaacaatatttccaaacagttgattttgaaaaatcccctggacgataatcaggccatcaagagcaaactggaaatatttgtctcaggctataagatgaatccgaaaattgccaaaaaatatagtgtttcggtaaggtttgtcgataaggaaaaatcaagggcatacaggttggtcggcgttccgcaggcggggacgggttatactctgtcggtatggatgaacagcgtgggcgacggatacaaatgccgtgatgccgcttctgccctagcctattcggagactttgtccgcggatgccggctgtgaagctttctctaatcgtaaaaaatag

SEQ ID NO: 59886 - DNA, 786 bp, Neisseria meningitidis
ttgccgccaatttgcgggggggggggggggggtaatatccgctttatagacgtaaaccccgaagatttcgccggcttccctttaaacatcagacacatttccatcacgacttatgcccgcctgaaattgggcgaatacattgccgattgcgataaagtcctgtatctggatatagacgtattggtcagggacagcctgaagcctttatgggataccgatttgggcgataactggcttggcgcgtgcatcgatttgtttgtcgaaaggcagaatgcttacaaacaaaaaatcggtatggcggacggcgaatattatttcaatgccggcgtattgctgatcaacctgaaaaaatggcggcagcacgatattttcaaaacggcctgcgaatgggtggaacaatacaaggacgtgatgcaatatcaggatcaggatattttgaacgggctgtttaaaggcggggtgtgttatgcgaacagccgtttcaactttatgccggccaattatgcctttatggcgaacaggtttgcgtcccgccataccgacccgctttaccgcgaccggacttatacggtaatgcccgtcgccgtcagccattattgcggcccggcaaagccgtggcacagggactgcacagcgtggggtgcggaacgtttcacagagttggcgggcagcctgacggccgttcccgaagaatggcgcggcaaacttgccgtcccgcctgcaaagcgtatgtttcaaagatggcgcagaaaactgtctgccagtttcttacgcaagatttattga

SEQ ID NO: 59887 - DNA, 1773 bp, Neisseria meningitidis
atgatactgccagcccgtttttcagacggcatcagcctttccctacgcctgaaactcctgaccggactgtgggtcgggttggcggcattgtctgtcgttttgacactgctgctctctttgcgtctggaaaacgcggcctccgtcatcgaagaggcgggcaacttgagaatgcaggcataccgtctggcatacatggcgggtgaaggctcgccccgtgcgcaaattgacaatcaggttgccgaatttgaaaaaagcctgaatcgtatttcacaaagtgatgccatccatccgctgattccttcggacacccctcttgcttatgatttgatacaatccatgctgattatagattggcaggcacacatcctccccccgctccagtcctaccggcgaccgactcaggtcgatctctaccgctttgccggaaacatcgaactgtttttgcaggcattggaaaatgccaacgaaaaaaacacatggtggctcaggcgttttcaatgggcaattatgttgatgacgctggtgtcgtctgtactgatgctgttttggcaccagatttgggttatccggccgctgcaggcgttaagggaaggtgcggaacgcatcggacggaggtgtttcgatattccggttcccgaaggcggtacgccggaattcaaacaggtcgggcgttgtttcaatcaaatgggcggcaggttgaaaattttatatgatgatttggaaggacaagtcgccgagcagacacgcagtctcgaaaaacaaaatcaaaacctgaccctgctgtaccaaactacacgggacctgcaccaatcctacataccgcaacaggctgcagaacattttctaaaccgtatcctgcccgccgtaggagcagattccggcagagtttgtttggacggcggatccgatgtttatgtttccattcatcatgcggattgcggcacagcagcttcggatttggggaagtaccatgaggaaatcttccccattgagtaccagaacgaaacattgggcaggctgttgctcagctttccaaacggcatttctcttgatgaagacgaccgcatcctgcttcaaacactaggcaggcaattaggcgtatcgctcgctggcgcgaagcaggaagaagaaaaacgcctgcttgcggtattgcaggaacgcagcctgattgcacaggggctgcacgacagcatcgcacaagcattaacgttcctaaacctacaggtacagatgctggaaaccgcctttgccgaaaacaaacgggaggaagccgcagaaaacatcggcttcatcaaaacaggcgtgcaggaatgttatgaagatgtccgcgaactgctgctcaacttccgtaccaaaatcagcaataaagaatttcccgaagccgttgccgacctattctcgcgctttacgcaacagaccggcacgactgtcgaaaccgcttgggaaaacggcacgcacctgcctacacaggacgagcagctccaaatgattttcatcctgcaagaaagcttgtccaacatccgaaaacatgcccacgccacccatatcaaattcagactgctcaaacaggatggaagttttacaatgaccattcaagacaacggacagggttttgacacggaaaacattggagaaccatcgggcagccatgtcggactgcatatcatgcaggagcgtgccaaacgtatccgcgccgtattgaaaatctattcccaaccccaacagggaaccaccgtctcattggcgggtgtatctgaagaaagcttgaaatga

SEQ ID NO: 59888 - DNA, 5928 bp, Neisseria meningitidis
atgaataaaggtttacatcgcattatctttagtaaaaagcacagcaccatggttgcagtagccgaaactgccaacagccagggcaaaggtaaacaggcaggcagttcggtttctgtttcactgaaaacttcaggcgacctttgcggcaaactcaaaaccacccttaaaaccttggtctgctctttggtttccctgagtatggtattgcctgcccatgcccaaattaccaccgacaaatcagcacctaaaaaccagcaggtcgttatccttaaaaccaacactggtgcccccttggtgaatatccaaactccgaatggacgcggattgagccacaaccgctatacgcagtttgatgttgacaacaaaggggcagtgttaaacaacgaccgtaacaataatccgtttctggtcaaaggcagtgcgcaattgattttgaacgaggtacgcggtacggctagcaaactcaacggcatcgttaccgtaggcggtcaaaaggccgacgtgattattgccaaccccaacggcattaccgttaatggcggcggctttaaaaatgtcggtcggggcatcttaactaccggtgcgccccaaatcggcaaagacggtgcactgacaggatttgatgtgcgtcaaggcacattgaccgtaggagcagcaggttggaatgataaaggcggagccgactacaccggggtacttgctcgtgcagttgctttgcaggggaaattacagggtaaaaacctggcggtttctaccggtcctcagaaagtagattacgccagcggcgaaatcagtgcaggtacggcagcgggtacgaaaccgactattgcccttgatactgccgcactgggcggtatgtacgccgacagcatcacactgattgccaatgaaaaaggcgtaggcgtcaaaaatgccggcacactcgaagcggccaagcaattgattgtgacttcgtcaggccgcattgaaaacagcggccgcatcgccaccactgccgacggcaccgaagcttcaccgacttatctctccatcgaaaccaccgaaaaaggagcggcaggcacatttatctccaatggtggtcggatcgagagcaaaggcttattggttattgagacgggagaagatatcagcttgcgtaacggagccgtggtgcagaataacggcagtcgcccagctaccacggtattaaatgctggtcataatttggtgattgagagcaaaactaatgtgaacaatgccaaaggcccggctactctgtcggccgacggccgtaccgtcatcaaggaggccagtattcagactggcactaccgtatacagttccagcaaaggcaacgccgaattaggcaataacacacgcattaccggggcagatgttaccgtattatccaacggcaccatcagcagttccgccgtaatagatgccaaagacaccgcacacatcgaagcaggcaaaccgctttctttggaagcttcaacagttacctccgatatccgcttaaacggaggcagtatcaagggcggcaagcagcttgctttactggcagacgataacattactgccaaaactaccaatctgaatactcccggcaatctgtatgttcatacaggtaaagatctgaatttgaatgttgataaagatttgtctgccgccagcatccatttgaaatcggataacgctgcccatattaccggcaccagtaaaaccctcactgcctcaaaagacatgggtgtggaggcaggctcgctgaatgttaccaataccaatctgcgtaccaactcgggtaatctgcacattcaggcagccaaaggcaatattcagcttcgcaataccaagctgaacgcagccaaggctctcgaaaccaccgcattgcagggcaatatcgtttcagacggccttcatgctgtttctgcagacggtcatgtatccttattggccaacggtaatgccgactttaccggtcacaataccctgacagccaaggccgatgtcaatgcaggatcggttggtaaaggccgtctgaaagcagacaataccaatatcacttcatcttcaggagatattacgttggttgccggcaacggtattcagcttggtgacggaaaacaacgcaattcaatcaacggaaaacacatcagcatcaaaaacaacggtggtaatgccgacttaaaaaaccttaacgtccatgccaaaagcggggcattgaacattcattccgaccgggcattgagcatagaaaataccaagctggagtctacccataatacgcatcttaatgcacaacacgagcgggtaacgctcaaccaagtagatgcctacgcacaccgtcatctaagcattaccggcagccagatttggcaaaacgacaaactgccttctgccaacaagctggtggctaacggtgtattggcactcaatgcgcgctattcccaaattgccgacaacaccacgctgagagcgggtgcaatcaaccttactgccggtaccgccctagtcaagcgcggcaacatcaattggagtaccgtttcgaccaaaactttggaagataatgccgaattaaaaccattggccggacggctgaatattgaagcaggtagcggcacattaaccatcgaacctgccaaccgcatcagtgcgcataccgacctgagcatcaaaacaggcggaaaattgctgttgtctgcaaaaggaggaaatgcaggtgcgcctagtgctcaagtttcctcattggaagcaaaaggcaatatccgtctggttacaggagaaacagatttaagaggttctaaaattacagcaggtaaaaacttggttgtcgccaccaccaaaggcaagttgaatatcgaagccgtaaacaactcattcagcaattattttccaacccaaaaggcagccgaactcaaccaaaaatccaaagaattggaacagcagattgcgcagttgaaaaaaagctcgcctaagagcaagctgattccaaccttgcaagaagaacgcgaccgtctcgctttctatattcaagccatcaacaaggaagttaaaggtaaaaaacccaaaggcaaagaatatctgcaagccaagctttctgcacaaaatattgacttgatttccgcacaaggcatcgaaatcagcggttccgatattaccgcttccaaaaaactgaaccttcacgccgcaggcgtattgccaaaggcagcagattcagaggcggctgctattctgattgacggcataaccgaccaatatgaaattggcaagcccacctacaagagtcactacgacaaagctgctctgaacaagccttcacgtttgaccggacgtacgggggtaagtattcatgcagctgcggcactcgatgatgcacgtattattatcggtgcatccgaaatcaaagctccctcaggcagcatagacatcaaagcccatagtgatattgtactggaggctggacaaaacgatgcctataccttcttaaaaaccaaaggtaaaagcggcaaaatcatcagaaaaaccaagtttaccagcacccgcgaccacctgattatgccagcccccgtcgagctgaccgccaacggtatcacgcttcaggcaggcggcaacatcgaagctaataccacccgcttcaatgcccctgcaggtaaagttaccctggttgcgggtgaagagctgcaactgctggcagaagaaggcatccacaagcacgagttggatgtccaaaaaagccgccgctttatcggcatcaaggtaggtaagagcaattacagtaaaaacgaactgaacgaaaccaaattgcctgtccgcgtcgtcgcccaaactgcagccacccgttcaggctgggataccgtgctcgaaggtaccgaattcaaaaccacgctggccggtgccgacattcaggcaggtgtaggcgaaaaagcccgtgtcgatgcgaaaattatcctcaaaggcattgtgaaccgtatccagtcggaagaaaaattagaaaccaactcaaccgtatggcagaaacaggccggacgcggcagcactatcgaaacgctaaaactgcccagcttcgaaagccctactccgcccaaattgtccgcacccggcggttacattgtcgatattcccaaaggcaatctgaaaaccgaaatcgaaaagctggccaaacagcccgaatacgcctacctgaaacagcttcagacggccaagaacgtcgattggaaacaggtgcagctggcctacgacaaatgggactataaacaggaaggcttgaccggagccggtgcagcgattgtggtgattattgtaaccgctctaacttatggatacggagcggctgcagcgggtagcgtaactgccgcaggaagtagtacagccgcagctgcaacaacgacagcggcagcaactaccactgtttctactgcagctgccatgcaaaccgcagctttagcctccttgtatagccaagcagctgtagccatcatcaataataaaggcgatgtaggcaaagcattaaaagatctcggcaccagtgatacggtcaagcagattgttacttccgcactgacggcgggtgcattaaaccagatgggcgcagatattgcccaattgaacagcaaggtaagaaccgaactgttcagcagtacgggcaatcaaaccattgccaaccttggaggcagattggccaccaacctcagcaatgcaggtatctcagctggtatcaataccgccgttaacggcggcagcttgaaagacaacttaggcaatgccgcattgggagcattggttaatagcttccaaggggaagccgccagcaaaatcaaaacaaccttcagcgacgattatgttgccaaacagttcgcccacgctttggcgggttgtgttagcggactggtacagggaaaatgtaaagatggggcaattggcgcagcagttggggaaatcgtagctgaatccatacttggcggcagaaaccctgctacactcagcgatgcagaaaagcataaagttatcagttactcgaagattattgcgggcagcgtggcggcactcaacggcggcgatgtgaatactgcggcgaatgcggctgaggtagctgtggtgaataatgctttgaattttgacagtacccctaccaatgcgaaaaagcatcaaccgcagaagcccgacaaaaccgcactggaaaaaatcatccaaagtattatgcctgcacatgcggcaggtgcgatgactaatccgcaggataaggatgctgccatttggataagcaatatccgtaatggcatcacaggcccgattgtgattaccagctatggggtttatgctgcaggttggacagctccgctgatcggtacagcgggtaaattagctatcagcacctgcatggctaatccttctggttgtactgtcatggtcactcaggctgccgaagcgggcgcgggaatcgccacgggtgcggtaacggtaggcaacgcttgggaagcgcctgtgggggcgttgtcgaaagcgaaggcggccaagcaggctataccaacccagacagttaaagaacttgatggcttactacaagaatcaaaaaatataggtgctgtaaatacacgaattaatatagcgaatagtactactcgatatacaccaatgagacaaacgggacaaccggtatctgctggctttgagcatgttcttgaggggcacttccataggcctattgcgaataaccgttcagtttttaccatctccccaaatgaattgaaggttatacttcaaagtaataaagtagtttcttctcccgtatcgatgactcctgatggccaatatatgcggactgtcgatgtaggaaaagttattggtactacttctattaaagaaggtggacaacccacaactacaattaaagtatttacagataagtcaggaaatttgattactacatacccagtaaaaggaaactaa

SEQ ID NO: 59889 - DNA, 663 bp, Neisseria meningitidis; identical to SEQ ID NO: 50838

SEQ ID NO: 59890 - DNA, 1092 bp, Neisseria meningitidis
atgaacgcccaaaccctgattgccaacgttgccgaattcgtcaaaaccaagctcaaacccatagtggacgacatcgaccgcaaaggatactaccccgaagcatttatgcgcgaactcggcgcaatcggtggattcggcgcagtcggtacagaagccgaaggcggcaacggcttgggtttggcaacgcaaatcgccgtattgcgcgaaatcggcaaagaatgcggcgcaacctctttcagtgcgtggtgtcaggcggcttgcgcgtggtatctgcaccaaacgcccaaccgggccgtcaaagacaaataccttgccgacatcctgcaaggcaaagtattggcgggtacgggcatgtccaataccgtcaaacaccttgccgacatcgaaaaacacaacctccaagccgaacgcgtggaaggcggctacacagtcaacggcgcgctgccgtgggtgtccaacatcggtgaagaccacatctgggcgaataccgcccaaatcggcgacggctacgttatgttcatcacaggcggacaatgggaaggcgtaagcctgcaaaactgccccgaattttgcgccctcgaaggtacgcgcaccttcagcctgaatttcaaagacgtatttatccccgacgaagacatcatcgccgcgcccgaacagtttgccgactacatccaaagcatcaaagcaggctttatcctcctgcaaatcggcatcggcgcgggcgtaatcgacggcagcctcggcatcatccgcctcgccaacgtcgtcaacgccgaagtcaacaactacctcaacgacggctacgacagcctcaaaacaaggctggacggcgcgtgggcagaaaccgaacggctcgccggcttggcttggagcggcacgcccgacaaccttgctaccctcaagctgcgcgaagccgccgccgtactggcacttgccgccgcccaatccgccgccctgcattccggcgcaaaaggctacctgatgcgcagtcccgcccaaaggcgcgtccgcgaagcaatgtttgttgccatcgtaacccccgcgatcaaacacctacgcaaagaaatagcggcaatcgaagccgcaaaataa

SEQ ID NO: 59891 - DNA, 1185 bp, Neisseria meningitidis; identical to SEQ ID NO: 42183

SEQ ID NO: 59892 - DNA, 525 bp, Neisseria meningitidis
atgcaaacccgcattctctccgccgtactgctggctttttcaaccgctgcctttgccgggggcgcattcacgctgcaattcgacaacccgtccgaagacggcggcttcacgcaaaaccagcttttgagcgcgccttacggatttggctgttcgggcggcaatgcttcgcccgcgctgtcgtggaaaaatccgcccgccgggacaaaaagtttcgtcctgaccgtttacgataaagacgcgccgaccggactgggctggatgcaccgggtggtcgccgacattcccgccgatgtccaccgccgcaacgcgacctcgctgcaattaagccgctgcgccaacatcgccgacgaccagtccgcagccatatcggcggtaatcagtttgcggatttgccgcatcaggttgacgccttcgtacacggcaaaaccgatgccgtcatgctgcaaccacgccaacacgccgcaaagcgcgacctccgccgcattgtgcggcacttcttcatccgtcagcaccgccgccgcataa

SEQ ID NO: 59893 - DNA, 537 bp, Neisseria meningitidis; identical to SEQ ID NO: 37832

SEQ ID NO: 59894 - DNA, 573 bp, Neisseria meningitidis; identical to SEQ ID NO: 51089

SEQ ID NO: 59895 - DNA, 159 bp, Neisseria meningitidis; identical to SEQ ID NO: 42666

SEQ ID NO: 59896 - DNA, 369 bp, Neisseria meningitidis; identical to SEQ ID NO: 45086

SEQ ID NO: 59897 - DNA, 483 bp, Neisseria meningitidis; identical to SEQ ID NO: 42793

SEQ ID NO: 59898 - DNA, 453 bp, Neisseria meningitidis
atgaatattgaagtagaaatgaaagtgttggacgagaggatggcggattttatccctgcctatgcgacggagggttctgctggtttagatttgcgtgcctgtttggatgaggaagttgtcttgcagccgggtgaaacgtttcttgtaccgacaggtttggcaatttatttggcgaatcccgcatatgccgccgttttgctgccccgttccggattggggcataaacacggcattgttttgggcaatttggtcggcttgattgactccgattatcaaggggaattgaaggtttcgttatggaacagaagcagcgagccgtttactgtcaaaccgtttgagcgtatcgcgcagatggttatcgtgccaatcgtgcaggcgcgtttcaaacgtgtcgaggaatttgtcggaagcagccggggtgagggcggcttcggcagtacgggtttgcattga

SEQ ID NO: 59899 - DNA, 267 bp, Neisseria meningitidis
atggactttgaatttggtttcagaaccctgtggccgattgcgacggcggcattttggttttgggtcaacggcatttcaggccgtctgaaagaggcggacaagcgtatcgacgacctgaaagaggagctgcacgcggtcaagctctcttatcacaccaagcaagatgccaaggcagaccgcgacaatattgcggcttcgttgggacgcatcgaaaacaagttggaaaaagtaaacgaaaaactggacaggaaagcagacaaatcatga

SEQ ID NO: 59900 - DNA, 1518 bp, Neisseria meningitidis; identical to SEQ ID NO: 50444

SEQ ID NO: 59901 - DNA, 180 bp, Neisseria meningitidis; identical to SEQ ID NO: 39090

SEQ ID NO: 59902 - DNA, 453 bp, Neisseria meningitidis
atgagtgaagttgaatatttctcacactttatatcggacggaaaagggaagcttttagaaattccgcagcgaagaggtaagcaagacggggtttttgttgattggatttcattcacattccatgaagatactttactgaaagtttccggttgccctttattttctgatgctgaatacatgtatgtattaagcagaaagctggaagaaattctaggttttggcataacgcgcaaatgcaaatcaaggggcaacaaattctatgaatccatgtataggttaggttcggatgatgttgattatggagaggtgcatttcggaggtcagcgcaatactgttttagttgagttgaaaggtactggttgcagcgttgcaagtccgggttgggagttgaggctaaagcagtttctcgatgattcgataaggacaagaataacgcgaattgaccttatatga

SEQ ID NO: 59903 - DNA, 270 bp, Neisseria meningitidis
atgaatataatcgggctggacatctcaaaggataccatagacgcaacattgcataaaacaaacggaagtatccattacattaaatttaagaataatgatgatggattaaaacagtttagattgtggataaagggaaacagaatcagaaaagcctatatcggcatggaggcaacaggcatctattacgaaaaggcagcagatatgcttctctactatactgtttacgttattaatcttaaaaatcaaggactacggaaaaagcaggtttaa

SEQ ID NO: 59904 - DNA, 1002 bp, Neisseria meningitidis
atgaaacggaaaatttggctgctgccgctgctggcggtttcggcatacctgcaggcgcagacggaagtcaggctggcggtgcataagtcgttcagcctgcccaaagggttgattgcgcgcttcgagcgggcaaacgatgcgaaagtgtcgattattcaggcgggcggcgcgaacgaaatgctcaacaaactgattttgagccgcgccaacccgattgccgacgcggtgtatggtttggacaacgccaatatcggcaaggcgcgggaaatgggcattttggcggcggcgcaacccgaatccgcccccgtcgcggtcgggctgccttcggctttggcggtcgattacggctatgtggctatcaattacgacaaaaaatggtttgaaggcaaaaagctgcccctgccgcaaaccctgcaggatttgacccgccccgaatataaaaacctattggtcgtgccgtcccccgccacgtcgtccccggggctgggcttcctgatggcgaacatcagcggtctgggcgaagaaggcgcgttcaaatggtgggcacagatgcggcagaacggcgtgaaggtcgccaaaggttggagcgaggcgtattacaccgacttttcgcacaacggcggcgcgtatccgctggtggtcggttatgccgccagcccggcggcggaagtgtatttttccaaaggcaaatacagcgagccgccgacgggcaacctgtttttaaaaggcggcgtattccgccaggtcgaaggcgcggcggtcttgaagggcgcgaaacagccggaattggcggcaaaactggtgcaatggctgcaaagtcgggaagtgcagcaggcggttccgtccgaaatgtgggtttaccccgccgtcaaaaacacgcgcctgcccgacgtgttccgcttcgcccaagccccgacgcacaccaccgcccccgcgcagcgcgatattgatgcgaaccagcgcggatgggtttcccgttggattagaacggttttgaaataa

SEQ ID NO: 59905 - DNA, 1998 bp, Neisseria meningitidis
atgaagaaaattacccctcaaaacctgcgccccctgctttcggaaagcttgggacataccgattttgtcaacgtcctcaacgcactgattaaatttttgcgccgtggcggcaaaaaatgtgcgggggaacgtttcgacctgattatcgacacattcaaacaagacagggaattactgtcccgcttcagccggtgtttttacatttggctcgcgcaaatacacatttatccggcactcatcaaactcggcatcttctcgcgccacagctttgcccgggaaatgggcatacgcatctacgaacgcttcagcccgtcatataaagattttgccaacttgggcgaagtcttcctttatcttttccattccgaaaacgacgacaaatggctgcaaacgctcaatatccgccaatggctggttttatacgaactcatccggagccacgccgagccgtccaaattgcagacggcgggcatccgccttgccgatgcgcgtttgcgcgccatcgaaatgctgtctgtctggacggcatccgaagccatcgaacccgacctcatccgcatcgccccgcgcctgctggaagccgattcttccttcgtcgccctccaacgcgaaaccgccaaactggtcgaacactaccgcaacggcaccacgccttacgacaccgcccacctcgaagtgatgttcgaccaatgtttcagccagattgactatttgcgccgcaaagggacgggcgccggctccggttcgtcggtcaaagtcgcccacctgctcgaacggctccggcagaccgtagaccgtctgaagctgctcaccgacatccaaaccggcgccggcaacagcaaccgcctgaccatcgcgctgatgaactccctcatctacgcggcggtcgaacaatacagcacccgccacctgcgccgcagcagcatccgtatgctcgcccgcagcattaccgaaaacaaaagccaccacggcgaacactacatcacccgcaaccgcaaagaatatttcaaaatgttctactcggcggcaggcggcggcatcatcatcgccctaatggcgctgctcaaaatccgcatcggctcactcggcctcagccccttcctcacttccttgtcggctgggttcaactacggcatcggctttatgatcatccatatgctgcactgcaccgtcgccaccaagcagcccgcgatgactgccgccagctttgccgaacaggtcgatctcaacgaaggcggcaaagcggtggacaacaaactcgccaagctcctcatcgacgtatgccgctcccaaagtgtcgccgtcttcggcaacgtttccatcgccatccttttggcgtgcgccatatcgttcggctatgcccatctgtaccggctgcccatactcgatgcccacaccgccgcctaccagttcaaatccatagacatcatcgcttacccgacgctgtggtatgccgccattgcaggtctgtggctgttctgctccggcatcatcgcaggttttttcgacaaccgcgccgactacctcaacctgcgccaacgcctgcccttcaaccccttgctgcgtaaaatcatgcgccccgggccccgccgcgtcctcgccgcctacatccacaaacactacggctcgctggtcggcaacttcatcttcgggatgctcttgggtatgaccggctatttcggacacctcctcgggctgccgctggacatccgccacgtcgccttttcctccgccaacctcggctatgccgccgtcagcggcaacgtcggtttgggcacgttcgtactcggcattttcagcgtcctcgccatcggcctggtcaacctctgcgtcagcttcagcctcgccctcttcgtcgccctgcgctcgcgcggcacgaaaatcggcagcatccgcaatctgattaaaagtttttggaatcagattaaaagcaatccctgcatacttttcctcccgcccgccaaagaacagggacatcctccttcggacaagccttga

SEQ ID NO: 59906 - DNA, 357 bp, Neisseria meningitidis
atgttgtccgcttactttcccgtctttgtctttatccttgtcggtcttgcagccggcgtactgtttatcctgctcggcacaattttgggcccgaaacgtcactatcccgaaaaagacgcgccttacgaatgcggttttgaagcctttgaaaacgcaaggatgaagttcgacgtgcgctattacctcgtcgccatcctcttcatcctgtttgatttggaggtcgcgtttatgctgccgtgggctgtcgtgttcaaagatttgggcgtgtacggcttctggtctatgctggtgtttatcgtcgttctgacggtaggctttgtttacgaatggaaaaaaggtgcgctggaatgggaatag

SEQ ID NO: 59907 - DNA, 933 bp, Neisseria meningitidis; identical to SEQ ID NO: 51401

SEQ ID NO: 59908 - DNA, 360 bp, Neisseria meningitidis; identical to SEQ ID NO: 45472

SEQ ID NO: 59909 - DNA, 966 bp, Neisseria meningitidis
atgttgcgtttgaccgcattgaccctctgcaccgtcctcgccttgggcgcgtgttcgccgaaagattccgactctgccccacaagccaaagaacaggcggtttccgccgcacaatccgaaagcgcgtccgttaccgtcaaaaccgcgcgcggcgatgttcaaataccgcaaaaccccgaacgtatcgccgtttacgatttgggtatgctcgacaccttgagcaaactgggcgtgaaaaccggtttgtccgtcgataaaaaccgcctgccgtatttagaggaatatttcaaaacgacaaaacctgccggcactttgttcgagccggattacgaaacgctcaatgcctacaagccgcagctcatcatcatcggcagccgcgcagccaaagcgtttgacaaattgaacgaaatcgcgccgaccatcgaaatgaccgccgataccgccaacctcaaagaaagtgccaaagagcgtatcgacgcgctggcgcaaatcttcggcaaacaggcggaagcggacaagctgaaggcggaaatcgatgcttcgtttgaagcggcgaaaaccgccgcgcaaggcaaaggcaaaggtttggtgattttggtcaacggcggcaaaatgtccgccttcggcccgtcttcacgactgggcggctggctgcacaaagacatcggcgttcccgctgttgacgaagccatcaaagaaggcagccacggtcagcctatcagctttgaatacctgaaagagaaaaatcccgactggctgtttgtccttgaccgcagcgcggccatcggcgaagagggtcaggcggcgaaagacgtgttggataatccgctggttgccgaaacaaccgcttggaaaaaaggacaggtcgtttaccttgttcccgaaacttatttggcggccggcggcgcgcaagagctgctgaatgcaagcaaacaggttgccgacgcttttaacgcggcaaaataa

SEQ ID NO: 59910 - DNA, 684 bp, Neisseria meningitidis; identical to SEQ ID NO: 51432

SEQ ID NO: 59911 - DNA, 156 bp, Neisseria meningitidis
  misc_feature 6, 7, 8, 9, 10: 'n' is a, c, g or t
gtgtgnnnnntcgtcgcgctgctgtcgctgtgggtcaatgccggcgcgttcggtatgcaggaagacgataccccgcaatcggattatgaaaggcgtttgggcttgggtgcgaagctgaaaaacaaaaatccggatacggacgaaaaacggcaataa

SEQ ID NO: 59912 - DNA, 858 bp, Neisseria meningitidis
atgaattacgccctagacgcattatggtggaaacttaccagccaacccgtccgcgaccttgcctcgctgctgactgcgccgcctttgtggcaaagcggctgcgaattgagcgtgcgagaactactgggagaacacggtttccgttaccttttggcattggatgccgatcccacacggctgacggattacctcgcccaacgcgccccgttcggccaccgtctcggcatttatgccgaagagctgctggctttttggtttgccaatgcaccgcacgccgaactgctcgcgcacaacctcacggtttccggttcggacggcaatacgcaaggcgcggcggattttgtggcaaggcttaacggcaaaccctaccatatcgagctgacctgcaaatattacggcggcgacacggacagtcccgaagggatgcgcggattcgaccccaaagacacgctgttgggaaaagccgccaaactgaccgcccaactcggtctgccgcacacttcagacggcatccggaccttgcggcagcacggtttgccgcttaacgtaaaacccgtttccatcgtgcgcggcatcggattttttccacacggtttccatgcttttgagccaccgcttaatccatacggttggcgcggcatctatattcaagattgggcagaatacgggtttaaacgccaagaagtccgctaccatctgctcgaccgtatggcctacctcgcgcctgcgcgtgtcgccgaaaccgaaacattgaacgcaaccgaaatccgccgtatcgaccaaggcttgattgccgttttggaatgtcggccggacggcttttggcacgaaatcgaacgcattatgaaggccgtctga

SEQ ID NO: 59913 - DNA, 2832 bp, Neisseria meningitidis
atgaataagaaacacggttttcagcttaccctgactgccttggccattgcaaccgcttttccggcttatgccgcccaagcggggggggcgacacctgatgccgcgcagacccaatccctgaaagaggttaccgtccgtgccgccaaagtgggacggcgatcgaaagaggcgaccggtttgggcaaaatcgtcaaaacgtcggaaactttgaacaaagaacaggtactcggtatccgcgacctgacgcgctacgatccgggcgtggcggttgtcgaacagggcaacggcgcgagcggcggctactcgatacgcggcgtggataaaaaccgtgtggcggtttcggtcgacggcgttgcccaaatacaggcgtttaccgtgcagggatcgttgagcggatacggcggacgcggcggcagcggtgcaatcaacgaaatcgaatatgaaaacatcagcacggtggaaatcgacaaaggcgccggttcgtccgatcacggcagtggcgcactcggcggcgcggtcgctttccgcaccaaagaagcggcagacctgatttcagacggcaaaagctgggggatacaggcaaaaactgcctacggcagtaaaaaccgccaatttatgaagtcgctcggcgcggggttcagtaaagacggttgggaagggctgctaatccgaaccgaacgtcaggggcgggaaacgcacccgcacggcgatattgcggacggggtggaatacggcatagaccgtttggacgcgttccgccagacatacgatattcaaggcgagaaaacagagccatttttctcagtagagggcgagcgtgaatccaagcccgtggcaaaattggcgggctacgggaaatatttgaacaaccagctcaaccgctgggtaaaagaacgtattgaaaaaaatcagcctttaagtgctgaagaagaggcgcaggtgcgggaggcgcaggcgcgccacgaaaatctgtccgcccaagcttacacgggcggcggcaggatattgcccgatccgatggattaccgcagcggctcttggcttgccaagctgggctaccgcttcggcggcaggcattatgtcggcggcgtgtttgaggataccaaacagcgttacgacatccgcgatatgacggaaaaacagtattacggtacggacgaggcggaaaagtttagagacaagagcggggtgtacgacggcgacgatttccgcgacggcttgtattttgtgccgaatatagaagagtggaagggcgatacaaatttggtcaagggcataggtttgaaatattcccgcaccaaatttattgacgaacatcaccgccgccgccgtatgggtttgctgtaccgttatgaaaacgaagcgtattctgacaattgggcggataaggcggtgttgtcgtttgacaaacagggcgtggcaaccgacaacaacacgctgaagctgaattgcgccgtgtatcctgctgtggacaaatcctgccgcgcgtcggcggacaaaccgtattcctacgacagcagcgaccgtttccactaccgcgaacagcacaatgttttgaatgcctcgtttgagaaatcgctgaaaaacaaatggacgaaacaccatctgactttgggcttcggttacgatgcttccaacgcgatctcccgccccgaacagctttcccacaatgcggcaaggatttcggaatccacgggattcgatgataacaatcaagataagtaccgtttgggtaagcccgaagtcgtcgaagggtcggtctgcggctacatcgaaaccctgcgttcccgcaaatgcgtgccaagaaaaatcaacggcagcaatatccatatttctttgaacgaccgtttttcaatcggcaaatatttcgatttcagcttgggcggcaggtacgaccggaaaaacttcaccacgtcggaagaactcgtccgcagcggacggtatgttgaccgttcgtggaacagcggcatcgtgttcaaaccgaaccggcatttttccgtgtcttaccgcgcctccagcggcttcagaacgccctcattccaagaacttttcgggatagacatttatcacgattatccgaaaggctggcagcgtcccgccctgaaatcggaaaaggcagccaaccgcgaaatcggtttgcagtggaagggcgatttcggctttttggaaatcagcagcttccgcaaccgttataccgatatgattgccgttgccgatcacaaaaccaaattgccgaatcaggcaggacaattgacagagattgatatacgcgattattacaatgcccaaaatatgtcgctccaaggcgttaatatattgggaaaaatcgactggaacggtgtgtacggcaaactgcccgaaggtttgtacaccacattggcgtacaaccgcatcaaaccgaaatcggtatccaaccggccggacttgtccctccgcagctatgctttggatgcggtacagccgtcgcgttatgttttggggttcggatacgaccagccagaggggaaatggggcgcaaacattatgctgacctattccaaagggaaaaaccctgacgagcttgcttatctggcaggcgatcaaaaacgatattcgacaaaaagagcgtcgtcttcttggtcgacggcagacgtttccgcctatctgaatctgaaaaaacggctgaccttgagggcggctatctacaatatcggcaactaccgctacgttacttgggaatccttgcgccagaccgcggaaagcacggcaaaccggcacggcggcgacagcaactatggaaggtatgccgcaccgggcaggaacttcagcctcgcgcttgaaatgaagttttaa

SEQ ID NO: 59914 - DNA, 594 bp, Neisseria meningitidis; identical to SEQ ID NO: 51543

SEQ ID NO: 59915 - DNA, 1047 bp, Neisseria meningitidis
atgtcagacgacaaaagcaaagcccttgccgccgccttggcgcaaatcgaaaaaagtttcggcaaaggcgccatcatgaaaatggacggcagccagcaggaagaaaacctcgaagtcatttccaccggatcgctcggattagacctcgcactcggagtcggcggcctgccgcgcgggcgcatcgtcgaaatcttcggccccgaatcctccggcaaaaccacactctgcctcgaagccgtcgcccaatgccagaaaaacggcggcgtgtgcgcctttgtcgatgccgaacacgcctttgatcccgtttacgcccgcaaactcggcgtaaaagtcgaagagctttacctgtcccagcccgataccggcgaacaggctttggaaatctgcgacacactcgtccgttcaggcggcatagatatggtagtcgtcgattccgtagccgcactcgtccccaaagccgaaatcgaaggcgatatgggggacagccatgtcggactgcaggcgcgcctgatgagtcaggctttgcgcaaactgaccggacacatcaaaaaaaccaacacgctggttgtgttcatcaaccaaatccggatgaagatcggcgtaatgttcggcagccccgagaccaccaccggcggcaacgcgctgaaattctattcttccgtccgcctcgacatccgccgcaccggatccatcaaaaaaggcgaagaagtattgggcaacgaaacccgcgtcaaagtcatcaaaaacaaagtcgcccccccgttccgtcaggcagagtttgacatcctctacggagaaggcatcagttgggaaggcgaattgatcgacatcggcgtgaaaaacgacatcatcaacaaatccggcgcgtggtacagctacaacggcgcgaaaatcggtcagggcaaagacaacgtccgcgtctggctgaaggaaaatcccgaagtcgccaatgaaatcgacgcaaaaatccgcgccctcaacggcgtagaaatgcacatcaccgaagggacgcaggacgaaaccgacggcgaacgccccgaagaataa

SEQ ID NO: 59916 - DNA, 1134 bp, Neisseria meningitidis
atgaaaagaattctttgcattacaggtaccagagccgacttcggcaagctaaaacctttattagcctatattgaaaatcacccagaccttgaattgcatttgattgtaactggtatgcatatgatgaaaacatatggcagaacctacaaggaagtaactcgagaaaactatcaacatacatatctgttttcaaatcaaatccaaggtgaaccaatgggtgccgttttaggcaataccattacgtttatctctcgtctatctgatgaaattgaacctgatatggtcatgattcacggcgaccgtttagaagcactagcaggcgcagctgtaggtgcattaagcagccgtttagtttgccatatcgaaggtggtgaactatctggtacagtagatgactccattcgtcattctattagtaaactttctcatatccacttggtagcaaatgaacaagctgtcactcgcctagtgcaaatgggagaaaaaagaaagcatattcacatcatcggctcccccgatttagatgttatggcctcttccaccctcccatccttagaagaagtcaaagaatattacggtttaccatacgaaaattatggtatttctatgtttcaccccgtgactacagaagcacatttaatgccacaatatgcggcccaatatttcaaagcattagaattaagtggccaaaatatcattagcatctaccctaataatgacactggcactgaaagtattctgcaagaattattaaaatatcaatctgataaatttattgcatttccttccattcgatttgaatattttttagtcttattgaaacatgctaaatttatggtcggcaactcaagtgcaggtattagagaagctcctctctacggtgtcccttcaattgatgttggtacacgccaaagtaaccgccatagtggaaaatctattattcatacagattatgaaactaaaaatatctttgatgcgattcaacaagcatgcagtttaggcaaatttgaagcagatgatacctttaatggcggagatactcgcaccagcacagaaagatttgctgaagtaatcaacaatcctgaaacgtggaatgtttctgctcaaaaacgttttatcgatttgaatctttaa

SEQ ID NO: 59917 - DNA, 207 bp, Neisseria meningitidis; identical to SEQ ID NO: 40222

SEQ ID NO: 59918 - DNA, 288 bp, Neisseria meningitidis; identical to SEQ ID NO: 43621

SEQ ID NO: 59919 - DNA, 513 bp, Neisseria meningitidis; identical to SEQ ID NO: 44991

SEQ ID NO: 59920 - DNA, 669 bp, Neisseria meningitidis; identical to SEQ ID NO: 51481

SEQ ID NO: 59921 - DNA, 975 bp, Neisseria meningitidis
atgccgtctgaaaacaaaattgaatttatgcagggttcgccgcgcccgttatgggcggcattcgcacttttactgatctgctgcggactgtttttaacgctcaatgtcaaaggcgattgggattttgtactgcaactgcgtctgaccaaacttgccgcgctgctgatggtcgcctatgcggtcggcgtgtccacgcaactcttccaaacgctgaccaataatccgattctgaccccttcgattttgggtttcgattcgctgtatgtgtttttgcagaccttgctggtgtttacgttcggcggtgtgggctatgcttccctgccgttgacgggcaaattcggctttgaactggtcgttatgatgggcggctcgctgctgctgttttacacgctcatccgtcagggcgggcgcgatttgccgcgtatgattttaatcggcgtgattttcgggattttgttccgcagcctgtcatcgctgctttcgcgcatgattgaccccgaagaatttaccgcggcgcaggcgaatatgtttgccggattcaataccgtccacagcgagcttttaggcataggcgcgctgattctgctcgtcagcgcggcggtcgtttggcgcgaacgctaccgcttggacgtacaccttttggggcgcgaccaagccatcaatttgggcatcagctacacgcgcaacaccttatggatactgctttggattgccgcattggtggcgacggcgaccgccgtagtcggcccggtaagctttttcgggcttctcgccgcctcgcttgccaaccacttttccccatccgtgcgccattccgtccgcctgccgatgacggtttgtatcggcggcatcctcctggtcggcggacagaccgtattcgaacacttcttgggcatgaaggcggtattaagcgtggtggtcgaatttgcgggcggactcgttttcctctatctcgttttaaaacacaaaaaatga

SEQ ID NO: 59922 - DNA, 2190 bp, Neisseria meningitidis
atgatctaccaccgcatcgccgtaaacgtgccgctttcagacggtcttttaacttattcccattccgagccgctgccgcagggaatgcgggtgcttgtgccttttcgcaataaaaccgtggtcgggatggtgtgggaaacggatattgcgccggatatggatacggcgcggattttgagtattcagacgacctttttagacgagccgccgttgcctgaaagctggcgtgatttgctctcgtttacgtcgcgttattaccactatccgacggggcaggcggtgtttgccgcgctgccgcagggtttgaaggaaacgcgcgcggtggaaatgccgcagccgccgttgttttatgctttgaacgaagcgggcagggcgcaaacgccgccgccggcgcggtttaacaaaaaagcggctttgtgggacgcgctgctttcgggcggaatgacgatggcggcgttgaagcaggtaaacgcgcaggcggcgaaattgattgaagattgggcggaacagggttggattgaaacgacggaggcggcgaaaccggtattgaggtcgtaccacgggcaggcttcgcactctgaatttgtattaaacgccgaccagcagaaggcttccgatgaaattcagacggcattgggacgcttccggccgtttctgctgtacggcatcaccggcagcggcaagaccgaagtgtatttcgatgcgatggcgaaagtgttggcgcaggggcggcaggtgttgtttctgttgcccgaaatcaacctcacgccgcagcttttaaagcgggtggaaaaccgttttgctgacgtgccgaccgccgtgttgcacagccagatggcggcaggcaggcgcacgcaggattatttgcgcgcgatgttggggcaggcgaaattggtcatcggcacgcggctggcggtgttcacgccgatggatgatgtcgggctgattgtggtcgatgaggaacacgacggctcgttcaaacaggacaacgaattacgctaccacgcccgcgatttggcggtgtggcgggcgaagcagagcggctgccccgttgtgttgggcagtgctacgcccagtttggagagttggcacaaggcgcaaagcggcgcgtaccgcctgctgcaactgaccgaacgcgcccataccgccgcgcaactgccgcaagtggacatcctcaacgtaggtcgtctgaaactcgacaacggcttctcgccgcaagccttgcagcttttgaaacagaactttgaagcaggcggtatgtcgctggtgtacctcaaccggcgcggtttcgcgcccgcgctgttttgcggcgactgcggccataccttcggctgcccgaactgctccgccaaaatggtgttgcaccaacgcgcccgccaattgcgctgccaccactgcgaccaccgcgaacccattccgttcaaatgccccgactgcggcaaccaagacctgaccgccgtcggacacggcacgcagcgcgtcgaagaaaccctgcgcgccttcctgcctaaagccgccgtcgtccgcgtcgatagggacagcacggcgcacaaaaatgactgggcggatttgtaccgccgtatcgccgacaacgaaatcgacattctggtcggcacgcagatgctcgccaaaggtcatgatttcgcgcggctcaacctcgttatcgtattgaacgccgatggcagcctgtatagcgcggactttcgtgcgccggaaaggctgtttgccgagctgatgcaagtgtccggcagggcggggcgtgccgacaaacccggcaaggtgttgatacagacccaactgcccgaacatcccgtcttcgccgccgtcaaggcgcaggattatgccgtgtttgccgaaaatgaattgaacgagcggcaaatgttcgcgatgccgcccttcggtttccagaccgccgtccgcgccgatgcgccgcgtgttgccgatgcgatggaatttctcaatgccgccaaagaaaccctcgccccgctgttgcccgaaagcgtttcccagtttggcgccgcccctatgctgatggtgcgccttgctgaacgcgaacgcgcgcaaatcttcctcgaatcggtatcccgacaggatttgcaccgcgccgtgagtttgtgggtgcaggtgttgcagcaaaaccgcgacggcaaaattagatggtcggtggatgtcgatccgcaggaggcttga

SEQ ID NO: 59923 - DNA, 1050 bp, Neisseria meningitidis; identical to SEQ ID NO: 38313

SEQ ID NO: 59924 - DNA, 1701 bp, Neisseria meningitidis
ttggcctcccccaaccctgccgaaatccgtatgcagcaagatattcagcaacgccaacgcgaagagcagttgcgccaaaccatgcagcctgaaagcgatgtgcgtttgcatcaaaaaaacacgggggaaacggttaatcagttgatgggcgatgacagcagccaaccgtgttttgccattaacgaagtggtgttggaaggcgaacaccatgctcggtttcagtttgccctaaaacgtgccttgcgcgaaacgggttttcaggctggcaagtgtctgcatgcgggcaacattaatcaaatcatgtccttagcacaaaatgctttgatcggcaggggatataccacgacccgtatcttggctgcgccacaggatttgaatagtggcaagcttcaattaaccctgataccgagctatctgcgctccatacgaatcgatcggtctaacgatgatcaaacccatgcaggacgtattgcagcattccagaacaaatttcccacccgctcgaacgatctgttgaatctgcgtgatttggaacaaggactggaaaatctcaaacgtctcccgactgcggaagccgatctccaaatcgttcccgtagagggagaaccaaaccaaagtgatgtcgtggtgcaatggcggcaacgtctgctgccctaccgtgtgagtgtggggatggataattcgggtagtgaggcgacaggaaaataccaaggaaatatcactttctctgccgacaatcctttgggactgagtgatatgttctatgtaaattatggacgttcgattggcggtacgcccgatgaggaaagttttgacggccatcgcaaagaaggcggatcaaacaattacgccgtacattattcagcccctttcggtaaatggacatgggcattcaatcacaatggctaccgttaccatcaggcagtttccggattatcggaagtctatgactataatggaaaaagttacaatactgatttcggcttcaaccgcctgttgtatcgtgatgccaaacgcaaaacctatctcggtgtaaaactgtggatgagggaaacaaaaagttacattgatgatgccgaactgactgtacaacggcgtaaaactgcgggttggttggcagaactttcccacaaagaatatatcggtcgcagtacggcagattttaagttgaaatataaacgcggcaccggcatgaaagatgctctgcgcgcgcctgaagaagcctttggcgaaggcacgtcacgtatgaaaatttggacggcatcggctgatgtaaatactccttttcaaatcggtaaacagctatttgcctatgacacatccgttcatgcacaatggaacaaaaccccgctaacatcgcaagacaaactggctatcggcggacaccacaccgtacgtggcttcgacggtgaaatgagtttgtctgccgagcggggatggtattggcgcaacgatttgagctggcaatttaaaccaggccatcagctttatcttggggctgatgtaggacatgtttcaggacaatccgccaaatggttatcgggccaaactctagtcggcacagcaattgggatacgcgggcagataaagcttggcggcaacctgcattacgatatatttaccggccgcgcattgaaaaagcccgaatttttccaatcaaggaaatgggcaagcggttttcaggtaggctatacgttttaa

SEQ ID NO: 59925 - DNA, 1281 bp, Neisseria meningitidis; identical to SEQ ID NO: 52869

SEQ ID NO: 59926 - DNA, 564 bp, Neisseria meningitidis; identical to SEQ ID NO: 53570

SEQ ID NO: 59927 - DNA, 360 bp, Neisseria meningitidis; identical to SEQ ID NO: 38354

SEQ ID NO: 59928 - DNA, 1209 bp, Neisseria meningitidis; identical to SEQ ID NO: 52137

SEQ ID NO: 59929 - DNA, 792 bp, Neisseria meningitidis; identical to SEQ ID NO: 39568

SEQ ID NO: 59930 - DNA, 729 bp, Neisseria meningitidis
atgaccgcctaccgtatcgcacccagtattttgtcggcagactttgcccgccttggagaagaggtggaaagcgtcattgcggcaggtgcagatctgatccattttgacgtgatggacaaccattatgtgccgaacctgaccttcggccctatggtttgcgcggcgttgaagccttatgcaagcgtgccgattgatgtgcatctgatggtcgaacccgttgacgacctgattcagtcgtttgccaaagcaggagcatcaatcatcacgttccatcccgaagcgagccgccatatcgaccgcagcttgagcctgattcgtgatatgggctgtcaggcggggctggtgttgaatccggcaacgcccgtatatctgttggaaaacgtattggacaggctggatatggttttgctgatgtcggtaaaccccgggttcggcggacaaagcttcatcccgcacacccttgaaaaaatccgccgggtgcgggcgatgctggatcggtacgaagcacaaagcgggcggcacatcgccatcgaagtggacggcggcatcaaaaccgacaatattgccgccgttgcccgagctggtgcggatacctttgttgccggttctgcgattttcggcaaaccagactataaggcggtgattgatgcgatgagggcggaactggaaaaaagcggcaggctgaaccttgcgccaatgattgaaatagaaatgccgtctgaaaattag

SEQ ID NO: 59931 - DNA, 4476 bp, Neisseria meningitidis
atgcgcttcacacacaccaccccattttgttccgtattgtccaccctcggtctttttgccgtttcccctgcttactcatccattgtccgcaacgatgtcgattaccaatattttcgcgactttgccgaaaataaaggcgcgttcgccgtaggtgcaagcaatatttccatccaagacaagcaaggcaaaatattaggcagggttctcaacggcatccccatgcccgacttccgagtcagcaaccggcaaaccgccatcgccaccctgattcacccccaatacgtcaacagtgtcaaacacaacgtcggctacggttccatacaattcggcaacgacacccaaaatccagaagaacaagcctatacctaccgcctcgtatcacgcaacccgcacccggactacgactaccaccttccccgcctcaacaaactggttaccgaaatctcacctgccgcactcagcagcgtacccttgcttggaaacggccagccaaaggccaatgcctacctcgataccgaccgcttcccctactttgtacgactcggctcaggcacgcaacaagtccgcaaagcagacggcacgcgtacacgaaccgccccggcataccaatacctgaccggcggcacgccactgaaagtattggggttccaaaaccacggcttactcgtcggcggcagcctgaccgaccaaccccttaacacctacgcaatcgccggagacagcggttcccccctgtttgccttcgacaagcatgaaaaccgctgggtgcttgcgggcgtactcagcacctacgccggcttcgataatttcttcaacaaatacatcgtcacgcaacccgaattcatccgttccaccatccgccaatacgaaacccggctggatgtcgggctgaccaccaacgaactcatatggcgcgacaacggtaatggcgacagcaccctgcaagggctcaacgaacgcatcaccctgcccattgcaaacccttcgcttgccccacaaaacgacagcaggcacatgccgtctgaagatgccggcaaaacgctcatcctatccagcaggttcgacaacaaaacactgatgctggcagacaatatcaaccaaggcgcaggcgcattgcagttcgacagcaacttcaccgtcgtcggtaaaaaccacacatggcaaggtgcaggcgttatcgtagccgacggcaaacgcgtcttctggcaagtcagcaaccccaaaggcgaccggctctccaaactgggcgcaggcacgcttatcgccaacggacaaggcatcaaccagggcgacatcagcatcggggaaggcactgtcgtactcgcccaaaaagctgcttcagacggcagcaaacaagcattcaaccaagtcggcatcaccagcggcaggggtacggccgtcctcgccgacagccagcaaatcaaatccgaaaacctctatttcggcttcaggggcggacggctcgacctcaacggcaacaaccttgcctttacccatatccgccatgcggacggcggcgcgcagatcgtcaaccacaaccctgaccaagccgcgacactgacgctgaccggcaaccccgtcctcagtcctgagcatgtcgagtgggtgcaatggggcaaccgtccgcaaggcaacgcggcggtttacgaatacatcaacccgcaccgcaaccgtcggaccgactacttcatactcaaacccggcggcaacccgcgcgaatttttcccgttaaatatggaaaactcaacaagctggcaatttatcggcaacaacaggcaacaggccgccaaacaagtcgcccaagccgaaaatgcccgccccgacctaattaccttcggcggatacttgggtgagaacgcgcaaacgggcaaagccgcaccgagttacagcaaaaccaatatcgaatgggtgaatggtccaaacaccccacacaagccctcgccctatacgaatacgccaacccgcacaggggcaggcgtaccgacgattaccgcctcaaagaaggcggcaaccccggcgcctacttcccatggaatgcctacagcacccaagactgggaatttctcggacatgaccggcgaagcagccatagaaaaaaaccgccatatcgcaaatgccgccgtatacggccggcccgaataccgttacaacggcgcactcaacctgcactatcgtcccaaacgcaccgacagcacgctgttgctcaacggcggcatgaaccttaacggggaagtcttgattgagggcggcaatatgattgtgtcaggcaggcccgtaccccatgcctacgaccaccaggccaaacgcgaacccgttcttgaaaacgaatggaccgacggcagcttcaaggctgcacggttcaccctgcgaaaccatgcccgactgacggcagggcgcaataccgcgcatctggacggcgacataaccgcatacaatctgtccggcatcgacctcggctttatccaaggcaaaacaccggaatgctaccgctcctaccatagcggcagcacccactgcacacccaacgccgttttaaaagccgaaaactatcgtgcactacctgcaacgcaagtacgcggcgacattacccttaacgaccgttcagagctccgcctgggcaaagcacacctgtacggcagcatccgtgccggcaaagacaccgcagtccgcatggaagcagacagcaactggacactttcccagtccagccacaccggcgcactgacgcttgacggcgcacaaattaccctgaaccccgatttcgccaataatacacacaacaaccgcttcaacacactgaccgtcaacggcacacttgacgggttcggcacattccgattcctgaccggcatcgtccgaaaacaaaatgccccccccctcaaactggaaggggacagccgcggcgcattccaaatccacgtcaaaaacaccggacaagaacctcaaacaaccgaatcgcttgcacttgtgagcctcaatccgaaacacagccaccaagcccgattcaccctccaaaacggctatgccgatttgggtgcctaccgctacatcctccgcaaaaacaacaacggatacagcctgtacaacccgctcaaagaggccgaacttcaaattgaagccacgcgtgcggaacatgagcgcaaccaacaggcatacaaccaattacaggcaaccgacatcagcagacaggttcaacatgactctgacgcgaccaggcaggcactacaggcctggcagaacagtcaaaccgaacttgcccgcatcgacagccaagtccaatatctgtccgcccaattgaaacagacagacccgctgaccggcattctgacgcgtgcccaaaacctgtgtgccgcacaaggatacagtgccgatatctgccgtcaggttgccaaagccgccgacacgaacgacctgacactcttcgaaaccgaactggatacgtatatagaacgtgtagaaatggccgaatccgaacttgacaaagcacggcaaggcggcgatgcgcaagccgtcgaaacagcccggcacgcctacctgaacgcactcaaccgtctgtcccgacaaatccacagtttgaaaaccggcgttgccggcatccgtatgccgaacctggccgaactgatcagccggtcggccaacaccgccgtttccgaacaggccgcctacaataccggccggcaacaggcgggacgccgcatcgaccgccaccttaccgatccgcagcagcaaaacatctggctggaaaccggtacgcaacaaaccgactaccatagcggcacacaccgtccctaccaacaaactaccaactatgcacatatcggcatccaaaccggcatcaccgaccgtctcagtgtcggtacaattttaaccgatgagcgcacaaacaaccgttttgatgaaggcgtatccgcccgaaaccgcagcaacggcgcacatctgttcgtcaaaggggaaaacggcgcactctttgccgcggcagatttaggctacagcaacagccgtacccgatttaccgattatgacggggctgccgtccgccgccacgcatgggatgcaggcatcaacaccggcatcaaaatcgataccggcatcaacctcagaccctatgccggcatccgtataaaccgcagcaacggcaaccggtacgtactcgacggcgcagagataaacagcccggcgcaaatccaaaccacatggcatgccggcatccgtctcgataaaaccgtcgaactgggtcaagccaagctgacccccgccttcagcagcgattactacgatacccgccaaaacagcggttccgccctcagcgtcaacgaccgtaccttactgcagcaagccgcccacggcacactgcataccctgcaaatcgacgccggatacaaaggctggaacgccaaacttcatgccgcttacggcaaagacagcaacaccgcccgccacaaacaggcaggaatcaaaataggctacaactggtaa

SEQ ID NO: 59932 - DNA, 849 bp, Neisseria meningitidis; identical to SEQ ID NO: 37501

SEQ ID NO: 59933 - DNA, 1179 bp, Neisseria meningitidis; identical to SEQ ID NO: 43491

SEQ ID NO: 59934 - DNA, 1881 bp, Neisseria meningitidis
atgaatattttttacgaagagtccggccaattcaaagtcgccgccatcgtccaaaaaaacgacgccacctaccaagtcgatacccaacacggtaaacgcaccaaagtgaaggcaaacaatgtctttgccgagtttgacggcgatatggcggcgtttttggaaaacgcgcaggcacaggcggcggacatcgacaccgatttattgtgggaagtatgcggcgaagaagaattttccgccgaggcgattgccgaagaatattacggccatgcgccgaccaaaaccgagctggcggcgaccttgattgcgctgtacgccgcgccgatgtatttctacaaaaaagccaaaggcgtgttcaaagccgcgcccgaagaaactttaaaacaagcacttgccgccatcgaacgcaaaaaacagcaagacgcgcaaatcgacgcttgggcggaagccttgaaacgcggcgagatgccgtctgaaatcgcggcggatttgaaaaccatcctgcacgcgcccgacaagcagtcgctgacctacaaagcctttaccaaagccgccgacgcgctgaaaacctctgcctacgaattggcgaaaaaaacgggcggcattacgtccattccccaatacctgcaagacgggtttgaaatcaaatatttccctaaaggaacaggcttccccgaccttccgcttcctgaaatgcccgacctgcccaaggccgacgttaccgccttttccattgacgacgagtcgaccaccgaagtcgatgatgccttgagcctgaccgacttgggcaatggcatgaaacgcgtcggtatccacatcgccgcgccgtcgcttgccattaagcaaggcgacaaaatggaaaaaaacatcatggaacgcttaagcacggtttattttcccggcggcaaaatcacgatgttgcccgaaaactggattgccgcgttcagccttgatgcaggtacataccgcccttccatcagcatttatttcgatgtggacaacgagttcaacgtcggcgcgccgacctgcaaaatcgaagcggtcaacatcgccacaaacctgcgtatccaagccatcgagccgcatttcaacgccgaaaccggcttggacgaagccggcgaaatgatgttcgcccaccatcaagacctgatttggttctatcaattcgccaccgccctgcaaaaagcgcgcggcaaatacgaacccgaccgcgcgccgcaatacgattacagcatcgaattggatgaggaaggcaaggtatccgtcgtccgccgcgaacgcggctcacccatcgatacgctggtcagcgagatgatgattcttgccaacagcacttgggcacaaatgctccatgacaacgacctgcccggcctcttccgcgtccaacccaccggaaaagtacgcatgagcaccaaatccgagccgcatatcggcatgggcgtgcagcattacggctggtttacctcgccgctgcgccgcgccgccgactacatcaaccaaaagcagctgatcagcctgatagacgacactgccgagccgctgtatcaaaacagcgatgccgagcttttcgccgcactgcgcgactttgatgccgcctataccgcctacgccgatttccaacggcagatggaagcctactggagccttgtgtacctgcaacagcaaggtacaagcgagctgaccgcgaccatcctcaaagaagacctcgtccgcatcgaaggcctgccgctggtcacgcgcgcgaccggtattccgtttgacgcactgcccaaatcacaggcattgttcaaaatcaccgaattggatgccgagaagcagtttgtctcgctcaactacatcaaggcagtcgcacccgcgggtacaacggcaggcaatgccgtctga

SEQ ID NO: 59935 - DNA, 696 bp, Neisseria meningitidis; identical to SEQ ID NO: 38171

SEQ ID NO: 59936 - DNA, 639 bp, Neisseria meningitidis; identical to SEQ ID NO: 51920

SEQ ID NO: 59937 - DNA, 312 bp, Neisseria meningitidis; identical to SEQ ID NO: 42205

SEQ ID NO: 59938 - DNA, 810 bp, Neisseria meningitidis; identical to SEQ ID NO: 54386

SEQ ID NO: 59939 - DNA, 618 bp, Neisseria meningitidis; identical to SEQ ID NO: 41482

SEQ ID NO: 59940 - DNA, 210 bp, Neisseria meningitidis
atgaatgagggtgaagttgttttaacaccagaacaaatccaaaccttgcgtggttatgctttccgtggcgatacctatggcggttggcgttatttggctaatttgggtgaccgttatgcggatgatgctgctgcaattgtcggtaaggatgcaaacttaaatggtttgaatttatggatgaaaaaaaggggtggaaaacctatgggatga

SEQ ID NO: 59941 - DNA, 1011 bp, Neisseria meningitidis
atgagcaaaaaacgagttctgaccggcgtaaccaccaccggcatcccgcatctgggcaactacgtcggcgccatccgccccgccgtccgcgcggcgcaaaaccctgataccgaatccttcctcttcctcgccgattaccacggtatcatcaaatgccacgagccggagatgattcaccaatccacccaagccgttgccgccacttggcttgcctgcggactcgaccccgagcgcaccaccttctaccgccaaagcgacattcccgaagtgatggaattgaactggattctgacctgtatcaccgccaagggtttgatgaaccgcgcccacgcctacaaagccgccgtgcaggcaaattcagaaaacaatcaggaagatcccgatttcggcgtggaaatgggtttgttcagctatccgattctgatgaccgccgacatccttatgttcaacgccaacgaagtgcccgtcgggcgcgaccaaatccaacacgtcgaaatggcgcgcgacatcgccggccgcttcaatcaccgctttaaagaaatctttaccctgcccgaagtgaaaatcgacgaaaacgtcgaactcttggtcggtttggacggacgcaaaatgtccaaatcctacggcaacaccattccgctttgggaaaacgacaaaaaaacccaaaaatcggtcaacaaaatcatcaccaatatgaaagagccgggcgagccgaaacagcccgacgaaagcccattgtttgaaatctacaaagccttctccacgccgtctgaaacggtggaatttacgaaaatgcttgccgacggcttggcttggggcgaggcaaaaaaacttttggcggcgaaaatcaacgccgaactcgccgaaccgcgcgaacgctacaacgagctgaccgccgacccttcgcaaatcgaagagattttacaggcaggtgcgcaaaaagcgcgtaaagaagcacgcgaattgttggacaaagtacgcgatgcggtcggcatccgcccgttgaaataa

SEQ ID NO: 59942 - DNA, 201 bp, Neisseria meningitidis; identical to SEQ ID NO: 36599

SEQ ID NO: 59943 - DNA, 2163 bp, Neisseria meningitidis
atgaacgccccgtttttccgcctcagcctgctctcgcttaccctggcggcaggttttgcccatgcggcagaaaataatgccaatgtcgcattggataccgttaccgtaaaaggcgaccgccaaggcagcaaaatccgtaccaacatcgttacgcttcaacaaaaagacgaaagcaccgcaaccgatatgcgcgaactcttaaaagaagagccctccatcgatttcggcggcggcaacggcacgtcccaattcctgacgctgcgcggcatgggtcagaactctgtcgacatcaaggtggacaacgcctattccgacagccaaatcctttaccaccaaggcagatttattgtcgatcccgctttggttaaagtcgtttccgtacaaaaaggcgcgggttccgcctctgccggtatcggcgcgaccaacggcgcgattatcgccaaaaccgtcgatgcccaagacctgctcaaaggcttggataaaaactggggcgtgcgcctcaacagcggctttgccagcaacgaaggcgtaagctacggcgcaagcgtattcggaaaagagggcaacttcgacggtttgttctcttacaaccgcaacgatgaaaaagattacgaagccggcaaaggtttccgcaatgtcaacggcggcaaaaccgtaccgtacagcgcgctggacaaacgcagctacctcgccaaaatcggaacaaccttcggcggcgacgaccaccgcatcgtgttgagccatatgaaagaccaacaccggggcatccgcactgtgcgtgaagagtttgccgtcggcgacacaaaatcacggataaatattaaacgccaagcccctgcttaccgcgaaaccactcaatccaacaccaacttggcgtacaccggcaaagatttgggctttgtcgaaaaactggatgccaacgcctatgtgttggaaaagaaacgctattccgccgatgacaaagataacggctacgcaggcaatgtaaaaggccccaaccatacccgaatcaccactcggggtatgaacttcaacttcgacagccgccttgccgaacaaaccctgttgaaatacggtatcaactaccgccatcaggaaatcaaaccgcaagcgtttttgaactcgaaattctccatcccgacgacagaaaagaaaaacggtcaagatgttgctaaaccagcagaccaacaagccaaagaccgcaaagacgaagcccttgtccattcctaccgtctgaccaacccgaccaaaaccgataccggcgcgtatatcgaagccattcacgaaattaacggctttaccctgaccggcgggctgcgttacgaccgcttcaaggtgaaaacccacgacggcaaaaccgtttcaagcagcaaccttaacccgagtttcggcgtgatttggcagccgcacgaacactggagcttcagcgcgagccacaactacgccagccgtagcccgcgcctgtatgacgcgctgcaaacccacggcaaacgcggcatcatctcgattgccgacggcacgaaagccgaacgcgcgcgcaataccgaaatcggcttcaactacaacgacggcacgtttgccgcaaacggcagctacttctggcagaccatcaaagacgcgcttgccaatccgcaaaaccgccacgtctctgccgccgtccgtgaagccgtcaatgccggttacatcaaaaaccacggttacgaattgggcgcgtcctaccgcaccggcggcctgactgccaaagtcggcgtaagccacagcaaaccgcgcttttacgatacccatcctaaaaaactgttgagcgcgaaccccgagtttggcgcacaaaccggccgcacttggacggcttcccttgcctaccgcttccaaaatccgaatctggaaatcggctggcgcggacgctatgttcaaaaagccgtgggttcgatattggtgtcaggtcaaaaaaaccgcgagggcaaattggaaaacgttgtacgccaaggtttcggtgtgaacgatgtcttcgccaactggaaaccgctgggcaaagacacgctcaatgtcaatctttcagtcaacaacgtgttcaacacgttctactatccgcacagccaacgctggaccaataccctgccgggcgtgggacgtgatgtacgcttgggcgtgaactacaagttctaa

SEQ ID NO: 59944 - DNA, 1128 bp, Neisseria meningitidis
ttgaagcacgcctactctttgttgttttttcaaataggcaaaatgaccgtattgagagaggtacacatgtccaaaaatgcacaaaaaaccctacttgccgtgtgcagtttcgaggtgcagccaaaagacgggcgaatccaactgctgccatatggcgaatttcgcgcagtagacggtcgtccgactgatgtccctgcgtggtatctgaccgaagaaaacggtcatgatgtcgcgttgttggccaacagctcgcgcaatcagttggttgtcgattatgaacaccagacgctctacaaagagaaaaacggacaacctgcacctgccgccggttggatgcgttggctggagttcacgcctaaaggcatgtttgccgaagtggagtggacggacaaggcggctgcggcaattgccgcaaaagagtatcgctacatctctgctgtgttttcctatgacacaaagggatatgtaagcaaaatttttcacgccgcgctgacaaatttccccgcgttggacggtatggacgaggtgctggcggcagcgtcggcgcaaattttaaaaccggaaacggagcaaaaccctatgaaagagttgttacagcaactgttcgacctgcctgatgcgggcgaagaagaactgaaggcggcattgtccgcgctcgtggaagccaagccgaaagacgtggcattgtctgccgacgtgttcgcgcagctggcggaaaaagacagccgcatcgcggcattgacggcgcaaaccgccaagcctgatttgactaaatacgcgcctatctcagtggttcaagagctgcaaagcaaagtcgccgcgctgactgccaagcaggaagcagacaaaggcaacgaattgattaccgccgcgctgacttcaggcaaattgctgcctgctcagaaggagtgggcaaaaggcgtattgaaacagccgggcggcttggcatttttgaccggctttattgaaaacgcccagccggtcgctgcactggcaggctcgcaaacgggcggcaaagcacccgacgaacgcgtcgccgcactgactgcggaagaggcagccgcagcaaaaatgctgggcatgtccggcgaagaatttgtaaaaatcaaagaaagcgaaggtaagtaa

SEQ ID NO: 59945 - DNA, 306 bp, Neisseria meningitidis; identical to SEQ ID NO: 38577

SEQ ID NO: 59946 - DNA, 564 bp, Neisseria meningitidis; identical to SEQ ID NO: 50461

SEQ ID NO: 59947 - DNA, 474 bp, Neisseria meningitidis
atgaaaaaacaaatcactgaagccacgatgatgctgtctataatcgcccccgcaatggcaaacggattggacaatcaggcatttgaaaaatacgtattccacacgcaggcagatgcgccgatgcagttggcggagctttctcaaaaggagatgaaggagactgagggggcgtttcttcctattgtggcaggtgctttgatgggaggggcaattagtgcttgggctaatcacggcatttctaaaattaaaacagggcaatttgcttcaacaagaagtaccttggctgcaaccgctggtggtatgataggaggcggatatagcagtgcgatgttgcgcggtgcagggattactactagtgtttttgcccgttctgcttggaaagggggaaatgctattcctaatgcagttattcgtgcaaatggtgcagcattaaatcagtcttctagcgccgcaatgggaaaacatagaagataa

SEQ ID NO: 59948 - DNA, 1104 bp, Neisseria meningitidis; identical to SEQ ID NO: 52231

SEQ ID NO: 59949 - DNA, 363 bp, Neisseria meningitidis; identical to SEQ ID NO: 43119

SEQ ID NO: 59950 - DNA, 867 bp, Neisseria meningitidis; identical to SEQ ID NO: 43718

SEQ ID NO: 59951 - DNA, 213 bp, Neisseria meningitidis; identical to SEQ ID NO: 48329

SEQ ID NO: 59952 - DNA, 360 bp, Neisseria meningitidis; identical to SEQ ID NO: 39367

SEQ ID NO: 59953 - DNA, 1293 bp, Neisseria meningitidis; identical to SEQ ID NO: 38975

SEQ ID NO: 59954 - DNA, 231 bp, Neisseria meningitidis; identical to SEQ ID NO: 36464

SEQ ID NO: 59955 - DNA, 417 bp, Neisseria meningitidis; identical to SEQ ID NO: 37115

SEQ ID NO: 59956 - DNA, 1677 bp, Neisseria meningitidis
atgagcttcaaaaccgatgccgaaatcgcccaatcctccacgatgcgcccgattggcgaaattgccgccaagctgggtctgaacgccgacaacatcgagccttacggtcattacaaggcgaaaatcaatcctgccgaagcgttcaaactgccgcgaaaacaaggcaggctgattttggttaccgccattaatccgactcctgccggcgaaggtaaaaccaccgtaaccatcggtttggcggacgcattgcgccatatcggcaaagactctgtgattgctttgcgcgagccttctttgggtccggtgttcggcgtgaaaggcggcgcggcaggcggcggctatgcccaagttttgccgatggaagacatcaacctgcacttcaccggagattttcacgccatcggtgcggcaaataatctgcttgccgcgatgctcgacaaccatatctaccaaggcaacgagttgaacatcgaccccaaacgcgtgctgtggcggcgcgtggtcgatatgaacgaccgccagttgcgcaacatcatcgacggcatgggcaagcctgttgacggcgtgatgcgtcctgacggtttcgatattaccgttgcttccgaagtgatggcggtattctgtcttgccaaagacatcagcgatttgaaagagcgtttgggcaacatcctcgtcgcctacgccaaagacggcagccccgtttacgccaaagatttgaaagcgaatggcgcgatggcggcattgcttaaagatgcgattaagcccaacttggtgcaaaccatcgaaggcacgcccgccttcgtacacggcggcccgttcgccaacatcgcccacggctgcaactccgtaaccgcaacccgtctggcgaaacaccttgccgattacgccgtaactgaagcaggcttcggcgcggacttgggcgcggaaaaattctgcgacatcaaatgccgccttgccggtttgaaacctgatgcggctgttgtcgtggcgactgtccgcgcgttgaaatataacggcggcgtggaacgcgccaacctcggcgaagaaaatttagacgctttggaaaaaggtttgcccaacctgttgaaacacatttccaacctgaaaaacgtattcggactgcctgtggtggttgccatcaaccgcttcgtgtccgactccgatgccgagttggcgatgattgaaaaagcctgtgccgaacacggcgttgaagtttccctgaccgaagtgtggggcaaaggtggtgcgggcggcgcggatttggcgcacaaagtcgtcaacgccatcgaaaaccaaccgaataacttcaagtttgcctacgatgttgagttgagcattaaagacaaaatccgtgcgattgcccaaaaagtgtacggtgcggaagatgtcgatttcagcgcggaagcgtctgccgaaatcgcctcgctggaaaaactgggtttggacaaaatgccgatctgcatggcgaaaacccaatactctttgagcgacaacgccaaactgttgggctgccccgaaggcttccgcatcgccgtgcgcggcatcaccgtttccgccggcgcgggcttcatcgtcgccctgtgcggcaatatgatgaagatgccgggcctgccgaaagttccggccgccgagaaaatcgatgtggacgaacacggcgtgattcacggcttgttctga

SEQ ID NO: 59957 - DNA, 1104 bp, Neisseria meningitidis
atgaatacgacagcaaacccttccaatatcatcgtcgggctctccggcggtgtcgattcttccgtaaccgccgccctgctcaagcagcagggttatcaagtgcgcggtgtgttcatgcagaactgggaagacgacgacaacgacgaatattgcagcatcaaacaggattcgttcgatgccatcgccgttgccgatattatcggcatcgatatcgacatcgttaatttcgccgcgcaatataaagacaaagtctttgcttattttcttcaggaatacagtgcggggcgcacgccgaatccggatgtgttgtgcaacgccgaaatcaaattcaaatgctttttggactacgccgtagggcagggcgcggataccatcgccaccggccactatgcgcgcaaagaagttcgcaacggcgtgcattacctgctcaaaggtttggatcgaaacaaagaccaaagctatttcctctaccgcctcaagcctttccaactcgaacgcgcgatttttccgttgggcggtttggaaaaacccgaagtgcgccgccttgccgccgagttcaaactgccgaccgccgccaaaaaagacagcacgggcatctgcttcatcggtgaacgcccgtttcgcgagtttctgcaaaaatacctgccgaccgacaacggtaaaatggttacgcccgaagggaaaaccgtcggcgaacacgtcgggctgatgttctacacgctcggacagcgcaaaggtttgggcatcggcggcgcgggcgaaccgtggtttgttgcggctaaagatttgacgaaaaacgaactgattgtcgtgcaaggacacgaccatccgctgctctatacccgcagccttgtgatgaacgatttgagtttcacgcttcccgaacgcccgaaggcaggacgctatacctgcaaaacgcgttaccgtatggcggacgcgccttgtgagttgcgctatttggatgaagaaaccgccgagctggtgtttgacgaaccgcaatgggcggttacgccgggccagtctgccgtgctgtacgacggcgacatctgtttgggcggcggcatcatccaaacgaccgacaaaccagtcatcatcacacgataa

SEQ ID NO: 59958 - DNA, 849 bp, Neisseria meningitidis
atggacttcaaacaatttgattttttacacctgatcagtgtttccggttgggagcatctggctgaaaaggcgtgggcgttcgggctgaaccttgccgccgcgctgcttatttttttggtcggaaaatgggcggcgaaacgcattgtcgctgtgatgagggcggcgatgacgcgcgcgcaggtcgatgccacgctgattagttttttgtgtaatgttgccaatatcggcttattgattttggtgattattgccgcattgggcagattgggcgtttccacaacatccgtaaccgccttaatcggcggcgcgggtttggcggtggcgttgtccttgaaagaccagctgtccaattttgccgccggcgcactgattatcctgttccgcccgttcaaagtcggcgattttatccgcgtcggcggttttgaaggatatgtccgagagattaaaatggtgcagacttctttgcggacgaccgacaacgaagaagtcgtgctgcccaacagcgtggtgatgggcaacagcatcgtcaaccgttccacactgccgctgtgccgcgcccaagtgatagtcggcgtcgattacaactgcgatttgaaagtggcgaaagaggcggtgttgaaagccgccgtcgaacaccccttgagcgttcaaaacgaagagcggcaggccgccgcctacatcaccgccttgggcgacaatgccatcgaaatcacattatgggcttgggcaaacgaagcagaccgctggacgctgcaatgcgacttgaacgaacaagtggtcgaaaacctccgcaaagtcaatatcaacatcccgttcccgcaacgcgacatacacatcatcaattcttaa

SEQ ID NO: 59959 - DNA, 381 bp, Neisseria meningitidis
atgcctttaaaattccaaccaagggaacgttcggttatcatgtgcgactttcgcggttatgaagaaccggaaatggtcaagaaacgccctgtcgtcgtcatagcgcgaaacaggcacaacggcaaactggtaacggtcgtacccttaagcagcacagaacctgtccctttggcggactaccaccacaaaatgagtggaaaccccttaccggacaagccgcacatccaatgttgggcaaaatgcgatatgacggcaacagtcggattggcacggttagaccgatacaaacccaaagggcgcgaccgctgcattccaataatcagtgaagaggattttcaggcgattaaaacagccgttgccaaggcattcaaactgtactag

SEQ ID NO: 59960 - DNA, 1680 bp, Neisseria meningitidis
atggaaattattaacgatgcagaacttatccgttccatgcagcgtcagcagcacatagatgctgaattgttaactgatgcaaatgtccgtttcgagcaaccattggagaagaacaattatgtcctgagtgaagatgaaacaccgtgtactcgggtaaattacattagtttagatgataagacggtgcgcaaattttcttttcttccttctgtgctcatgaaagaaacagcttttaaaactgggatgtgtttaggttccaataatttgagcaggctacaaaaagctgcgcaacagatactgatcgtgcgtggctacctcacttcccaagctattatccaaccacagaatatggattcgggaattctgaaattacgggtatcagcaggcgaaataggggatatccgctatgaagaaaaacgggatgggaagtctgccgaaggcagtattagtacattcaataacaaatttcccttatataggaacaaaattctcaatcttcgcgatgtagagcagggcttggaaaacctgcgtcgtttgtcgagtgttaaaacagatattcagattataccgtccgaagaagaaggcaaaagcgatttacagatcaaatggcagcagaataaacccatacggttcagtatcggtatagatgatgcgggcggcaaaacgaccggcaaatatcaaggaaatgtcgctttatcgttcgataaccctttgggcttaagcgatttgttttatgtttcatatggacgcggtttggcgcacaaaacggacttgactgatgccaccggtacggaaactgaaagcggatccagaagttacagcgtgcattattcggtgcccgtaaaaaaatggctgttttcttttaatcacaatggacatcgttaccacgaagcaaccgaaggctattccgtcaattacgattacaacggcaaacaatatcagagcagcctggccgccgagcgcatgctttggcgtaacagacttcataaaacttcagtcggaatgaaattatggacacgccaaacctataaatacatcgacgatgccgaaatcgaagtgcaacgccgccgctctgcaggctgggaagccgaattgcgccaccgtgcttacctcaaccgttggcagcttgacggcaagttgtcttacaaacgcgggaccggcatgcgccaaagtatgcctgcaccggaagaaaacggcggcgatattcttccaggtacatctcgtatgaaaatcattactgccggtttggacgcagccgccccatttattttaggcaaacagcagtttttctacgcaaccgccattcaagctcaatggaacaaaacgccgttggttgcccaagataaattgtcaatcggcagccgctacaccgttcgcggatttgatggggagcagagtcttttcggagagcgaggtttctactggcagaatactttaacttggtattttcatccgaaccatcagttctatctcggtgcggactatggccgcgtatctggcgaaagtgcacaatatgtatcgggcaagcagctgatgggtgcagtggtcggcttcagaggagggcataaagtaggcggtatgtttgcttatgatctgtttgccggcaagccgcttcataaacccaaaggctttcagacgaccaacaccgtttacggcttcaacttgaattacagtttctaa

SEQ ID NO: 59961 - DNA, 1863 bp, Neisseria meningitidis
atggctcttttgcagatttcagaaccgggtatgtccgccgccccgcaccggcaccgtttggcggcaggcatcgatttgggtacgaccaacagcttggtcgccaccgtccgcagcggcagtgccgcctgcctgcccgatgccgaagggcgcgttaccctgccttccgtcgtccgctatctggaaaacggcggcattgaagtcggcaaaatcgccctgtccgcccaaaaaaccgacccgctgaacaccgtcagctccgccaaacgccttatcggacggacgcttgccgatctgcatcaaaatacgcattacctgccttaccgtttcggcgacaatcaacgcgttatcgaactgcatacgcggcagggggtgaaaacgcctgtcgaagtgtcggcggaaatcctcaaaacccttaaatcgcgcgccgaagaaaccttggtcggcgatttggtcggcgtggtgattaccgtccccgcctatttcgacgatgcccaacgccaggccaccaaagatgccgcgcgtctggcgggtttgaacgtattgcgcctgctcaacgaacccaccgccgccgcaatcgcctacgggctggacaacgcctcggaaggcacgtttgtcgtgtacgacttagggggcggcacattcgacgtatccgtattgcaactgaccaaaggactgtttgaagtcaaagccaccggcggcaacagcgcgttgggcggcgatgacttcgaccatcgtttgttctgctacctgctcgaacaaaacggactctcccaactcaacgaacaagacagccaactcctgctttcgctcgtccgcgccgccaaagaacaattaaccacgcaaaccgaagcgcgcattcaggcgacgctttcagacggcatggcaatcgacacaagcatcagtcgcgccgagttccacaacctgacgcagcatttggtgatgaaaacgctcgaaccggtcaaacaggcgttgaaagatgccggtgtcggtaaaaacgaagtcaaaggcgtaattatggtcggcggttcgacccgtatgctgcacgtccagcaggcagtcgccacctttttcgggcaaaccccgctgaacaacctcaaccccgacgaagtcgtcgcgctcggcgcagccatacaggcgaacgtcctcgcaggcaacaaagccgacggcgaatggctgctgctggacgttacgcccttgtcgctcggtttggaaacctatggcggcttggcggaaaaaatcatcccgcgcaattccaccatccccaccgcgcgcgcgcaggactttaccaccttcaaagacggtcagaccgcgatgacgatacacgtcgtacaaggcgaacgcgaactggttgccgactgccgcagccttgccaaattcaccctgcgcggcattccgccgatggcggcgggtgcggcgcgtatccgcgtaaccttccaaatcgatgcggacgggctgctgtccgtttccgcccaagaacaaagtaccggcgtacacgcgcaaatcgaagtcaaaccttcctacggtttggacgacggcgcgattacccgaatgcttaaagacagtatggacaacgccgccgaagatatggcggcacgcgcccgcgccgaagccgtggtcgaagccgaaagcctgaccgatgccgtcaacgccgccctcgagttggacagcgatttgctggatgccgaagaattgcaacagattcggcaaggtatcgccgatttgcaaggccgtctgaaagacggaaaagccgaagacatccgcgccgccgccgccaaactcggcagcatcaccgacaatttcgccgccaaacgcatgaaccgcaacatccaacgtgcgctgacaggccagagtgtcgataatatttga

SEQ ID NO: 59962 - DNA, 201 bp, Neisseria meningitidis; identical to SEQ ID NO: 50893

SEQ ID NO: 59963 - DNA, 723 bp, Neisseria meningitidis; identical to SEQ ID NO: 53615

SEQ ID NO: 59964 - DNA, 420 bp, Neisseria meningitidis
atgaatctcgtgaaactgctagcgaataactggcaaccaattgccattatcgcgcttgtcggcacgggtttggcggtgtcgcaccatcaaggctataagtcggcgtttgcgaagcagcaggtggtcattgagaaaatgaagcgcgacaaggcgcaagccatgctgttgtcggctcaaaactatgcacgcgagctggaacaggcgcgcgcggaagcgaaaaaatatgaagtcaaggcgcacgccgtcggcatggctttggcgaaaaaacaggcggaagtcagccgtctgaaaacggaaaataaaaaggaaatcgaaaatgtccttactcaagaccgtaaaaatgcaggcggcggttgtattgacggctttggccatcacggcttgcagctctacaagcgcgccctcggctacggaaattaa

SEQ ID NO: 59965 - DNA, 678 bp, Neisseria meningitidis
ttggcaaagaaagtattggttgcccaaattcacaacctcagccgttttgagaattgtcagacgaccttgttgcagaccgaacaaattatccatggcaaaaatgtagcctccgcgtcactggaagacatccaaaccatcttgaacctgaaacgtgcctatcaatatgtgatttcgcatatttcaaacggcgaaccggtcgatatttcactccttaaaaaaatcaacaacattgttgccaaggacgattctttggcacccagtgatttccgtaccggttcagtcggcgtaacgctattggacggttcccgtcatgccccgaatccagtgaaggaaattgaagtggcccgcgtgttacaaaatatcggactgcaaagcggttcgacgacggaggcagccgtccgttttatgctttattgtatgcggcagcaggttttttgggacggcaacaaacgaacggcaaccttatttgccaacggtctgatgatggcggggggctgcggcatcttggaaatctccgaaatgcagatgccgcaattcaatgaaaaactgtccgcattctatcgctccggcgacgataccgatatttccaagtttgtgtatcaaaattgtatatcgggcatagactatttcggcacggacgaagatatagatttccccgacccaccaaacatgggctaa

SEQ ID NO: 59966 - DNA, 1005 bp, Neisseria meningitidis
atgaccatcatcgtaacaggcgcggccggctttatcggcagcaacatcgtcaaagcacttaatcaacgcggtattaccgacatcgtcgccgtcgataatttgagcaaaggcgaaaaattcaaaaaccttgccgagtgcgaaatcgcccattatctcgacaaacacgaattcatccgccaagtgagggaacacattttaccttatcaaaacatcgaagccgttttccatcaaggcgcgtgttccgatacgatgaaccacgacggtttgtatatgatggaaaacaactaccagtacacgctggatttgttggactggtgtcaggacgaacgcattcccttcctttatgcctccagtgcggcggtttacggcaaaggcgaaatcttccgcgaagagcgcgaactcgaaaaaccgcttaatgtgtacggctactccaaattcctgttcgaccaagtattgcgccgccgcatgaaagaaggtctcaccgcccaagtcgtcggcttccgctacttcaacgtttacggacaacacgaacaacacaaaggccgcatggcatccgtcaccttccaccatttccaccaataccgcgaacacggttacgtcaacctgttcggcagcaatgacggttacggcaacggcgaacaaacccgcgactttgtcagcgtcgaagacgttgccaaagtcaacctctacttcttcgaccatcccgaactttccggcatctacaacctcggtaccggccgcagccaacagtttaacgaactcgccgccgccaccgtcaacgcctgccgcgccgccgaaggcaagcctgaaatgagcttgaaagagctggtggaagaagaacttatccgctacatccccttccccgacgcactcaaaggcaaataccagagcttcacccaagccgacatcaccaaattgcgcgaagccggatataaggaagaatttttcgatgtcaaatcaggcgtcgaccgctacgtcaaatggatgctggaaaatttggcttaa

SEQ ID NO: 59967 - DNA, 1338 bp, Neisseria meningitidis
atgagtaaccatacttcttggtcgtccaaaatcggtttcgtccttgctgcggcaggttcggccatcggtttgggcgcgatttggaaatttccttatacggcaggcaccaacggcggcgcggtgtttttcctgctgtttttgatatttactatcttggtcgccctacccgttcagcttgccgaattttatatcgggcgcacgggcggtaaaaatgccgtcgattccttcagggttctgcgtccgggcacgcaatggctttgggtcgggcgtatgggcgttgccgcctgctttattttgctgtcgttttacagcgtggtcggcggatgggtattaaattatgtcgtccacagttttacgggggcggttcataccggcgcggactttgaagccttgttcggcgcgacgatttccaatccggcaggttcgctgtcctatcaggcactgtttatgctgattacggtctgggtggtcaaaggcggcatttcagacggcattgaaaaggcaaaccgttatctgatgccggggctgtttatcctctttattgcgctggcaatccgttcgctgacgctgccgggtgcaatggagggcgtgtctttcctgctcaaaccgaattggtcgtactttaaagccgatacgatgattacggctttaggccaggcgttttttgccttgagcatcggcgtttccgctatgattacctatgcttcgtatttgggaaaagatcaggatatgttccgctcggggcatacgattatgtggatgaacctcttggtttcgctgttggcaggtttggtgatttttccggcggtgttcgccttcggttttgaaccgagccaggggccgggattgatttttatcgtattgcccgcagtgtttatgaagatgccgttcggtacggttttgtttgcggtatttatgctgctggtcgttttcgccacgctgacttcggcattttcgatgttggaaacggtcattgcctcaaccatccgccaagacgagcgcaaacgcaaaaaacacacttggcttatcggcacggccattttcattatcggcatcccgtccgcgctgtctttcggcgtatggggcgagtttaaggttttcggcaaaaccatttttgatttgtgggactatgttatttccgccgtcattatgccgattggtgctttgagtgtttccatctttaccgcctggattcaggacaagcagtctgtgttaaaagatgccggcgcgggcagcaccgtaccacgggcagtgctgctgctgtggctgaataccttgcgctacctcgccccgattgccattattatcgttttcgtcaattctttgggcatcctttaa

SEQ ID NO: 59968 - DNA, 435 bp, Neisseria meningitidis; identical to SEQ ID NO: 43640

SEQ ID NO: 59969 - DNA, 645 bp, Neisseria meningitidis; identical to SEQ ID NO: 38405

SEQ ID NO: 59970 - DNA, 195 bp, Neisseria meningitidis
atgaaatacttgatccgcaccgccttactcgcagtcgcagccgccggcatctacgcctgccaaccgcaatccgaagccgcagtgcaagtcaaggctgaaaacagcctgaccgctatgcgcttagccgtcgccgacaaacaggcagagattgacgggttgaacgcccaaatcgacgccgaaatcagacaacgctaa

SEQ ID NO: 59971 - DNA, 654 bp, Neisseria meningitidis
atgttttccgtaccgcgttcctttttgccgggcgttttcgtacttgccgcgcttgccgcctgcaaacctcaagacaacagtgcggcgcaagccgcttcttcaagtgcatccgcgtcggctgcggaaaatgcggcaaagccgcaaacgcgcggtacggatatgcgtaaggaagacatcggcggcgatttcacgctgaccgacggcgaaggcaagcctttcagcctgagcgatttgaaaggcaaggtcgtgattctgtctttcggctttacgcactgtcccgatgtctgcccgacagagcttttgacgtacagcgacacgttgaagcagttgggcgggcaggctaaggacgtgaaagtggtgttcgtcagcatcgatccggaacgcgacacgcctgaaatcatcggcaagtatgccaaacagttcaatccggactttatcggtctgacggcaacgggcggccaaaacctgccggtcatcaagcagcaataccgcgtggtttctgccaaagtcaatcaaaaagacgacagcgaaaactatttggtcgaccactcttccggtgcgtatctcatcgacaaaaacggtgaggttgccattttctcgccttacggaagcgagccggaaacgattgctgccgatgtaaggaccctgctctga

SEQ ID NO: 59972 - DNA, 747 bp, Neisseria meningitidis; identical to SEQ ID NO: 47877

SEQ ID NO: 59973 - DNA, 1044 bp, Neisseria meningitidis
atgagtaaaaaaatcaaagtcggcattgtcggcgcgacgggctacaccggcgtggaactgctgcgcctgcttgccgcccatcccgatgtcgaagtcgccgccgtaaccagccgcagcgaagcgggaaccgcagttgccgattactttccaagtctgcgcggcgtgtacggcctcgccttccaaacgcccgacgaggcaggtttggaacaatgcgacatcgtcttcttcgccacgcccaacggcatcgctatgaaagacgcgctgcgccttttggaacagggcgtgcgcgtcatcgacctttccgccgacttccgcatacgggacattccgacctgggaacactggtacggcatgacccacgccgcccccggcctcgtttcccaagccgtgtacggattgagcgaactcaaccgcgaagccgtcgcacaggcgcgcctcgtcgccaaccccggctgctacccgacctgcgtatccctaccgctcgtgccgctgttgcggcaatgccgtctgaagcccggtatgccgctgattgccgactgcaaatccggcgtgtccggcgcgggcaggaaaggcaatgtcggttcgctgttgtgcgaagccggcgacaacttcaaagcctacggcatagccggacaccgccacctgcccgaaatcaggcagaccatcgccgggcttcaggacggcatcgccgaaggattcgtgttcacgccgcacctcgcgccgatgatacgcggtatgcacgccaccgtttacctccacctttcaaacggcatctgccccgaaaccgtcctgcgcgactattaccgcgacagcctgttcgtggacatcctgccgaccggttccgcccccgaaacccgcagcgtgcgcggcgcaaacctctgccgcatcagcatccaacaggcggcgcaatccgatgtgtgggtcgtcctttccgtcatcgacaacctcgtcaaaggcgcggcgggtcaggcagtccaaaatatgaacattatgttcggactggaggaaacacacggcttggacgcaatccccctgctcccctga

SEQ ID NO: 59974 - DNA, 330 bp, Neisseria meningitidis; identical to SEQ ID NO: 39065

SEQ ID NO: 59975 - DNA, 402 bp, Neisseria meningitidis
gtgaagcgcgaatggttcgtcatcgatgcccaagacaaagtcttgggtcgcgttgcagccgaagtcgccagccgtctgcgtggcaaacacaaacctgaatacaccccccacgtcgataccggcgattacatcatcgtcatcaacgcggacaaactgcgtgtaaccggtgccaaattcgaagacaaaaaatacttccgccattccggtttcccgggcggtatctacgaacgcaccttccgcgaaatgcaagagcaattcccgggccgcgctttggaacaagccgtaaaaggcatgttgcctaaaggtcccctgggttacgccatgattaaaaaactgaaagtgtacgctggtgcagaacatgcccatgccgcacaacaacccaaagttttggaactgaaataa

SEQ ID NO: 59976 - DNA, 1977 bp, Neisseria meningitidis; identical to SEQ ID NO: 56079

SEQ ID NO: 59977 - DNA, 2214 bp, Neisseria meningitidis; identical to SEQ ID NO: 50108

SEQ ID NO: 59978 - DNA, 846 bp, Neisseria meningitidis; identical to SEQ ID NO: 44327

SEQ ID NO: 59979 - DNA, 774 bp, Neisseria meningitidis
atgaacactattgcagacgtgcaatccagccgagatttgcgcaatctgccgatcaatcaggtcggtatcaaagacctgcgctttccgattaccctgcaaactgcagaaggcatccagtccacagttgcccgtctgaccatgacggtttacctgcctgccgagcagaagggtacgcatatgtcgcgctttgtcgcattgatggagcaacataccgaagccttggattttgcacaattgcgcaggctgactgctgaaatggtcgcgcttttggattcccgcgccggcaaaatcagcgtttctttcccatttttccgcaagaaaaccgccccggtttccggtattcggtccttactggattatgatgtcagcctcacgggcgaaatgaaagacggtgcatacggccacagtatgaaggtcatgattcccgtaacctcgctttgcccgtgttccaaagaaatttcccaatatggcgcgcacaaccagcgttcgcacgttaccgtcagcctgactgccgatgccgaagtcggtatcgaggaagtcatcgattatgtggaggcgcaggcgagctgccaactctacggcctgctcaaacgccccgatgaaaaatacgttaccgaaaaggcctacgaaaacccgaaattcgtggaagatatggtgcgcgatgtcgctacttcgctgatcgccgacaaacgcatcaagagtttcgttgtcgagagcgagaatttcgagtctatccacaaccattcggcttatgcctatatcgcctacccgtag

SEQ ID NO: 59980 - DNA, 1170 bp, Neisseria meningitidis
atgagcgaatatctgtttacttccgaatcggtatccgaaggccatccggacaaagttgccgaccaagtgtccgatgcgattttggatgccatcttggcgcaagaccccaaagcgcgtgtcgctgcagaaaccttggtcaacacaggcttgtgcgtattggcgggcgaaatcaccaccaccgcccaagtggactacatcaaagtcgcacgcgaaaccatcaaacgcatcggctacaactcgtccgagctgggctttgatgccaacggctgcgcggtcggcgtgtactacgaccagcaatcccccgacatcgcccaaggcgtgaacgaaggcgaaggcatcgacctgaaccagggcgcgggcgaccaaggtttgatgttcggctatgcctgcgacgaaaccccgaccctgatgccgtttgccatctattacagccaccgcctgatgcagcgtcaaagcgaattacgcaaagacggccgcctgccttggctgcgccctgacgcaaaagcccaactgaccgtggtttacgacagcgaaaccggcaaagtaaaacgcatcgacaccgtcgtcctctctacccagcacgatccgtccatcgcttacgaagaactgaaaaacgccgtcatcgagcagattatcaagcccgtcctgccgtctgaactgctgaccgacgaaaccaaatacctgatcaacccgaccggccgcttcgtcatcggcggcccgcaaggcgactgcggtttgaccggccgtaaaatcatcgtcgatacctacggcggcgcggctccgcacggcggcggcgcgttttccggcaaagacccgtccaaggttgaccgttccgccgcctacgcctgccgctatgtggcgaaaaacatcgtcgccgcaggattggcaacccaatgccaaatccaagtttcctacgccatcggcgttgccgaaccgacttcgatttccatcgatactttcggcacaggcaaaatcagcgaagaaaaactgattaccttagttcgcgaacatttcgacctgcgccccaaaggcatcgtccaaatgctcgacctcttgcgcccgatttacagtaaatccgccgcttacggacatttcggccgcgaagaacctgagttcacttgggagcgcaccgacaaagctgctgcattgagggcggcagcggggctgtaa

SEQ ID NO: 59981 - DNA, 843 bp, Neisseria meningitidis
atgattcaacacgcaggcttgggctaccgccgcgacttggcggaagactttctctcgctttccgaaaacagcccgatatgctttatcgaagccgcaccggaaaactggctgaaaatgggcggctgggcgcgcaaacagtttgaccgtgtggcggaacggctgccgctggcgttgcacggattatctatgtcgctgggcgggcaagcaccgctggatactgatttgatagacggcatcaaagaaatgatgcgccgttacgattgcacgtttttctccgaccatttgagctactgccacgacggcggtcatctttacgatttgttgccgctgccctttaccgaggaaatggtgcatcatacggcgcggcgtatccgcgaagtgcaagaccgtttgggctgccgcatcgccgtggaaaacacgtcctactatctgcattccccgcttgccgagatgaacgaggtcgagttcctcaacgcggttgcacgtgaggccgattgcggcattcatctggacgtgaacaatatctacgtcaacgccgtcaatcacggcctgttgtcgccggaggcttttttgaaaaacgttgacgcagatcgcgtgtgctatatccatattgccggacatgacgtggaaacgccggaattgttgattgatacacatggcgcggcagttttgccgactgtttgggacttgctcgaacttgcctatgccaaactgccgacgattccgcccaccctgttggaacgcgattttaatttcccgccttttgccgaactcgaagccgaagtcgccaaaatcgccgattatcaaacgcgtgccggaaaggaatgccgccgtgcagcctga

SEQ ID NO: 59982 - DNA, 687 bp, Neisseria meningitidis
gtgcaggcggatttagcctatgccgccgaacgcattacccacgattatccgaaagcaaccggtgcaaacaacacaagcacagtaagcgattatttcagaaacatccgtgcgcattccatccacccccgagtgtcagtcggctacgatttcggcgactggagaatagcggcagattatgccagttacagaaaatggaacaacaataaatattccgtcaacacaaaagaggtgagaagaaacgggggcaacagtgaaaacctgaagacggaaaatcaggaaaacggtacattccacgccgcttcttctctcggcttatccgccatttacgatttcaaactcaacgataaattcgataaattcaaaccctatatcggtgtgcgcgtcgcctacggacacgttaaacatcaggttcattcagtggaaagcaaaaccacgattgttaccactgcaccaacgggaggcgctcaaaagggaggcgttatctcagaagctacgattagcaaacctccctatcaccaaagccacagtatcagcagcttgggtcttggtgtcatcgccggtgtcggtttcgacatcacgcccaatctgactttagacaccggataccgctaccacaactggggacgcttggaaaacacccgcttcaaaacccacgaagtctcattgggcatgcgctaccgcttctga

SEQ ID NO: 59983 - DNA, 579 bp, Neisseria meningitidis; identical to SEQ ID NO: 42998

SEQ ID NO: 59984 - DNA, 606 bp, Neisseria meningitidis
atgatgaccctctattccggcattacctgccccttcagccaccgctgccgcttcgttttgtacgaaaaaggtatggattttgaaatcaaagacgtcgatatttacaacaaacccgaagacctcgccgtcatgaacccgtacaaccaggtccccgtactggtcgagcgcgatttggtgctgcacgagtccaacatcatcaacgaatacatcgacgaacgcttcccccatccgcagcttatgcccggtgatcccgttatgcgcggcaggggccggctggtgctgtaccgtatggaaaaagaattgttcaactacgtccaagttttggaaaaccccgccgccaccaacaaggaacaggcaaaagcgcgcgaagccatcggcaacggcctgacgatgctcgccccttcgttcagcaaaagcaaatacatcctcggcgaagatttttctatgattgatgtcgcccttgctccgctgctgtggcggctcgaccactacgatgtcaaactgggcaaaagtgccgcgccgctgctcaaatacgccgagcgcatcttccagcgcgaagcctttatcgaagcactgacacccgccgaaaaagccatgcgcaaataa

SEQ ID NO: 59985 - DNA, 762 bp, Neisseria meningitidis; identical to SEQ ID NO: 54658

SEQ ID NO: 59986 - DNA, 1260 bp, Neisseria meningitidis
atgagtatggcacttgcccaaaaacttgccgccgacagcattgcggcggttgccgaagggcgcaaccttcaggacgtgttggcgcacatccgcgcggcgcatcccgatcttacggcgcaggaaaacggcgcgttgcaggacatcgcctacggctgccagcgttatttgggcagtttgaaacatatgctcgcgcagatgctgaaaaaaccgattgacaatccgcagctcgaaagcctgcttttggcggcgttgtaccaactgcattacacgcgcaacgcgccccacgccgtggtcaatgaggcggtggaaagcatcgcgaaaatcgggcgcgggcagtaccgttcgtttgccaacgcggttttgcgccgctttttgcgcgaacgcgacaagcttgtggcttcctgtaaaaaagacgatgtggcgaaacacaacctgccgctgtggtgggtggcttacttgaaaaaccattatccgaaacactggcacaacatcactgccgcgctgcaatcccatccgccgatgactttgcgcgtcaaccgccgacacggcaatgccgaaagctatttggaaaaactggtggcggaaggtatcgcggctaaggcgttggacgaatatgcggttacgttggaagaagccgtgccggtaaaccgcctgcccggcttttcagacggcatcgtttcggtacaggacttcggcgcgcagcaggcggcgtatctccttaacccgaaagacggcgaacggattttggacgcgtgcgccgcgccgggcggcaagacggggcatatcttggaattggcggattgccgtgttaccgccttggacattgatgcaggccgtctgaaacgggtggaagacaatatcgcgcgcctgggctttcagacggcatcgacggcgtgtgccgatgcacaggacctgccggcatggtatgatgggaaaccgtttgatgccgtccttgccgacgtgccgtgtaccgcctcgggcgtggcgcggcgcaatcccgacgtgaaatggctgcgccgtccgaccgatgccgccaaaaccgcccgccagcaggaagccctgctggatgcgttgtggcaggtgctgaaaagcgggggaaggatgttgatcgccacctgttccgtgttcgtcgaggaaaacgacggacaattgcaaaaattcctcaaccgccatgccgatgcagaactgatcgaatcgcgggtactcttaccgaacaaacaccaagatggcttttattacgcgcttattcaaaagcagtaa

SEQ ID NO: 59987 - DNA, 726 bp, Neisseria meningitidis
atggattttctctcttgttggcggcgcatcgcagacgcgcccactatcaggcgttgcgtattatgccacggttcgtccggcgtttcagacggcatctgcgccggctgccgcaacgatttggcggcataccgcaccgacgcggcaaacagctgccccctgtgtttcaggcacgttcaaggcggcgcggtatgcggcggctgtcagaaaaaaccgcccgcattcgaccggatgtgggcatcgctgcattacgaaccgcccgtcagcaatatgatacgcgcgctgaagcacttggctgatttgggcatggtgcagccgctggcagacctgatgatgcagaatccgcccgaccggcttgcagacgaatgtttcgatttcgtcctgcccgttccgctaagcagggagcggctgctgcaacgcgggttcaaccaaagcgagggcatcgtcgggttgttggcgcaacgctacggctggcggatactgccccgacacaccgtattccgacaccaccgcccgccgcaaagcacgctcaaaggcagcgaacggcggcgaaacatcaaaaacgcctttgaaatccgcacaccgataccggaaaactgtaatattctgttaatcgacgatgtctttaccaccggcgcgacgctggacgaactggcaaagacgctgaaaaaatcgggcgcaaaccgaatctgctgctggacgctggcacgcacgccaatgaaaaaataa

SEQ ID NO: 59988 - DNA, 993 bp, Neisseria meningitidis; identical to SEQ ID NO: 44011

SEQ ID NO: 59989 - DNA, 987 bp, Neisseria meningitidis
atgcaataccgaatcagaagagaaaacgaagcacccgaagcaaaaaatgcgggggaaaccttatgggagcgcgatatgatgcgcgaagtgctgctgtccgcctatcgggacaggcgcagggagcggatgtggaaaaacatctggcgcgccgtcagcaccctgattctggttgccctgattgcaggcattttccgaaaagacgaagccgcattgcagttggcgggcaatacgccgcataccgcagtcgtcaacctgtacggcgaaatcggcaacggtgtagaagaccaggtcaaaaaactcaaagacggtatggaggccgcctacaaaaacccgcaggcaaaagccatcgtcatccgcgccaacagccccggcggttcgcccgtcgtctccaacaccgcttttgaagaaatacgccgtctgaaggcgcagcaccccggcattcccgtttatctcgtggcggaagatatgtgcgcgtccggctgctactacatcgcggcggcggcggacaaaatctatgccgacccgtccagcatcgtcggcagcatcggcgttatcggcagcagtttcgacgcgaccggcctgatggaaaaaatcggcgtgaaacgcagggttaaaattgcgggcagcaacaaaggcatgggcgatccgttttcgcccgaaacgcccgaacagtcgaaaatctgggaagaaatgctgaccggcatacacggcgaattcatcaaagccgtcaaaaccggacggggcggccgcctcaaattccgacaatatcccgacgtgttcagcggtcgcgtgtacacgggtgcggatgcgcagaaagtcgggctggtggacggactcggcaatatttacagcgtggcgcgagacgtggtcaaagcccccgatgtggtggattacactccgaaggacgatttcggcagaatcttgggcagacgcttcggcgcagaactcaaagcaagcgtgcgcgaagccctgcaggccgtccggtag

SEQ ID NO: 59990 - DNA, 198 bp, Neisseria meningitidis; identical to SEQ ID NO: 43350

SEQ ID NO: 59991 - DNA, 1209 bp, Neisseria meningitidis; identical to SEQ ID NO: 38616

SEQ ID NO: 59992 - DNA, 963 bp, Neisseria meningitidis
atgcccagtatctccgtccgccgcctgtttgatgacaaccaatacaaactgcaactcgcttgggccgccggcaattcgggtgcggacaaccgtatcggcgtagaggcggacaagcccgtcctcgccctagtcggacacctgaatttcattcatcccaaccaaatccaagtggtcggtttggcagagtcggaatatctgaaccgcctcgaatcgggggaaacgggttatcagtttggcgacctgttcgatatttctatgtctttggttattgtggcaaacggcttgccggtttccccgggactgcgcgactactgccacaaaaacgatattccactgctgacttccaaactcgaaagcccctatctgatggacgtgttgcggatttacctgcaacgcaccctggcggcatcgtccgtcaaacacggcgtatttctcgatgtgtttgaaatcggcgtgctgattaccgggcattcgggtttgggcaagagcgaattggcattggaactgatttcgcgcggacacagcctgattgccgacgatgcggtggagctgttccgcatcggtccggaaacattggaagggcgttgttcgcctatgctgcgcgattttttggaagtgcgcggcttggggatactcaatatccgccatattttcggcgaaacttccatccgccccaaaaaaatcctgcaactcattatcaatttggtcgaggcggacgacgagtatatgaagcagcttgaccggttgagcatccgcaccgaaaccgaatccatcctcaacgtcaacgtccgttcggttacgctgcccgtcgccgtcggacgcaacctcgccgttttggttgaggcggcggtacgcaattatattcttcagttgcgcggtaaggatagtacgcgcgaatttttggaacgtcatcagacgcagcttaaagaaaacgagcaacacaatgaaaatcgtcctgattag

SEQ ID NO: 59993 - DNA, 360 bp, Neisseria meningitidis; identical to SEQ ID NO: 42278

SEQ ID NO: 59994 - DNA, 1902 bp, Neisseria meningitidis
atgactacgccaaaaaaaaccgccaaaacttccggcaacgaagcgcgcgaacttgccgacttgagcgaagacatcggtatccgcttcaaatatccgaactcggaacgcgtgtatctgcaaggcagccgcgacgacatccgcgtgcctttgcgtgaaatccgtcaggacgacacctatacggcgcaaggcgcggaagccaacccgccgattcccgtctatgacaccagcggcgtgtacggcgatccagcggcacacatcgacctgaaacaaggtctgccgcacatccgcaccgcatggctgaacgaacgcggcgataccgaaatcctgcccaagctctccagcgaatacggcatcgaacgcgcacacgatccgaaaaccgcccatctgcgcttcaaccaaatcacccgcccgcgccgcgcgaaaagcggtagcaacgtaacccagcttcactacgcgcgccaaggcattatcacgcccgaaatggagtttgtcgccatacgcgaacgtttaaaattagacgaattgtcccaaaaatcggaatacgccaaactcttgaaacaacacgcagggcaaagtttcggcgcgaacatcccaacccgtcccgaccaaatcacgcccgaattcgtgcgccaagaaatcgccgccggacgcgcgattatccccgccaacatcaaccatcccgaactcgaaccgatgattatcggccgcaacttccgcgtcaaaatcaacggcaacttgggcaattccgccgtcacttccagcctgaccgaagaagtcgaaaaaatggtgtggtcgctgcgttggggcgcggacacaattatggacttatccacaggcgcgcacatccatgaaacgcgcgaatggattatccgcaacgcgcccgtccccatcggcaccgtgcctatttatcaggctttggaaaaaaccggcggcattgccgaagatttgacttgggatttgttccgcgacaccttaatcgagcaggcggaacaaggcgtggactatttcaccatacacgcgggcgtgttgctgcgttatgtaccgatgaccgccaaccgcctcaccggcatcgtctcgcgcggcggttcgattatggcgaaatggtgtttggcacatcatcgggaaaacttcctctacacgcatttcgacgaaatctgcgaaatcatgaaagcgtatgatgtgtcgttcagcctcggcgacggcctgcgccccggctgcattgccgatgccaacgacgaatcccaattcgccgagctgcacaccttgggcgaattgaccgataaggcgtggaaacatgacgtacaagtcatgatcgaaggccccggccatgtgccgctgcaacgcgtcaaagaaaacatgaccgaagagctgcaacactgctttgaagcacctttttacacactcggcccgctcgttaccgacatcgcacccggctacgaccacatcacctcgggcataggcgcggccaatatcggctggtacggcacggcgatgctttgttacgttacccccaaagaacatttggggctgcccgacaaagaagacgtgcgcaccggcatcatcacctacaaactcgccgcccacgccgccgatctcgccaaaggctggccgggcgcacaattacgtgacaacgccctgagcaaggcgcgtttcgagttccgttggcgcgaccaatttcgcttaagcctcgaccctgaacgtgccgaaagcttccacgacgaaaccctgcctgccgaaggcgcgaaaatcgcccacttctgctcaatgtgcggccccaaattctgctcgatgaaaatcacgcaggaagtgcgcgactacgccgacaagcaaaaagcccaacggcagggcatggaggaaaaagcggtcgagttcgtcaaaaaaggcgcgaagatttacagttga

SEQ ID NO: 59995 - DNA, 501 bp, Neisseria meningitidis; identical to SEQ ID NO: 37882

SEQ ID NO: 59996 - DNA, 1968 bp, Neisseria meningitidis; identical to SEQ ID NO: 51324

SEQ ID NO: 59997 - DNA, 207 bp, Neisseria meningitidis
atggatgaagcagtttttgccgattgggcgttgaaaatctgcctgaccggcttgattatttttttgggttttatcgtttggaatttgggcaaggagtccaaagcaggcaaattcggcatcgccattttgtttttggttttgggcttgggcgtgttcggttttgtgttcaaagagttattgattaagtttttggtattgccgaaatag

SEQ ID NO: 59998 - DNA, 6822 bp, Neisseria meningitidis
atgaacaagcgatgctacaaggttatcttcaacaagaaacgcagttgtatgatggctgtagcagagaatgttcatcgtgacggcaagagtatgcaggatagtgaggcggcttcggttcgagtgaccggtgccgcttctgtttcttctgcccgggcagccttcggtttccgtatggctgccttttctgtcatgttggctttgggtgttgctgcgttttcccctgcccctgcttccggcatcattgccgacaaatccgcccctaaaaaccaacaagccgttattcttcagacagcaaacggtttgccgcaagtcaatattcaaactccgtcatcccaaggcgtttctgttaaccgattcaagcagttcgatgttgatgaaaaaggcgtaatactaaacaacagccgcagcaatacgcaaacgcaactcggtggatggattcaaggcaatccccatctggcacgcggcgaagcgcgggtaattgtgaaccagattgacagcagtaatccttcgttgttgaacggttatatcgaagtcggcggcaaacgcgccgaagtagtcgttgccaatccgtcgggcatccgtgtgaatggcggcggattgattaatgccgcttcggttacgctgacttcgggcgttcctgttttgaataacggcaatctgacgggctttgatgtttcttcgggtaaagtcgtgattgggggcaaaggtttggatacctctgatgccgattacacccgtatccttagtcgtgctgctgaaatcaatgcgggcgtttggggtaaagatgtcaaggtggtttcgggtaagaacaaattggattttgacggctctcttgccaaaacagcttctgcgccatcttcttcggattctgttactcctaccgttgccatcgacaccgccacactgggtgggatgtacgcagacaaaatcactttaatcagcaccgacaacggcgccgtaatccgcaacaagggtcggatttttgccgcaacaggcggcgttacgttaagcgcagacggcaaattgagcaacagcggttcgattgatgctgccgaaatcaccatttccgctcaaaccgttgataaccgccaaggctttatccgcagcggcaaaggcagtgtattgaaggtttcagacggcataaataatcaagcaggcttaatcggctcggccggtttgctggatattcgcgatacaggcaaaagcagcctgcatatcaataacacagacggcacgattattgcgggcaaagatgtttccttacaggcaaaatcactggacaacgacggcatattaaccgccgcacgcgatgtttccgtttctcttcatgatgattttgccggcaaacgcgatattgaagccggacgcacactcacgttctccacccaaggccgtctgaaaaacacccgcatcatacaggcaggcgataccgtatccctgaccgccgcccaaatcgacaacactgtctccggtaaaatccaatccggaaaccgcaccgggttaaacggcaaaaacggcatcaccaacaggggtttaatcaacagcaacggtataacgctgctgcaaaccgaagccaagtcggacaatgccggcacgggcagaatttacggcagccgtgtggcagttgaggcagataccttgttgaaccgggaagaaacggtcaacggcgaaaccaaagcggcggtaattgcagcgcgggagcggttggatattggagcgcgggaaattgagaaccgagaggcggcattattgtccagctccggcgatcttcatatcggttctgcattgaatggaagccgacaggtgcaaggagcaaatacatcactgcacaaccgcagtgcggcaatcgaatcatcaggcaatatccgtatcgctacaaaagatttgcagaataccaatgagcatctgcgtttccatacggaagaaacccatcgcgaacaccgtatcgaatatcaggcggaaggcagaacagaacgctatccggaaggttctcaaaaagagttgggctgggaaatatttgaagatgagtctttacatatgcggactccggacggcagcccccactctgtctggtacaaatacgattacgaacgaatcaccgccgagagcaaaattaccgaatccaagcccggtcaaatcatcagtggcggcaatttggttttagatgccgccaagctgaaaaatcataacagccggattattgccggcggcagattgatcgtcggtacgcccgaatccgcattggacaatgatgaaactttgggaacaaaaaccataaccgataaaggggacttgcaccgttaccaccgtcatcacaagaaagggcgggattctacgggatacagtcggtctccctacgaaccggcccccgaagtcagctccatccgtatgggtatttcagcctataaaggctatgcgccccaacaggcatctgatatacccggcactgttgtacccgttgttgctgaaaacggcatccatcctacatttactctgccgaacagcagcttgtttgccattgcgccaaacaacaaaggctatttgattgaaaccgaccctgcctttaccgactaccgcaaatggctgggcagcggctatatgcttgccgcactgcaacaagacccgaaccatatccacaagcgtttgggcgacggctattacgagcagaaactggtaaacgaacaaatcgccaagctgacaggctaccgccgcttggacggttataccaatgacgaagagcaattcaaggctttgatggataacggcattaccatagccaaagaattgcagcttactccgggtattgccctgtctgccgaacaggttgcccgtctgacttccgacattgtttggctggaaaacgagaccgttaccctgcccgacgggacaactcaaaccgtattgaaacccaaagtctatgtccgcgcacgccccaaagatatgaacggacaaggggcgttgctgtccggcagcgttgttgatatcggcagcggcgccattgaaaaccggggcggcttaattgccgggcgcgaagcactaattttaaacgcacagaatattaaaaatctgcaaggtgatttgcagggcaaaaacatcttcgccgcagcaggcagcgacattacgaataccggcagcatcggcgcagaaaacgccctgctgctcaaagcgagtaacaatatagaaagccgcagcgagacccgcagcaatcagaatgagcaaggctcggtacgcaatatcggccgggtggcaggcatttatctgaccggcaggcagaatggaagcgtcttgctggatgcaggcaacaatatcgtcctgacggcttccgaattgaccaatcaatctgaagacggtcaaaccgtactgaatgccggcggcgacatccgctcggatacgacgggcatttcccgcaatcagaacactatctttgattccgacaactatgtgattcgcaaagaacaaaacgaagtcggcagcaccatccgcacccggggcaatctcagtctgaatgcaaaaggagacatccgtatccgtgcagcagaggtcggcagcgaacaaggccgtctgaaactggcagccggacgggatatcaaagtcgaagccggcaaagcccataccgaaaccgaagatgccctgaaatacaccggtagaagcgggggcggcatcaaacagaagatgacccgccatctcaagaaccaaaacggacaagccgtatccggcacgctggacggcaaagaaatcattctggtttcaggacgcgatattaccgttactggcagcaatatcattgcagacaaccataccattctctcggcaaaaaacaatatcgtccttaaagcagccgaaacacgcagccgcagtgccgaaatgaacaaaaaagaaaaatccggactgatgggcagcggcggcatcggctttacggcgggcagcaaaaaagacacgcaaaccaaccgatccgagaccgtcagccacacagaaagcgtcgtcggcagcctgaacggcaataccctgatttcggcaggaaaacattacacccaaaccggttcgaccatatcctcgccccaaggcgatgtcggcatttcctccggaaaaatcagcatcgatgccgcacaaaaccgttacagccaagagagtaagcaggtttacgaacaaaaaggcgtaaccgtcgccattagcgttccggttgtgaataccgtaatgggcgcggttgacgccgtaaaagcagtccaaaccgtcggcaaaagcaaaaacagccgggtcaatgccatggctgctgccaacgccttgaataaaggagtagattccggcgtggcactctataatgccgcccgaaatcccaaaaaagcagccggtcagggcatcagcgtctccgttacctacggcgaacagaagaacacctccgaaagccgcatcaaaggcacgcaggtgcaagagggcaaaatcaccggcggcggcaaagtttccctgactgcttcaggcgcaggcaaagactcccgcatcacgattaccggctccgatgtgtacggcggcaaaggaacacgcctcaaagcagaaaatgccgttcagattgaagccgcccgccaaacgcatcaggaacgcagcgaaaacaaatccgcaggctttaatgccggagtcgccatcgccatcaacaaaggcatcagtttcggcttcacagccggagcaaactacggcaaaggttacggcaacggcgacgaaaccgcctaccgcaacagccatatcggcagcaaagacagccaaaccgctattgaaagcggtggcgataccgtcatcaaaggcgggcagcttaaaggcaaaggcgttggcgtaacggcagagagtctgcatatcgaaagtttgcaggataccgccgtgtttaaaggcaaacaggaaaatgtttccgcccaagttacggtaggctacggctttagtgtcggtggcagctataaccgctcgaaaagcagctcggattatgcatccgtcaacgagcaaagcggtatctttgcaggaggagacggctatcggattcgcgtaaacggcaaaaccggattggtcggcgccgctgttgtttcagatgccgacaaatcaaaaaacctgctgaaaacaagcgaaatctggcataaagatattcaaaaccatgcttcggcggctgcttccgccttgggcttgagcggcggtttttcatacagcccgaagcctaccagcggacagtattccaccaaaaaagaagcagaaatcggtaaaatcggcggcaaaccggtcagcctgatgcgttttgaccaggtttcggcgaaagacgacgagttgaacgaaaaatatcgaagtgagcgtattgaaaaaggggaaacctttaaagaggcaaatttaaatcaaaacaacgccggcggcttgaaattcggtttgaagcaaaacgatatacacagcaacgacaaatacgccttggcaaaaatgggtttgggcaatctgttgggcaatgccaaagaatcagaaagccgccaatccattacccgctccgtcatcagtgagggagattggcaaattgcttccgcgcagggcaggaaaaatattgccggtattgaaaaaggcacttcatccgcacataaggcattggcaaaagcagaccgcgaaggcttgctgaaagaagtcgaactcaatagggatgttgccaaagagtttatcaatgagacgctgatcggcggcattgcagacgaagcctaccgcagccagtttattgcagaacaccgcctgatgacctttaaaatggatgaaaacggcgagccgattgaagataagcagcttgaagaggatataaataaacagtttgacaactcagtaaagttgaaaaaagaatttgcctcatttaaagattattgggaagcctataaagccattgggggaaatatctacgaattgcgcgaagtatccgaccaggaacggaaaaatctgaaaactgcccgttacaccgacccggagaccggcaaaaccgttgaaaaaatcgttgtcggcgtcaacggcattttcaataatatacaagcagccgccaaatttgccgcccaacaatatgtggggcgtttcaatcccgagaaaaaccgatatgaacgcacctatgaaaatgtttatttcctgcacaatccggaaaccaatgggcggggcttttcaaaattgcccgaaatcgccgttgcggcctttcataaaatgctcgaaggggcaaaaataggcaataagaccgttatcggcttgagcaattcaggcttggctttaggcaatatcatggaagactacgggaaggataaaaacggcctgtttgtcggctcgcacagccgtggaaccctggtggtcgacaatgtactcaataccttgaatacccaagccaatcgggataagaaaattttatccaataccgaactgaaaatggtcggccctgccgccaacgttgtccgggcagataaaaggctgtttcaactgcagcagggggtaacgacacccagaacggcagatttcgcccgtcagtccatccaaatagaaaaccacgaattagaccttatcggcatgctgattggcagaaatccggcaacagtcggaaccaatacccggcaaaaaagccaatggcaggctataagggatattataggggattacacctcgccgcataattgctacggtatggctaataaacaatgtgtaacagatggttatcgagaccctgaaaataaacaaacccaaagtccgacaggtgtatttgaaagaggagtgtccaacgaaatcgaaattatgtaccgtcctgtacgcatttatgatctgcaacatccgaaaggaaaaacaaaatga

SEQ ID NO: 59999 - DNA, 453 bp, Neisseria meningitidis; identical to SEQ ID NO: 43802

SEQ ID NO: 60000 - DNA, 219 bp, Neisseria meningitidis; identical to SEQ ID NO: 36291

SEQ ID NO: 60001 - DNA, 174 bp, Neisseria meningitidis; identical to SEQ ID NO: 36913

SEQ ID NO: 60002 - DNA, 291 bp, Neisseria meningitidis; identical to SEQ ID NO: 42924

SEQ ID NO: 60003 - DNA, 843 bp, Neisseria meningitidis
atgtcgggaggggttatgcctgaattgccggaagtggaaacgacgttgcgcggcatcgcgccgcatattgaagggaaaacggtggaagccgtggtattgcgccaattgaagctgcgctggcagattaatcccgatttgggggagattttgtccggccggcaggtgttgtcctgcggcaggagggcgaaatacctgcttatccgctttcaaacgggcgtgctgctgattcacttggggatgtcgggcagcttgcggatttttacgccgtcggacggacgtatcggcaggccggacagacacgatcacgtcgatattgtgttttcagacggcacggtcatgcgttaccgcgatccgagaaagttcggcgcgatactttggtatgagggaatcgaagaacatcatccgctgttggaaaaactggggccggagcctttgtcggaggcattttgtgcggattatctgtatgcaaggctgaaggcgcagaagcgcgcggtcaaacttgccctgatggacaatgcggtcgtggtcggtgtgggcaacatttatgccaacgagagcctgttcagagcgggcatttcgccccaccgtcctgccaaccgcctgaaaaagaaagagtgcgcgcttttggttgaaaccgtcaaagcggtgttgcagcgcgccattgaaacgggcggcagtaccttgagggattttgtggacagcgacggcaaaagcggctacttccaacaggaatatacagtgtacgggcggcacaatcagccgtgcccccggtgcggcggtttggttgtgaaagaaactttggggcagcgcggcacgttttattgcccgaactgtcagaaatag

SEQ ID NO: 60004 - DNA, 387 bp, Neisseria meningitidis; identical to SEQ ID NO: 43260

SEQ ID NO: 60005 - DNA, 727 bp, Neisseria meningitidis
atggcatttgcctcactatttaccctgccggacgacatcaccgccgttttggacgatgttgccctgatgaccaaagccgccgcaaagaaaaccgccggcgtggtcggcgacgatttggcacccaatgccaaccgggttacgggcgtatcggcagaacgcgagttgccgattgtttggtcgatggcgaaaggttctttttccaacaagccggttttggtgcctgcggccctgctgctttccgccttcctgccgcaactcattacgccgcttttgacggcaggcggcatttatctgtgctttgaaggcgtagaaaagctgctgcacaagtttctgcaccgacatgacgcgcatgctcgtaatggcggcaatcggcatcggcatgactgttttggtgtacggaatcgttgccgtcatcgtcaaactcgacgacttaggcatgctgctgatgcgccgcccacaaaccttttcgcgcagtttggggcaaatgctgactgcctttatgccttgctttatgcgcggtttgagcgtggtcggcacgcttgccatgtttcttatcggcggcgtactggtcgcccacaacctcggccttctgcacgatttcctgcacgcgcaacactgggacgctggctgggcggagtacttcgccaacctcgttgtcgggctgctttccggttcgattgcctgcgcccccgccttgccgctgatgaatcgtttcggcaggcattga

SEQ ID NO: 60006 - DNA, 1020 bp, Neisseria meningitidis
atgaacacaatgctaatgtcgggcgcggctgccgcgctgcttgccggcatcatcctttatttcaaaagcgacaaaaagcggcaggaaaacggtgaatggagttccggcctcgaatacgcctatatcctgacagcggtcggcgtgtttgccgctttgtccctgtttatgagctttaccgccgttttcctgattttcgttgtattgtgcggtacggcttggggggtatacaaataccgcctgaagactcatcccgaaatctcggaaagcagccacttcggcgattatttcggcagtttcttccctaccgttttggtattgttcctcatccggtcgtttatcgccgaaccgttccaaatcccgtccagctcaatgcgcccgggcctgatcaagggcgatttcattttggtcggcaaattttcctacggcctgcgcgtacctgttttaaacaatgtattcatccccacgggcaaaatcgaacggggcgatgtggtcgtttttaattatcctttgcaaccggagatgacctacatcaagcgtattgtcggcattccgggcgatgtggtcgaatatcggaataaagttttgacggtaaacggaaaacctgcttccgatattcctgacggcacataccgttatcccgacgacaccgacccatccgaaatccacaatacggatatgttccacagcggtttggacggcaaatccttcaatattctgaaaaaagaaggacagcctgccgtttccctgcccgtattgggcaaatatacctccgatattatgtctgaaaacggatattccatagagcaaagcggtttggaacactgccaatatgccgacgacggcagcggtttcgtgtgcaaagttcccgaaggacgctatttcgctatgggcgacaaccgcgacaacagtgccgattctcgctactggggatttgtggatgacaagctggttgtcggcaaggcaatgttcattttgatgaacttcggcgatttcggcagggccggtacggcaatccgttag

SEQ ID NO: 60007 - DNA, 1149 bp, Neisseria meningitidis
atgccgacaatgggggtggagatgaatacacggaatatgcgctatattcttttgacaggactgttgccgatggcatccgcttttggagagaccgcgctgcaatgcgccgctttgacggacaatgttacgcgtttggcgtgttacgacaggatttttgcggcacagcttccgtcttcggcagggcaggaagggcaggagtcgaaagccgtactcaatctgacggaaaccgtccgcagcagcctggataagggcgaggcggtcattgttgttgaaaaaggcggggatgcgcttcctgccgacagtgcgggcgaaaccgccgacatctatacgcctttgagcctgatgtacgacttggacaaaaacgatttgcgcgggctgttgggcgtacgcgaacacaatccgatgtaccttatgccgctctggtacaacaattcgcccaactatgccccgagttcgccgacgcgcggtacgactgtacaggaaaaattcggacagcagaaacgtgcggaaaccaaattgcaggtttcgttcaaaagcaaaattgccgaagatttgtttaaaacccgcgcggatctgtggttcggctacacccaaagatccgattggcagatttacaaccaaggcaggaaatccgcgccgttccgcaatacggattacaaacctgaaattttcctgacccagcctgtgaaggcggatttgccgttcggcggcaggctgcgtatgctcggtgcgggttttgtccaccagtccaacggacagagccgtcccgaatcgcgttcgtggaacaggatttacgccatggcaggcatggaatggggcaaattgacggtgattccgcgcgtgtgggtgcgtgcgttcgatcagagcggcgataaaaacgacaatcccgatattgccgactatatggggtatggcgacgtgaagctgcagtaccgcctgaacgacaggcagaatgtgtattccgtattgcgctacaaccccaaaacgggctacggcgcgattgaagccgcctacacgtttccgattaagggcaaactcaaaggcgtggtacgcggattccacggttacggcgagagcctgatcgactacaaccacaagcagaacggtatcggtatcgggttgatgttcaacgacttggacggcatctga

SEQ ID NO: 60008 - DNA, 502 bp, Neisseria meningitidis
atgagaaaaagtcgtctaagccggtataaacaaaataaactcattgagctatttgtcgcaggtgtaactgcaagaacagcagcagagttagtaggcgttaataaaaataccgcagcctattattttcatcgtttacgatgacttaatttatcaaaacagcccacatttagaaatgtttgatggcgaagtagaagcagatgaaagttattttggcggacaacgcaaaggcaaacgcggtcgcggtgctgccggtaaagtcgccgtattcggtcttttgaagcgaaatggtaaggtttatacggttacagtaccgaatactcaaaccgctactttatttcctattatccgtgaacaagtgaaacctgacagcattttttatacggattgttatcgtagctatgatgtattagatgtgcgcgaatttagccattttagcttcgctgaaacttcgttttcgtatcaatcacagcacacattttgccgaacgacaaaaccatattaa

SEQ ID NO: 60009 - DNA, 549 bp, Neisseria meningitidis; identical to SEQ ID NO: 50906

SEQ ID NO: 60010 - DNA, 696 bp, Neisseria meningitidis; identical to SEQ ID NO: 39886

SEQ ID NO: 60011 - DNA, 537 bp, Neisseria meningitidis; identical to SEQ ID NO: 45905

SEQ ID NO: 60012 - DNA, 924 bp, Neisseria meningitidis
atggaaaaccaaaggccgctcctaggcttcgcgttggcacttttggcggcgatgacgtggggaacgctgccgattgccgtgcggcaggtattgaagtttgtcgatgcgccgacgctggtgtgggtgcgttttaccgtggcggcggcggtattgtttgttttgctggcattgggcgggcggctgccgaagtggcgggatttttcttggtgctcattcaggctgctgctgctcggcgtggcgggcatttcggcaaactttgtgctgattgcccaagggctgcattatatttcgccgaccacgacgcaggttttgtggcagatttcgccgtttacgatgattgttgtcggtgtgttggtgtttaaagaccggatgactgccgctcagaaaatcggcttggttttgctgcttgccggtttgcttatgttttttaacgataaattcggcgagttgtcgggtttgggcgcgtatgcgaagggcgtgttgctgtgtgcggtaggcagtatggcatgggtgtgttatgccgtggcgcaaaagctgctgtcggcgcaattcgggccgcaacagattctgctgttgatttatgcggcaagtgccgccgtgttcctgccgtttgccgaaccggcacacatcggaagtttggacggtacgttggcgtgggtttgttttgcgtattgctgcttgaatacgttaatcggttacggctcgttcggcgaggcgttgaaacattgggaggcttccaaagtcagcgcggtaacaaccttgctccccgtgtttaccgtaatattttctttgctcgggcattatgtgatgcctgatacttttgccgcgccggatatgaacggtttgggttatgttggcgcactggtcgtggtcgggggtgcggttacggcggcggtgggggacaggctgttcaaacgccgctag

SEQ ID NO: 60013 - DNA, 1173 bp, Neisseria meningitidis
atgaaacgtgatttgagcaaaatgacctgcatcgaagacttgcgccgcgttgccaagcgcaaaatgccgcgtatgttttacgattacatcgattcgggttcgtggacagaaactacctaccgtgaaaacacttcggatttcaaagacatccgcttccgacaaaaggtattggtcaatatggaaggccgaagcctggaaaccaaaatgatcgggcaggatgtgaaaatgccggtggcgattgcgccgacgggtttcacgggtatggcacacgccgacggtgaaattttggcggcgcgggcggcggagaagttcggcattccgtttacgctgtccacgatgtctatctgctcgattgaagacgttgccgagaacacttccgcaccattttggtttcagctttatgtgatgcgcgaccgcgagtttatggaaaacctgattaagcgcgcgaaggatgccaaatgttcggcattggtattgaccgctgatttgcaggttttggggcaacgccacaaagacatcaaaaacggcctgtccgcgccgccgaaaccgaccatcgccaatttaatcaatctggcgaccaagcccgaatggtgtatgaaaatgctgaacacggaacgccgcacgttccgcaatatcgtcggacacgcgaagaacgtcggcgatttgtcttcgctgtcttcatggacttccgaacaattcgacccgcgcctgagctgggacgatgtggcgcgcattaaagatttgtggggcggcaagctgattatcaaaggcattatggaacccgaagacgcggaaaaagcagcgaaaagcggcgcggacgcattgattgtttccaaccacggcggccgacagctcgacgataccgtgtctgccatcaaagccttgcccgacatcgtcagcgcagtgggcagcgacatcgaagtttggatggacagcggcatccgcagcggtcaggatattttgaaggcttgggctttgggcgcgaaaggtacaatgataggtcgggcgttcctgtatggcttgggcgcgtatggcgaagaaggcgtaacccgtgcgctggaaatcctatataaagaaatggatatatctatggcgtttacgggacaccgcgatattcaagatgtcgatgcctcgattttgaggggtaaggattggggtagggaaacggtttag

SEQ ID NO: 60014 - DNA, 300 bp, Neisseria meningitidis; identical to SEQ ID NO: 39866

SEQ ID NO: 60015 - DNA, 297 bp, Neisseria meningitidis; identical to SEQ ID NO: 42747

SEQ ID NO: 60016 - DNA, 318 bp, Neisseria meningitidis; identical to SEQ ID NO: 43917

SEQ ID NO: 60017 - DNA, 561 bp, Neisseria meningitidis
ttgttaccttcacacaggtcgcccgattcggcaacacacgacagaatcaggaaaatgaccatgaatgcaatgccccaaaccgccgcacaaaacgaaaccctgcacacttgtagcattattgtcgatgatgcacaggatttttcccccatgcttctcgatgcagggcgggacgacacacttatcagcgaatcgatgattccgcaaatccgcaccgttgccgccctgatagccgccgaacggcacgacttcagccgcagcagccccgccgagtttaccgatgccgccgatttttttgccgcacggattctcgtattgggcgtgcgacgcttccatctggacgtatcgctgcttcagattttgaaaaccgccaacagccgcgcccgccgctttgccgaaaaacaccgcctgtttttcacacccgcacaagccgaattgagcctgaacaaacacaaaaaccgccgcctgctgaccgtagaaaccgaacacgaagtcgaaaacaaaggcaacccagtcgccaacagcctcgcatttgtccgcaaattgcacaccctgcccctgtaa

SEQ ID NO: 60018 - DNA, 768 bp, Neisseria meningitidis
atgcaagaaataatgcaatctatcgtttttgttgctgccgcaatactgcacggaattacaggcatgggatttccgatgctcggtacaaccgcattggcttttatcatgccattgtctaaggttgttgccttggtggcattaccaagcctgttaatgagcttgttggttctatgcagcaataacaaaaagggtttttggcaagagattgtttattatttaaaaacctataaattgcttgctatcggcagcgtcgttggcagcattttgggggtgaagttgcttttgatacttccagtgtcttggctgcttttactgatggcaatcattacattgtattattctgtcaatggtattttaaatgtatgtgcaaaagcaaaaaatattcaagtagttgccaataataagaatatggttctttttgggtttttggcaggcatcatcggcggttcaaccaatgccatgtctcccatattgttaatatttttgcttagcgaaacagaaaataaaaatcgtatcgtaaaatcaagcaatctatgctatcttttggcgaaaattgttcaaatatatatgctaagagaccagtattggttattaaataagagtgaatacggtttaatatttttactgtccgtattgtctgttattggattgtatgttggaattcggttaaggactaagattagcccaaatttttttaaaatgttaatttttattgttttattggtattggctctgaaaatcgggcattcgggtttaatcaaactttaa

SEQ ID NO: 60019 - DNA, 279 bp, Neisseria meningitidis; identical to SEQ ID NO: 36930

SEQ ID NO: 60020 - DNA, 1584 bp, Neisseria meningitidis
atgccgaacaaaaagaaaaaagccgcctttgcgcgtgctgcaacggagaacggtgtgccggacgtgtccaacatcaaaaattcatatgatgatttgatgtatgaatccggcgcattctctcaaaccgccatcaataatttggaggcgcgcgcccgcctgatgggtttgcagcccgcgcccgccgccaatgccaaggtcttggagctgggctgttcgatgggcggaaacatcatcacgcaggcactttattacccggatgcggaatttgtcggtatcgacctgtccggcaggcaggttgcacagggcaacgccatcattgaaaaaatgggcttgaaaaatgtgcgtctggaagaaaaagatattttgaccatcgatgagtcattcgggaagtttgactatatcatcgtccacggcatttggtcgtgggtgcctgacgcagttaaagacaaaattttttcgatttgctggaacaacctgaccaaacacggcattgcctatatttcatacaatgtttaccccggctggaaacggcaggagcagttgcgcgaaattatgtactttgccggcagggatgtgcttgaagaacccttggaagcgcggacgcggaaaggcttggacgcgctcaaggcgctggcggaaattttggaaaacgacaagggcttggacggcggcggcaaacttccggcgattcaaaaaatattgaatcataatttttattacatcgcacacgaatatatggaggcgtttaacgacccgatttacgtcaacggcttcatcgaatgggctaaccgccacaggctcgcatatatcggggataccaatttgcacgtgtcttttgtttcttggatggcggagcatacgcgggagcggattctggcattggcaggggacgattatattgccaaagaattttacagtgatattttatccgaccgccaattccgccgttcgcttttatgccgtgaggaagtcggggatactgtcaggcgtgatgagtcggttgccgtcgaagtgatagaaagtttgaatttccgcccggcaagaggggaaacaatcaactttgatgaaaacgatatcctgctttcgggcatacgcgatgtgatgaaaaccggagaggcgtttaaaacggaagatgttgcggaaaatctcgcccgccgatttcccggtttggaatttgaccgcatgaaaatcaattcccagcttttattgcaaaccattctcgggcgtttttctgtttcatcagacaatgcgggcaaaccattttttgaagaccataaaacctatgtgccggcgcgctttacaaactatgccgccgcctttgtggaacacggcgcggaagcgtttgtccggcctgccaaccgttacaacgaaagcaccccctcattcggatacgggcatttgtacattatgcgccaattgtcgcggccgacgagcaaacaggcattgattgaaacggttgccgaaaacttgaacatcgtcagcaccacgcccgacggtttgacattccatccgcctgccgaagtgtatgtggaagaaatattggcagacttggcagacaggcattttctcgtttcggcggattga

SEQ ID NO: 60021 - DNA, 510 bp, Neisseria meningitidis
atgacagacactcaaaaccgggtagccatgggctacatcaaaggcgtattcggcataaaaggctggttgaaaattgccgccaacaccgaatattccgacagccttttggactaccccgagtggcatttggtcaaggacggcaaaaccatcagcgttacccttgaagccggaaaagtcgtcaacggcgaactccaagtcaaattcgaaggcataaacgaccgcgacttggcattctcattgcgcggttacaccatcgaaataccccgtgaagcattcgccccgacagaagaagacgaatactactgggcagacttggtcggcatgaccgtcgtcaacaaagaccataccgttttaggcaaagtaagcaacctgatggaaaccggcgcaaacgacgtattaatgattgacggagaacacgggcagattctgattccgttcgtttcccaatatatcgaaaccgtcgataccggcagcaagaccattactgccgactggggtttggactactga

SEQ ID NO: 60022 - DNA, 1410 bp, Neisseria meningitidis; identical to SEQ ID NO: 46946

SEQ ID NO: 60023 - DNA, 2376 bp, Neisseria meningitidis
atgaaaccattacaaatgctccctatcgccgcgctggtcggcagtattttcggcaatccggtcttggcagcagatgaagctgcaactgaaaccacacccgttaaggcagagataaaagcagtgcgcgttaaaggtcagcgcaatgcgcctgcggctgtggaacgcgtcaaccttaaccgtatcaaacaagaaatgatacgcgacaataaagacttggtgcgctattccaccgatgtcggcttgagcgacagcggccgccatcaaaaaggctttgctgttcgcggcgtggaaggcaaccgtgtcggcgtgagcatagacggtgtaaacctgcctgattctgaagaaaactcgctgtacgcccgttatggcaacttcaacagctcgcgtttgtctatcgaccccgaactcgtgcgcaacatcgaaatcgtgaagggcgcagactctttcaataccggcagtggtgcattgggcggcggtgtgaattaccaaacgctgcaaggccgtgatttgctgttggacgacaggcaattcggcgtgatgatgaaaaacggttacagcacgcgtaaccgtgaatggacaaatactctcggtttcggtgtgagtaacgaccgcgtggatgctgctttgctgtattcgcaacgtcgcggtcatgaaaccgaaagtgcgggaaaccgaggctatgctgtggaaggggaaggcagtggcgcgaatatccgtggttcggcacgcggtatccctgattcgtccaaacacaaataccacagctttttgggtaagattgcttaccaaattaacgataaccaccgcatcggcgcatcgcttaacggccagcagggacataattacacggttgaagagtcttataacctgaccgcttcttcctggcgcgaagccgatgacgtaaacagacggcgcaatgccaacctcttttacgaatggatgcctgattcaaattggttgtcgtctttgaaggcggacttcgattatcagaaaaccaaagtggcggcggttaacaacaaaggctcgttcccgatggattattccacctggacgcgcaactataatcagaaggatttggacgaaatatacaaccgcagcatggacacccgattcaaacgttttactttgcgtttggacagccatccgttgcaactcgggggggggcgacaccgcctgtcgtttaaaactttcgtcagccgccgtgattttgaaaacctaaaccgcgacgattattacttcagcggccgtgttgttcgaaccaccagcagtatccagcatccggtgaaaaccaccaactacggtttctcactgtctgaccaaattcaatggaacgacgtgttcagtagccgcgcaggtatccgttacgaccacaccaaaatgacgcctcaggaattgaatgccgagtgtcatgcttgtgacaaaacaccacctgcagccaacacttataaaggctggagcggttttgtcggcttggcggcgcaactgaatcaggcttggcgtgtcggttacgacattacttccggctaccgtgtccccaatgcgtccgaagtgtatttcacttacaaccacggttcgggtaattggctgcccaatcccaacctgaaagccgagcgcagcaccacccacaccctgtctctgcaaggccgcagcgaaaaaggcatgctggatgccaacctgtatcaaagcaattaccgcaatttcctgtctgaagagcagaagctgaccaccagcggcactcccggctgtactgaggaaaatgcttactacggtatatgcagcgacccctacaaagaaaaactggattggcagatgaaaaatatcgacaaggccagaatccgcggtatcgagctgacaggccgtctgaatgtggacaaagtagcgtcttttgttcctgagggttggaaactgttcggctcgctgggttatgcgaaaagcaaactgtcgggcgacaacagcctgctgtccacacagccgctgaaagtgattgccggtatcgactatgaaagtccgagcgaaaaatggggcgtattctcccgcctgacctatctaggcgcgaaaaaggtcaaagacgcgcaatacaccgtttatgaaaacaagggctggggtacgcctttgcagaaaaaggtaaaagattacccgtggctgaacaagtcggcttatgtgtttgatatgtacggcttctacaaaccggctaaaaacctgactttgcgtgcaggcgtgtacaacctgttcaaccgcaaatacaccacttgggattccctgcgcggtttatatagctacagcaccaccaatgcggtcgaccgcgatggcaaaggcttagaccgctaccgcgccccaggccgcaattacgccgtatcgctggaatggaagttttaa

SEQ ID NO: 60024 - DNA, 501 bp, Neisseria meningitidis; identical to SEQ ID NO: 42982

SEQ ID NO: 60025 - DNA, 846 bp, Neisseria meningitidis
atgctcagttacagacacgcattccacgccggcaaccacgccgatatgctcaaacacttcaccttgtttttagtgctgcaatatttcaaccgcaaagacaagccctactggtacatcgacacgcacggcggcgcgggtgtgtacaatctcgaaggcagcgaggcgcagaaagtcggcgaataccggcaaggcatcgccctacttcgacaagcaaaaaacctgccaaccgagttaaacggctttatcgcgcacatacaaaaaatcctgccctcgcccgaactttactgcggttctccgtggctggcgcaatcgctgacccgcgtcggcgacaaattacgcctgtttgagctgcaccccaccgactttgtccatctgcaaaacaatatgggcgaagcaggattgggcaaacgcggacaagtgttgcgcgaagacggttacaaagagctgatttccctgctgccgcccccgccgcgccgcgccaccgtcctcatcgacccgccctatgaggaaaaacaggactaccggcgtgtaacggaaacgctgaaagccgctttaaaacggtttgagtccggctgttatctcatttggtatccctgcctcagccgcgaagaaagccgcaagctgcccgaagaattgaaaaaactcctgcccgacaactaccttcacgccgaacttcacgtccacgcgccgaaagccgacggtttcggtatgcacggcagcggaatgttcgtcatcaatccgccctatctgttggcggaacaattggcggcaaacctccccgccctgacgcggctgctggcgcaagacgaaggcgcgcgctaccttttggacagcaaaatccgctga

SEQ ID NO: 60026 - DNA, 291 bp, Neisseria meningitidis; identical to SEQ ID NO: 45911

SEQ ID NO: 60027 - DNA, 516 bp, Neisseria meningitidis; identical to SEQ ID NO: 38602

SEQ ID NO: 60028 - DNA, 396 bp, Neisseria meningitidis; identical to SEQ ID NO: 37459

SEQ ID NO: 60029 - DNA, 879 bp, Neisseria meningitidis
atgatgagtcaacactctgccggagcacgtttccgccaagccgtgaaagaatcgaatccgcttgccgtcgccggttgcgtcaatgcttattttgcacgattggccacccaaagcggtttcaaagccatctatctgtccggcggcggcgtggcagcctgttcttgcggtatccctgatttgggcattaccacaatggaagatgtgctgatcgacgcacgacgcattacggacaacgtggatacgcctctgctggtggacatcgatgtgggttggggcggtgcattcaatattgcccgtaccattcgcaactttgaacgcgccggtgttgcagcggttcacatcgaagatcaggtagcgcaaaaacgctgcggccaccgtccgaacaaagccattgtatataaagatgaaatggtcgaccgtatcaaagctgccgtagatgcgcgcgttgatgagaacttcgtgattatggcgcgtaccgatgcgctggcggtagaaggtttggatgccgctatcgaacgcgcccaagcttgtgtcgaagccggtgcggacatgattttccctgaagccatgaccgatttgaacatgtaccgccaatttgcagatgcggtgaaagtgcccgtgttggcgaacattaccgagtttggttccactccgctttatacccaaagcgagctggctgaaaacggcgtgtcgctggtgctgtatccgctgtcatcgttccgtgcagcaagcaaagccgctctgaatgtttacgaagcgattatgcgcgatggcactcaggcggcggtggtggacagtatgcaaacccgtgccgagctgtacgagcatctgaactatcatgccttcgagcaaaaactggataaattgtttcaaaaatga

SEQ ID NO: 60030 - DNA, 1035 bp, Neisseria meningitidis; identical to SEQ ID NO: 42551

SEQ ID NO: 60031 - DNA, 411 bp, Neisseria meningitidis; identical to SEQ ID NO: 50279

SEQ ID NO: 60032 - DNA, 2277 bp, Neisseria meningitidis
atggaacaaaccactctcaagcccattgttttatcaattcttttaaccaacacacccctcctcgcccaagcgcatgaaactgagcaatcggtggatttggaaacggtcagcgtcgtcggcaaaagccgtccgcgcgccacatccgggctgctgcacacttcgaccgcctccgacaaaatcatcagcggcgacaccttgcgacaaaaagccgtcaacttgggcgatgctttggacggcgtgccgggcattcacgcctcgcaatacggcggcggcgcgtccgctcccgttattcgcggtcaaacaggcaggcggattaaagtgttgaaccatcacggcgaaacaggcgatatggcggatttttcgcccgatcacgccattatggtagataccgccttgtcgcaacaggtcgaaatcctgcgcgggccggttacgctcttgtacagctcgggcaatgtggcggggctggtggatgttgccgatggcaaaatccccgaaaaaatgcctgaaaacggcgtatcgggcgaactagggctgcgtttgagcagcggcaatctggaaaaactcacgtccggcggcatcaatatcggcttgggcaaaaactttgtattgcataccgaaggcttgtaccgcaaatcgggcgattacgccgtaccgcgttaccgcaatctgaaacgcctacccgacagccacgccgattcgcaaacgggcagcatcgggctgtcttgggttggcgaaaaaggttttatcggcgtagcgtacagcgaccgtcgcgaccaatatggtctgcctgcccacagccacgaatacgatgattgccacgccgacatcatctggcaaaagagcttgattaacaaacgctatttacagctttatccgcacctgttgaccgaagaagacgtcgattacgacaatccgggcttgagctgcggcttccacgacgacgatgatgcacacgcccatgcccacaacggcaaaccttggatagacctgcgcaacaaacgctacgaactccgcgccgaatggaagcagccattccccggttttgaagccctgcgcgtacacctgaaccgcaacgactaccaccacgacgaaaaagcaggcgatgcagtcgaaaacttttttaacaaccaaacgcaaaacgcccgcatcgagttgcgccaccaacccataggccgtctgaaaggcagctggggcgtgcaatatttacaacaaaaatccagtgctttatctgccacatccgaagcggtcaaacaaccgatgctgcttgacaataaagtgcaacattacagctttttcggtgtagaacaggcaaactgggacaacttcacgcttgaaggcggcgtacgcgtggaaaaacaaaaagcctccatccgctacgacaaagcattgattgatcgggaaaactactacaaccatcccctgcccgacctcggcgcgcaccgccaaaccgcccgctcattcgcactttcgggcaactggtatttcacgccacaacacaaactcagcctgaccgcctcccatcaggaacgcctgccgtcaacgcaagagctgtacgcacacggcaaacacgtcgccaccaacacctttgaagtcggcaacaaacacctcaacaaagagcgttccaacaatatcgaactcgcgctgggctacgaaggcgaccgctggcaatacaatctggcactctaccgcaaccgcttcggcaactacatttacgcccaaaccttaaacgacggacgcggccccaaatccatcgaagacgacagcgaaatgaagctcgtgcgctacaaccaatccggtgcggacttctacggcgcagaaggcgaaatctacttcaaaccgacaccgcgctaccgcatcggcgtttccggcgactatgtacgaggccgtctgaaaaacctgccgtccctacccggcagggaagatgcctacggcaaccgtcctttcatcgcacaggacgaccaaaatgcccctcgcgttccggctgcgcgcctcggcgtccacctgaaagcctcgctgaccgaccgcatcgatgccaatttagactactaccgcgtgttcgcccaaaacaaactcgcccgctacgaaacacgcacgcccggacaccatatgctcaacctcggcgcaaactaccgccgcaatacgcgctatggcgagtggaattggtacgtcaaagccgacaacctgctcaaccaatccgtttacgcccacagcagctttctctctgatacgccgcaaatgggccgcagctttaccggcggcgtgaacgtgaagttttaa

SEQ ID NO: 60033 - DNA, 519 bp, Neisseria meningitidis; identical to SEQ ID NO: 36779

SEQ ID NO: 60034 - DNA, 453 bp, Neisseria meningitidis; identical to SEQ ID NO: 51833

SEQ ID NO: 60035 - DNA, 534 bp, Neisseria meningitidis
atgtcacgtgtcgcaaaaaacccagtgactgttcccgctggtgtagaagtaaaatttggaacagaggcattagttattaagggtaagaacggtgaattgtcttttcctttgcattctgatgtagccattgaatttaatgatggcaaattgacttttgttgcgaataacagcagtaaacaagcaaatgcaatgtctggtactgctcgcgcattagtcagcaatatggttaaaggtgtttcagaaggttttgagaaaagattgcaattgataggtgtgggttatcgtgctcaagcacaaggtaaaatcttgaatctgtctttgggtttttctcatccgatcgtatatgaaatgcctgaaggtgtctccgttcaaactcctagccaaacagagattgttttaaccggctcggataaacaagttgttggtcaagttgctgctgagattcgtgcgttccgtgctcctgagccttataaaggtaaaggtgttcgctatgtaggcgaagtagtggtaatgaaagaagccaagaaaaaataa

SEQ ID NO: 60036 - DNA, 330 bp, Neisseria meningitidis; identical to SEQ ID NO: 37077

SEQ ID NO: 60037 - DNA, 501 bp, Neisseria meningitidis
atgagaaaaagtcgtctaagccagtataaacaaaataaactcattgaactgtttgtcgcaggtgtaactgcaagaacggcagcagagttagtaggcgttaataaaaataccgcagcctattattttcatcggttacgattacttatttatcaaaacagtccgcatttggaaatgtttgatggcgaagtagaagcagatgaaagttattttggcggacaacgcaaaggcaaacgcggtcgcggtgctgccggtaaagtcgccgtattcggtcttttgaagcgaaatggtaaggtttatacggttacagtaccgaatactcaaaccgctactttatttcctattatccgtgaacaagtgaaacctgacagtattgtttatacggattgttatcgtagctatgatgtattagatgtgcgcgaatttagccattttagcttcgctgaaatttcgttttcgtatcaatcacagcacacattttgctgaacgacaaaaccatattaa

SEQ ID NO: 60038 - DNA, 4176 bp, Neisseria meningitidis
atgaatttgttgaacttatttaatccgttgcaaactgccggaatggaagaagagtttgatgccattaaaatcggtattgcctctcccgaaaccatccgctcatggtcttatggcgaagtcaaaaaacctgaaaccatcaactaccgtacgttcaaacctgagcgtgacggtttgttctgtgccaaaatctttggcccggtcaaagactacgaatgcttgtgcggaaaatacaaacgcttgaaatttaaaggcgtaacgtgtgaaaaatgcggcgtggaagtaaccctgtccaaagtgcgccgcgaacgcatgggccatatcgaattggctgcgcccgtcgcacatatttggttcttaaaatccctgccttcccgcttgggtatggtactggacatgactttgcgcgatatcgaacgcgtattgtactttgaagcatttgtggtaaccgatcccggtatgactccgctgcaacgccgccaattgctgactgaagacgattactacaacaagctggacgaatacggcgacgatttcgatgccaaaatgggtgcggaaggtatccgcgaattgctgcgtaccctgaatgtagcgggcgaaatcgaaatcctgcgccaagagttggaatcgaccggttccgacaccaaaatcaaaaaaatcgccaaacgcttgaaagtattggaagccttccatcgttccggtatgaaactggaatggatgattatggatgtgctgccggtattgccgcctgatttgcgtccgttggttccattggatggtggtcgttttgccacttccgatttgaacgatttgtaccgccgcgttattaaccgtaacaaccgtctgaaacgtctgttggaactgcatgcgcctgacatcatcgtccgcaacgaaaaacgtatgttgcaagaagcagttgactcgctgttggataacggccgtcgcggtaaagccatgaccggtgccaacaaacgtccgctgaaatcattggcagacatgattaaaggtaaaggcggccgcttccgtcaaaacctgctgggtaaacgtgtggactactccggccgttccgtgattaccgtaggtccatacctgcgcctgcaccaatgtggtctgccgaaaaaaatggctttggagttgttcaaaccattcattttccacaaattggaaaaacaaggtttggcctctaccgttaaagcagcgaaaaaattggtagagcaagaagtaccggaagtatgggacatcttggaagaagtcatccgcgaacatccgattatgctgaaccgtgcgccgaccctgcaccgtttgggtattcaagcgttcgaacctatcttgattgaaggtaaagcgattcagttgcacccattggtgtgtgctgcgttcaacgccgactttgacggcgaccaaatggcggtacacgttccattgagcttggaagcacaaatggaagcacgcacgctgatgctggcttcaaacaacgtattgtctccggccaacggcgaaccgattatcgtaccttcccaagacatcgtattgggcctgtactatatgactcgcgatcgtatcaatgccaaaggcgaaggcagcctgtttgccgatgtgaaagaagtgcatcgcgcataccataccaaacaggtcgagctgggtacgaaaatcaccgtacgtctgcgcgaatgggtgaaaaacgaagcaggtgagtttgagcctgtcgttaaccgttacgaaacaaccgtcggccgtgcattgttgagcgaaatcctgccgaaaggcctgccgtttgaatatgtcaacaaagcgttgaagaaaaaagaaatttctaaactgattaacgcatcgttccgcctgtgcggcttgcgcgatacggttatctttgctgaccacctgatgtacaccggtttcggatttgcggcaaaaggcggtatttccattgccgttgacgatatggaaattccaaaagaaaaagcggccttgctggctgaagccaatgccgaggttaaagaaatcgaagaccaataccgtcaaggtttggttaccaacggcgaacgctacaacaaggtggtcgatatttggggtcgtgccggcgataagattgctaaagcgatgatggacaacttgtccaaacaaaaagttatcgaccgtgccggcaacgaagtcgatcaagagtcattcaactccatttatatgatggcggactccggtgcccgtggttctgcagctcagattaaacagttgtccggtatgcgtggcttgatggcaaaacctgacggctcgattattgaaacgccgattacctcaaacttccgtgaaggtctgaccgtattgcaatactttattgcgacccacggtgcgcgtaagggtttggcggataccgcattgaaaaccgcgaactccggttacctgactcgtcgtctggtagacgtaactcaagatttggtcgttgttgaagacgattgcggtacttcagacggctttgtcatgaaggcagtggtacaaggcggtgatgtgattgaagcattgcgcgatcgtattttgggtcgtgttaccgcgtctgacgttgtcgatccgtcaagtggcgaaaccttggttgaagccggtacgttgctgactgaaaaactggtggatatgatcgaccaatccggtgtcgatgaagtcaaagtccgtacgccgattacttgtaaaacccgtcacggcctgtgtgcacactgttacggtcgtgacttggcacgcggcaaactggttaacgccggtgaggcagtcggtgtgattgctgcacaatccattggcgaaccgggtacccagttgaccatgcgtacgttccacatcggtggtgcggcatcccgtgcggcagcagccagccaagtggaagccaaatccaacggtacggcacgattcagcagccagatgcgctacgttgccaacaacaaaggcgagttggttgtcatcggccgttcttgtgaagtcgtgattcacgacgatatcggccgtgaacgcgaacgccacaaagtaccttacggtgccatcctgctggtacaagacggtatggccattaaagccggtcaaaccttggcaacctgggatccgcatacccgtccgatgattaccgaacacgcaggtatggtgaaattcgaaaacgtggaagagggcgttaccgttgccaaacaaaccgatgatgtaaccggtttgtccactttggtggtgattgacggtaaacgtcgttcctctagtgcttccaaactgctgcgtccgactgtgaaactcttggacgaaaacggcgtggaaatctgtattcccggtacttctactccggtatccatggcattccccgttggtgcggtgattaccgtacgcgaaggtcaggaaatcggtaaaggcgacgtattggcgcgtattccgcaagcctcttccaaaacccgcgacattaccggcggcctgccgcgcgttgccgagctgtttgaagcacgcgtgccgaaagatgccggtatgttggcggaaattaccggtaccgtttccttcggcaaagagaccaaagggaagcaacgtctgattatcactgacgtggacggtgtagcatacgaaaccctgatttctaaagagaaacagattctggtacacgacggtcaagtggtaaaccgcggcgaaaccattgtggacggcgcggtcgatccgcacgatattctgcgtctgcaaggtatcgaagcactggcacgctacattgtccaagaggtgcaagaggtttaccgtctgcaaggtgtgaagatttctgataaacacatcgaagtcatcatccgtcaaatgttgcgccgtgtgaacattgcggatgccggcgaaaccgggttcattaccggagagcaggtcgaacgcggcgatgtgatggcggccaatgaaaaagctttggaagaaggcaaagaaccggcgcgttacgaaaacgtattgctgggtattaccaaagcttccctgtccaccgacagtttcatttctgccgcatcgttccaagaaacgacccgtgttctgaccgaagccgcgattatgggcaaacaagacgaactgcgcggtttaaaagagaacgtcatcgtcggccgcctgattcctgccggtaccggtttgacttatcaccgcagccgtcatcagcaatggcaaggggtagagcaggagactgctgaaacccaagtaacggatgaataa

SEQ ID NO: 60039 - DNA, 543 bp, Neisseria meningitidis
gtgcagagttggaaagcgcggcgggatttcaatattgtaaagcaggatttggatttttcctgtggggcggcttcggtggcgacgcttttgaacaatttttacgggcaaacgctaacggaagaagaagtgttggaaaagctggataaggagcagatgcgcgcgtcgtttgaggatatgcggcgcattatgccagatttgggttttgaagcgaaaggctatgccctgtctttcgagcagctcgcacagttgaaaatccccgtcatcgtgtatctgaaataccgcaaggatgatcatttctcggtattgcgcggtatagacggcaatacggttttgcttgccgacccgtcgctgggtcatgtttcaatgagcagggcgcagtttttggatgcttggcaaacccgtgagggaaatttggcaggtaagattttggcggtcgtgccgaaaaaagccgagacaatttcaaataaattgtttttcacacatcatcccaagcggcagacagaatttgcagtcggacaaatcaggcaagcacgtgcagagtaa

SEQ ID NO: 60040 - DNA, 1443 bp, Neisseria meningitidis; identical to SEQ ID NO: 50652

SEQ ID NO: 60041 - DNA, 360 bp, Neisseria meningitidis; identical to SEQ ID NO: 40630

SEQ ID NO: 60042 - DNA, 687 bp, Neisseria meningitidis; identical to SEQ ID NO: 36558

SEQ ID NO: 60043 - DNA, 519 bp, Neisseria meningitidis; identical to SEQ ID NO: 42795

SEQ ID NO: 60044 - DNA, 195 bp, Neisseria meningitidis; identical to SEQ ID NO: 42321

SEQ ID NO: 60045 - DNA, 453 bp, Neisseria meningitidis
atggcaaaaccgctcaaataccccgtttccgcactggtcgtcctttatagcggggacggcggcatcctgctcatcgaacgcacgcatccgaaaggattttggcagtcggtaaccggcagcctcgaaccaggcgaaaccgtcgcccaaacggcaaggcgcgaagtttgggaagaaaccggcatcctgctggcggacgggcagcttcaagactggcacgacagcacggtttacgaaatctaccaccactggcggcaccgctatccaaaaggcgtgtttgaaaaccgcgaacacctcttctctgccgaaatcccgcgcgatacgcccgtcgtcctgcaacccgaggaacacgtctcctacggctggttcggcttggaagaagcggcggaaaaagtgttttccccgtccaacaggcgcgcaattttggaactgggcaggtttttgggcaaacggtaa

SEQ ID NO: 60046 - DNA, 339 bp, Neisseria meningitidis; identical to SEQ ID NO: 43914

SEQ ID NO: 60047 - DNA, 1077 bp, Neisseria meningitidis; identical to SEQ ID NO: 43947

SEQ ID NO: 60048 - DNA, 402 bp, Neisseria meningitidis; identical to SEQ ID NO: 42860

SEQ ID NO: 60049 - DNA, 1284 bp, Neisseria meningitidis
atgactgcatcgaaatcaggttttatcgggcaaatcttttcccgaaatatgcttgtctgtatttttacggggtttacctcggggctgccgctgtactttctgattaacctgattccggcgtggttgcgcagcgagcaggtggatttgaagagcatcgggctgatggcgttaatcggtctgccgtttacttggaaatttttgtggtcgccgctgatggacgcggtcaggctgcccgttttgggacggcggcgcgggtggatgctgctgacgcaggcagggttgctggcggctttggcggcctatgcctttttaaacccccgtaatcatctgccgctgattgccggcttgtcggtgcttgtcgcttttttttccgccagtcaggatattgtattggatgcgttcaggcgcgagattttgtcagacgaagaattgggtttgggcaactcggttcatgtgaacgcctaccggattgccgccctgattcccggttcattgagtttggtgttggcagacaggatgccgtggccggaggtgtttgtcatcacttcgctgtttatgctgcccggccttctgatgacgctgtttcttgcgcgcgaacccgtgttgccgcctgccgttcctaaaacgttgaagcagaccgtggtagagccgtttaaagaattttttacgcgcaagggcatcgcttcggcggtgtgcgtgctgctgtttatcttcctttacaaactcggcgacagtatggcaaccgcgttggcaacgccgttttatctggatatgggtttcagcaagacagacatcggtttgattgcgaaaaatgcaggactgtggccggcagtggcggcaggtatcttgggcggcgtgtggatgctgaaaatcggcgtaaacaaagccttgtggctattcggcgcggtgcaggctgtaaccgttttggggtttgtatggctggcagggttcggacatttcgacacggtcggcacaggcgagaggctgatgctggcggcagttatcggcgcggaagcggtcggcgtggggttggggacggcggcgttcgtatcgtatatggcgcgtgaaaccaatcccgcatttaccgcaacgcagcttgcgctgtttaccagcctgtccgccgtcccgcgcacggtcatcaattcctttgccggttatctgattgaatggctcggttatgtaccgtttttccaactgtgtttcgcactcgccctaccgggtatgctgctgctgctgaaagttgcgccttggaacggggagaaaactcaggatgcaggcagatga

SEQ ID NO: 60050 - DNA, 1083 bp, Neisseria meningitidis; identical to SEQ ID NO: 43486

SEQ ID NO: 60051 - DNA, 285 bp, Neisseria meningitidis; identical to SEQ ID NO: 39838

SEQ ID NO: 60052 - DNA, 255 bp, Neisseria meningitidis; identical to SEQ ID NO: 51837

SEQ ID NO: 60053 - DNA, 369 bp, Neisseria meningitidis; identical to SEQ ID NO: 50379

SEQ ID NO: 60054 - DNA, 438 bp, Neisseria meningitidis; identical to SEQ ID NO: 39862

SEQ ID NO: 60055 - DNA, 237 bp, Neisseria meningitidis; identical to SEQ ID NO: 44060

SEQ ID NO: 60056 - DNA, 1578 bp, Neisseria meningitidis; identical to SEQ ID NO: 50137

SEQ ID NO: 60057 - DNA, 1551 bp, Neisseria meningitidis
atgaaaaaacctttgatttcggttgcggcagcattgctcggcgttgctttgggcacgccttattatttgggtgtcaaagccgaagaaagcttgacgcagcagcaaaaaatattgcaggaagcgggcttcttgaccgtcgaatcgcaccaatatgagcgcggctggtttacctctacggaaacgacggtcatccgcttgaaaccggagttgctgaataatgcccggaaatacctgccggacaacctgaaaacagtgttggaacagccggttacgctggtaaaccatatcacgcacggccctttcgccggcggattcggcacgcaggcgtacattgaaaccgagttcaaatacgcgcctgaaacggaaaaagttctggaacgcttttttggaaaacaagtcccggtttcccttgccaataccgtttattttaacggcagcggtaaaatggaagtcagtgttcccgccttcgattatgaagagctgtcgggcatcaggctgcactgggaaggattgacgggaaaaacggtttatcaaaaaggtttcaaaagctaccgcaacagctatgatgcgcccttgttcaaaatcaagctggcagacaaaggcgatgccgcgtttgaaaaagcgcatttcgattcggaaacttcagacggcatcaatccgcttgctttgggcagcagcaatctgaccttggaaaaattctccctagaatggaaagagggtgtcgattacaacgtcaagttaaacgaactggtcaatcttgttaccgatttgcagattggcgcgtttatcaatcccaacggcagcatcgcaccttccaaaatcgaagtcggcaaactggctttttcaaccaagaccggggaatcaggcgcgtttatcaacagtgaagggcagttccgtttcgatacactggtgtacggcgatgaaaaatacggcccgctggacatccatatcgctgccgaacacctcgatgcttctgccttaaccgtattgaaacgcaagtttgcacaaatttccgccaaaaaaatgaccgaggaacaaatccgcaatgatttgattgccgccgtcaaaggagaggcttccggactgttcaccaacaatcccgtattggacattaaaactttccgattcacgctgccatcgggaaaaatcgatgtgggcggaaaaatcatgtttaaagacatgaagaaggaagatttgaatcaattgggtttgatgctgaagaaaaccgaagccgacatcagaatgagtattccccaaaaaatgctggaagacttggcggtcagtcaagcaggcaatattttcagcgtcaatgccgaagatgaggcggaaggcagggcaagtcttgacgacatcaacgagaccttgcgcctgatggtggacagtacggttcagagtatggcaagggaaaaatatctgactttgaacggcgaccagattgatactgccatttctctgaaaaacaatcagttgaaattgaacggtaaaacgttgcaaaacgaaccggagccggattttgatgaaggcggtatggtttcagagccgcagcagtaa

SEQ ID NO: 60058 - DNA, 405 bp, Neisseria meningitidis; identical to SEQ ID NO: 42674

SEQ ID NO: 60059 - DNA, 435 bp, Neisseria meningitidis; identical to SEQ ID NO: 36184

SEQ ID NO: 60060 - DNA, 417 bp, Neisseria meningitidis; identical to SEQ ID NO: 36667

SEQ ID NO: 60061 - DNA, 285 bp, Neisseria meningitidis; identical to SEQ ID NO: 39906

SEQ ID NO: 60062 - DNA, 1722 bp, Neisseria meningitidis; identical to SEQ ID NO: 51265

SEQ ID NO: 60063 - DNA, 1296 bp, Neisseria meningitidis; identical to SEQ ID NO: 51215

SEQ ID NO: 60064 - DNA, 1470 bp, Neisseria meningitidis; identical to SEQ ID NO: 51326

SEQ ID NO: 60065 - DNA, 2100 bp, Neisseria meningitidis
atgccgtctgaaagacgtttccgacccatccctactacacgctttgtccgcaaacgcatcacaggcaagattatggaagtcatccgataccccgattcccctttcaaactccaccaacccttcccgcccgcaggcgaccagcccaccgccattgcaggcctgctcgaagggctttcagacggccttgcctatcaaaccctgctcggcgtaaccggttcgggcaaaacctacaccatggcgaacgtcatcgcccaaagcggccgccccgccatcatcatggcgcacaacaaaacccttgccgcccagctttacgccgaaatgcgcgaatttttccccgaaaacgcagtggaatatttcgtctcctactacgactattaccagcccgaagcctatgtgcccagccgcgacttgttcatcgaaaaagacagcgcgatcaatgaacacatcgaacaaatgcgcctttccgccaccaaaaacctgatgacgcgcgacgacgtgattatcgtcgccaccgtgtccgccatttacggtatcggcgacccgaccgagtatcaacaaatggtgttgtccgtcaaagaaggcgataccatcgagcagcgcgacatcatcgccacgctcgtttccatgcagtacgaacgcggcgatttggacttcaaacgcggcagcttccgcgtgcgcggcgacgtgattgacgtgtaccccgccgaaagctccgaaaacgccttgcgtatcagcctgtttgacgacgaaatcgaccgcctcgatatgttcgacccgctttcaggcagccttatccaacgcgtcggccgctacaccgtcttcccgtccagccactacgttaccccgcgcgacaccgtattgcgcgcctgtgactccatcaaagaagaattgcgcgaacgcattgatttctttaccaaagaaaaccgtcccgtcgaacaacaacgcatcgaacagcgcacccgtttcgacctcgaaatgctctacgaaatgggcttctgtaaaggaatcgaaaactactcccgccacttctccggcaaaaaagaaggcgaaccgccgcccacgctgatggactacctgccaagcaacaccatcatgttcatcgacgaaagccacgttaccgttacccaaatcggcggcatgtacaaaggcgacgcctcgcgcaaacaaaacctcgtagattacggcttccgcctgccttccgcccgcgacaaccgcccgctcaaattccacgaatttgaaaaagtcatgccgcaaactgtctttgtttccgccactccagccaaatacgaagaagaacacgccggacaagtggtcgaacaagtcgtccgccccacagggctggtcgacccccaaatcatcatccgccccgtcgccacccaagtcgacgacttaatgagcgaaatcaacgaccgcatccaaaaaggcgaacgcgttctcgttaccaccctcaccaaacgcatggcggagcaactcaccgactattacagcgaactcggcatcaaagtgcgctacctgcacagcgacattgataccgtagagcgcgttgaaatcattagagatttacggctcggcctgtttgacgtactcgtcggcatcaacctcttgcgcgaaggcctcgatatccccgaagtctccctcgtcgccatcctcgacgccgacaaagaaggcttcctgcgctcacaccgcagcctgattcaaaccataggccgcgccgcgcgcaacgtgaacggcgtcgcgattctgtacgccgacaaaatcaccgactctatgaaagccgccatcgacgaaaccgaacgccgccgtgaaaaacaaattaaattcaacgaagaacacggcatcgtgccgcagcagattaaaaaacaggtcaaagacatcatcgacggcgtgtaccacgaagaagacggcagtaaaggccgtctgaaaggtaaaaacaaggttaaagtgggcgagattcacaacgaagaagatgcgattaaagaaatcgccaaactcgaaaaagccatgcagcaggcggctagggatttgcagtttgaagaggcggctgtgttgcgggataggattagggatattaaagagaatttgttgtttggggcggagtga

SEQ ID NO: 60066 - DNA, 591 bp, Neisseria meningitidis; identical to SEQ ID NO: 43038

SEQ ID NO: 60067 - DNA, 126 bp, Neisseria meningitidis; identical to SEQ ID NO: 39360

SEQ ID NO: 60068 - DNA, 906 bp, Neisseria meningitidis
ttggcacgggatttttacaaagaatacaaccctttatttatcaaaacataccaatccgaacaccccggcacatccgtcagcatccaacaatcccacggcggctccagcaaacaggcattatccgtagccaacggccttcaagccgatgtcgtaaccatgaaccaatcctccgacatcgacctgctcgaaaaaaaaggactggtagaaaaaggctggcaacaagccctccccgaccacgccgcgccctacaccagcactatggttttccttgtccgaaaaaacaaccccaaacagatccgcgattggaacgaccttgccaaagacggcgttaacatcgtcatcgccaatcccaaaacctcgggcaacggacgctacgccttcctcggcgcatacggttacggtctgaaagccaccaacggcaacgaacaggaagcccaaaaactcgtcgcatccatcctcaaaaacacccccgtttttgaaaacggcggacgcgccgccaccaccaccttcacacaacgcaacatcggcgacgtactcatcacttttgaaaacgaagccaactacgtcagcaaaaaactgacccaaggacagtttgaaatcgtctatccgagctacaccatttccgccgaaagccccgtcgccgtcgtcaacagcgtcgtcgcgaaaaaaggcacgcaaaaaaccgcccgcgcctatctcgaatacctttggagcgaaccggcgcaagaactcgccgcctcactctacctgcgcccccgcaaccccgaagtattggcaagacacaaagccgacttcccagacttagacaccttctctcccgaaaaaaaattcggcggatgggacaacatcatgaaaacctacttcgccgacggcggcatattcgaccgcctgaccgcacaaaaatga

SEQ ID NO: 60069 - DNA, 285 bp, Neisseria meningitidis
atggctgggggaaacaaatcattaaaaatagggacacaatctgttgaaaaatcaaccggtcgtacaatacctaataatttaaaggaacaattagcaatggaagaagttaaggcaaacccacagggcaaaactcctgcgagaatacctcctatgtccgatactaaaaatggttggttagcaaaagacggttgggttaagcgtgttcaaaacgtaaacaaaattgaaatacattacattgaaaactcaagaaccggtgagaaaacagattttaagtttaaggattag

SEQ ID NO: 60070 - DNA, 654 bp, Neisseria meningitidis
atgggattgggcatggaaatcggcaagctgattgtggcttttttggtgctgattaatccgtttagcgcgttgtcgctttaccttgacctgaccaacgggcacagcacgaaggagcgcaggaaggtcgcgcggacggccgccgttgccgtgtttgccgtgattgcggtatttgcgctgatcggcggtacgctgctgaaggttttgggcatcagcgtcggttcgtttcaggtcggcggcgggattttggtgctgctgatcgccatttcgatgatgaacggcaacgacaatcccgccaagcagaatctcggcgcgcagccggaaacggggcaggcgcgccccgcccgcaatgccggagcgattgccgtcgtgcccatcgccataccgatcaccatcggcccgggcggtatttcgaccgtgattatttacgcttcggcggctaaaacatacggcgacatcgcgttgattatcgcggccggtttggtggtcagtgcgatttgttatgccattttaatcgttgccgggaaggtcagccgcctgctgggcgcgacggggctgacgattttaaaccgcattatgggtatgatgctggcggcggtatcggtggagattattgtgtcgggactgaaaacgatattcccgcaactggcaggttga

SEQ ID NO: 60071 - DNA, 516 bp, Neisseria meningitidis; identical to SEQ ID NO: 51357

SEQ ID NO: 60072 - DNA, 375 bp, Neisseria meningitidis; identical to SEQ ID NO: 37139

SEQ ID NO: 60073 - DNA, 987 bp, Neisseria meningitidis
gtgagtggagcagaaagttaccggcatatcacggtcttgctgaatgaggcggtggatgcgcttgccgtgcgcgaagacggtgtctatgtggacggtacgttcggcaggggagggcattcccggctgattttgtcgcgtttgggcgatgcggggcggttgattgttttcgacaaagaccctcaggcgattgctgtggcagaagagctggcgcgttcggacaagcgggtcggtgtcgtgcatggcggttttgcttcgtttcaggcggcattggacggtttgggtatcggcaaggtggacggtgcgctgtttgatttggggatttcgtctccgcaaatcgatgacggcagccgcggtttcagctttcgtttcgatgcccctttggatatgcgtatggatacgacgcgcggtatgtctgccgcagagtggatagcggttgcgtcggaacaggatttgcacgaggtaatcaagaattatggtgaagagcggtttagccgccagattgcgcgcgccattgttgcgcaacgggcggaaagtccaatcgatacaacccgcaagctggcgcagatcgtggcacaaaacgtccgtactcgcgagcgggggcaggatcctgcgacgcgcaccttccaggcaatccgcatctttattaaccgcgagcttgaagaagtaggggcagtattgccgcaggtcatgtgtcgtctgaaagagggcggacgtttggcggtcattgctttccattcgttggaagaccgcattgtgaagcagtttgtcaaaaaatattcgcaacacgcgcccctgccgcgctgggcggcggtcagggaagcggatttgcccgagctgcccctgaaaatcgtgggcagggcattaaagccgggtgaggcggaaattgccgccaatccgagggcgagaagtgcggttttgcgtgtggcggagcggactgccggtccgataccggaacaatcacagagaaaaacgtctgaatggcaatga

SEQ ID NO: 60074 - DNA, 843 bp, Neisseria meningitidis; identical to SEQ ID NO: 41197

SEQ ID NO: 60075 - DNA, 318 bp, Neisseria meningitidis; identical to SEQ ID NO: 51540

SEQ ID NO: 60076 - DNA, 651 bp, Neisseria meningitidis
atgcccgtgacccgccccgccaaaatcaatacttacacacgcatcatcgacgccagccttgtgcttttcaacgaggaaggcgagcgcaacatcagcaccaaccatattgccgcccatttgggcatcagtccgggcaacctctattaccacttccgcaacaaagacgaaatcatcgtccaactgttcaaacgttacagcgaagccctgcttgcctacctcaacgaagccgtgttgccgtctgatgtggaagactccatcaactatatggcgggcatttacgacgtgatgtgggaataccgcttcctattcagcgacgtgaacaccctgcttgcacgcagtgccgaactattgggcgaacacaataccttcacccaagccaaagtctccccgctcttggtcaacctgctgacccagctcaacggtctgaacatcatccaagccgaccaaaccgctatgaacgatctcgccgtcaatatgtggatggttacgaaatactggttcgacttcgacagctccctgcgcggccgcaccaagctgaccgaagactccaaagcacgcggcatccgccgcaccttaagcctccttcgtccttatcttttgcccgaacaccgcaagaaatacgaccggaaaatcggcaacggcaacccgtaa

SEQ ID NO: 60077 - DNA, 369 bp, Neisseria meningitidis; identical to SEQ ID NO: 37026

SEQ ID NO: 60078 - DNA, 2451 bp, Neisseria meningitidis
atgacacaaaaagaaaagcattttgaggaatatgccgccttggcaacccttcctttgcgggatgtcgtcgtttacccgcatatggttctgccgctgtttgtcggcaggccgaaatccatcgccgcactggaaaacgccattacccgcgaggagccggttttcctgttggcgcaaaccgatgcggcgctagaagaaccggttgccgccgacctgtatcagaccggtacggtcgcacaagtcctgcaagtgttgaaactacccgacggcacggtaaaagtattggtcgaagggctgtatcgcggacgtgttctgaccattgaagacacgggcggtctgttcgtttcccatatagagacggtcgtggaagaagacacgggcggcaataccgacctcgaagccgtgcgccgcaccctgttggcgcagtttgaacaatacgccaaactcaataaaaaaatccccgccgaaattatcggcagcattaacggcattgccgaaaacagccggctaaccgatacggtcgcagcgcatttgcagttgaaactggcgcaacgccaacagattttggaaattcccgaaatcggcaaacggatggaattcctgctggcacagctggaatccgaactcgacattatgcaggccgaaaaacgcatacgcggacgcgtcaaacgccaaatggaaaaatcccagcgcgaatattatctgaacgaacagattaaagcgatacacaaagaattgggcgaagaagacgaaaacggcgaactggatgccttggaagcaggcatcaaaaaggcggggatgagcaaagaagcggaagaaaaatgcctgtccgaactgaaaaaactcaaaatgatgccgccgatgtctgccgaatccaccgtcgtacgcaactacatcgacaccctgctcgaactgccgtggaagaaaaaatcccgcgtcagcaaagacatcgccaaagccggattggtgctggataccgaccactacggcctggaaaaagtcaaagaacggattttggaatacctcgccgtccaaaaacgtatggacaaactcaaaggcccgattctgtgcctggtcggccctccaggcgtgggcaaaacctctttgggcgaatccatcgccaaagcaacggggcggaaatatgtccgcatggctttgggcggcgtgcgcgacgaaagcgaaatccggggacaccgccgcacctatatcggctccatgcccggtaagattttgcagaatatggcaaaagccggcgtaaaaaacccattgttcctgctcgacgaaatcgacaaattgggtagcgacttccggggcgatcccgccagcgcgttgctcgaagtgcttgatcccgagcaaaacaacaagttcgccgatcattatgccgaagtggattacgatttgagcgatgtgatgtttattgcgacttcaaacagcctgaatatcccgacaccgctgctcgaccgtatggaaatcatccgtctgtccggctataccgaagacgaaaaaatcaatatcgcgatgcagtacctcgtgccgaagcaaatgaagcgcaacggcgtaaaagaaggggaattggcaatcgaagaaagcgcggtgcgcgatattatccgttactacacccgcgaggcgggcgtgcgttcgctcgaccgcgagattgccaaaatctgccgcaaggtggtgatgcagattaccttggacgaagactcaaaaaccaaaaaaaccggaaaagccaagcccagggcggttaaagtaaatgagaaaaatctgcacgactatttgggtgtgcgccgcttcgattacggcgttgccgaaagcgaaaaccgtatcggacaagtaaccggtttggcgtggacggaagtcggcggcgaattgctgaccgtcgaagccgcagcattgccgggtaagggcgtgattcagtgcaccggccagttgggcgatgtgatgaaggaatccgtgtccgcagcgtggtcggttgtccgctcccgcgcggaatcagtgggcttggctcctgatttttacgagaaaaaagacatccatgtccatgttcccgaaggtgcgacgccgaaagacggtccgagtgcgggcattgccatgactttggcgatggtgtctgcattcaccaaaatcccggtgcgcgccgatgttgccatgacgggcgaaattaccctgcgcggcgaagtcctgccgattggcggtctgaaggaaaaactgttggctgcgcttcgcggcggcatcaaacacgttttaattccaaaagacaacctcaaagacttggaagaaatccctgaaaacgtgaaaaccggcctgaccatccatccggtcaaatggatagacgaggtattggctttgggtttggaaagccagcctgagccttgggcagaaccttctggtgcggaagcggcggcggaatccgcttcaaaaccaaaaccccgcagcagggcaaccaaacattga

SEQ ID NO: 60079 - DNA, 396 bp, Neisseria meningitidis; identical to SEQ ID NO: 43897

SEQ ID NO: 60080 - DNA, 1593 bp, Neisseria meningitidis; identical to SEQ ID NO: 42823

SEQ ID NO: 60081 - DNA, 1842 bp, Neisseria meningitidis
atgcagacaaattatttgtctgaaacggattcgattatgaaaaaactgatttgcctgttcgccgtatttttgatgttgtgcggacgagctttcgcgctggatgcgaacgatctgctgccgccggaaaaggcattcgtgccggagcttgccgttgccgacgacggtgtgaacgtccgtttcaggattgccgacggatactatatgtatcaggcgaaaatcgtcggcaagaccgatccggcggatttgttgggacagccttctttcagcaagggcgaagagaaggaagacgagtttttcggcaggcagacggtttaccatcacgaagcgcaggttgcctttccttatgcaaaggctgtcggcgaaccgtataaattggttttgacctatcagggctgtgccgaagccggcgtgtgctatccgcccgtggataccgagtttgatatttccggcaacggcacttaccatccgcaaaccgacgaaccggcatccgccaaagatcgctttttgcagccttcctctcaaaacggcagcggggcgctgccgcccccgaagggggatgagggcggcgacagccgtttcaagctgtcttgggatacgctcaacgccaatcttttggcgttttttctcgccggtttgggtctgagttttaccgcctgtatgtatcccctgttgccgattgtttccagtattgtggtcggcgacaaaaaggcgggcaaggcgcgggcgtttgtgctgtccgtcgtttatgttcagggtttggctctgacttatacgctggtcggcattgttgccggactgacgggcgcgctgctgaccgtatggttgcagcaggcttgggtcgtgttggcggcatcggctttgatggtcgtcttggcactgtctatgttcgggctgttcaacatccagcttcccaacgccgtgcagtcgtattttcagaatcaaagcagcaggctttcaggcggtaaaatcgtttccgtctttattatgggcatattgtccgcgctgattgtcgggccgtgcgtcgccccgccgctggcatttgctttgggctacatcggtcagacgggcgatgcggttttaggcggtttggcactttacactttggcgttgggcaccggcgttccgctgattgccatcggcacgttcggcgggcatatcctgcctaaggcaggcgattggatgaatgccgtcaaatacgctttcggctttatcctgcttgccgtcgccgtttacctcgccacgccgcacttgccctattatctcgtcgtcgcgctgtacacgctgctgatgctggttcctgcctgtatgctgctggtcaacggacgcaggcagaaacgccgtccgaaagctgtggcattcgcattgggcggcatattgctgataggcggcgcgtggttcggctggcagggcgcaaacggcaaaacgaccgcgctgcaccatttcctgaccctcaatccgccggccgaagcaggcaaatcttcggaacacggaaaaatgtttgccgatactgccgcgctgaaggcagcgatggatacggcgttgaaagaacatcccgacaaacccgtcgttttggatttttatgccgactggtgcatttcctgcaaagaaatggcggcttacacgcttaatcagccggaagtgcatcaggcagtcgatatggaacgctttttccaaatcgacgtaaccgccaacacgcccgaacatcaggcgttgttgaaagaatacggtctgttcgggccgccgggcgtgtttgtcgtccgctccgacggcagccgcagcgagccgctgctgggttttgtcaaagcagacaagtttatcgagtggtatgaacaaaaccgctga

SEQ ID NO: 60082 - DNA, 1908 bp, Neisseria meningitidis
atgccgtctgaagcgtcccgccccgtccgaacagtgttagaatcgaaatccgccacaccgatgcacgatacccgtaccatgatgatcaaaccgaccgccctgctcctgccggctttatttttctttccgcacgcatacgcgcctgccgccgacctttccgaaaacaaggcggcgggtttcgcattgttcaaaaacaaaagccccgacaccgaatcagtcaaattaaaacccaaattccccgtccgcatcgacacgcaggacagtgaaatcaaagatatggtcgaagaacacctgccgctcatcacgcagcagcaggaagaagtattggacaaagaacagacgggcttcctcgccgaagaagcatcggacaacgttaaaacgatgctccgcagcaaaggctatttcagcagcaaagtcagcctgacggaaaaagacggagcttatacggtacacatcacaccgggcccgcgcaccaaaatcgccaacgtcggcgtcgccatcctcggcgacatcctttcagacggcaacctcgccgaatactaccgcaacgcgctggaaaactggcagcagccggtaggcagtgatttcgatcaggacagttgggaaaacagcaaaacttccgtcctcggcgcggtaacgcgcaaagcctacccgcttgccaagctcggcaacacccgggcggccgtcaaccccgataccgccaccgccgatttgaacgtcgtcgtggacagcggccgccccatcgccttcggcgactttgaaattaccggcacgcagcgttaccccgaacaaatcgtctccggcctggcgcgcttccaaccgggcacgccctacgacctcgacctgctgctcgacttccaacaggcgctcgaacaaaacgggcattattccggcgcgtccgtacaagccgacttcgaccgcctccaaggcgaccgcgtccccgtcaaagtcagcgtaaccgaggtcaaacgccacaagctcgaaaccggcatccgcctcgattcggaatacggtttgggcggcaaaatcgcctacgactattacaacctcttcaacaaaggctatatcggttcggtcgtctgggatatggacaaatacgaaaccacgcttgccgccggcatcagccagccgcgcaactatcggggcaactactggacaagcaacgtttcctacaaccgttcgaccacccaaaacctcgaaaaacgcgccttctccggcggcatctggtatgtgcgcgaccgcgcgggcatcgatgccaggctgggggcggagtttctcgcagaaggccggaaaatccccggctcggatatcgatttgggcaacagccacgccacgatgctgaccgcctcttggaaacgccagctgctcaacaacgtgctgcatcccgaaaacggccattacctcgacggcaaaatcggtacgactttgggcgcattcctgtcctccaccgcgctgatccgcacctctgcccgcgcaggttatttcttcacgcccgaaaacaaaaaactcggcacgttcatcatacgcggacaagcgggttacaccgttgcccgcgacaatgccaacgttccttcagggctgatgttccgcagcggcggcgcgtcttccgtgcgcggttacgaactcgacagcatcgggcttgccggcccgaacggatcggtcctgcccgaacgcgccctcttggtgggcagcctggaataccaactgccgtttacgcgcaccctttccggcgcggtattccacgatatgggcgatgccgccgccaatttcaaacgtatgaagctgaaacacggttcgggactgggcgtgcgctggttcagcccgctcgcgccgttttccttcgacatcgcctacgggcacagcgataagaaaatccgctggcacatcagcttgggaacacgcttctaa

SEQ ID NO: 60083 - DNA, 1047 bp, Neisseria meningitidis
atgaaaatgcaggcagttgttgtgaataaaaatgtagcgggcgatgtggaaatagtcgaacgcgaggttcgcccgttggaatacggcgaggcgttggtcgaagtcgaatattgcggcgtgtgccacaccgacctgcacgttgcggcaggcgactacggcgaaaaaccgggccgcgtgctgggacacgagggcatcggtttggttaaagaagttgccgacggtgtgaaaaatctgaaagtcggcgaccgcgtcagcatcgcctggctgttccaaagctgcggctcgtgcgaatactgcaataccggccgcgaaaccctgtgccgctctgtattgaacgcgggctacaccgccgacggcggtatggcgacccactgcatcgtgagtgccgattacgcggtcaaagtccctgaaggtttggatcctgcgcaagcttccagcattacttgtgccggcgtgaccacttataaagccattaaagtttccagtgttcgtccgggacagtggattgccatctacggcgcgggcggtttgggcaacttgggggttcaatacgcgaaaaaagtattcggcgcgcacgttgtcgccatcgacatcaacgacgacaaactggcgtttgccaaagaaaccggcgcggatttggttgtcaacgccgccaaagaagacgctgccaaagtgattcaggaaaaaaccggcggcgcacacgctgcggtcgtaaccgccgtatctgctgccgcattcaactctgccgtgaattgcgtccgcgcaggcggacgtgtggttgccatcgggctgccgccggaatcgatggatttgtccatcccgcgtttggttttggacggcatcgaagtggtcggctctttggtcggcacgcgcaaagatttggaagaagctttccaattcggcgcggaaggtttggttgtgccgaaagtccaactgcgtgctttggatgaagcacccgccattttccaagaaatgcgcgaaggcaaaatcaccggtcgtatggtaatcgatatgaaaaaagaatgcggctgcggccaccaccactga

SEQ ID NO: 60084 - DNA, 171 bp, Neisseria meningitidis
ttgggtctaggctcaacctgcgtttgctgcatctttggaagaaatagtggattcgaaaaaataggaagaattctgattaatggtatgcgaggtgtagcaatgggggctgttgctggtggcataaatggttatgcaggttctacgggtaagaacactgacattcgccgttaa

SEQ ID NO: 60085 - DNA, 2187 bp, Neisseria meningitidis
ttgtcccgatgcctgaaacagactgtccgccacgtcatgccgtctgaaaccggcgcagatgccgccaagccttcagacggcattgcctgcccgctccgaccgaacaacaaccatctttgggagaaccttatgcccgaacaaaaccgcatcctctgccgcgaactgagcctgctggcattcaaccgccgcgtgttggcacaggcggaagacaaaaacgttccccttttggaacgcctgcgcttcctgtgcatcgtgtcgtccaatctggacgagtttttcgaagtccgcatggcgtggctcaaacgtgaaaacaagctgcacccccggcgcaggctggacaacggcaaaatgccgtctgaaaccatcgccgacgttaccgaagcggcgcgctccctgatacggcaccagtacgatttgttcaacaacgtccttcagcccgagctggcacaagaaggcatccatttttaccgccgccgaaattggacagacacacagaaaaaatggattgaaaactattttgaccgcgaattgctgccgattctgacccccatcggactcgacccttcccaccccttcccgcgcccgctgaacaaatcgctcaacttcgccgtcgaactcgacggcacagacgcgttcggcaggccttcggggatggcgattgtgcaggcaccacgcatcctgccgcgcgttgttcccctgccgtccgaactgtgtggcggcggacacggcttcgtcttcctgtcgtccatcctccacgcccacgtcggcaaactcttcccgggcatgaacgtcaaaggctgccaccagttccgcctgacgcgcgacagcgacttgaccgttgacgaagaagacctgcaaaacctccgcgccgccattcaaaacgagttgcacgaccgcgaatacggcgacggcgtgcggctcgaagtcgccgacacctgccccgcctacatccacgacttcctgctgtcgcaattcaaactgaccgccgccgaactctatcaggtcaaaggcccggtcaacctcgtgcgcctcaacgccgtccccgacctagtcaaccgccccgatttgaaatttcccccacacacgccgggcagactgaaagccttgggcaaaaccgcgtccatattcgatttggtgcgccaatcgcccatcctgctgcaccacccctaccaatcgttcgaccccgttgtcgaaatgatgcgcgaagccgccgccgaccccgacgtgcttgccgtcaaaatgacgatttaccgcaccggcacgcgctccgaactcgtccgcgccctgatgaaggcggcactcgccggcaaacaagtaaccgtcgtcgtcgaactgatggcgcgttttgacgaagccaacaacgtcaactgggcgaagcagctcgaagaggcgggcgcgcacgtcgtgtacggcgtgttcggctacaaagtccacgccaagatggcactggtcatccgccgcgaagacggcgtactcaagcgttacgcccacctcggcacgggtaactaccaccaaggcacatcgcgcatctacaccgacttcggcatcattaccgccgacgaacaaatcaccgccgatgtgaacacattgtttatggaaatcacaggcttgggcaaacccgggcggctgaacaaactctaccaaagcccgtttaccctgcacaaaatggttatcgaccgcatcgcacgcgaaaccgaacacgccaaagccggcaaacccgcccgaatcaccgccaagatgaattcgctcatcgaaccgaccgtcatcgaagccctgtatcgggcaagcgcggcaggcgtgcaaatcgatttgattgtgcgcggtatgtgcaccttgcgcccgggtgtaaaaggcttgtccgaaaacatccgcgtccgctccatcatcggcaggcagctcgaacacgcgcgcgtgtattgcttccacaacaacggcgcggacgatacctttatctccagcgcggattggatggggcgcaacttcttccgccgcatcgaaaccgccgcgccgattgccgcgcccgaactcaaaaaacgcgtcatccgcgaaggtttggaaatggcattggcagacaatacgcacgcgtggctgatgcagcccgacggcggctatatccgcgccgcacctgccgagggcgaatccgaagccgacctgcaaaacgatttgtggacactgctcggaggctga

SEQ ID NO: 60086 - DNA, 1929 bp, Neisseria meningitidis
atggcaaaagtaatcggtatcgacttaggtacaaccaactcttgtttggccatttccgaaaacggtcaaaccaaagttatcgaaaacgcagaaggcgcacgcaccacgccgtccgttatcgcttatttggacggcggcgaaatcctcgtcggcgcgcctgccaaacgccaagcggtgaccaacgccaaaaacactatttacgccgccaaacgtttgatcggccacaaatttgaagacaaagaagtccaacgcgacatcgaatctatgcctttcgaaatcatcaaagccaacaacggcgacgcatgggtaaaagcacaaggcaaagagctgtctcctcctcaaatttccgcagaagtcctgcgtaaaatgaaagaagccgccgaagcttacttgggcgaaaaagtaaccgaagccgtgattaccgtcccggcctacttcaacgacagccaacgtcaagccaccaaagacgcaggccgtatcgccggtttggacgtaaaacgcatcatcaacgagccgaccgcagccgctttggcattcggtatggacaaaggcgacaacaaagaccgcaaagtagccgtatatgacttgggcggcggtactttcgatatttccatcatcgaaatcgccaacctcgacggcgacaaacaatttgaagtattggctaccaacggcgatactttcttgggcggtgaagacttcgaccaacgcttgatcgactacatcattgacgagtttaaaaaagaacaaggcattgatttgaaacaagacgtcatggctctgcaacgtctgaaagaagctgccgaaaaagccaaaatcgaattgtccagcggccagcaaaccgaaatcaacctgccgtacatcaccatggacgcaaccggcccgaaacacttggcgatgaaaattacccgcgccaaattcgaaagcctggttgaagacctgattgcccgctctatcgagccttgccgcaccgcattgaaagatgcaggtctgagcactggcgacatcgacgacgtgattttggtcggtggtcaaagccgtatgccgaaagtacaagaagccgttaaagacttcttcggcaaagagccgcgcaaagacgtgaaccctgacgaagctgtcgccgtaggcgcagcgattcaaggcgaagtgttaagcggcggccgcagcgacgtattgctgctggacgtaacccctctgtccttgggtatcgaaaccatgggcggcgtgatgaccaagctgattcaaaagaacacaactatcccgactaaagcgtcgcaagtgttctctaccgccgaagacaaccaaagcgcagtaaccatccacgtactgcaaggcgaacgcgaacgcgcttctgccaacaaatctttgggtcagttcaacttgggcgacatcgcacccgcaccgcgcggtatgccgcaaatcgaagtcaccttcgatattgacgccaacggtatcctgcacgtttccgccaaagacaaaggcactggcaaagcagccaacatcaccatccaaggttcttcaggtttgagcgaagaagaaatcgaacgcatggtgaaagatgccgaagccaatgccgaggaagataaaaaactgactgaattggtcgcttcccgcaaccaagctgaagccctgattcactctgtgaaaaaatctttggccgactacggcgacaaactcgacgcagccgagaaagaaaaaatcgaagccgcgctgaaagaagccgaagaagcagttaaaggcgacgacaaagccgctatcgatgccaaaaccgaggcgctgggcgcagccagccaaaaactgggggaaatggtttacgctcaagcacaagctgaagcccaagcaggcgaaagcgaacaagccaatgcttctgcaaagaaagacgatgatgtcgtagatgccgactttgaagaagtaaaagacgacaaaaaataa

SEQ ID NO: 60087 - DNA, 2796 bp, Neisseria meningitidis
atgtccaacagacctacactcctcctcgttgacggatcgtcctacctctaccgtgcgtatcacgcgatggggcaaaacctgaccgcacccgacggcgcgccgacgggtgcgctgtatggcgtattgaatatgttgcgccgtttgcggtcggaatatccgcacgattattgcgcggtggtttttgatgcgaaaggcaaaaatttccgccatcaaatgtttgaagaatacaaggcgacgcgcccgccgatgcccgacgatttgcgcccgcaggcggaagcactgccggatttagtgcgcctgacgggctggccggtattggtgattgggcaagtggaggcggacgatgtgatcggcacgctggcgaaacagggggcggaacatggtttgcgagtcattgtttcgaccggcgataaggacatggcgcagttggtggatgagcgcgttacgctggtgaacacgatgagcagcgaaacgctggacattgaaggcgtgaaggcaaaattcggcgtgcgccccgaccaaatccgcgattatctcgcgctgatgggcgacaaggtggacaacgtgccgggcgtggaaaaatgcggcccgaaaacggcggtgaaatggctggaagcctacggttcgctggctggtgtgatggaacacgcttcggaaatcaagggcaaagtgggcgaaaacctgcaagccgcactgccccaactgccgctgtcgtatgatttggtcacgattaaaaccgatgtggacttgcacgccgagctttcagacggcatcgaaagcctgcgccgtactacgccgaaatgggcgcagctggttgtcgatttcaaacgctggggcttccgcacctggctgaaagaagcggaatcaaacatgaataccggctcgaccgatgatttgttcggcagcgacagcatcggcgagcaggcggctttgaatgcggaaatgccgtttgaaaaacaagccgaaaaagccaccgcccccgaaaaactggattatcaagccgttaccaccgaagcgcagtttgccgctttgttggacaaactgtcgcgggcggacacaatcggcatcgatacggaaaccacgtcattagacgcgatgaacgcctcgctggtcggcatcagcatcgctttccaagcaggcgaagcggtttacatccccgtaggacacagcctgaccgccgcacccgaacagcttgatttgcaagacgtgttaggccgtctgaaaccgcatttggaaaaccccgccctgaaaaaaatcgggcaaaacctcaaatacgaccaacacgttttcgccaactacggcatcgccctgaacggcattgccggcgattccatgctcgcttcctacatcatcgagagccatctcggacacggcttggacgaattgtccggacgctggctcggcttggaaaccattacctacgaatcattgtgcggtaaaggcgcgaagcaaatcagttttgccgatgtcgccatcgggcaggcgaccgaatacgccgcccaagacgccgatttcgccttgcgcctcgaagcgcacctgcgcgcgcaaatggacgccaaacagcttgaaatgtatgaaaaaatggagctgcccgtcgcgcaagtattgtttgaaatggaacgcaacggtgtgcaaatcgaccgcgccgaactcgcccgccaaagcgcggaactcggcgccgagctgatgaagctcgaacaagaagcctacgccgccgcagggcagccgttcaacctcaactcgcccaaacagctgcaagaaatcctgttcgacaaaatgggcatcccgacaaaagggctgaaaaaaaccgccaagggcggcatttccaccaacgaggccgtgctcgaacagctcgcgcccgactaccccctgcctaaaatcatcctgcaaaaccgcagcctggcgaagctcaaatccacctacaccgacaaactacccgaaatgatttcccccaaggacggccgcgtgcataccacctacgcccaagccgtcgccattaccggccgcctcgccagcaacaaccccaacctgcaaaacatccccatccgcaccgccgaaggccgccgcgtgcgccgcgcctttaccgcaccgcaaggcagcgtcatcgtttccgccgactattcccaaatcgagctgcgcattatggcgcacctctccggcgacaaaaccctgattgccgcgttccaaaacggcgaagacgtacaccgccgcaccgccgccgaagtgttcggcactgcgcccgaaaacgtctcgcctgagcaacgccgctacgccaaaaccatcaacttcggcttaatctacggtatggggcaatacggccttgccaaatcattgggcatcgacaacctttccgccaaaaactttatcgaccgctacttcgcccgctaccccggcgtcgccgaatacatgcagcgcaccaaagaacaagccgccgcccaaggcttcgtcgaaaccctgtttggccgccgcctctacctgcccgacatccgcaacaaaaacgccaacgcccgcgccggagccgaacgcgccgccatcaacgcccccatgcaaggcaccgcctccgaccttatcaaacgcgccatgatagacgtgtcccgctggctggtttcagacgacctgaagagcaaactgattatgcaggtgcatgacgaactggtgctggaagtcgttgaaaccgaactggattttgtcaaagaaaaactgccgcagattatggcgaaagtgggcggcggattattggatgtaccgctggtggctgaggttggcgtaggggagaattgggaagaggcacattga

SEQ ID NO: 60088 - DNA, 171 bp, Neisseria meningitidis; identical to SEQ ID NO: 50701

SEQ ID NO: 60089 - DNA, 141 bp, Neisseria meningitidis; identical to SEQ ID NO: 51058

SEQ ID NO: 60090 - DNA, 1155 bp, Neisseria meningitidis
ttgttggaacaggatatgagtcaaaatgcctcggtgggcattgtaatgccccaaaaaattccgtttgagatgccgctggttttggaaaacggtaaaactttgccgcgtttcgatctgatgattgaaacctacggcgagctgaatgctgaaaaaaacaatgcggttttaatctgccacgcgctgtcgggcaaccatcatgttgcgggcaggcattcggcggaagataaatatacgggctggtgggacaatatggtcggacctggcaaaccgattgatacggaacgttttttcgtggtcggtttgaataatctgggcggctgcgacggcagcagcgggcccttgtcgatcaatcctgaaacgggcagggaatacggcgcggattttccggttgttacggtgaaggactgggtaaaatcccaagccgcgcttgccgattatctcggcatcgaacaatgggcggcggttgtcggcggcagtttgggcggtatgcaggctttgcagtgggcgatttcctatcccgaacgcgtgcgccatgctttagtgattgcgtctgcgccgaagctgtccacgcaaaatatcgcgttcaacgatgtggcgcgtcaggcgattttgaccgaccccgatttcaacgaaggacattaccgcagccgtaacaccgttcctgcacggggcttacggattgcccgcatgatgggacacattacctatcttgccgaagacggtttgggcaaaaaattcggacgcgatttgcgctccaatggctatcaatacggctatggcgttgaatttgaagtagaatcctatctgcgctatcaaggcgacaaattcgtcggacggtttgatgccaacacctacctgctgatgaccaaagctttggactatttcgatccggcggcggatttcggcaacagcctgacccgcgccgtgcaggatgtgcaggcaaaattctttgtcgccagcttcagcaccgattggcgtttcgcgcccgaacgttcgcacgaactggtcaaggcactgattgccgcacaaaaatccgtgcagtatatcgaagtcaaatccgcacacgggcacgatgcctttttaatggaagacgaagcctatatgcgtgcggtcgccgcctatatgaacaacgtttataaggaatgtcagcaatga

SEQ ID NO: 60091 - DNA, 534 bp, Neisseria meningitidis; identical to SEQ ID NO: 39841

SEQ ID NO: 60092 - DNA, 354 bp, Neisseria meningitidis; identical to SEQ ID NO: 52201

SEQ ID NO: 60093 - DNA, 345 bp, Neisseria meningitidis; identical to SEQ ID NO: 36231

SEQ ID NO: 60094 - DNA, 234 bp, Neisseria meningitidis; identical to SEQ ID NO: 40733

SEQ ID NO: 60095 - DNA, 2280 bp, Neisseria meningitidis; identical to SEQ ID NO: 43035

SEQ ID NO: 60096 - DNA, 183 bp, Neisseria meningitidis; identical to SEQ ID NO: 51850

SEQ ID NO: 60097 - DNA, 411 bp, Neisseria meningitidis; identical to SEQ ID NO: 55930

SEQ ID NO: 60098 - DNA, 300 bp, Neisseria meningitidis; identical to SEQ ID NO: 42170

SEQ ID NO: 60099 - DNA, 882 bp, Neisseria meningitidis
atgtgtatcgagatgaaatttatattttttgtactgtatgttttgcagtttctgccgtttgcgctgctgcacaagattgccgacctgacgggtttgcttgcctaccttctggtcaaaccgcgccgccgtatcggcgaaatcaatttggcaaaatgtttttccgaatggagtgaggaaaagcgtaaaaccgtgttgaaacagcatttcaaacacatggcgaaactgatgttggaatacggtttatattggtacgcgcctgccggacgtttgaaatcgctggtgcgctaccgcaataagcattatttggacgacgcgctggcggcgggggaaaaagtcatcatcctgtatccgcacttcaccgcgttcgagatggcggtgtacgcgcttaatcaggatatcccgctgatcagtatgtattcccatcaaaaaaacaagatattggacgaacagattttgaaaggccgcaaccgctatcacaacgtcttccttatcgggcgcaccgaagggctgcgcgccctcgtcaaacagttccgcaaaagcagcgcgccgtttctgtatctgcccgatcaggatttcggacgcaacgattcggtttttgtggattttttcggtattcagacggcaacgattaccggattgagccgcattgccgcgcttgcaaatgcaaaagtgatacccgccattcccgtccgcgaggcagacaatacggttacattgcatttctaccctgcttggaaatcctttccgggtgaagacgcgaaagccgacgcgcagcgcatgaaccgttttatcgaagacagggtgcgcgaacatccggaacaatatttttggctgcacaagcgttttaaaacccgtccggaaggcagccccgatttttactga

SEQ ID NO: 60100 - DNA, 795 bp, Neisseria meningitidis; identical to SEQ ID NO: 50651

SEQ ID NO: 60101 - DNA, 870 bp, Neisseria meningitidis
atgaaggagcggatagtgggtcaaagcggcgagttgttttgtttcggacagatgcccgtatggaaggcggaaaacctgccggaaattttgttgtcgggttattcgtccgaaggaggggaatgggtctgcctgaatgtgttgcagggcgatgtcgaagtccgcacgcaggacggggcggcagaggtttggtcggcggaaagcggcgattgcgtgtttgcgccgcagcaggtgttttcggtcaaaccgaaaacggatgatgctgaaatccgtttgtcgatgtattgcacggcggcagactattttcacaaaaaatacgggatgagtgccacgcattctgcggtcgtggcggcacaggataccgtaccggcgggcagggcgttggatatgggctgcggacaggggcgcaacgcgctgttcctcggcttgaaagggtttgacgtaaccgctgccgatcacaatccggccgcgttggcaaacgtggcggagctggcagaggcggagggtttgaacgtccgcacgctggaatatgatttgaacgccgccgccttgcagggcgaatttgattatattgtggcaacagtggtgctgatgttcctgatgccgcagcgcgtgcctgacgtgattgccgatatgcaggcgcatacggcggcgggaggatacaatttgatcgtatcggcaatggatacggcggatttcccctgtccgatgccgttcccttttaaatttaaagagggcgagctgaaggattattatcgggattgggaactggtcgaatataaagaagaattgggttctatgcatgccaaagacgaaaacggcaatccgatacggtttaaatttgtaacgatgctggcgaaaaagcctgaataa

SEQ ID NO: 60102 - DNA, 1047 bp, Neisseria meningitidis
atggaggcacgcccaccccgggcaaatgaagcccaagccccccgcgcggttgaaatgaaaaaagaaagccgccccgcgtttgacgcggcagccgtatttgacgcggcagccgtaccggtatccgacagcgggtttgccgccaatgcaaatgtccgccgttttgtggacgatgaagtcgggaaaggggatttttcccgggcggaatggcaggatttttttgacaaagcggcttacaaggcggacatcgtcaagattatgcaccgcccctccacatcgcgtccgtggtatgtgttccgcacgggaaattcgggcaaggcgaaatttcgcggcgcgcgccggttttatgcggaaaaccgcgcgcttatcgatgatgtggcgcaaaaatacggcgtgcctgccgaacttatcgtggcggttatcgggattgaaacgaattacggcaaaaatacgggcagtttccgtgtggcggacgcattggcgaccttaggctttgattacccccgccgcgccgggtttttccaaaaagaattggtcgagcttttaaagctggcaaaagaagaaggcggcgatgttttcgcctttaaaggcagctatgcgggcgcaatggggatgccgcaatttatgccttcgagctaccggaaatgggcggtggattatgacggggacggacatcgggacatatggggcaacgtcggcgatgtcgcggcatcggttgccaattatatgaagcagcacggttggcgcacgggcgggaaaatgctggtgtctgcaacattggcgccgggtgcggatgttcaggcaatcattggcgaaaaaaccgccctgacgcggacggtggcggatttgaaggcgtacggcatcatccccggcgaagagcttgcagatgatgaaaaggcggttttgttcaaactggaaaccgcaccgggcgtgtttgaatattatttgggcttgaacaatttttatacggtatggcagtacaaccacagccggatgtatgtaacggcggtcagggacattgccaattcgcttggcggcccgggattgtaa

SEQ ID NO: 60103 - DNA, 795 bp, Neisseria meningitidis
atgaccttacctatgcaggaaacccgtttttccatactgctggacgaattggcggcaaaacaggaggcagccatcgctccccacctgcttgccgacggaaccaaggtatgggtacgcaaagcaggcaggcacaatgcgcggtggcgttacgcgctgctcggtatggttgcccgatatttgaaactgggggtgttgaagccggttcccagcctcggcggcgagcctgccattgcaaccgaatcaaaacgcctgtacgaattgcgctcggcggggatagccgttcccgaattgctcgccgtcaggaaaaatgcccttatgttcggcaatttggcaggcatcccgctcgatacgcaaatccgccaagaagccgaagccggaaaggcggacgcttggcttgccggtttggaagccattgcacgcgtgcataaaaaacagcagttcctcagtcaggcgtttgcgcggaatatgatgtcggacggaaaaaacatcagctttctagattttgaagacgacccttccgaagtcctgaccatagcgcaatgccaagcccgcgattggctctgctacatccattcgaccgcgctgatattgaaaaacggcggactgctggaagcggctgcggaaaaatggggcggcgtactgtctgagcagcctgccgaaatacaaaggctgattgccgccaccgtcaaaccgatcctcccgatacgcaggctggaacacccccgctggggacgggacgcgctcaggctggcagcctcgatttccctgatttcccttgccgatataccgccataa

SEQ ID NO: 60104 - DNA, 435 bp, Neisseria meningitidis; identical to SEQ ID NO: 43108

SEQ ID NO: 60105 - DNA, 1446 bp, Neisseria meningitidis
atgagtacacaaacaaattttgatttggtgttgttcggtgcgaccggcgatttggcgatgcgcaagctgttgccctgtctgtaccaggcgcatgttgccggtctgcttcatcccgaagggcgtattttgggggtcagccgcagcgagttggataccgaaggttttctggcgaaggtggaaaccagttccaaaatccatgtgaaagaaaatttttccgatgaggcttgggcatcgtttgtcgaacgtttcgcatatctcaaagtcgatgttacgcagccggacgattttgccgctttgggcgatttggtcaaagcgcgcaaagaaaccgacaatgtcgtcatctatctttccaccgcgccgaaattcttcgcgcaaacatgtgaaaaccttgccaaaatcggtttgaacgccgacaacgtgcgtgtggttttggaaaaaccgttgggtacggatttggcttcttcccagcaaatcaataccgatgttgcgcgttatttcaaagaagggcaaatttaccgcatcgaccactaccttggcaaagaaagcctgcaaaacctgcttgcgctgcgttttgccaatgtaatgttcgagccgctgtggaacaataaatacatcgaaagcgtgcagttgaccatcgccgagcagttgggcgtggaagagcgcggcgagttttacgacattaccggcgcgttgcgcgatatggtgcaaaaccatttgatgcagatgctgtgcatgactgcgatggaagcccccgccagcttggatgccgacgcggtgcgcgatgaaaaagtcaaagtcatcaagtcattgaagccgctgaccgtcgagtctgtcaatgaaaacgtcgtgcgcggacaatataccgccgccagaggcatgaacggctatcttgaagaaatcaacgttccgcaagacagctttaccgaaacctacgtcgccattaaagccgaaatcgaaaacgaacgctggaagggcgttcccttctacctgcgtaccggcaaacgcatggcgggcaaagtggcggaaatcgttttgaacttcaaagatttgaacagccatatttttgaaggcagccgcaccgcgcccaaccggctcgttatcgagttgcaaccatatgaatccgtgcgcctctatacgcagatgaaaaccccgggggcaggaaataaggtcgaaaccgtgccgctggcaaccgatttgggcaaagcattggaaagccgccgcgcggaagcttacgagcgcctgctgctggatgtgattaacggcaaactcgctttgtttaaccgccgcgacgaactcgaagccgcgtgggaatatgtgatgccgattttggaaaactggacaaataacaccacgccgccgcacggctacggcgcacactcgtgggggcctgaagccgcgcgcgaactattggcgcgcgacggacacaagtggcacgaagagcagtaa

SEQ ID NO: 60106 - DNA, 185 bp, Neisseria meningitidis
ttgcttgactattttcaagattctgtacctcgtgaaccggactatacaaaaaaaccgccttcgtgtaaagcggttcttaaatcgcccgttaaggcggacacaacgatagccaaactggaacaggaggcggcaaaggcgggtttatccaaaacggctttgcttgaaaggctggttgggatttgtag

SEQ ID NO: 60107 - DNA, 528 bp, Neisseria meningitidis; identical to SEQ ID NO: 43903

SEQ ID NO: 60108 - DNA, 756 bp, Neisseria meningitidis
atggggcgtttacttttgggcagtatccgcatgagcatcattgtcgaaaacctgaccgtcagctaccgccgccgtcctgccgtacaccacgttgacattacttttgaagaacatagtatgtgggcggttttcggtcccaacggcgcagggaaatccacctttctcaaatccttgatgggattgcagcctatcgatacaggcagcatccggctggatggattgagccgccaagacatcgcctaccttccccagcagtccgatatcgaccgctcccaacctatgactgttttcgacttggcggcaatggggctttggtatgaaatcggctttttcaaagggataaatgccgttcaaaaacaacgcgttcacgaagccttggagcgtgtaggaatgcggcagtttgcacgccgccaaatcgcccacctctcaaacggacaattccaacgcgtcctttttgcccgaatgctggttcaaaatgcaaaattcctgcttttggacgaacctttcaacgccgttgatgcacggacgacctacgaacttctcgacgtattgcagaaatgccattgcggcggacacgctatcattgccgtactgcacgattacgaacaagtccgtgcctactttcccagtaccctgctactcgcccgagaaaaaattgcggcaggcgcaaccgagaccattctgacagaaccctacctcgcccaagccaacgccaaaatgcagcaacaggaaagccccgactggtgcgcctcataa

SEQ ID NO: 60109 - DNA, 297 bp, Neisseria meningitidis; identical to SEQ ID NO: 39905

SEQ ID NO: 60110 - DNA, 426 bp, Neisseria meningitidis; identical to SEQ ID NO: 42184

SEQ ID NO: 60111 - DNA, 1254 bp, Neisseria meningitidis
atgcgtaaacccagaatcacccatttggatgtttgggcaaacgatgaaagaatcggtactttggaaaagggggcaatgtaccgtttcacatatgacaaccccggttctccattgttgggtttgcactatcaggataggggtaaagtatatatcagcaacaacatgccgcatatctttgcacagtattttccggaaggctttttggatgcacacatcacaagcaaatatgcttttcatgatgcgccttttgaagacaatgagatgctgcgcttggcaattctgtgcagagagactttgggtcggatacatgtgcgctgtaatgacccgctttttaatgaatggattgacgggttggagatgaaaaatccaagaatattgactgaacgggatttgctgggcataaatgcccgacaggtttttcagcaatatatggcagaaatcttccatcacggccgtttcgtcagtgtatccgggatacagcagaagatgtccttagaggccatccgcagaaataccaagcaaactgcctcatatattgccaaaggttttgatgcatccgaatatccttgcttggctgccaatgaatttttatgcatgcagaccatcaaacaagccggcattgccgttgcacagaccagcctgtcggaagattcatcagtcttattggtacgtcggtttgatgtcagtgaacagggttattttttagggatggaagactttaccagtctgcgccagtattcggtagaagataaatataaaggcagttatgcggctattgcacagattatccgacagatatccggcagaccagatgaagatttaatccatttctttaatcagcttgctgccagttgcatattgaaaaacggcgatgcacacctcaaaaatttttcagtactctatcatgacgaatacgatgttcgtcttgcacctgtctatgatgtattggatacatcaatatacagggttggaacacaaggaatttttgatgcttatgacgatacgctggcattaaacctgactaaccacggtaagaaaacatatccttccaagaatacattgttggattttgctgagaaatattgcgatttgggaagagaagatgcatcctttatgatagatacaatcgttcaagctaaagaacaggttcttgttaaatactcggatgtattgcgtgagaatgaatggttggcgcagaagtggcattttatcccggatgaaaatgaagaaggtctaccgtttacattccggtag

SEQ ID NO: 60112 - DNA, 606 bp, Neisseria meningitidis; identical to SEQ ID NO: 42337

SEQ ID NO: 60113 - DNA, 810 bp, Neisseria meningitidis
atggcgaaaattgggaattttgccgtcaaatccatgatagagatacggagcaaacgaatgattaccctgccttccttaaacaatctgccgtcaaaatgggatgaaatccgctattggctcgaaacccgggtttgtgagtgcggcgttatgccgcatcccaatttgacggaatgcgaagccgggcagttcgatcgggatttttgggacaatatcggctgcgcgcctgaagaatatgtccgtatccgccgagccatccgtctgttggaagcgcgttatcccgacagtttgaatgagctggtgtgtgccgccattgccacgcctttgggcgagatgctggcggtgttcggaaataagggattgtgtctgctggagtttgtcggacagaagcatttggaacaggaaattgccgccgtccaaaaagccttgcgcggacggtttgtgtttcgggaagatgagcggacgcaacttttgcggcaggaattggacttatacttcaagggtcgtctgaaaacctttgccacgcctttggagcagattggcaccgagtttcaaaagcaggcatgggacgcgctcttggcgattccttacggcgaaacgcgcagctacaaggagcaggcgcagcgtttgggcaaccccaaagccgtccgcgccgttgccgccgccaacgggcagaacaaggtgtctgtcctgattccctgccaccgcgtcatcggcagcgacggcaaactgaccggctacgcgggcgggttgaaccgcaaacagtttttactggctttggaacgcggcgaagttcagacggcattgttttaa

SEQ ID NO: 60114 - DNA, 201 bp, Neisseria meningitidis; identical to SEQ ID NO: 36765

SEQ ID NO: 60115 - DNA, 453 bp, Neisseria meningitidis; identical to SEQ ID NO: 49903

SEQ ID NO: 60116 - DNA, 354 bp, Neisseria meningitidis; identical to SEQ ID NO: 36586

SEQ ID NO: 60117 - DNA, 363 bp, Neisseria meningitidis
atggctcgtattgcaggggtaaatatccctaataacgcacacatcgtaattggtcttcaggctatttacggtattggtgctactcgtgctaaattgatttgtgaggctgcaaatattgcgcctgatactaaagcaaaagatttggacgagactcaattagatgctttgcgtgaccaaattgccaagtatgaagtagaaggtgatttgcgtcgtgaggtaactatgagtatcaagcgattgatggacatgggctgctatcgtggcttccgtcatcgtcgcggcttaccatgccgcggtcaacgcactcgtacaaatgcgcgtacccgcaaaggtccgcgtaaagcgattgctggtaagaaataa

SEQ ID NO: 60118 - DNA, 306 bp, Neisseria meningitidis; identical to SEQ ID NO: 36883

SEQ ID NO: 60119 - DNA, 369 bp, Neisseria meningitidis; identical to SEQ ID NO: 39932

SEQ ID NO: 60120 - DNA, 492 bp, Neisseria meningitidis
ttgaaaaaccatccgcccgtcgccgcctttccgccgcaggaagaaatggaacacttcatgcgcgaagcactgcgccaagcagaacaatccgccgctgacggcgaaatacccgtcggggcagtcatcgtttcagacggcaaaatcatcgcatcggcacacaacacctgcattgccgactgcaatgtcagctgccacgccgaaatcaacgccttggcacaggcaggcagcgaaatgcaaaactaccgccttgacggatgcgacatctacatcaccctcgaaccatgcgccatgtgcgcgtccgcactgatacaggcacgaatcaggcgcgtgatctacggtgcggcagaacccaaaaccggcgcggcaggaagcatcgtcaacctgtttgccgacaaacgcctcaatacgcacaccgccatacggggcggaatcctgcaagaagaatgccgcgccgtattaaaccgttttttccaaaacaaaagaaaaggttga

SEQ ID NO: 60121 - DNA, 129 bp, Neisseria meningitidis; identical to SEQ ID NO: 43085

SEQ ID NO: 60122 - DNA, 549 bp, Neisseria meningitidis; identical to SEQ ID NO: 37155

SEQ ID NO: 60123 - DNA, 558 bp, Neisseria meningitidis
ttgatgaacaatatgtttgccgcaaaattgtccaaactggtttataccgcttccgaccatcctgattccctgtcggagatggaggagtttgaccgcctgattctgctgatacgcaaactgtatcaaatattggacgggcaacatatcctctccagagtaacggtttgccttcaccaccaaaaccggcgcgacctgattgccttggataaagcggctgccggttgcgattcggcaatgttgcgcgcccaacgttggctcatctacacgcaaattgcggaacgccttgccgggtcgggcggcggtttcacggttacggtagaaagcgtgtccgccgcctgtccggagcttgaaggacgctatctcgagcttgtccgccgcgccgccgtctctttcggtttcacgcaaggatgggaaaatccggcaggcgggcaggaaaaaacacaagccgtcccggatgccgcatcgggtcattccgtcagaaaaccaatcaaaatcaatatagaagcgagagtggaacgctatccggcatactgcccgaccgtcgccctaaaagtatag

SEQ ID NO: 60124 - DNA, 507 bp, Neisseria meningitidis; identical to SEQ ID NO: 44054

SEQ ID NO: 60125 - DNA, 714 bp, Neisseria meningitidis
atgatggtttatataatgaatgccttcgatataaagtcgacaaagatggacgtattgtctatatctttgcatacatcagacttgtttgatttggaagatgtgctggtcaaattgggcaagaagtttcaagagtctggtgttgttccatttgttctggatgttcaagagtttgattatcccgagtctttggatcttgctgcattggtttcgttgttttcaaggcatggtatgcaaattttgggtctgaagcattctgatgaacgttgggctgctgcggctatgaagtatcatttgctgttttgtctgtctcattcggaaaatgttaaagaactgggtcaggttgaggtgcagaaaacggaggatggtcagaaagcaaggaaaacagtattgattacatcccctgtccgtaccggtcagcaggtttatgccgaagatggcgatttgattgttacgggggcggttagccagggggcagaattgattgcggatggcaatatacatatttatgcgccgatgagggggcgtgctttggccggcgccaagggtgatacttctgcccgcatatttatccactccatgcaggcagaactggtttctgtggcgggtatttaccgtaattttgaacaggatttgccggaccatctgcacaagcagccggtacagatattgttgcaggataaccgattggttatcagtgcaattggctcagagtaa

SEQ ID NO: 60126 - DNA, 279 bp, Neisseria meningitidis; identical to SEQ ID NO: 37183

SEQ ID NO: 60127 - DNA, 324 bp, Neisseria meningitidis; identical to SEQ ID NO: 43376

SEQ ID NO: 60128 - DNA, 1365 bp, Neisseria meningitidis
atgcagcatctcactgaaagaatgacgcaaattgccaagctgctgaattcttccgcaaacaatcctgatatagacattcccgattttcttactgaaatcaaagattattcagaattttccgtgacagatgaaaatggaacctacctgcattgggacaaattccgccggattcacacggaagatacgcggatgaaatggcgcgccgttaaggaaagccgcaaaaaaatccaaaaaccaattgatttcccgtttgaacatcagttttggttctgcattcccgactctttgcaggcacggcttcatttgattgacaaaagctgcggcagttctatcggcacgtctagcttgggtggcttcggcagaagcgagcaaaacagattcttgctcaagtctctgattatggaagaagcgattacatccgcccaactggaaggtgcggctaccacgcgtaaagtggccaaggatatgctcaaatcgcagcgtaaacccaaaacaaaagacgaaatcatgatagtgaacaactatcacttgatgaaaaaagcggtagaattgaaaaatacgccgttaagtgttgaaatgattttggatttgcaccgcattgctaccagtaacgctattgaaaacaaggccgagcccggacaattcaggcaggatgacgaaatctttatcgccgatatcaatggtaacagcctgtatcaaccaccgccgcacggacaggttcatacgctgatggaagaggtgtgtgcgtttgccaataatacctatgacggcgtggaaaatccgtttatccatccggttgtccaagctattatcttgcatttcctcatcggctacatccacccatttggtgatggcaacgggcggacagcgcgggctttgttctattggtttatgctcaaaaacggctactggctatttgaatacatatccatcagccgtcttctgaaaaacgctcctgcccaatacgccaaatcctatttgtatgcggaaactgacgatttagatttaacctatttcatctattaccaatgcgatattatcaagcgggcggttgccgatttggagcactacatttccgacaaacaaaaacaccaacaggaattcaaagcagcgattgcccaatatactgaaaagataggaaagttgaaccaacggcaaattggtatcctgcaaaaagcagtggaagaaagcggaaaaatctttactgcacaagaaattgccaaccaatacggcatctccctgaatactgcccgtagcgatttgagtaaactgggagaatatagattcctagtgccgttcaaatcaggaaatgctttagagtatgttgctcctcaggatttattggaaaggttagaaaaaaaatag

SEQ ID NO: 60129 - DNA, 1112 bp, Neisseria meningitidis
atgagcaccttcttccggcaaaccgcacaagccataattgccaaacacatcgaccgtttcccgctattgaagttggaccgggtgattgattggcagccgatcgaaccatacctgaaccgtcaaaaacccgttacctcagagattaccgcggccgtcccgcctatcccctgttgtccatgttcaaagccgtcctgctcggacaatggcacagcctctccgatcccgaactcgaacacagcctcattacccgcatcgacttcaacctgttttgccgtttcgacgaactgagcatccccgattacagcaccttatgccgctaccgcaaccggctggcgcaagacaataccctgtctgaactgttggaactgattaaccgccaactgaccgaaaaaggtttaaaaatagagaaagcatccgctgccgtcgttgacgccaccattattcagaccgccggcagcaaacagcgtcaggccatagaagttgacgaagaaggacaaatcagcggtcaaaccacaccgagtaaggacaaagatgcccgttggataaagaaaaacggcctctacaaactcggttacaaacaacatacccgtaccgatgaggaaggctatatcaagaaactgcacattacccccgccaatgcccatgagtgcaaacacctgtcgccgttgttggaaggactgcccaaaggtacgaccgtctatgccgacaaaggctacgacagtgcggaaaaccggcaacatctggaagaacatcagttgctggacggcattatgcgcaaagcctgccgcaaccgtccgctgacggaaacgcaaaccaaacgcaaccggtatttgtcgaagacccgttatagtggattaaatttaaatcaggacaaggcgacgaagcagcagacagtacaaatagtacggcaaggcgaggcaacgccgtactggtttaaatttaatccactatatgtggtcgaacagagcttcggtacgctgcaccgtaaattccgctatgcgcgggcagcctatttcggactgattaaagtgagtgcgcaaagccacctgaaggcgatgtgtttgaacctgttgaaagccgccaacaggctaagtgcgcccgctgccgcctaa

SEQ ID NO: 60130 - DNA, 540 bp, Neisseria meningitidis; identical to SEQ ID NO: 36581

SEQ ID NO: 60131 - DNA, 1545 bp, Neisseria meningitidis
atgaatatggtttccaaactggacaaatactggcagcaccccgccctctactggcctttgctcatcctttttgccgccgccaccccctttaccttcgcaccctactaccacttttggctgatgcccttgattttcggtgccttcgtccgcctcatcgaactgcgtccgcgttttgctgtctcttccgcctacctgttcggcctgaccgcatacacgacacagttctactggatacacaccgccctgcacgacgtttccggcctgcccgacctctatgccgtaccgctgaccttcctactccccgcctaccttgccctttatccggcactgtgtttctggctgtggaaaaaatttaccctgcctcggggcataaaaatcggtttggtactgcccatcctgtggacgctgaccgagtttgcccgcgaacgtttcctgaccggattcggctggggcgcaatcggctactcccaaatcaccccggacagcccgctcgccggctttgccccattgggcggcatccacatggttacactggcaaccgcctttctcggtgtctggctggttttggcgagtaataacaccgcacgttcgggcaaacgcctgcttccgattatcctgattgccgccctgcttgccgcaggctacaccgcccgacaaaccgacttcacccgccccgacggcagccgcagcaccgtcgccctgcttcaaggcaacatcgaccaaaccctcaaatggcgtgaagaccaagttatcccgaccatacagaaatattacgaacaagtcggcaaaaccaccgccgacatcgtcatcctgcccgaaaccgccatccccgttatgcgccaaaacctgccggaaaacatactggcgaaatttgccgaacaggcgcaaaacaacggcagcgcgctcgccgtcggcatcagccaatacacttcggacggcaacggttacgaaaacgccgtcatcaacctgaccggttatcaggaaaacaatcaggacggtatcccctactacgccaaaaaccacctcgtccccttcggcgaatacaaaccgctgcctttcctgaccacgccgctttacaaaatgatggatatgcccctttccgacttccgcaaaggcggcggcaagcaatccgccctgctgatgaaaaaccaaaaaatcgccttcaacatctgttacgaagacggattcggcgacgaactgattgccgccgcaaaagatgccaccctgcttgccaatgccagcaatatggcgtggtacggaaaatccaacgccatgtaccagcacctccaacaatcgcaggcgcgggctatggaactcggacgctatatggtccgcgccaccaacaccggcgcaaccgccatcatctcccccaaaggcaacatcatcgcccaagcccaacccgatacggaaaccgtattggaaggacacatcaaaggctatgtcggcgaaacgccctatatgaaaaccggcagttcatggtggttgatgggcatattggccctagccgcactgattcttttcatcttccgaaacaaagaacactga

SEQ ID NO: 60132 - DNA, 549 bp, Neisseria meningitidis; identical to SEQ ID NO: 39944

SEQ ID NO: 60133 - DNA, 1437 bp, Neisseria meningitidis
ttggaaaactcattaattatcggtctggcactggcggtattgctggtgcttttggttatgcgtgcgaagcagggtaagaaaacaccgaagcgcaaatcccaaggtgtcggcaatacgcaggggcagccgcccggaagcaatgattcggactgggtcgatcagattggacaatcggtttcagacggcacgcaacccgactggtcttggaacgaaagtgccgagaccgcatccgccgccgtatccgcgcaagaagtcgatccgcttacggagtatcaggtttataagcaattcggttatcagggcaaggctgccgaatctttggctgcctatctggacggcattccggatggtgaagcgaaacctgaaaaccttatccgcgagctgctcgatatcaatctcgaagtgggggatgtcgatgttttggcagacaatctgcaaaaatacggcaaactgattccttccgaacttttggcaaaatatatcgaacaggcattacagcgcgattcaaaccatttgcgtatccgcgtcttggcggaagaaggtttgggatggggtactcaggagattgaaaaacgtgcggaaggcggttctgcgacggcagcttccgcatcgcccccgccggatgccggcggtaaggcttatgaagccgaagaaatcaagcgcatcccgattgtgcggggcaaaaaagacgtgtccggaatcagtcaagaggaaatcggtgcgattgccggtttggtccgtgccgatcaaggtgcgaaaatccttaaagacaaagtcagctatgaaacggcatcgaaacaatacgaccgtgccatccaaacttccgaaaaacctgcaaacctgattatcgatgcgttgaaactcgattaccaatacgcggacatagaccgttttgccggacatttgtggaaactttaccaaacgttgggcaactacggcaggcaggttaaagagcggatgctggggtgggggtacagcctgggttaccatgaggttttcgatgatttggaaaaagggccgaacgaccggcaaatcaaagacatcggtatggggcacgggtatctgccgaaaaatatacagaaattcaaatcgcaacatcgggatttggtgcttcaagattcttcgttgatcaacaccggttcgtctccggcagacgatgcggttaaggaagtagagtcgttgctgatgtatggtcagattgaagcggcaatggatgtgttggagcaggcggtattgaaatatcccgacgagtcccagctttatattacgttgatcgatatttatgaacgtactgaagattgggataggttggggcagtttttaagggtattgagggaacgtgcggacaggcttcctgaagaggtcgttatgctgatgagccggctgctgcagcgtatgaatcaaaatattaaaaaaataaaacggtacggaaaataa

SEQ ID NO: 60134 - DNA, 1359 bp, Neisseria meningitidis
atgaaaccactggatctaaatttcatctgccaagccctcaagcttccgatgccgtctgaaagcaaactcgtgtcgcgcatcgtaaccgacagccgcgacatccgcgcgggcgatgtgtttttcgcattggcgggcgggcggtttgacgcgcatgattttgttgaagacgtattggctgcgggtgcggcggcggttgtggtttcgcgcgaagattgcgcgtctttgaaagacgcgttgaaagttgatgacacgcttgccgcattgcaaacgctggcaaaggcgtggcgtgaaaacgtggatccgtttgtgttcggcattaccggttcggtcggcaagacgacggtgaaggaaatgttggctgcggtattgcgccgccgtttcggcgataatgccgttttggcgacggcaggcaacttcaacaaccacatcggattgccgttgactttgttgaaattaaacgaaaaacaccgctatgccgtgattgaaatgggtatgaaccattttggcgaactggcggttttgacgcaaatcgccaaacccgatgccgccttggttaacaacgccctgcgtgcccatgtcggctgcggtttcgacggagtgggcgatattgccaaagcgaaaagcgagatttatcaaggcttatgttcagacggcatggcactgattcctcaagaagatgccaatatggctgtcttcaaaacggcaacgcttaatttgaatacgcgcactttcggcgtcgatagcggcgatgtccacgcggaaaatatcgtgctgaaaccgttgtcgtgcgaatttgatttggtgtgcggcgatgagcgcgccgccgtggtgctgcctgttcccggccgccacaatgtccacaacgccgccgctgccgccgcgctggctttggctgcgggtttgagtttgaacgatgtggcggaaggtttgcaaggcttcagcaacatcaaaggccgtctgaacgtcaaatccggcatcaaaggcgcaaccctgattgacgatacctacaacgcgaaccccgacagtatgaaagccgcgattgacgtgttggcgcgtatgcctgcgccgcgtattttcgtgatgggcgatatgggcgaactgggtgaggacgaagccgccgccatgcacgccgaagtcggcgcgtatgctcgcgaccaaggcatcgaagcggcttattttgtcggcgacaacagcgtcgaagcggcggaaaaatttggcgcggacggtttgtggttcgccgccaaagacccgttgattcaagtgttgcgccacgatttgcccgaacgcgccaccgtgttggtgaaaggttcgcgctttatgcagatggaagaagtggtcgaggcattggaggataagtga

SEQ ID NO: 60135 - DNA, 582 bp, Neisseria meningitidis; identical to SEQ ID NO: 39957

SEQ ID NO: 60136 - DNA, 828 bp, Neisseria meningitidis
ttgcggtgttttatggaacgcattgatttagcattgaatttagttaaagagagaagccgacttggatactctcgaaagaattttgctgagcaaactggatgcagtgcagaaagtttgagactgtatgaaagcgggcaggtcaacattcctgcggactttttacttgctgctgtccaattaggggtggatattcaatttgtctttacaggcattcattcggcaaatttaaatgctgtttcagacgaccttaataaaaaattggacgacgctattggcaaatcaaacgttgagaatcagattaacggcaacgtcagtaacgctgttatcgcctcatctggttcggttgttcatcaaattaatacccaaaatcacgtcatcagaacccgtgtcgattcaaaacccggcaaggaacatataacgcttgagcaagcttcaaagctgcaacaacttgttaaacaagttgccgcagcagaagagattgccaaacggtcgccaaaatcaatccgtgcaatttgggctagtctgaatgctcactgtaaagttccaagttacaaactaatcgcattgagcgattacgacaaagcagaaacttatctcagaaaatggctgggtaggttgagcaatacagcaacatcaaagaacaacgatcccgactggcgaaaaaagaaatacgcttatatcaaattaaatgtaaaacaacttgagcttgaagattggttgaaaagttacctcgaaaaaaatttcgcagtagaaagcctgactgaattaagtaatgacgatttgcaaaaaacatatgcagcagtatcgactaaaaaacggaaaaaatag

SEQ ID NO: 60137 - DNA, 499 bp, Neisseria meningitidis
atgagaaaaagtcgtctaagccagtataaacaaaataaactcattgaactgtttgtcacaggtgtaactgcaagaacggcagcagagttagtaggcgttaataaaaataccgcagcctattattttcatcgtttacgattacttatttatcaaaacagtccgcatttggaaatgtttgatggcgaagtagaagcagatgaaagttattttggcggacaacgcaaaggcaaacgcggtcgcggtgctgccggtaaagtcgccgtattcggtcttttgaagcgaaatggtaaggtttatacggttacagtaccgaattcaaaccgctactttatttcctattatccgtgaacaagtgaaacctgacagcattgtttatacggattgttatcgtagctatgatgtattagatgtgcgcgaatttagccattttagcttcgctgaaacttcgttttcgtatcaatcacagcacacattttgccgaacgacaaaaccatattaa

SEQ ID NO: 60138 - DNA, 393 bp, Neisseria meningitidis
atgagtatgcatgatcctatttccgatatgttgactcgtatccgcaatgcgcaacgtgctaataaagcagcagttgcaatgccttcttcaaaattaaagtgtgctattgcaaaggtattgaaagaagaaggatatattgaggacttcgcagtttcatctgacgtaaagtctatattggaaattcaattaaaatactatgcaggtcgtcctgtaattgaacaaatcaagcgtgtatctcgccctggtttgcgtatttataaagcgtctagtgagattccaagtgttatgaatggcttgggtattgctattgttagtacttctaaaggtgtaatgactgatcgtaaagcacgttctcaaggtgttggtggtgagttgttatgcattgtagcctag

SEQ ID NO: 60139 - DNA, 492 bp, Neisseria meningitidis
atgcgtgcggtcatacagaaaacggtaggtgcaaaggtggatgtcgtgtccgaaaacggcacggaaacctgcggcaaaatcgacggcggattcgtcgtactgctcggtgtaacgcatagcgacatagaaaaagatgcacgctatgtcgccgacaaaatcgcccatttgcgcgtgtttgaagacgaagcgggcaagttgaacctgtctttgaaggatgtcgggggatccgtgctgctggtgtcgcagtttacgctttatgccgatgcggcaagcggccggcggccttcgttttcccaagctgcacctgcagaacaggcgcagcagctttacctgcgaacggcggaactgttgcgcggacacgggattcatgtcgaaacagggcgtttccgcacgcatatgcaggtgtcgctctgtaacgacgggccggtaaccatactgctggactctttcatgacgcggatttccccaaaaatgaaggttgttccggattga

SEQ ID NO: 60140 - DNA, 621 bp, Neisseria meningitidis; identical to SEQ ID NO: 37371

SEQ ID NO: 60141 - DNA, 666 bp, Neisseria meningitidis; identical to SEQ ID NO: 39840

SEQ ID NO: 60142 - DNA, 1467 bp, Neisseria meningitidis
atggttattttttatttttgtgggaagacatttatgcctgcacgaaacagatggatgctgctgctgcctttattggcaagcgcggcatatgccgaagaaacaccgcgcgaaccggatttgagaagccgtcccgagttcaggcttcatgaagcggaggtcaaaccaatcgacagggagaaggtaccggggcaggtgcgggaaaaaggaaaagttttgcagattgacggagaaaccctgctgaaaaatcccgaattgttgtcccgcgcgatgtattccgcagtggtctcaaacaatattgccggtatccgcgttattttgccgatttacctacaacaggcgcagcaggataagatgttggcactttatgcacaagggattttggcgcaggcagacggtagggtgaaggaggcgatttcccattaccgggaattgattgccgcccaacccgacgcgcccgccgtccgtatgcgtttggcggcggcattgtttgacaacaggcagaacgaggcggcggcagaccagttcgaccgcctgaaggcggaaaacctgccgccgcagctgatggagcaggtcgagctgtaccgcaaggcattgcgcgaacgcgatgcgtggaaggtaaatggcggcttcagcgtcacccgcgaacacaatatcaaccaagccccgaaacggcagcagtacggcaaatggactttcccgaaacaggtggacggcacggcggtcaattaccggctcggcgcggagaaaaaatggtcgctgaaaaacggctggtacacgacggcgggcggcgacgtgtccggcagggtttatccggggaataagaaattcaacgatatgacggcaggcgtttccggcggcatcggttttgccgaccggcgcaaagatgccgggctggcagtgttccacgaacgccgcacctacggcaacgacgcttattcttacaccaacggcgcacgcctttatttcaaccgttggcaaaccccgaaatggcaaacgttgtcttcggcggagtgggggcgtttgaagaatacgcgccgggcgcgttccgacaatacccatttgcaaatttccaattcgctggtgttttaccggaatgcgcgccaatattggatgggcggtttggatttttaccgcgagcgcaaccccgccgaccggggcgacaatttcaaccgttacggcctgcgctttgcctgggggcaggaatggggcggcagcggcctgtcttcgctgttgcgcctcggcgcggcgaaacggcattatgaaaaacccggctttttcagcggttttaaaggggaaaggcgcagggataaagaattgaacacatccttgagcctttggcaccgggcattgcatttcaaaggcatcacgccgcgcctgacgttgtcgcaccgcgaaacgcggagtaacgatgtgttcaacgaatacgagaaaaatcgggcgtttgtcgagtttaataaaacgttctga

SEQ ID NO: 60143 - DNA, 144 bp, Neisseria meningitidis; identical to SEQ ID NO: 39918

SEQ ID NO: 60144 - DNA, 363 bp, Neisseria meningitidis; identical to SEQ ID NO: 43023

SEQ ID NO: 60145 - DNA, 1089 bp, Neisseria meningitidis; identical to SEQ ID NO: 50476

SEQ ID NO: 60146 - DNA, 546 bp, Neisseria meningitidis; identical to SEQ ID NO: 39943

SEQ ID NO: 60147 - DNA, 552 bp, Neisseria meningitidis
atgaaggttttgaacggttggtcggacaggaagatgtggcgggttttaagtgctttgccgataggcgtggtgttttttgatttgatctacggttttgtgttgaacgtgttgcagggttttgatttgcagcgtgccgtgccggattcggaaggcgtgttggcggttacgcccgatattgcgttcaacagtttgcagattgtcgccaacggcggtatggcggcggtggtctgtttcgggttggcggttgtgtttctgctcaaccgttcggtgcggcggcggcaggtcttggaaatcggggtgttccggatgttggggctggtggcggtattggcgttcagcgcgccttcgctgtgggagtgggcgaacgcgctgccgctgctgctgaatggcgcggacgtggtcaatacgggcaatgcgcgttatgtgctgacggctttgtgtatgccctttccggcggtgtcgtgcgtcatcgggctggtggggcggttcaggcttcagacggcatcgggcagggcggcaaaggcagggggtgcgggcaaggcggacggatag

SEQ ID NO: 60148 - DNA, 1125 bp, Neisseria meningitidis
gtgtgcggattatgccataaaacggtgcccgccccaatcgcgggcgcgtccggagattggaaatcctgcttaaaaaatgtacaatgtcgcacttttttgaaacgcggacccattatgcacatcggcggctattttatcgacaaccccatcgcacttgcgccgatggcgggcattaccgacaaacccttccgccgcctttgccgcgagtttggcgcgggttgggcagtgtgcgaaatgctgaccagcgacccgacgctcagaaatactagaaaaaccttgcaccgcagcgattttgtcgatgaaggcggcatcgttgccgtgcagattgccggcagcgatccgcagcagatggcggatgcggcgcgttacaacgtcagcctcggggcgcagcttatcgacatcaatatgggctgtcccgccaaaaaagtgtgcaacgtccaagccggcagcgcgctgatgcagaacgagccgctggttgccgccattttggaagccgtcgtccgtgcggcaggcgtacccgttaccctcaaaacccgtttgggttggcacgacgaccatcaaaacctgcccgtcatcgccaaaatcgccgaagattgcggcatcgccgcccttgccgtccacggacgcacgcgtacgcaaatgtacaaaggcgaagcgcgttacgaactcatcgccgaaaccaaatgccgtctgaacatcccggtctgggtcaacggcgacattacttcgccgcaaaaagcccaagccgtcctcaaacaaaccgccgccgacggcattatgatagggcgcggcgcgcaaggcaggccgtggttcttccgcgatttgaaacattatgccgaacacggtgttttgccgcctgccttgagtttggcagaatgcgccgccgctattttgaaccacatccgcgccatacacgcgttttacggcgacaccgccggtgtgcgcatcgcacgcaaacacataggctggtacatcgacgaaatgcccgacggcgaacagacacgtcgtgaaatcaaccgcttggacagtgcggcggcgcaatacgacatgcttgcaggttatcttgaaagacttgccgaaaaaaccgacagttgggcgtgcgcctaccgcccaaatgccttctga

SEQ ID NO: 60149 - DNA, 924 bp, Neisseria meningitidis; identical to SEQ ID NO: 43972

SEQ ID NO: 60150 - DNA, 435 bp, Neisseria meningitidis
atggaaaaattcaacaatattgcacaactgaaagacagcggtctgaaggttaccggcccgcgtttgaagattttggatttgttcgagacgcatgcggaagagcatttgagtgcggaagatgtgtaccgcattttgttggaagagggtgtggaaatcggtgtggcgacgatttaccgtgtgctgacccagtttgagcaggcgggtattctgcaacgccatcattttgaaacgggcaaggcggtttatgagttggacaaaggcgaccaccatgaccatatcgtctgcgtgaagtgcggcgaggtaacggagttccacaatcccgaaatcgaagccctgcaagacaaaatcgccgaggaaaacggctaccgcatcgtcgatcacgcgctttatatgtacggcgtgtgcagcgactgtcaggccaagggcaaacgttaa

SEQ ID NO: 60151 - DNA, 216 bp, Neisseria meningitidis; identical to SEQ ID NO: 43890

SEQ ID NO: 60152 - DNA, 408 bp, Neisseria meningitidis; identical to SEQ ID NO: 54717

SEQ ID NO: 60153 - DNA, 318 bp, Neisseria meningitidis; identical to SEQ ID NO: 41968

SEQ ID NO: 60154 - DNA, 744 bp, Neisseria meningitidis; identical to SEQ ID NO: 51955

SEQ ID NO: 60155 - DNA, 981 bp, Neisseria meningitidis
atggcaatggcagaaaacggaaaatatctcgactgggcacgcgaagtgttgcacgccgaagcggaaggcttgcgcgaaattgcagcggaattggacaaaaacttcgtccttgcggcagacgcgttgttgcactgcaagggcagggtcgttatcacgggcatgggcaagtcgggacatatcgggcgcaaaatggcggcaactatggcctcgaccggcacgcctgcgtttttcgtccaccctgcggaagcggcacacggcgatttgggtatgattgtggacaacgacgtggtcgtcgcgatttccaattccggcgaaagcgacgaaatcgccgccatcatccccgcactcaaacgcaaagacatcacgcttgtctgcatcaccgcccgccccgattcaaccatggcgcgccatgccgacatccacatcacggcgtcggtttccaaagaagcctgcccgctggggcttgccccgaccaccagcaccaccgccgtcatggctttgggcgatgcgttggcggtcgtcctgctgcgcgcacgcgcgttcacgcccgacgatttcgccttgagccatcctgccggcagcctcggcaaacgcctacttttgcgcgttgccgacattatgcacaaaggcggcggcctgcctgccgtccgactcggcacgcccttgaaagaagccatcgtcagcatgagtgaaaaagggctgggcatgttggcggtaacggacgggcaaggccgtctgaaaggcgtattcaccgacggcgatttgcgccgcctgtttcaagaatgcgacaattttaccggtctttcgatagacgaagtcatgcatacgcatcctaaaaccatctccgccgaacgcctcgccaccgaagccctgaaagtcatgcaggcaaaccatgtgaacgggcttctggttaccgatgcagatggcgtgctgatcggcgcgctgaatatgcacgacctgctggcggcacggattgtataa

SEQ ID NO: 60156 - DNA, 336 bp, Neisseria meningitidis; identical to SEQ ID NO: 43327

SEQ ID NO: 60157 - DNA, 495 bp, Neisseria meningitidis; identical to SEQ ID NO: 43908

SEQ ID NO: 60158 - DNA, 732 bp, Neisseria meningitidis; identical to SEQ ID NO: 51962

SEQ ID NO: 60159 - DNA, 822 bp, Neisseria meningitidis
atgacgtttgataaatggttgggcttgtcaaaactgcctaaaaatgaagcaagaatgctgctgcaatatgtttcggaatatacgcgcgtgcagttgttgacgcggggcggggaagaaatgccggacgaagtccgacagcgggcggacaggctggcgcaacgccgtctgaacggcgagccggttgcctatattttaggtgtgcgcgaattttatggcagacgctttacagtcaatccgagcgtgctgattccgcgccccgaaaccgaacatttggtcgaagccgtattggcgcgcctgcccgaaaacgggcgcgtgtgggatttggggacgggcagcggcgcggttgccgtaaccgtcgcgctcgaacgccccgatgcgtttgtgcgcgcatccgacatcagcccgcccgcccttgaaacggcgcggaaaaatgcggcggatttgggcgcgcgggtcgaatttgcacacggttcgtggttcgacaccgatatgccgtctgaagggaaatgggacatcatcgtgtccaacccgccctatatcgaaaacggcgataaacatttgttgcaaggcgatttgcggtttgagccgcaaatcgcgctgaccgacttttcagacggcctaagctgcatccgcaccttggcgcaaggcgcgcccgaccgtttggcggaaggcggttttttgttgttggaacacggtttcgatcagggcgcggcggtgcgcggcgtgttggcggagaatggtttttcaggagtggaaaccctgccggacttggcgggtttggacagggttacgctggggaagtatatgaagcatttgaaataa

SEQ ID NO: 60160 - DNA, 375 bp, Neisseria meningitidis; identical to SEQ ID NO: 39975

SEQ ID NO: 60161 - DNA, 300 bp, Neisseria meningitidis; identical to SEQ ID NO: 43921

SEQ ID NO: 60162 - DNA, 300 bp, Neisseria meningitidis
atgaagaaaatgttcgtgctgttctgtatgctgttctcctgcgccttctcccttgcggcggtaaacatcaatgcggcttcgcagcaggagttggaggcgctgccgggcataggcccggcgaaggcgaaggccattgcggaataccgtgcgcaaaacggtgcgttcaagtctgtggacgatttgaccaaggtaaagggcatcggccctgcggtgctggcgaagctgaaggatcaggcttcggtcggcgcgcccgcaccaaaaggcccagccaaaccagtgctgcccgcggataaaaaataa

SEQ ID NO: 60163 - DNA, 1266 bp, Neisseria meningitidis
atgtcccacttattccgaaaagaagtctttgtagcccaacaaaataagtggacaggtcaggttatcttgacccgtccattctcttttttatttctgactttttgcgcttttctcattgctctgtgtatcattatctttttgatttttggtagctataccaataaaacaaccgttgaaggtcaattacttccaattatgggggtggttcgtgtttactcttccgatatcggcacgattacgcataaatttgttgaagatggtaactttgtcaaagctggcgaaccattgttcaaactttccacatcgcgttttggcgaaaaaggaaacgtacaagccaaattggcagcagaagccaaccttaaaaaaactttggcattacaagaattggaacgtttaaagcgcattcatcaaaatgagcaaaaaaatgttcataacaacattcatcgtttaaacaatcaattagagaatattaaacagcaaattacagggcaaaatcgtcaaattcgtttagcggaaaaaacccttaacaagaacaagtttttagccagtcaaggcgcagtatcccaacaagataagatgaccgccgaaagccatttattggaacaacgctcacgtttggagagcctaaaacgtgaacaaaataatgcaatcagggaacttgatgaacagaaaattacattaagcagcctgcctgaacgccataaaaccgaattgagccaactcaaccgtgcgattacggaaatgaaccaagaaattttggattttgatttgaaatccgaacaaaccatacgagctagtaaatcaggttatatatcaacaattaatgttgatatagggcaacaagttgaaccgtctaaattgctgttaagcattgtccctgaacaaactgaattggtcgccaatctttacatacccagtaaagctgttggttttattaaaccgaaagataaagttgttttacgttaccaagcgtacccttaccaaaaatttggacatgccacaggagaaattatttcagttgccagaactgctctcggtaaacaagagctatcaggtttaggtatcattttcactaacccaaccttattaaatgaacctgcctatcttgtgaaagttaaattggaaaaacaaacgattaaagcatacggagaaaacaagccgcttcaaattggcatgattttagaagcagatattctccatgaacgaaaaaaattgtacgaatgggtacttgacccactttacagcatttcaggaaaaatcaattaa

SEQ ID NO: 60164 - DNA, 927 bp, Neisseria meningitidis
atgaaagtcatcttcgccggcacgcccgattttgccgccgccgccttaagagccgttgccgccgccggttttgaaattccgctggtgctgacccagcccgaccgtccgaaagggcgcggtatgcaactgactgccccgcccgtcaaacaagccgcgctggaactcggtttgcgcgtcgaacagcccgaaaagctgcgcaacaacgccgaagccctgcaaatgctcaaagaggtcgaggcagacgtaatggtggttgccgcctacggtttgattctgccgcaagacgtgttggatgtgccgaaacacggctgcctcaatatccacgcctcgctgctgccccgttggcgcggcgcggcgccgattcagcgcgcgattgaggccggcgatgccgaaaccggcgtgtgcattatgcagatggacatcggtttggacaccggtgatgtggtcagcgaacaccgctacgccatccgacctaccgataccgccaacgaagtccacgacgcgctgatggaaatcggtgcggcggcggttgttgccgatttgcaacagcttcaaagcaaaggccgtctgaacgcggtcaaacagcccgaagaaggtgttacttacgcccaaaaactaagcaaagaagaagcgcgtatcgattggagcgaaagcgcggcggttatcgaacgcaaaatccgcgccttcaaccccgtgcctgccgcgtgggttgagtatcagggcaagccgatgaaaatccggcgcgccgaagtggtggcgcaacaaggcacggcaggcgaagtgttgtcctgttcggcggacggtttggtcgttgcctgcggcgaaaacgcgctgaagattaccgaattgcagcctgccggcggcaaacgtatgaatatcgcggcgtttgcagcaggacggcatatcgaagcagggacgaagctgtaa

SEQ ID NO: 60165 - DNA, 321 bp, Neisseria meningitidis; identical to SEQ ID NO: 43935

SEQ ID NO: 60166 - DNA, 873 bp, Neisseria meningitidis; identical to SEQ ID NO: 37718

SEQ ID NO: 60167 - DNA, 360 bp, Neisseria meningitidis; identical to SEQ ID NO: 51146

SEQ ID NO: 60168 - DNA, 1452 bp, Neisseria meningitidis; identical to SEQ ID NO: 45985

SEQ ID NO: 60169 - DNA, 2025 bp, Neisseria meningitidis; identical to SEQ ID NO: 43581

SEQ ID NO: 60170 - DNA, 1092 bp, Neisseria meningitidis
atgatgaaaatcaaagccctgatgattgccgccgcattgctggcagcagccgatgtccacgccgcaccgcaaaaggcaaaaaccgcatccgccaaagctgccaaagctgccaaagttgccaaagttgccaaagttgccaaagttgccaaagttgccaaagttgccaaagttgccaaagttgccaaagttgccaaagttgccgccacggcgcaaaaagaagccgcacccgcacaacagcagggcggtatccgcttttcagacggcattgccgccgttgccgacaacgaagtcatcacgcgccgccggcttgccgaagccgttgccgaagccaaagccaacctgcccaaagacgcgcagataagcgaatccgagctgtcccgacaggtgctgatgcagcttgtcaaccaatccctgattgtacaggcgggcaaacgccgcaacattcaagcaagcgaagcggaaatcgatgccgtcgtcgcaaaaaatcccgccctcaaaaacctcagccccgcccaacgccgcgattttgccgacaacatcattgccgaaaaagtccgccagcaggcagtgatgcagaacagccgcgtgagcgaagctgaaatcgatgccttcctcgagcaggcgcaaaaacaaggcatcaccctgcccgaaggcgcaccgttgcgccaataccgcgcccaacacatcctgattaaagccgacagcgaaaacgccgccgtcggcgcggaaagcaccatccgcaaaatctacggagaggcccgcagcggcacagacttttccagcctggcgcgccaatattcgcaagacgcgagcgcgggcaacggcggagatttgggctggtttgccgacggcgtgatggttcccgcctttgaagaagccgtccacgcgctcaaacccggacaggtcggcgcgcccgtccgcacccaattcggctggcatatcatcaaattgaacgaagtgcgcgatgccggcacacctcaggaacgtatccgcaattccgtgcggcaatacatcttccaacaaaaagccgaacaggcaaccgtcaacctgttgcgtgacctgcattccggcgcgtatgtcgacatccgctaa

SEQ ID NO: 60171 - DNA, 2379 bp, Neisseria meningitidis
gtgctggcattgggcctctgcttcggcacgcattgcgccgccgccgatgccgttgcggcggaggaaacggacaatccgaccgccggaggaagcgttcggagcgtgtccgaacccatacagcctaccagcctgagcctcggttcgacctgcctgttttgcagtaacgaaagcggcagccccgagagaaccgaagccgccgtccgaggcagcggcgaagcatccatccccgaagactatacgcgcattgttgccgacaaggtggaaggacagtcgcaggtgcaggtgcgtgccgaaggcaacgtcgtcgtcgaacgcaaccggacgaccctcaataccgattgggcggattacgaccagtcgggcgacaccgttaccgcaggcgaccggttcgccctccaacaggacggtacgctgattcggggcgaaaccctgacctacaatctcgagcagcagaccggggaagcgcacaacgtccgtatggaaaccgaacaaggcggacggcggctgcaaagcgtcagccgcaccgccgaaatgttgggcgaagggcattacaaactgacggaaacccaattcaacacctgttccgccggcgatgccggctggtatgtcaaggccgcttccgtcgaagccgatcgggaaaaaggcataggcgttgccaaacacgccgccttcgtgttcggcggcgttccccttttctatacgccttgggcggacttcccgcttgacggcaaccgcaaaagcggcctgcttgttccctcactgtccgccggttcggacggcgtttccctttccgttccctattatttcaaccttgcccccaatctcgatgccacgttcgcgcccggcgtgatcggcgaacgcggcgcggtctttgacgggcaggtacgctacctgcggccggattatgccggccagtccgacctgacctggctgccgcacgacaaaaaaagcggcaggaataaccgctatcaggcgaaatggcagcaccggcacgacatttccgacacgcttcaggcgggtgtcgatttcaaccaagtctccgacagcggctactaccgcgacttttacggcaacaaagaaatcgccggcaacgtcaacctcaaccgccgtgtatggctggattatggcggcagggcggcgggcggcagcctgaatgccggcctttcggttctgaaataccagacgctggcaaaccaaagcggctacaaagacaaaccgtatgccctgatgccgcgcctttccgccgattggcgcaaaaacaccggcagggcgcaaatcggcgtgtccgcccaatttacccgcttcagccacgacagccgccaagacggcagccgcctcgtcgtctatcccgacatcaaatgggatttcagcaacagctggggttacgtccgtcccaaactcggactgcacgccacctattacagcctcaaccgcttcggcagccaagaagcccgacgcgtcagccgcactctgcccatcgtcaacatcgacagcggcatgaccttcgaacgcaatacgcggatgttcggcggcggagtcctgcaaaccctcgagccgcgcctgttctacaactatattcctgccaaatcccaaaacgacctgcccaatttcgattcgtcggaaagcagcttcggctacgggcagctttttcgtgaaaacctctattacggcaacgacaggattaacaccgcaaacagcctttccgccgccgtgcaaagccgtattttggacggcgcgacgggggaagagcgtttccgcgccggcatcgggcagaaattctacttcaaaaacgacgcagtcatgcttgacggcagtgtcggcaaaaaaccgcgcagccgttccgactgggtggcattcgcctccagcggcatcggcagccgcttcatcctcgacagcagcatccactacaaccaaaacgacaaacgcgccgagaactacgccgtcggtgcaagctaccgtcccgcacagggcaaagtgctgaacgcccgctacaaatacgggcgcaacgaaaaaatctacctgaagtccgacggttcctatttttacgacaaactcagccagctcgacctgtccgcacaatggccgctgacgcgcaacctgtcggccgtcgtccgttacaactacggttttgaagccaaaaaaccgatagaggtgctggcgggtgcggaatacaaaagcagttgcggctgctggggcgcgggcgtgtacgcccaacgctacgttaccggcgaaaacacctacaaaaacgctgtctttttctcacttcagttgaaagacctcagcagtgtcggcagaaaccccgcagacaggatggatgtcgccgttcccggctatatcaccgcccactctctttccgccggacgcaacaaacgaccctga

SEQ ID NO: 60172 - DNA, 645 bp, Neisseria meningitidis; identical to SEQ ID NO: 37921

SEQ ID NO: 60173 - DNA, 249 bp, Neisseria meningitidis; identical to SEQ ID NO: 43952

SEQ ID NO: 60174 - DNA, 195 bp, Neisseria meningitidis; identical to SEQ ID NO: 40091

SEQ ID NO: 60175 - DNA, 450 bp, Neisseria meningitidis; identical to SEQ ID NO: 36806

SEQ ID NO: 60176 - DNA, 651 bp, Neisseria meningitidis; identical to SEQ ID NO: 50221

SEQ ID NO: 60177 - DNA, 1164 bp, Neisseria meningitidis
atgtctgagcaacttcctgtggcagttgccactgaaaccaaagccgagcgtaaaaagccgaaaaagaaaagttggattaaaaagctaagccctttattttgggtaacggtgattatccctacggtaatttcgttggtgtatttcggcttcttcgcttccgatcgttttacgtcgcaatcgagctttgtggtgcgctcgcctaaaagccaatcttctctcaatggcctgggtgccattttgcagggcacaggttttgcccgtgcgcaagatgatatttacacggttggggagtatatgcgttcgcgctcgtctttggatgaactgcgtaaaatcttgccggtgcgtgaattttatgaaactaagggcgatgtatttagccgatttaatggttttggattccgtggtgaggaagaggctttttatcaatactataaagataagctgaacattaattttgatgcgatttcaggtatctctacgcttaacgttacatcatttgatgcgcttgaatctaagaaaatcaatgaagctttgttaaaacagggcgaagcattgattaaccagctgaatgatcgtgcgcgctctgatacagtgcgttatgcggaagaagtggtgaaaactgctgaagagcgtgtgaaagaaacttcacagaatctgactaattaccgcatttctaatggtgtttttgacttgaaagcgcaatcagaggtacagatgggcttggtatccaagctgcaagatgagttgattgtgattcaaacccagcttgatcaggtgaaagcagttacgccagaaaacccgcaaattccaggtttgcaggcacgtgagaagagcttacgcaaagaaattaaccaacagttacgtgccatttcgggtggtgggcaatcatcattatcaaatcaagcagctgattatcagcgcgtttatttggaaaatcaattagctgagcagcaattggcagcggccatgacttctctggaaagcgctaaagctgaagctgatcgccagcagctttatttagaagtgatttctcagccgagcctgccggatttggcgcatgaacctaaacggttatacaacattgttgccactctgattatcggcttgatggtttatggtattttgagcctgttgactgccagcattcgtgagcataaaaactga

SEQ ID NO: 60178 - DNA, 951 bp, Neisseria meningitidis; identical to SEQ ID NO: 50204

SEQ ID NO: 60179 - DNA, 969 bp, Neisseria meningitidis; identical to SEQ ID NO: 42633

SEQ ID NO: 60180 - DNA, 207 bp, Neisseria meningitidis; identical to SEQ ID NO: 39999

SEQ ID NO: 60181 - DNA, 1107 bp, Neisseria meningitidis; identical to SEQ ID NO: 43970

SEQ ID NO: 60182 - DNA, 543 bp, Neisseria meningitidis
atgaggacacaccgcaagacctgctctgcggtgtgttttgcttttcagacggcatcgaaacccgccgtttccatccgacatcccagcgaggacattatgagcctgaaaatccgccttaccgaagacatgaaaaccgcgatgcgcgccaaagaccaagtttccctcggcaccatccgcctcatcaacgccgccgtcaaacagtttgaagtggacgaacgcaccgaagccgacgatgccaaaatcaccgccatcctgaccaaaatggtcaaacagcgaaaagacagcgcgaaaatctacactgaagccggccgtcaggatttggcagacaaagaaaacgccgaaatcgaggtactgcaccgctaccttccccaaatgctctccgccggggaaatccgtactgcggtcgatgccgccgttgccgaaaccggcgcggcaggtatggcggatatgggcaaagtgatgggcgtattgaaaacccgacttgccggcaaagccgatatgggcgaagtcaacaaaatcctgaaagccgtgctgaccgcctga

SEQ ID NO: 60183 - DNA, 642 bp, Neisseria meningitidis; identical to SEQ ID NO: 51770

SEQ ID NO: 60184 - DNA, 468 bp, Neisseria meningitidis
atgcaaatagataatatatccgatgaacaggttgtgattgtcagaatgtcttgttatcttaagaaagatgaaatttttaagaatatagaaagatatggatatcagtcatcagatattaagaaaattagtcctccttttccattaaatattttacctgctcccaaaccttattatttttatctttatgatacccatttgaatcaaatttatgatttggcttggtcatgtaatgattttttaatgtttgaaatatttattttggatagggaaagcatcaaatatatagataaagataaactttttaaatctggagaaacactatattcgaattttaaatctattaaaaatcaatgcaaaaattattttttttgcggttttgattttgatgccccttactttaaaagcggtgtgagtcaggtggcagattataattttgttcctgatgcattttctttattctttatttaa

SEQ ID NO: 60185 - DNA, 315 bp, Neisseria meningitidis; identical to SEQ ID NO: 37950

SEQ ID NO: 60186 - DNA, 561 bp, Neisseria meningitidis; identical to SEQ ID NO: 46003

SEQ ID NO: 60187 - DNA, 405 bp, Neisseria meningitidis; identical to SEQ ID NO: 43748

SEQ ID NO: 60188 - DNA, 411 bp, Neisseria meningitidis; identical to SEQ ID NO: 42958

SEQ ID NO: 60189 - DNA, 438 bp, Neisseria meningitidis; identical to SEQ ID NO: 42580

SEQ ID NO: 60190 - DNA, 393 bp, Neisseria meningitidis; identical to SEQ ID NO: 43975

SEQ ID NO: 60191 - DNA, 561 bp, Neisseria meningitidis; identical to SEQ ID NO: 43976

SEQ ID NO: 60192 - DNA, 321 bp, Neisseria meningitidis; identical to SEQ ID NO: 52023

SEQ ID NO: 60193 - DNA, 1197 bp, Neisseria meningitidis
ttgtccacttttccgaaccacaccatgcacaccatttcctttccaaaccgcacccgactcaccgccctgccgcccctgtcgctttacatccacatcccgtggtgcatcaaaaaatgcccgtattgcgacttcaattcccacagcctgaaaaacggattgcccgaagccgcctatatcgacgcgctgctgaccgacttgcagctcgaattgcccaatatttggggcaggccggtggaaacgatctttttcggcggcggtacgcccagcctgtttcaggcggaatcgattgaccgtttattgagcggcgtgcgttcgctgttgcgcttgcagccggaagcggaaattaccttggaagccaatccggggacatttgaaatcgagaagtttcaaggatttaaagacgcaggcatcacgcggctttctattggtgtacagagtttcaacgacgatatgctctcaaggctggggcgcgtccacaacggcaaggaagccttaaccgctatcgataccgccttgaaattatttgataaagtcaatatcgacttgatgtatgccctgccgaaccaaaccgttcagacggcattggacgacgtacaaaccgctatcgctacgggcgcgacccacatcagcgcgtatcatctgacgatggaaccgaacacgccgttcggtcatacgccgccgaaaggtttgccgcaagacgaagccgccctcgacatcgaagacgcggtacacggcgcgctggaaggcgcgggttttgtccactacgaaacatcggcttttgcgaaaccagccatgcagtgccgccacaatttgaactactggcagttcggcgattatttaggcataggcgcgggcgcgcacggcaaaatttcctatcccgaccgcatcgagcgcaccgtccgccgccgccaccccaacgactacctcgccttaatgcaaagccaaccgggcgaagccgtcgaacgcaaaaccgtcgccgccgaagatttgccgttcgagtttatgatgaacgccctgcgcctgaccgacggcgtacccgccgcgatgttgcaggaacgcacgggcgtacccgccgccaaaatcatggcgcaaatcgaaacggcaaggcaaaaaggcctgctggaaaccgaccctgccgtattccgcccgaccgaaaaaggacgcttgtttttaaacgatttgctgcagtgtttttta

SEQ ID NO: 60194 - DNA, 330 bp, Neisseria meningitidis; identical to SEQ ID NO: 42940

SEQ ID NO: 60195 - DNA, 261 bp, Neisseria meningitidis; identical to SEQ ID NO: 52025

SEQ ID NO: 60196 - DNA, 318 bp, Neisseria meningitidis; identical to SEQ ID NO: 43381

SEQ ID NO: 60197 - DNA, 390 bp, Neisseria meningitidis; identical to SEQ ID NO: 47854

SEQ ID NO: 60198 - DNA, 345 bp, Neisseria meningitidis; identical to SEQ ID NO: 42331

SEQ ID NO: 60199 - DNA, 552 bp, Neisseria meningitidis
atggaattcctatctctttacccttggtggtctttttttattatattaactattatccttagctatattggattctgtgcacatctccacattcaaaatagggcagttttcttttatagctatcgggatgtaactattattttcttgacacctgtcatcctcatcgctctaagttatttaattaaaaataaagaaatcctgtcagcttgtatcttatgtataactcttattgcattttcatgggcatggattataacctatcgatctaatactaaaaggttttttctttccttattgatagtatgtggaaaattgttattaagtactattgtttgggcaattctcgccatatcacttggcttagctgtaataacagggaacagcaagcgtaaaaaatatgaacgacgtgaccgtcatgctgaacgtaatgaaaaagcttttataggtgcgctattagtaggtttcgaattatcaagaaatttattgaatttatgttgcctacacaaggatttttccaccccatctaaaaacattgaagtcaatcgctcttaa

SEQ ID NO: 60200 - DNA, 225 bp, Neisseria meningitidis
gtgggatgcagggtgtgcttcagcccgctgcatcaaaaatttttggagaaccggcgggagtcggcggttttggtttcggcggggacggtggaaatgggtaacattgacggaatcgacggaagcggtgggctgaagcccacccttgtatattggaatcactgtatcatagcaacaaaccgcccggccgccacccgcgcccacccaaggcacacaaccgttgcgtag

SEQ ID NO: 60201 - DNA, 1503 bp, Neisseria meningitidis
atgagtcgtgaaatgttacagctggcagaagcactggcaagcgaaaaaaacgttgatgcggaagtcgtcttccaagcactggaattcgccctgtctaccgccgccaagaaaaaggcagaccgcgaacacatggatgtccgcgtacaaatcaaccgcgacaccggcgaataccaaaccttccgccgttggctgattgtcgccgatgaagactatacctatcccgatgtcgaaaaaaccatcgaggaaatccaagaggaaattcccggcaccgccatccaaatcggcgaatactatgaagagcagctgcccaacgaaggcttcggccgccaagccgcgcaaaccgccaaacaaatcatcctgcaacgcatccgcgatgccgagcgcgagcagaatctgaacgagtttctcgccgtcaaagaagacatcgtgtccggcacggtcaaacgcgtcgaacgccacggcatcatcgtcgaagtcgttgccggcaaactggacgcgctgattccgcgcgaccaaatgattccgcgcgaaaacttccgcagcggcgaccgcatccgcgccctcttcctgcgcgtcgaagaaatcggcaacaccggccgcaaacaagtcatcctgagccgtacttccggcgatttcctcgtcaaactgtacgccaatgaagtacctgaaattgcagacggcatgcttgaaatccgcgctgtcgcccgcgacccgggacaacgtgccaaagtcgccgtcaaagccaacgaccagcgcatcgatccgcaaggcacctgtatcggcgttcgcggttcgcgtgtcaatgccgtcagcaacgaattgtccggcgagcgcatcgacgttgtcctttggtcgcccgagcctgcccaattcgtcatgagcgcgctctcacccgccgaagtcagccgcatcgtcatcgacgaagacaaacacgccgtcgatgtcatcgttgccgaagaccagctcgcgctcgccatcggacgcggcggtcaaaacgtgcgccttgcttccgacctgaccggctggcagctcaacatcatgacttccgccgaggcagacgaacgcaatgcggcagaagatgccgccatccgccgcctgtttatggatcacttgaacgtggacgaagaaaccgccgacgtactggttcaggaaggttttgcaaccttggaagaagtcgcctatgttcctgccgccgaactgcttgccattgaaggatttgacgaagaaatcgtcgatatgctccgcaaccgcgcccgcgatgccatcctgaccatggcgattgccgccgaagaaaaactgggcgaagtgtccgacgatatgcgcaacctcgaaggcatagatgccgatatgctccgcagccttgccgaagcaggcattaccacccgcgacgacttggcagagcttgctgtggacgaactgattgaaatcaccggtgtaaacgaagaaaccgcaaaagccgtcatcctgaccgcacgcgaacactggtttaccgaagacaaataa

SEQ ID NO: 60202 - DNA, 1536 bp, Neisseria meningitidis
gtgtctgattccaaaacgaaagaacgcgccacattcggcacgcgccgcgcgtttatgattgccgccatcggatccgccgtcggcttgggcaatatttggcgtttcccctatattgcttttgaaaacggcggcggcgcgttcatcctgccctatctggtcgcgcttctgacggcgggcatcccgctgctgctgctcgattatgccatcggccaccgttaccgtggttctgcgcccttggctttccgccgcctcggacgatggtttgagccggtcggctggtggaacgtgatgaccaatatcgtcatctgcatctattacgcggtaattatcggttgggcggcaagctatacctattattcggtcaacgccgcctggggtgcggatccgcagggttttttctttaaggacttcctgcaaatggcgggcccggaagccttgggtttggattttgtcggcaaagtcgccggtcctttggcgggcgtgtgggtttttaccgccgccattatggcgttgggcgtgcaaaagggcgtggcgcgcgcctcgtcgttctttatgccgctgcttttggtgatgtttttgattatggtcggcatttcactaaccctgccgggtgcggcaaagggcttggacgcattgtttacgcccgactggtcgaaactcgccgattccaaggtctgggtggcggcatacgggcagattttcttttcgctttccatctgcttcggcattatggttacctattcttcttatttgaagaaaaaaaccgacttgggcggaacggggctggtggtcggttttgccaacagcagctttgaactgctcgcgggcatcggcgtgtttgccgcattgggctttatggcgcaggcgggcggtaaggcggtcaacgaggttgcctcaggcggcatcggtttggcgtttatcgcctttccgaccattatcaaccaggcaccgatgggctggctgatcggcatattgtttttcggttcgctggtgttcgccggcgttacgtcgatgatttccatccttgaagtgattgtggcggcgattcaggacaagctgaacatcgggcgcgtcaacgccacgctgctggtctgcattccgatgggcattgtttccacgctgctgttcggtacggcgacggggctgccggttttggacgtgatggacaaattcgtcaacacctacggcattgttgccgccggctttgtttatgttgccgccatcatcatcagcggcaggctgccggaattacgcaagcacctgaacgctttgtcctccatccgcatcggcggcttgtggacggtctgcgtcgtggttaccgtcgtgatgctcggctatatgctgtttaaagataccagcggcctgatggagaaaaattacgaaggttatccggatggtttcctcagtattttcggctgggggatgtcggcggcgttggtcgtgttcgggctgctgctgtcgttgctgccttggaaacacggtcaggatttcaacgtcaaagacgaacacgaacatgaacaaggagacgaaaaatga

SEQ ID NO: 60203 - DNA, 225 bp, Neisseria meningitidis; identical to SEQ ID NO: 43982

SEQ ID NO: 60204 - DNA, 366 bp, Neisseria meningitidis; identical to SEQ ID NO: 43983

SEQ ID NO: 60205 - DNA, 429 bp, Neisseria meningitidis; identical to SEQ ID NO: 56121

SEQ ID NO: 60206 - DNA, 1176 bp, Neisseria meningitidis
gtgtttaaagtgaaattttatattcgtcacgcagtattattattgtgtggaagtttaattgtaggatgctctgcgattccttcatcaggccccagcgcaaaaaaaattgtctctttagggcaacaatctgaagttcaaattcctgaagtggagctgattgatgtgaatcatacggttgctcagttattatataaggctcagataaatcagtcattcactcagtttggcgatggttatgcttcggctggtacgctaaatattggtgatgtattggatattatgatttgggaagcgccgccggcagtattgtttggtggtggcctttcttcgatgggctcgggtagtgcgcatcaaactaagttgccagagcagttggtcacggcacgtggtacggtttctgtgccgtttgttggcgatatttcggtggtgggtaaaacgccagggcaggttcaggaaatcatcaaaggccgcctgaaaaaaatggccaatcagccacaagtgatggtgcgtttggtgcagaataatgcggcgaatgtgtcggtgattcgtgcaggcaatagtgtgcgtatgccgctgacggcagccggtgagcgtgtgttggatgcggtggctgcggtaggtggttcaacggcaaatgtgcaggatacgaatgtgcagctgacacgtggcaatgtagtacgaactgttgccttggaagatttagttgcaaatccgcgacaaaatattttgctgcgtcgcggtgatgtggttaccatgattaccaatccctatacctttacgtctatgggtgcggtggggagaacacaagaaatcggtttttcagctagaggcttatcgctttctgaagccattggccgtatgggcggtttgcaagatcgccgttctgatgcgcgtggtgtgtttgtgttccgctatacgccattggtggaattgccggcagaacgtcaggataaatggattgctcaaggttatggcagtgaggcagagattccaacggtatatcgtgtgaatatggctgatgcgcattcgctattttctatgcagcgctttcctgtgaagaataaagatgtattgtatgtgtcgaatgcgccgttggctgaagtgcagaaattcttgtcgtttgtgttctcgccggttaccagtggcgcgaacagtattaataatttaactaattaa

SEQ ID NO: 60207 - DNA, 1356 bp, Neisseria meningitidis
atgtctgatttttttcattctgacgtgttgtccgtttccgagttgaatgcatttgccaaaagtattttggaaaaccaccttgccggtttgtggattgccggcgaagtgtccaacctgacccgcgccgccagcggacattattacttctcgcttaaagacagccgcgcgcaggtgcgttgcgcgatgttcaaaggtgcggcggcgcgtttggcgaagcctttgaaagaaggcgatcatatcgaggtatcaggaaaaatcagtatttacgaggcgcggggcgaatttcaaattaccgtaaacgaagtacggctcaaaggtttggggcagctttacgaagcctatgagcggttgaaggcgcagttgcaggcggaaggcgcgtttgcggcggaacgcaagaaacctttgcccgtccgtccgcaatgtatcggcatcgtaaccagtctggcggcggcggctttgcgcgatgtcgttactaccttgaaacgccgcgcacccgaaatccccgttatcgtttatccgacacccgttcaaggcgcaggcagcgaattgcaaattgcccaagcgattaaaaccgcctcgcaacgcgccgaatgcgatgtgttgattgtctgtcgcggcggcggcagcattgaagacttgtgggcgtttaacgaagaaccggtcgtgcgcgccatcgaatcctgcacggttccggtcgtcagcggcgtaggccacgaaaccgatttcacgcttgccgatttcgtcgccgatatgcgcgcgcccacgccgaccggtgcggcggaactggtcagccccaaccgccaagaatcgctgcaccgcctcgcccaagcccaatgccgtctgaaaaccgttttggaacaacgctatttcgatgccagccaaaaactcgactggctggcgcggcaaatccgtcatccgcgccaaaaactcgacgaacagcgcgcttcaatcggcaagctggcgcaaacgctgtcttactcgatgacgcaaaacgtccgtacccacaccgcccgtttcgaacgccaaacccaagccctgaaacattgccgtcctgatgtttccgtttgcaaaaaaaacatcgaccgctttcagacggccctgtcgcacgccttccaccaactgcttacccaccgccgccaaagcctgactgcccaagccgcattgctcgaagccgtttcgccgcagcacattctggagcgcggcttttccgtcgtcaaaaacacacgcggacaagtcatccgcaacgccgatgttttgaagcaggggcagaagctgcacattatcttcgccgacggcgaaaccgacgtgcgcgtaagcaaagaacaagggcagcaggatttgttcgattgcatttaa

SEQ ID NO: 60208 - DNA, 354 bp, Neisseria meningitidis
gtgattacattgcgcatcgtgtgggcggttgccaaccgcgccaagcgtccgcaaagcgacagcaaggctgcggcggcaggacacggcattctgtatctgctcatgcttgccgttcccgttatcggcatgatccgccaatacggcagcggccgcggcccgttgaaagtgttcggcgttgaggtgatgcagggttcgccggaaaaaatcgagtggatggcaaacttgggcaacacgttccacggcaatttgggctggctgctgtttgccgccgtcgtcggacacgtcgccatggtcgtcgtccaccgtgttcaaggcaaagacgtgctgtaccgcatgacggggcgtgtccgttga

SEQ ID NO: 60209 - DNA, 423 bp, Neisseria meningitidis; identical to SEQ ID NO: 42328

SEQ ID NO: 60210 - DNA, 273 bp, Neisseria meningitidis
gtgtttgctgttattttcttttcgacattgggctgtattttagcatggataagagatattcctaaaataaaatcaaaaaaaattttggcaagatccttatatattataggaataataaatgtaataatcggctatgtattaattaaaaatatattggtttctgtttcggatgaagatggaacaaaatatcttgcaatatatttatcaaatcttttttttgggacagtattgatgtatgttcttgtgaaaagattatctaaaaagccaagctga

SEQ ID NO: 60211 - DNA, 273 bp, Neisseria meningitidis; identical to SEQ ID NO: 47986

SEQ ID NO: 60212 - DNA, 522 bp, Neisseria meningitidis
  misc_feature 6, 7, 8, 9, 10: 'n' is a, c, g or t
gtgtgnnnnntgcctgcggcttcgtcgccttgtcctgatttaaatttaatccactataaactcattgaactgtttgtcgcaggcgtaactgcaagaaaggcagcagagttagtaggcgttaataaaaataccgcagcctattattttcatcgtttacgattacttatttatcaaaacagcccacatttagaaatgtttgatggcgaagtagaagcagatgaaagttattttggcggacaacgcaaaggcaaacgcggtcgcggtgctgccgataaagtcgccgtattcggtcttttgaagcgaaatggtaaggtttatacggttacagtaccgaatactcaaaccgctactttatttcctattatccgtgaacaagtgaaacctgacagcattgtttatacggattgttatcgtagctatgatgtattagatgtgcgcgaatttagccattttagcttcgctgaaacttcgttttcgtatcaatcacagcacacattttgccgaacgacaaaaccatattaa

SEQ ID NO: 60213 - DNA, 432 bp, Neisseria meningitidis; identical to SEQ ID NO: 38797

SEQ ID NO: 60214 - DNA, 111 bp, Neisseria meningitidis; identical to SEQ ID NO: 40033

SEQ ID NO: 60215 - DNA, 462 bp, Neisseria meningitidis; identical to SEQ ID NO: 52040

SEQ ID NO: 60216 - DNA, 2482 bp, Neisseria meningitidis
atgcatcactttgggcgggctgcgacgagttgcgcggcggtatggatgcgagcctttataaagaactatgtgcttacgctattgtttttaaaatatgtttctgataagcataagtacggcggcggcatgattgagctgcacgccggtacgacttttgacgacatcgtcaaactcaaaaacaccgccgacatcggcgaccgcctgaataagattatcgcccaaattgccgaagccaacgacttaaaaggcgtgatcgacgttaccgacttcaacgacgaagacaaactgggtaaaggtaaggagatgatcgaccgtttgagcaggcttgtcggcatttttaaaaagctcaacctttcttccaaccaagccgaagacgacgatttgttaggtgatgcctacgaatacctgatgcgccattttgcgaccgagtcaggcaaatccaaagggcagttttacacgcctgccgaagtctcccgcattatggcgaaaattatcggaatcagcgcagattgccgtccagcaccagcgtttatgacccgacctgcggctcgggttcgctgttgctcaaagccgccgcccaagccggcagccaaatcagcctttacggtcaggaaaaagatgtggcaaccgcgtcccttgcccgtatgaatatgattttgcacaacaacgaaaccgccgaaatcaacaccgggaacaccttgtccgattcgtctttccgtgatgaaaacgacgggcttaagaccttcgattttgccgttgccaatccgccttatcccgcccgaaaaaaacggcgattacgcctttttgctgcatctgctcaaaagcctgaaaccaagcggcaaaggtgcgattattcttccgcacggtgtgctgtttcgcggcaatgccgaagcgcgtattcgcacggaattgcttaaccttgaccttattaaaggcattatcgggctgcctgccaacctgttttacggcacgggcattcctgcctgcatcatcgtcatcgacaaagaacacgcccaaaccgcccaatttgccgaagagggaacaaaccaagttatcagtggcggcagcgtgtttatgattgacgcatcgcgcggcttcattaaagacggcaacaaaaaccgtctgcgtgagcaagacattcacaaaatcatcgacactttcacaaacctcgttacagccgtatggtgcatttaagcgaaatcgcagcacaagattacaaccttaatctgcctcgctatatcgacagcggagaagttgaagacctgcaaaatctcgccgcctatctttatggcggcatacctgcgcacgatatggacgcattggaagcctattggcaagttttaggccgtatgaaaaacgagttgtttgccgaacacgatggccgctttaccactatacaacggaatcgattgcaaatctttcccactctcaacagcttaaaatcctgcgggattggtgtggaatttagggctaatctagtacagccccaaatttaatccactataaaatcgaaagcagccaaatcaaagcccatatattggcgcaccccgattacgccgccttcaaagccggacacctggcaaagtttgccgcgtggcacactcaaaacgaccttgccgccatccaaccgggcaggcttatccggaaatggagcgaaagcctgctggacgcgttcaaacccggcagcctgattgaagaatacgatttctaccaaatcctgacggactactgggcggaaaccctgcaagacgatgtttatctcatcgcccaagatggctggaaggcggttaaaaacctggccgaaatcaccaaagaaagcgatgaagacgcgaacctgaccgtcgtctttgaggaaaccgaaaccggcaaaaaaggcaaagccaaaaccaagcgcatcagcaaaaaataccgcagcgaagtcatcgcccccgagctggttgcccgccgctacttttcagacggcatcgccaagctggaagaaaaacaaagcgagctggaacgcctaagccaagaattggaaaaccacatagaagaacacggcggcgaagagggtgcgctgaacgacgtattggatgcaaaaggcaaactttccgccaaacttctgaaaaccgcattggaagaaagcggcatagaagaaggcgaacgggctgttttacaaaccacccaaacactgatgacgcaggaaaaagccgcgaaagacgcagtcaaaacccaaatcgaagccctgaaccttgccgtattcaaacaattcggccgactttccgaagccgaaatcaagcagcttgccgttcaagacaaatggcttgccgatttacaaagccgaatcgaaaatcgcttggaaaacagtattcagcagcttatcagccgcttgaacacgctggaagaccgctaccgcagcccgatggccgagcttgcccgagaagtggaaaagtggcaaagcaaagtcaatgcccaccttgaaaatatgggttttggaggctga

SEQ ID NO: 60217 - DNA, 279 bp, Neisseria meningitidis; identical to SEQ ID NO: 51115

SEQ ID NO: 60218 - DNA, 1224 bp, Neisseria meningitidis
gtgggacgcagaaaactttggtttgccctggcagcagcgggcgttatcggcggtttggtcggcattgtgctgacggaactgatgcacttcatacaacatacggcatacggttatggcacggacggcgtgtccatctcgttctgcgaaggtgtggcacaggcttccggtatgcggcgcgttgccgtgctgacgctgtgcggcgcggtcgcaggcagcggctggtggttgctgaaacgtttcggcaagccgcaaatcgaaatcaaagccgccttgaaacagccgttgcaggggctgccgtttctgacgacggttttccatgttctgctgcaaatcataacggtcggactcggttcaccgctcggacgggaagtcgccccgcgtgaaatgactgccgcgttcgcttttgccggcggcaggcggttgggtttggatgaagacgaaatgcggctgctgattgcttgcgcttcgggtgcgggtttggcggccgtgtataacgtgccgctcgcctccacactttttatcctcgaagccatgctgggcgtgtggacgcagcaagccgtcgccgccgcattgctgacttccgtcatcgccaccgccgtcgcgcgcatcggcttaggcgacgtgcagcaatatcatcccgccaaccttgccgtaaacacttcattactttggttttccgccgtcatcggcccgatactgggcgcaaccgccgtctttttccagcgcaccgcccaaaaattccccttcatcaagcgcgacaacatcaaaatcattcccttggcagtctgcatgtttgcgctcatcggcgtgattgccgtttggtttcccgaaattttgggcaacggcaaagcaggcaaccaactgacctttggcggtttgaccggttggcaacacagccttgagctgaccgccgtcaaatggctggttgtcttgatggcgttggcggcaggcgcatacggcggactgattacgccgtctatgatgctcggcagcaccatttcttttgcagccgccgccgcgtggaacagcgttttccccgaaatgccgtctggaagcgcggcagtcgtcggagcggcggtgtttctcggcgtatcgctcaaaatgccgctgaccgccattgtgttcgtattggaactgacctacgcgccgctgtccctgctgctgcctttgtgcatcggcatggcgggggcattgggaacatcgggaaaaatgggcttcaaataa

SEQ ID NO: 60219 - DNA, 1149 bp, Neisseria meningitidis
atgagcatccatctcgacttcggcattagtcctaaaacgttccgacagacttatctgtatcaaaagcccaagctctttaaaggagcggttcggaatctcgaagccgcatcttggaaagatatcaacgagatataccaacgagcagacccaaccgcaccgctgtttcatctgcgtaaaaaaggtgcaattgttcctaaagaagaatacgtcgaaagtttcgacgatttgggcaaaactcgctaccgttttattaaatccgttatctacgaacatatgaagaatggtgcgtcgttgctctataaccatattatagtggattaaatttaaaccagtacagcgttgcctcgccttgccggcgcacatactattgttagtggatatcttgcttttggcagcgacgaatcttataaaaaccattgggacacccgcgatgtgtatgccatccagcttttcggcaagaaacgttggcaacttactgcccctgatttccctatgccattgtatatgcaacagactaaagatactgatatttccattcctgaacatatcgatatggatattatccttgaagcaggtgatgtcctctacatcccgcgtggttggtggcacagacctatcccgctcggctgtgaaaccttccacctcgctgtcggtacctttccgcccaacggctataattacctcgagtggctaatgaagaaattccccaccatagaaagtctgcgccacagtttctcagactgggagcaagataggacgcgtatcaacgatactgccgcacaaattgctgccatgattgccgaccccgtcaattacgaagccttcagtgaagacttcctcggcaaagaacgcaccgataccgcttttcatctcgaacagttcgcgaatcccaacgctactccgctttcagacgacgtcaggttgagactaaatgccaataatttggatacgttggaaaagggatatttgattgggaatgggatgaagataagcgtagatgaattggggaaaaaagttttagaacacatcggtaagaatgaaccgttattgttgaaaaatctactggttaacttcaatcagggaaaacatgaagaagttaggaagttgatttatcagttgatagagttagattttctggaacttttgtga

SEQ ID NO: 60220 - DNA, 612 bp, Neisseria meningitidis
atgcgccgcaccgccctcctgctgctcgcactcgccgccggcacgtccctcgctgccggcttcagccaaaaagacacgccgatcaacacccgctaccgcgaaacgcccgaagaagccgccgcccgcgaatttaaagaacataccgccaaactgccgccgctgcccgatacgcactcggacggctggtttgacatttatgtggatgaaaattacggcaaacagccgaaaatcctgctcgacagcctgcaaattatgcccgcgcccgacggcagcatccgctacattctcaatatccgctccgacaaaggctacgacaacctgactgccgaaggcatattctgcgcccgcttctccatcaggttcggcaacggcaaaccttcctcctataaagtgttcggctacggcgacacggtcaaccgccgctggatacagccccgaaacgccgaatggaaaccgataggcggtacattaagccgcaacgacgcactgcgcaccgtcctgtatcaggcattctgcgagggcggtgtacccgccgacacgaaaggtttggtacaacgcctgaaagaacgtgccggacgctatgccccgtcgatgaagccgcacgacaaataa

SEQ ID NO: 60221 - DNA, 1332 bp, Neisseria meningitidis; identical to SEQ ID NO: 56134

SEQ ID NO: 60222 - DNA, 1269 bp, Neisseria meningitidis; identical to SEQ ID NO: 44008

SEQ ID NO: 60223 - DNA, 1002 bp, Neisseria meningitidis; identical to SEQ ID NO: 44009

SEQ ID NO: 60224 - DNA, 942 bp, Neisseria meningitidis
atggcaatccaatggtttcccggccatatgaacaaggcgaaaaaagccatcgccgagcgtgcaaaaagcgttgatatggtgattgaaatgctggacgcgcgtatgcccgcctccagcgaaaaccccctgcttgcccagctttccaaaggtaaacccaaacttaaaatcctcaacaaacaagatcttgccgaccccgagcgcaccaaaatctggctcgaacactataacagccgccccgacacctgcgccatcgccctcgattcctccgaaacaggcgcacacggcaaaattacccaagcctgtcgtgccatgattccccaccggcaaggcatagacaaacccttgcgcgtcttgatttgcggcattcccaacgtcggcaaatccaccctcatcaacggcatgataggcaaaaaatccgccaaaaccggcaacgaacccggcatcaccaaagccgaacaacgccttttccttgccgacgacttctggctgtacgacacccccggaatgctgtggccgaaaatcattgtcgaagaaagcggctacaacctcgccgccggcggttcagtcggacgcaacgcattggacgaagaagaagtcgccctcgaacttttagactacctccgccgccactacctccctatgctgcaagaacgctaccaagccgacaaagaccccagcagccactgggacgaaaacgtttggctcgaatggatagccaaaaaacgcggcgcagtcctcagcggcggacggatcaactaccaaaaagccgccgaaaacatcctcaccgacttccgtgaaggcaaaatcggcagaatcaccctcgaaacgccgaaccaatgggaaacttggctcaaaaaagcccgtcagaaagaagccgaactcaaagccatacgcgaagccagaaaagcagagcgtaaagggcagaagccttcggaagcataa

SEQ ID NO: 60225 - DNA, 914 bp, Neisseria meningitidis
atgaacgtatctgttctcaattttggtaacacccctgtatctttccgtcaagacggttttttaaatgcaaccgccattgcatctcactttggcaagttacctaaagactacctaaaaagtgaacaaactcaacaatatatctctgcacttgctgagaatttaagcgttaggagaaaaatcctaacggaagcaaatcaaatagttatcgtgaagcgtggtggcagtgagcaaggcacatggctgcatcccaaactcgctattcactttgcccgttggcttaatccgaaatttgcggtttggtgcgatgagcagattgaaattttacttaacggcaaaatttcagacggcataaaaacagttacccccaaacccacccgcgcccttccggacggcttgaccggcgaacaaatcgaagccgtcaaaaaactgcacaacgccctgaccaaatccgcacccaaagaagcgcaggcgcgtatcgccattaccctttggtctgccgtcaaaagcaagttcggatgcagctacaaagaagtacctgccgaacagttccccgaagttttaagcgtgatgagccgcgtggcagttgaaaacggcgtgctgtacggcgaagtcctcgaccgcgaaccgttacccgcaccgcaacctgccctgcccatcagcggcaacgccctgtacgacctcgccgttgccgtcagatacggcgcgtgggccatccaaatgggcagagacgtttccctgccgctgaagcagctcggctgcaaacaggcggtaacgatgtggacggtctgggcggaaacacgcagccgcccaaacgccctcgaagccttaaacgcacacgccgacgcggaacacgcggcaaaaatccgcccgatgctgcccgaaatccgcaacctgtcgtcggtttgatgcagtag

SEQ ID NO: 60226 - DNA, 777 bp, Neisseria meningitidis
atgaatagacccaagcaacccttcttccgtcccgaagtcgccgttgcccgccaaaccagcctgacgggtaaagtgattctgacacgaccgttgtcattttccctatggacgacatttgcatcgatatctgcgttactgattatcctgtttttgatatttggtaactatacgcgaaagacaacagcggagggacaaattttacctgcatcaggcgtaatcagggtgtatgcaccggatacggggacaattacagcgaaattcgtggaagatggagaaaaggttaaggctggcgacaagctatttgcgctttcgaccttacgtttcggcgcaggaggtagcgtgcagcagcagttgaaaacggaggcagttttgaagaaaacgttggcagaacaggaactgggtcgtctgaagctgatacacgggaatgaaacgcgcagccttaaagcaactgtcgaacgtttggaaaaccagaaactccatatttcgcaacagatagacggtcagaaaaggcgcattagacttgcggaagcagtagcaaaaacggcactgggcagacaggaattgtcgggattgggcatggtatcctccgatttggcgaagagcaacgaacctgtttatcttgtgaaaataaaacccgacaaaccaaccatcactgcatacggtgaggaaaaaccgctgcaaatcggcatgacgttggaagcagacatcctgcacgagaaacggcgattgtatgaatgggtattggagccgatttatagtatatcgggcaaactgtaa

SEQ ID NO: 60227 - DNA, 903 bp, Neisseria meningitidis
atgaatccggcaatgattgagcgtcttaaggcagtcgagaatcaggcggaagcaatgggacgcggcgcacgctctgcatatcttaagcagcaggcgcaggaattgggcatcagccttgccacgctataccgcaagctggaggcggtcagcatcaagccgacgcgcaaacggcgcagcgatgcgggcaagacggagcttaaaccggaagaagccaaattgatttcggcggttttggtggaggcgatgaggcgcaacggcaagcggttgatgtcggtgcggcaggcggtggaaatgctgcgcgccaacggaaaaatcgaggcggcgcggattgatggggaaaccggggaagtcatcccgtccgtccgcactgctttccgcccgctggcaagacatcgacctcaccgcccggttatggcacatccccgccgccgacatgaagaccaaacacccctttaccgtcccactgtcggactgggcggtagaaatactccgagagctgcacacgcagaccggcgacaacatccaccttttccccggcatccgcccacggcgcaaacccgcccccctcccgaccacatcagcatcaaattcgcccacaacgccatccgacgactgggctatgacggcagcacccccggcaaatccaaacacacaatgcacggattccgccacctcttcaccaacatcagcctgaccgccggaaaagacaccctcacaacagacctcgccctcggccacatcagccgcgccgccctccaacgcgccggcttctcaagcctgcaccactacctgaccgccgacagctaccgcctccaagagcggcgcgaactcgccgaatggtacagccgccgccaccgccaagcatacgaagccgccgcccaaaacacttgcaataaaacctaa

SEQ ID NO: 60228 - DNA, 984 bp, Neisseria meningitidis; identical to SEQ ID NO: 40053

SEQ ID NO: 60229 - DNA, 1527 bp, Neisseria meningitidis
atggattatccaccgcttaagggtgcggcattggcgtgggttacgctgtctttggggcttgccgtatttatggaagttttagatacgactatcgccaatgtcgccgttcccgtcatcgccggcaacctcggtgcggcaaccacgcaggggacgtgggtcattacttcttttgctgtggcaaacgccgtttccgtgccgttaacgggctttttggcaaaacgtatcggcgaggtcaaactgtttaccgccgccgctgtcggtttcgtcatcacatcatggctgtgcggcatcgcgcccaaccttcaggctttggtgtttttccgcatcttgcagggttttatcgccgggccgctgattcccctgtcgcaaagcctgttaatggcatcctatccgcccgcaaaacggacgctggcactggcattgtgggcaatgaccgtcgttgtcgcccctgttctcgggccgatactcggcggctggatttccggaaactggcattggggttggattttcttcattaatatccctatcggtatcatatcggcatggattacatggaaacatttgaaatatcgggaaacggaaaccgttaaaatgccgaccgactatgtcgggcttacattgatggtagtcggtatcggcgcgttacagatgatgctggacaggggtaaggaactcgactggttcgcctctggagaaatcattaccttgggcgtagtcgcactggtgtgtttgtcgtattttattgtttgggaattgggagaaaaatatccgattgtcgatttatcgctgtttaaagatcggaattttaccgtcggcgtaattgccacatcattgggttttatggtgtatatggggacgctgaccttgctgccgttagtgttgcagaccaacctgggctatacctccacgtgggcggggcttgccgccgcacccgtcggcatcctgcccgtcttcctgtctccgttaatcggcaggttcggcaataaaatcgatatgcgcctgctcgtaaccgccagcttcctgacctttgcctttactttctattggcgcaccgatttttatgccgacatggatatcggcaacgtcatctggccgcagttttggcagggggcaggcgttgccatgttcttcctgccgctgaccaccatcacactgtcgcacatgaagggcggacagattgccgccgcaggcagcctgtcgaatttcttgcgcgtgctgatgggcggtgtcggcgtatccgtcgtcagcaccctgtgggaacggcgcgaagcgttgcaccatacacgctttgccgaacacatcacgccatattccgcgacattgcacgaaacggcggcgcatttgtcccagcacggcgtttccgacattcaaaccgcaggtattatcaacaataccattacccagcagggttttattatcggctcgaacgaaatctttatggcgggcagcctgctgttcatcatcatgattcctgtcatatggctggcaaaaccgccgttccacaacggcggcggcggtggacattga

SEQ ID NO: 60230 - DNA, 2109 bp, Neisseria meningitidis; identical to SEQ ID NO: 44024

SEQ ID NO: 60231 - DNA, 630 bp, Neisseria meningitidis; identical to SEQ ID NO: 44026

SEQ ID NO: 60232 - DNA, 1368 bp, Neisseria meningitidis
atgtcttccccttcaaataccaatcgtcaaacctgatccagccgattaacctatatcctgaccgttgccggcgcgactgtcggcttcggcgcgacgtggcgtttcccgtatttggtcggtgaaaacggcggcggcgcgtatgtgtttttattctgtatcgccatgctcgttatcggtataccgatgattttggtggaaaacgtcatcggacggcgcaaaggcgtgaacgcgctggatgcgttcggcggctcgatgaacggcaaacccgtcgctaaaatttggaagctggtcggctgggcgggactgctcggcgcgttcggcattatggcttattatatggtgctcggcggctgggtaatcagctatatcgtcaacattatcggcggcaatctggacatttccagccccgtcgacggtatggttacaaaaagcttctttaccgaacacatcgaaaacagcccttgggaaattgcgttttatacgctgctttttgtcgccgtgaaccaatggattttggtcaaaggcgttatcggcggcattgaaaaagcggcaaaatagctgatgccgctgctgtttttgttcctaatcgcgatggtcgtccgcaacgttacccttccgggcgcaatggaaggggttgctttctatctgaaacctgatttcagcaagattaccgccgaactgttcgtcttcgttttggggcaggtattttttgccctgagcctgggtttcggcgtgatgattaccttgtccagctatttggataaaaacgaaaatctggttcagacggcagttatcacggcaattaccaataccatcatcgccatacttgcgggctttatgattttcccgtcgctcttcagcttcggcgttgcccccgattccggcccgactttggtgttccaaagcttgccgattgtgttctcacatatgtgggcgggatctgtgttcgccgtgattttcttctcgctgctcctgattgccgcgttgacaacttcgctgaccatttatgaagtgttgattacgaccattcaggaaaaaaccaaaatccgccgtaccgccgcgattacgattgtattggctgccatcttcattttcggcaacatcccgtccattctgagctatggtccgtggaaagacgttctgttcggcaaaaatattttcgatgccttcgactacatcagcggcaacatcttgtttatgctgaccgcgctcggtttcgcgctgtttgtcggttttgtgatgaaggacgaagcgaaggaagaattgctttacaaaggcaaccatacgacggtcaatatttggtttgcttatgtgaaatatcttgtgccgttggtgattttgctgatttttgtcagcaacctgttctaa

SEQ ID NO: 60233 - DNA, 1869 bp, Neisseria meningitidis
atgagccaagccttaccctaccgcccggacatcgacacattgcgcgccgccgccgtcttgtccgtcatcgtgttccatatcgaaaaaaattggctgccgggcgggtttctcggtgtcgatatattcttcgtgatttcaggctttttgatgacgatgattcttcaccgcgaaatgtcgggggggggggggttttccctgaaggcattttatatccgccgcatcaagcggattctgcccgcatttttcgccgtattggcggcaacgctggcaggcggcttctttttattcaccaaagatgatttctttcttttatggaaatccgcgctgaccgccttgggtttcgcctctaacctgtattttgcaagggggaaggattatttcgatcccgcgcaggaagaaaagcccctgctgcacatctggtctttgtcggtcgaagaacaattttactttgtctttccgatactgctgctgcttgtcgcccgcaaaagcctgcgcgtacagttcggcttccttgccgcactgtgtgccttaagccttgccgcctcctttataccttccgcgctcgataaatattacctgccccacctgcgcgcctgcgaattactgataggatcgctgaccgccgtgtggatgcgctgccggcaacctgccgtcggcagacgctgtgccgccgtcggcgcattgtttgccgtgtgcatattgtcaacctgcctgttttcctattcggaacaaaccgcctatttcccgggccccgccgctttgattccctgtctggctgttgccgcgctgatttatttcaatcattacgaacacccgcttaaaaaatttttccaatcgaaaatcactgttgccgccggtttgatttcctattcgctttatctgtggcattggccgatattggcctttatgcgctatatcggcccggacaacctgccgccttattcgccggcggcggcggtcgtcctgatattgctgctttccctgttttcttaccactgcatcgaaaaaccgtttaaaaaatggcaaggttcgttcgcacaatccgttttatggatttatgccttgcctatgctcattttgggggcgggctcgttttttgcgatgaggctgccgtttatggcgcaatacgaccgcttggggctgacgcgttccaacacctcctgccacaacaataccggcaaacaatgcctatggggggatacggaaaaacagccggaactgctggttttgggcgactcccacgccgaccattacaaaacattcttcgatgccgtgggcaaaaaagaaaaatggtccgccactatggtttccgccgacgcttgcgcctatgtggaaggctacgcgtcccgtgtgttccaaaactgggcagcctgccgcgccgtttatcgctatgccgaagaacacctgccccggtattcaaaagtggttttggcgatgcgctggggcagccaaatgcccgaaaacagccgctcccttgcctatgatgccggttttttccaaaaattcgaccgtatgctgcataaactctcgtccgaaaaacaagccgtttacctgatggcggacaaccttgcctcgtcttacaacgtccagcgcgcctatatcttgtcttcacgcataccgggttaccgccaagccctgcgcccggacgacgaaagcaccctgaaagccaatgcccgcatcagggaattggcagccaaataccccaacgtctatattattgatgccgccgcctatatccccgcagattttcaaatcggcggattgccggtttactcggacaaagaccacatcaacccttacggcggcacggaattggcaaagcgtttttccgaaaaacaacggtttctcgatacgcgccataaccattga

SEQ ID NO: 60234 - DNA, 981 bp, Neisseria meningitidis
atgcaagaaaacccgaccgtgtggctgttcgacctcgacaacacgctgcacaatgccgatgccggcctcttcacactcatcaaccgcgctatgacacgctatatggcacgccgcctcaaactctccgaatctgccgcgtccgacctgcgtcaagactattggcaccgctacggcgcaacgctcgccggactgcaaatccaccatcccgaaatcgacatcgccgaatttttgcgcgaaagccatccgatcgatgcaatcctgaccaggctgcacggcatggcggatacggaaaacaccctatgccgtctgaacgggcgcaaggcggttttttccaacggcccgtcgttttacgtccgtgccgttgtcggcgcactcggtttggaaaaccgtttcgacgcactgttcggcacggatgatttcgggctgctgtacaaacccaatccgcaagcgtatctcaatgtctgccgccttttggacgtaccgcccgaatgctgcattatggtggacgacagcgcggacaacctgcatcaggcaaaagcattgggcatgaaaaccgtccggttcggtgcaaaagtgcacgacctgccctttatcgatgcttccgtaagcgatatggcgcaactggctcggtatgcagaaactttgtcagaacaccgccaaaatcattacaatacccgcacaccccccccgaaaatacgaaagaatgttatgcgtaaaaccttccttatcctgatgactgccgccgcccttttgtcgggctgcgcgtgggaaacttatcaagacggcaacggcaagaccgccgtccgtcaaaaatatcccgccggcacgcccgtttattaccaagacggcagctactcgaaaaatatgaactacaaccaataccgtcccgaacgccatgccgtgttacccaaccaaaccggcaacaacgccgacgaagagcatcgccaacactggcaaaagcccaaatttcaaaaccgataa

SEQ ID NO: 60235 - DNA, 1488 bp, Neisseria meningitidis
atgctaaagaaaataaaaaaagctctttttcagcctaaaaagttttttcaagattcaatgtggttgacaacatctccattttatcttacccccccacgtaacaatttatttgtcatatctaatttaggtcagcttaaccaagtccaaagcctaattaaaatacaaaaattaaccaataatttactagtaattttatatacttctaaaaacttaaaaatgcctaagttagttcatcaatcagctaacaagaatctatttgaatctatttatctatttgagcttcctagaagccctaataatataactcctaaaaaattactttatatttatagaagttacaaaaaaatccttaatattatacagcctgctcatctctatatgctgtcttttacaggccactactcctatctgattagtattgcaaaaaaaaagaatattacgactcatttaattgatgaagggactggaacatatgctcctttattagaatcattttcatatcatccaacaaaattagaacgttatttgattggaaataatcttaatattaaaggatatatagatcattttgacatattgcatgtcccctttcctgaatatgctaaaaaaatatttaatgcaaaaaaatataaccggttttttgcgcatgctggaggaataagcattaataataacattgcaaacttacagaaaaaatatcaaatatctaaaaatgactatatttttgttagtcaacgctaccccatttcagatgatttgtattataagagtatagtagaaatcttaaacagcataagtttacaaattaaaggaaagatatttattaaactacacccaaaagagatgggcaacaactatgtaatgtctttatttctaaatatggtagaaataaaccctcggctggtagttattaatgaacctccttttctaattgagcccctaatatacttaacaaatcctaaaggaattataggcctggcctctagttctttaatttatacaccattactctcaccctcaacccaatgtctttctattggagagttaattattaacttaattcaaaaatattcaatggtggaaaacactgaaatgatccaagaacacttagagattattaagaaatttaattttattaatatactaaatgatttaaatggggtaataagtaaccctctctttaaaacagaagaaacatttgaaacacttcttaaatctgcagaattcgcatataaatctaaaaactactttcaggctattttttactggcaacttgccagcaaaaacaatattaccttattagggcataaagcattatggtactacaatgcactttataatgtaaaacaaatttataagatggaatattcagatattttttatatcgataatatctccgtagactttcatagtaaagataaattgacatgggaaaaaattaaacattattactattccgccgacaataaaattggtagagatagataa

SEQ ID NO: 60236 - DNA, 1041 bp, Neisseria meningitidis; identical to SEQ ID NO: 52075

SEQ ID NO: 60237 - DNA, 510 bp, Neisseria meningitidis
atgggatcaaaattctttttcctgctgctgcgttttgccggttcggggttgccgccgtcacatatgcgcggcatcggcatcgtcggcagacgggtgcgcggttttttggcgcggcgggtttctccgcatatcggacgcggggtcaatatcgaacgcggggcgtatgtgtttccggatacggttttgggcgacggctcgggcatcggggcaaactgtgaaatctgccgtgggctggtggtcggcaaaaatgtgatgatggagccggaatgtctgttttattcaaataaccacaagtttgaccgcaaaaaacgctttgagggctacacggaaatccgtccgattacgttggaggacgatgtctggccggggcacagggtgattgtaatggcgggcgtaaccgtcggacgcggttcggtcgtgggcgcaggcgcggtggttacaaaagacattccgccctactctttggcggcaggcaatccggcagtggtgaaaaagaatctgccggaaggt

SEQ ID NO: 60238 - DNA, 423 bp, Neisseria meningitidis; identical to SEQ ID NO: 44041

SEQ ID NO: 60239 - DNA, 360 bp, Neisseria meningitidis; identical to SEQ ID NO: 44043

SEQ ID NO: 60240 - DNA, 321 bp, Neisseria meningitidis; identical to SEQ ID NO: 44046

SEQ ID NO: 60241 - DNA, 174 bp, Neisseria meningitidis; identical to SEQ ID NO: 40073

SEQ ID NO: 60242 - DNA, 189 bp, Neisseria meningitidis; identical to SEQ ID NO: 44049

SEQ ID NO: 60243 - DNA, 375 bp, Neisseria meningitidis; identical to SEQ ID NO: 40077

SEQ ID NO: 60244 - DNA, 237 bp, Neisseria meningitidis
atgcgtattttggatatttttaaaaacccggcgacaggcaatgtgtcgcactcgaagctgtgggcaaacgtcgcctgcgcggcggggacgtttaaatttgtgatgttgcccgacccatcggcggagatttgggcggtgtatttgggcattgtcggcggctatgcggtggcgcgttcgttggtcagcgtcaaacgtcaggaggtcgagaatgaatctcgtgaaactgctagcgaataa

SEQ ID NO: 60245 - DNA, 291 bp, Neisseria meningitidis; identical to SEQ ID NO: 44053

SEQ ID NO: 60246 - DNA, 513 bp, Neisseria meningitidis
atgcccgaccttcttacatatcaatattataatatgacacacataagctcgccccgtaacgaatttatacgcggcatcaaagaaagttcgcccatacttatcggacttctgccttgggcattaatactcggtatgcagggcggacaaaaaggcatgagctggctggaaatgttgttgatgaccagtatgaacttcgccggcggctccgagtttgccacggtcaacctgtgggcggaacctctgccgatactgcttatcgccaccgtaacctttatgattaattcgcggcatatcctgatgggggcggcacttgccctgcacctgaaagaaataccgctgaaaaaagccgtgcccgcactgttttttatgtgtgatgaaagctgggcgatggcattctccgaaatccaaaaacggaaagcaaccggtttacccgcattcaatatgcctttttatagtggattaacaaaaaccagtacagcgttgcctcgccttagctcaaagagaacgattctc

SEQ ID NO: 60247 - DNA, 417 bp, Neisseria meningitidis; identical to SEQ ID NO: 46069

SEQ ID NO: 60248 - DNA, 360 bp, Neisseria meningitidis
ttggaaaggaaaaataacatcattgaactatccattgaggatctggagctaatttatggcggaggcttaggggagagaatccttgaaggaggagcaaatggtgcacaaataggaggatcaattggtgcaggtattggtctgggtgtcggtatagtttctggtggtattcctgccggaccggctattattctcggtggcacagttggtgctgctgttggtgctgcaactggtatgggtgttgcagcatatgagtattaccaagaaactcagcccaaagggacagtaacggtcggtccgatttctgcttttgctgtggacaaatcaggaaacggctacactgacagcacaaattactgctga

SEQ ID NO: 60249 - DNA, 243 bp, Neisseria meningitidis; identical to SEQ ID NO: 44059

SEQ ID NO: 60250 - DNA, 312 bp, Neisseria meningitidis
atgaacaaaccgtttatcactcaggcgcagttggcactttataaatatcagccgtctagcaagtattatggtaaaacaatggcatatactttcgctagtgagcttttggattattcaaaagttaataaatttataattcatgaagaaatccaatgttttttaaatagaaggatttctaataatatttggaaaatttatttttctgatgagtctgttgcgtatataaaaattttagaattacaggatgattctagtcgtggaattgaaattaaaacgtttgattttaatcctaatgttggggatgttttcggt

SEQ ID NO: 60251 - DNA, 207 bp, Neisseria meningitidis
ccgatggatatgaccctgaagcataaagccgaagcccttttgggcgagccgcttttagacgaacccgtccgacccgagtcgtgggaatgctgcggcagcgactgcggcgaggcgtgtattcagacgatttattgggcggataaggcccgctacgacgcgcaacggcggaaattgaaagaagcgggttggtcggacgatgccgtctga

SEQ ID NO: 60252 - DNA, 207 bp, Neisseria meningitidis
atgaatattattggtaaattgaaagaagctgcttcctattttcttacaaaattgattggagaaaatcctagtaatgagcaggtaaaccgcgcacttatacagatgccaaatgttcgtccgatacacacctatccacgcccaaatttaagaaactcaggcgtggcagccgcgaaacgggctgcgcgcaaacgcaagaatcgtcgttaa

SEQ ID NO: 60253 - DNA, 204 bp, Neisseria meningitidis; identical to SEQ ID NO: 40089

SEQ ID NO: 60254 - DNA, 195 bp, Neisseria meningitidis
gtgaagcgtaaactcgctgcttggtgggaaaccgccaaactgaccgccaacctcatggcaggcgtgcccgattatgaaaactacgttgcacagcagcgcaaacataatcccaacgcccctgtgatgaccaagctgcagtttcaagactattgccgcaaacgccgctgcggcgcaaacggcggacgctgctgttaa

SEQ ID NO: 60255 - DNA, 441 bp, Neisseria meningitidis; identical to SEQ ID NO: 44066

SEQ ID NO: 60256 - DNA, 129 bp, Neisseria meningitidis
atgagacctttgcaaaattccccaaaatcccctaaattcccaccaagacatttaggggattttggggaattttgcaaaggtctcggacagtattttgaacgcagtgcgcgtaaatccgtatggaaacca

SEQ ID NO: 60257 - DNA, 798 bp, Neisseria meningitidis
atggcagacatcctaccatccgacaagcggcggcaaccgccaaaaacgaaaggaagtacgatgaacataatcgaacaagaaatgaaacactccagtctgagaaaagtagatgtcgaaatcgccaaaatcattgcagacgcgcacaaaatcaacgccgaatccgtaaaaatagcccaagaatcccgatggtatcccatgatggcggccaccgggctggttaccgccatcgccgccgtgttggcactgatattcaaatttgcctgaccacaagccccgcgagaggctttatcccccgaacaaaatgaacagagccgcactattcaaccgctaccccgaatggattatcgggcaagacggcgcaagccgtttcattacccattgccgctatccccgcctgattgccaaaatccacaggcagacagacggcgaatgcccgggcgggcattaccgccattccgaaaacggcatcaccctttacgattttatttttttcgacggaaaaccggcagacgaagcccgatttgccgccgtccttaccgaaacctgccgccgggcagtcaaaaaaatatgcgaaacaaaataaaccgcaacgacatggaactcggctacacaccttacaacctgcgcaaccgctgcaaactgatacaggccgagttggcgcaaatcgtcggggtgaagcactacatacaggtaggccgctgggaagccgaacccgataccgaaacgcggcgggccgatatgccgctggaaaaatggcggcagttcctcgattggacagaaaaaacaaacgccgtctga

SEQ ID NO: 60258 - DNA, 249 bp, Neisseria meningitidis; identical to SEQ ID NO: 52077

SEQ ID NO: 60259 - DNA, 432 bp, Neisseria meningitidis
atgaaaaaacaaattaccgcagccgtaatgatgctgtctatgattgcccccgcaatggcaaacggattggacaatcaggcatttgaaaaatacgtattccacacgcaggcagatgcgccgatgcagttggctgagctttctcaaaaggagatgaaggagactgagggggagtggattcctaatgctgttggaggcattatgggaggagttggagggcatttcagctatatggctagtgctattgctagtggctcgtataatcgagaggcacattggacagcaattggaggtggtgcgttaattggtgcgatgaaccctattaacggaggaagagcactgattaatggtatgcgaggtgtagcagtgggggctgttgctggtggcataaatggttatgcaggttctacgggtaagaacactgacattcgccgt

SEQ ID NO: 60260 - DNA, 303 bp, Neisseria meningitidis; identical to SEQ ID NO: 40930

SEQ ID NO: 60261 - DNA, 219 bp, Neisseria meningitidis; identical to SEQ ID NO: 52102

SEQ ID NO: 60262 - DNA, 216 bp, Neisseria meningitidis; identical to SEQ ID NO: 52103

SEQ ID NO: 60263 - DNA, 291 bp, Neisseria meningitidis; identical to SEQ ID NO: 44076

SEQ ID NO: 60264 - DNA, 201 bp, Neisseria meningitidis; identical to SEQ ID NO: 52105

SEQ ID NO: 60265 - DNA, 195 bp, Neisseria meningitidis; identical to SEQ ID NO: 44078

SEQ ID NO: 60266 - DNA, 222 bp, Neisseria meningitidis; identical to SEQ ID NO: 40096

SEQ ID NO: 60267 - DNA, 2082 bp, Neisseria meningitidis
atgggcaaagccaacgcctttaccgcgccgattaccgtcgtcaactacgacgaacaagccctcaacaacaccgaggcgcgtactttggtggatgccgtagcgaaaaaagacgcttccgtttggcagttcggcggcgaaagcaacacgctgaccggattgtatttcagaggttatcagcttgatgcgcgccaattcagcgtcaacggtttgacaggtatgtacggcacgcaaggcacgaccagcgtgcaagtcggctccgcacaactgattcaaggcgcgtccaccgccgtaaacggcatgaaccctgatggcgcggtatccggttccgtcaatatcgaaaccaaaaaagccgctgatgaaggcaaccgcaaaatcggtttggcccggttcggcaacaaccgcgcccaaggtacgttcgacttgggccaacgtttcggcgaaaacaaagcattcggcgtgcgcgccaacggcaaactgcgccacggcgacaccccgcgccacggttacagcgaagacaacaaagaatttgcggtaaatgccgactatcgcggcgaaacactgcgcgtagcgttcgattccatctacgcaaaacgcaaaaccaacggcggtcgcgcgcgtatgcaggacattcaaaacgccggcggacgcttgtcctgactttgggcggacgtttccaagcggttgaatacaccaataagaaaaaatcacgcggaacggcagccggagctagcaaggtagaagtgaaggcaaacggaaatattgagcatcaattggcatcgtttacagccgactatcccaattcttgggagaactctgccaacttggatgccaatatcaaagtcaacagcctggctttgtccgacaccttgggcttcgtggataacaaataccgttggcgcgcccgatggtaaaaccaacctgctgccttcttggaactggcaaaataccgccggccaaaccaatatgcttacgtttgaatgggatgcgtttgacaatgcccaaattaccggcggtatcggctacaacaaggcgcgttattacggcacgctgatttccccgaccgtttgcggtacaagcggtgcgagcgaccaaaccgctacctgctcaagtgccaagcaataccacaccggcacggcgagcctgaccgaccaatatttccgcacattgagtatgaacctgaccgcacgcggcgaatttgaaaccggtccggtaacacataactggagcaccgcgttcgaccgtgttatccgccagcggaaaaccattcagagcggtgatgccaaacgtttcagcccgatgctgatggcggcgtgggtgccgcaacctgatttggttgtgtacggcaactatatggaagacttggagcctgccgatatcaaaaccgatgattccggcgaaacgacaatggcgaaaccgcgtgtcagccgtcagtttgaagtgggcgtgcgtaaaaactggggcaatttcgtaaccacgttaaacgcgttccaaatcaaacgcccgggctactggcgcggtcagactaataaagatggcagcctgacctacggcaataattccgattttgcccgctataaagcgcaaggcggtgcggccaaagacgaacaaggcatggaacgcaatcgcggtattgagttcaacacctacgcgaacttgctcaacaatactttgcgtccgactttgggtctgatgtatctgcaatcgaccgtgaaagagtatccaaattcacgcgatatgctggttaacggcgtacaagttgccaacccgcgtgtgattgccaaagcgggcgtggaatgggataccccgtttgccaaaggtttgaccttgaacggcaacgtttcgtatttcggcaagtcttaccaagatacgaaaaaacaatacgccttcccgtcttacactttggttgacgtaggcgcgcgctacaaaaccaagcttggcaaaaacactctgaccgtcagcagctcggtggaaaacctgttcaacaaaaactattggcaggtacagcgcggccaatacgaccgcagcttcgccgtcgtcggtatgccgcgcacttactggctgaaggcggaattggatttctga

SEQ ID NO: 60268 - DNA, 326 bp, Neisseria meningitidis; identical to SEQ ID NO: 52110

SEQ ID NO: 60269 - DNA, 1230 bp, Neisseria meningitidis; identical to SEQ ID NO: 44084

SEQ ID NO: 60270 - DNA, 399 bp, Neisseria meningitidis; identical to SEQ ID NO: 56204

SEQ ID NO: 60271 - DNA, 288 bp, Neisseria meningitidis
ttgccgagcgataaagaagcgcggacagggtgcttatctttgcctgccaataacggtataattcgggcgttatcaccgccttttaccggtataaacatcagactttttgccgccttgggtctcctgtccctttccggcgcggcggcgcaagcctccgtataccattgcaactcaaatggcaaaagcgtatatacatcagccccagcaggatcgtgcgccgatgcggatttacctaaaatcagcagccatcagggaggcggataccgcctgaaaattaaaaaactcagt

SEQ ID NO: 60272 - DNA, 213 bp, Neisseria meningitidis; identical to SEQ ID NO: 40104

SEQ ID NO: 60273 - DNA, 840 bp, Neisseria meningitidis; identical to SEQ ID NO: 39493

SEQ ID NO: 60274 - DNA, 429 bp, Neisseria meningitidis
atgaccgaaaacgcacaggacaaggcgcggcaggctgtcgaaaccgtcgtcaaatccccggagcttgtcgagcaaatcctgtccgacgagtacgtgcaaataatgatagcccggcgtttccattcgggaccgttgccgccgccgtccgacttggcgcaatacaacgacattatcagcaacggggcagaccgcattatggcaatggcggaaaaagaacaagccgtccggcacgaaaccatacggcaagaccaaaccttcaacaggcgcgggcaactgtacggcttcatcagcgtcatcctgatactgcttgccgtcttcctcgtatggagcggctaccccgcaaccgccgcctcccttgccggcggcacagtggttgccttggcgggtgctttcgtgattggaagaagccgagaccaaggcaaaaattaa

SEQ ID NO: 60275 - DNA, 270 bp, Neisseria meningitidis; identical to SEQ ID NO: 38067

SEQ ID NO: 60276 - DNA, 1011 bp, Neisseria meningitidis; identical to SEQ ID NO: 54184

SEQ ID NO: 60277 - DNA, 402 bp, Neisseria meningitidis; identical to SEQ ID NO: 46094

SEQ ID NO: 60278 - DNA, 1032 bp, Neisseria meningitidis
atggatttaagtatcgtagttcccatttataatgtcgaaagttatttggaagcgtgtttaagttccatagaacctatattaagtaatgaaaatgtcgaacttatccttgtgaatgacgggtcaaaagacggaagtgaagatatatgttataaatatatagataaaacaacaaacaacaaacaacaaacaacaaacaacaaacaacaaacaacaaacaacaaacaacaaaaccggacaccaaatatcaaatatatatatcaggataaccaaggattgtcagaggcgagaaataccggaataaaaaattcaaacggaaaatatatagtctttattgattcggatgattttattaattgtcaggtcttgctggattttcttagtaaagatgatattgatatgccggatgtggtttttttaaatgcggttaaatatgataagggaagtgtttcatattttggcgaagattatcagcctgaaaaaatactcaatcaatccaaagtcgaagttttgaaaggattatgccgatttagaaaatttccgggttcggcgtggaataagattataaaaagagaattgatcatcaaagaaaaactattttttgaaaaggggatttattctgaagatatcgaatggtcaatgaggttatttaatgcggcaacaacttttttttatttggacggttgttattactattatcggcagggaagaaaagattctattacgggaactgtttcggaaaaaagtataaagtcattattatatattttggagaaaaatgcggaaatggaatttaatagggatatatcaagttatctttattcctttctttcctacgaatatctcgttttgctttttatcatgacgagtaaaaatatagagtgtgatgctgatataaaaagaagggcgtatcatttaaggtttatgctgttaaagtccaataaattgatatataagctgatattcccgataatcacattattcggggtcgatattacaggcaggattttaaaagtaatcagagggaatgtttaa

SEQ ID NO: 60279 - DNA, 732 bp, Neisseria meningitidis; identical to SEQ ID NO: 56214

SEQ ID NO: 60280 - DNA, 3249 bp, Neisseria meningitidis
atgcgaacgaccccaaccttccctacaaaaactttcaaaccgactgccatggcgttagctgttgcaacaacactttctgcctgcttaggcggcggcggaggcggcacttctgcgcccgacttcaatgcaggcggtaccggtatcggcagcaacagcagagcaacaacagcgaaatcagcagcagtatcttacgccggtatcaagaacgaaatgtgcaaagacagaagcatgctctgtgccggtcgggatgacgttgcggttacagacagggatgccaaaatcaaccccccccccccgaatctgcataccggagactttccaaacccaaatgacgcatacaagaatttgatcaacctcaaacctgcaattgaagcaggctatacaggacgcggggtagaggtaggtatcgtcgacacaggcgaatccgtcggcagcatatcctttcccgaactgtatggcagaaaagaacacggctataacgaaaattacaaaaactatacggcgtatatgcggaaggaagcgcctgaagacggaggcggtaaagacattgaagcttctttcgacgatgaggccgttatagagactgaagcaaagccgacggatatccgccacgtaaaagaaatcggacacatcgatttggtctcccatattattggcgggcgttccgtggacggcagacctgcaggcggtattgcgcccgatgcgacgctacacataatgaatacgaatgatggaaccaagaacgaaatgatggttgcagccatccgcaatgcatgggtcaagctgggcgaacgtggcgtgcgcatcgtcaataacagttttggaacaacatcgagggcaggcactgccgaccttttccaaatagccaattcggaggagcagtaccgccaagcgttgctcgactattccggcggtgataaaacagacgagggtatccgcctgatgcaacagagcgattacggcaacctgtcctaccacatccgtaataaaaacatgcttttcatcttttcgacaggcaatgacgcacaagctcagcccaacacatatgccctattgccattttatgaaaaagacgctcaaaaaggcattatcacagtcgcaggcgtagaccgcagtggagaaaagttcaaacgggaaatgtatggagaaccgggtacagaaccgcttgagtatggctccaaccattgcggaattactgccatgtggtgcctgtcggcaccctatgaagcaagcgtccgtttcacccgtacaaacccgattcaaattgccggaacatccttttccgcacccatcgtaaccggcacggcggctctgctgctgcagaaatacccgtggatgagcaacgacaacctgcgtaccacgttgctgacgacggctcaggacatcggtgcagtcggcgtggacagcaagttcggctggggactgctggatgcgggtaaggccatgaacggacccgcgtcctttccgttcggcgactttaccgccgatacgaaaggtacatccgatattgcctactccttccgtaacgacatttcaggcacgggcggcctgatcaaaaaaggcggcagccaactgcaactgcacggcaacaacacctatacgggcaaaaccattatcgaaggcggttcgctggtgttgtacggcaacaacaaatcggatatgcgcgtcgaaaccaaaggtgcgctgatttataacggggcggcatccggcggcagcctgaacagcgacggcattgtctatctggcagataccgaccaatccggcgcaaacgaaaccgtacacatcaaaggcagtctgcagctggacggcaaaggtacgctgtacacacgtttgggcaaactgctgaaagtggacggtacggcgattatcggcggcaagctgtacatgtcggcacgcggcaagggggcaggctatctcaacagtaccggacgacgtgttcccttcctgagtgccgccaaaatcgggcaggattattctttcttcacaaacatcgaaaccgacggcggcctgctggcttccctcgacagcgtcgaaaaaacagcgggcagtgaaggcgacacgctgtcctattatgtccgtcgcggcaatgcggcacggactgcttcggcagcggcacattccgcgcccgccggtctgaaacacgccgtagaacagggcggcagcaatctggaaaacctgatggtcgaactggatgcctccgaatcatccgcaacacccgagacggttgaaactgcggcagccgaccgcacagatatgccgggcatccgcccctacggcgcaactttccgcgcagcggcagccgtacagcatgcgaatgccgccgacggtgtacgcatcttcaacagtctcgccgctaccgtctatgccgacagtaccgccgcccatgccgatatgcagggacgccgcctgaaagccgtatcggacgggttggaccacaacggcacgggtctgcgcgtcatcgcgcaaacccaacaggacggtggaacgtgggaacagggcggtgttgaaggcaaaatgcgcggcagtacccaaaccgtcggcattgccgcgaaaaccggcgaaaatacgacagcagccgccacactgggcatgggacgcagcacatggagcgaaaacagtgcaaatgcaaaaaccgacagcattagtctgtttgcaggcatacggcacgatgcgggcgatatcggctatctcaaaggcctgttctcctacggacgctacaaaaacagcatcagccgcagcaccggtgcggacgaacatgcggaaggcagcgtcaacggcacgctgatgcagctgggcgcactgggcggtgtcaacgttccgtttgccgcaacgggagatttgacggtcgaaggcggtctgcgctacgacctgctcaaacaggatgcattcgccgaaaaaggcagtgctttgggctggagcggcaacagcctcactgaaggcacgctggtcggactcgcgggtctgaagctgtcgcaacccttgagcgataaagccgtcctgtttgcaacggcgggcgtggaacgcgacctgaacggacgcgactacacggtaacgggcggctttaccggcgcgactgcagcaaccggcaagacgggggcacgcaatatgccgcacacccgcctggttgccggtctgggcgcggatgtcgaattcggcaacggctggaacggcttggcacgttacagctacgccggttccaaacagtacggcaaccacagcggacgagtcggcgtaggctaccggttctga

SEQ ID NO: 60281 - DNA, 1053 bp, Neisseria meningitidis; identical to SEQ ID NO: 44095

SEQ ID NO: 60282 - DNA, 321 bp, Neisseria meningitidis
ttgggcgaaaaaattaaagacggcaaaaaaaccgtactttcccgcgaagaagaacaaaaaatctgcaataccttcacgcacaaacaggcagtggaagatttcagtgtggtaatcggctacgatgaaatcaaagcgaagaatcacagcttgtcggcggggcagtatttcgaggtaaagattgattatgtggatatttccgccgacgaatttgcgcaaaaaatggcgggattttcagcggatttggataaacttttcgccgaatctgccgaattggaaaaagagattaaggatagattggcgatgttgaaattcaattcataa

SEQ ID NO: 60283 - DNA, 421 bp, Neisseria meningitidis; identical to SEQ ID NO: 52124

SEQ ID NO: 60284 - DNA, 1803 bp, Neisseria meningitidis
atgcccgctgaaacgaccgtatccggcgcgcaccccgccgccaaactgccgatttacatcctgccctgcttcctttggataggcatcgtcccctttaccttcgcgctcaaactgaaaccgtcgcccgacttttaccacgatgccgccgccgcagccggcctgattgtcctgttgttcctcacggcaggaaaaaaactgtttgatgtcaaaatccccgccatcagcttccttctgtttgcaatggcggcgttttggtatcttcaggcacgcctgatgaacctgatttaccccggtatgaacgacatcgtctcttggattttcatcttgctcgccgtcagcgcgtgggcctgccggagcttggtcgcacacttcggacaagaacgcatcgtgaccctgtttgcctggtcgctgcttatcggctccctgcttcaatcctgcatcgtcgtcatccagtttgccggctgggaagacacccctctgtttcaaaacatcatcgtttacagcgggcaaggcgtaatcggacacatcgggcagcgcaacaacctcggacactacctcatgtggggcatactcgccgccgcctacctcaacggacaacgaaaaatccccgccgccctcggcgtaatctgcctgattatgcagaccgccgttttaggtttggtcaactcgcgcaccatcttgacctacatagccgccatcgccctcatccttcccttctggtatttccgttcggacaaatccaacaggcggacgatgctcggcatagccgcagccgtattccttaccgcgctgttccaattttccatgaacaccattctggaaacctttactggcatccgctacgaaactgccgtcgaacgcgtcgccaacggcggtttcacagacttgccgcgccaaatcgaatggaataaagcccttgccgccttccagtccgccccgatattcgggcacggctggaacagttttgcccaacaaaccttcctcatcaatgccgaacagcacaacatatacgacaacctcctcagcaacttgttcacccattcccacaacatcgtcctccaactccttgcagagatgggaatcagcggcacgcttctggttgccgcaaccctgctgacgggcattgccgggctgcttaaacgccccctgacccccctaatctgcacgcttgccgtcagtatgtgccacagtatgctcgaatatcctttgtggtatgtctatttcctcatccctttcggactgatgctcttcctgtcccccgcagaggcttcagacggcatcgccttcaaaaaagccgccaatctcggcatactgaccgcctccgccgccatattcgcaggattgctgcacttggactggacatacacccggctggttaacgccttttcccccgccactgacgacagtgccaaaaccctcaaccggaaaatcaacgagttgcgctatatttccgcaaacagtccgatgctgtccttttatgccgacttctccctcgtaaacttcgccctgccggaataccccgaaacccagacttgggcggaagaagcaaccctcaaatcactaaaataccgcccccactccgccacctaccgcatcgccctctacctgatgcggcaaggcaaagttgcagaagcaaaacaatggatgcgggcgacacagtcctattacccctacctgatgccccgatacgccgacgaaatccgcaaactgcccgtatgggcgccgctgctacccgaactgctcaaagactgcaaagccttcgccgccgcgcccggtcatccggaagcaaaaccctgcaaatga

SEQ ID NO: 60285 - DNA, 1149 bp, Neisseria meningitidis
atgtggacgggatttttttcaaaatcaggcactggcattgcagagaaaaggcatcaaaactgccgtgcttgcaccgatgttccgctacttgcggaaagaaacagcaagcatcctgaccgtccttacggttttgcccaataccggcaaaaaggtttggacatctatgcatggcacggcatgtatttcttcccccgttttccgctaatcgacatcgaccgcatccgctgggtgcgggcaggattaaaggcctttgagcgctatatcggggaaaacggcattcccgacatcatccatgcccactgtatgaactatgccggcatacttgccttcaagatttcccaaaaatacggcatcccctatgtcgtcacggaacacagcagcaccattacgcgcggtttggtgcgtccgcaccaatggcagcctatgaaaaatgcggcggcacacgcctccgcactgctcgctgtcagctgccgtttcgcccaagtcctgcaacataaatacggcactacatggcaatatctgcctaacattctgggtaacatctttacccgagccttcaatcccccgcaaatcaaccgtccggacaaatattttaccttctgcactatctcccatctgcgccggctaaaaggacatgatgtcctcctgtccgcctttgcccgtgctttggcaaaacacccaaacctccgtttgaatatcggcggcagcggacaagaagaaacaagcctgaaacggcaggcacgtcagttgggaattgcccatgccgttacatttttgggcgcattgcagcccgaagcagtcttggatttgatgaggaacagcgacgcattcgtccttgccagccgcacagaaaccttcggcgtggtctatatcgaagcactgtcccaaggattgcccgtcattgcaacacgctgcggcggtgcggaatctattgtttcagacggcaacggatatttggttcctgttgacgacgacgatgcccttgccgacgcactcatcaaaatgtatgaacaccactctgattttgaacctgaccgacttagggaaaactgtctgaacgaatttggcgaagataccgttataggcaagttgatcggcattttccgacaggcaatcgcagaatacggtaagaaaataccggtgaaatag

SEQ ID NO: 60286 - DNA, 1128 bp, Neisseria meningitidis
atgtacactttccgcccgtttcccaacctgcacacagaaacacacattatgaacatacaaaacatccgcaccctcctcgacaccgtcgccgttccgaatacggcacgcacgctcggcggcgaaaaggccgtccgttcggtcgaacagcgttcagacggcatccatatcgccctgcatttcggcttccccgtcgcgcacattgcctcagaaacagccgaccgcatacaggaaatcctgatgcccgaaacaggcgacacacacatccatctgtccatggacactgaaatcggcacacacaaagtccagcccggcgttaccaccatcaaaggcgtgaaaaacatcatcgccgtcgcatcgggaaaaggcggcgtgggcaaatcgacaaccaccgccaaccttgccgccgcaatggcgcgcatgggcgcgcgcgtcggcgtgctcgatgccgacctttacggcccgagccaaccgaccatgttgggtgtggacgaccgcaaacccgatcagaaaaaccaaaaactcattcccgtcgaatcttcagacggcatacaggtcatgtctatcggctttctcgtcgataccgaccaagccgtcgtctggcgcgggccgatggtcagccaagccttgcagcagctgatgttccaaagcgagtgggacgaagtggactacctgtttatcgacctgccccccggcacgggcgacatccaactcacgctgtcccaacgcatccccgtaaccggatcggtcatcgtaaccacgccgcaggacatcgccctgatagacgcgcgcaaagccgtggatatgttccgcaaagtcaacattcccattttgggcgtattggaaaatatgtccgtccacatctgctccaactgcggacacagcgaagcactgttcggcacggacggcggcaaagatttggcggcacgcctcaacgtccccctgctcggacagcttcccctaagcctgcccgtgcgcgaagccatggacggcggcacaccggcgcaactgttcgacgaacaccccgccatcgccaaaatctacaccgatgccgcattccaaatcgccctgagcattgccgacaaaggcaaagacttcagcagccgcttccctaaaattgtcgtcgaataa

SEQ ID NO: 60287 - DNA, 2004 bp, Neisseria meningitidis
atgaaactcgaagcaagcaagcagcaaaagtttaaaaaatcatttattgtaagtctatttttttctattctttatacctctccgcttttggctgttgattacgtttacgacaaaaccaagctcactgatgatgaaattacccgcttaaaaaaactccgcgatagaaatagtgaatattggaaagaagaaacttatcacataaaaagtaacaaccgagtttatccaaacattcccgcattattccctaaacatcctttcgatccattcgaaaacatcaataattcaaaaaggatttctttttatgacaaagaatacactgaagattaccttgttggttttgctcaaggtttaggcgttgcaaaaagaaatggggaaacagaaaaaccaatacggcaatattttaaggaatgtttaaacactgggaaatatagtgatgatacttgcaaatctcaacaatctattcctacagtaagaagtgatattttcgccctaaatacgaaaataaaaaatagccatatcaacagcgaaattttcgctgtcggtaattatacaaaattgatgtactcagcccaacatcattctatttggtcagagcatctctattccaattcagaattatctcttgacgttgataactcacacgttatcggacaaacgattgatttgggagcattagaattaacaaattctctatgggaaccccgttggaactctaatattgattatttaataacaaaaaatgctgaaattcgttttaacactaaaagtgaaagtttactcgtaaaagaagattatgctggcggagctcgttttcgttttgcttacggtctaaaagataaagtccctgaaacaccagttttaacttttgaaaaaaatataactggcacttccgacatcatcttcgaaaatccaatagacgatttaaaaagtctcgacgggcatcaaattatcaaagtaaatggcacagcagataaacacgcattccgtctttctggcaaacaccaaaagggaatttatacgctttctttacaacaacgcccagaaggcttttttaccaaagtgcaagaacgcgatgatatttcgatttatgcacaacaggctcaagctgccaataccttattcgccttgcgtttgaacgacaaaaacagcgatattttcgaccgcactttaccacgcaaaggcttgtggttgcgtgtgattgacggacattccaaccaatgggtgcaaggcaaaacagcacctgtagaaagcaatcgtaaaggtgtgcaactcggcggcgaagtattcacatggcaaaacgaaagtaatcaactttccgttggcttaatgagcggacaggcagaacaacgcagtactttccgcaatccagatacagacaatcttacaacgggaaatgtgaaaggctttggtgcaggcgtttacgccacttggcatcagcttcaggacaaacagacaggtgcgtatgcggatagctggatgcaatatcaacgcttccgccaccgtatcaacactgaagatgctacagaacgttttacttcaaaaggtattactgcctcaattgaagcaggttacaacgctttattggcggaacacgtaactaaaaagggcaacagccttcgtgtttacctacaaccacaggcgcaattgacttatttgggggtaaacggaaaattcagcgatagcgaaaatgcccacgtgaatttacttggctcccgccaattacaaagccgagtgggcgttcaagctaaagctcaatttgctttcactaatggcgtcactttccaaccatttgtttccgtcaattcaatctaccaacaaaaacctttcggggtagaaatggacggagaacgtcgagtgataaacaataagacggcaattgagagccaattaggtgtagcagtgaaaatcaaatctcacttaaccttacaagcctcattcaaccgccaaacaggcaaacatcatcaggctaaacaaggtgcgttgaatttgcagtggacgttttaa

SEQ ID NO: 60288 - DNA, 2052 bp, Neisseria meningitidis; identical to SEQ ID NO: 54199

SEQ ID NO: 60289 - DNA, 2115 bp, Neisseria meningitidis
atgacactgaaagcaagcaagcaagcaagcaagcaagcaagcaagcaagcaagcaagcagcaagcaagcggtcgggttaatctattaacattatctgttttatcgctgttttgcacgccatatgtttgaggttcggatgcgtacgatcccgtcaaagaagccgagattaaaaacaaatttattttagaagcggcggaagacagaaattcccacgtttggcgcggcccgtgcagcatatcttttgattgcttcggtatgttcagagctcagcttggttcaaatactcgttctaccaaaatcggcgacgatgccgatttttcattttcagacaagccgaaacccggcacttcccattatttttccagcggtaaaaccgatcaaaattcatccgaatatgggtatgacgaaatcaatatccaaggtaaaaattacaatagcggcatcctcgccgtcgataatatgcccgttgtcaaaaaatatattacagagaagtatggggctgatttaaagcaggcggttaaaagtcaattacaggatttatacaaaacaagaccggaagcttgggcagaaaataaaaaacggactgaggaggcgtatatagcacagtttggaacaaaatttagtacgctcaaacagacgatgcccgatttaattaataaattggtagaagattccgtactcactcctcatagtaatacatcacagactagtctcaacaacatcttcaataaaaaattacacgtcaaaatcgaaaacaaatcccacgtcgccggacaggtgttggaactgaccaagatgacgctgaaagattccctttgggaaccgcgccgccattccgacatccatatgctggaaacttccgataatgcccggatccgcctgaacacgaaagatgaaaaactgaccgtccataaagcgtatcagggcggcgcggatttcctgttcggctacgacgtgcgggagtcggacgaacccgccctgacctttgaagacaaagtcagcggacaatccggcgtggttttggaacgccggccggaaaatctgaaaacgctcgacgggcgcaaactgattgcggcggaaaaggcagaccctaattcgtttgcgtttaaacaaaattaccggcagggactgtacgaattattgctcaagcaatgcgaaggcggattttgcttgggcgtgcagcgtttggctatccccgaggcggaagcggttttatatgcccaacaggcttatgcggcaaatactttgtttgggctgcgtgccgccgacaggggcgacgacgtgtatgccgccgatccgtcccgtcaaaaattgtggctgcgcttcatcggcggccggtcgcatcaaaatatacggggcggcgcggctgcggacgggcggcgcaaaggcgtgcaaatcggcggcgaggtgtttgtacggcaaaatgaaggcagccggctggcaatcggcgtgatgggcggcagggccggccagcacgcatcagtcaacggcaaaggcggtgcggcaggcagtgatttgtatggttatggcgggggtgtttatgctgcgtggcatcagttgcgcgataaacaaacgggtgcgtatttggacggctggttgcaataccaacgtttcaaacaccgcatcaatgatgaaaaccgtgtggaacgctacaaaaccaaaggttggacggcttctgtcgaaggcggctacaacgcgcttgtggcggaaggcgttgtcggaaaaggcaataatgtgcggttttacctgcaaccgcaggctcagtttacctacttgggcgtaaacggcggctttaccgacagcgaggggacggcggtcggactgctcggcagcggtcagtggcaaagccgcgccggtattcgggcaaaaacccgttttgctttgcgtaacggtgtcaatcttcagcctttcgccgcttttaatgttttgcacaggtcaaaatctttcggcgtggaaatggacggcgaaaaacagacgctggcaggcaggacggcgctcgaagggcggttcggcattgaagccggttggaaaggccatatgtccgcacgcatcggatacggcaaaaggacggacggcgacaaagaagccgcattgtcgctcaaatggctgttttga

SEQ ID NO: 60290 - DNA, 429 bp, Neisseria meningitidis; identical to SEQ ID NO: 54930

SEQ ID NO: 60291 - DNA, 552 bp, Neisseria meningitidis
atgccgtctgaacgccgaccgtttcagacggcatttttatcgaacaggaaaaccgtcggtaaacttgcagagcgtgtgcaatcccgatatgatggtttgcataaatttaaacatatatgttccgcagctatggcactgattaaagagccgttggacaaagcgaaacaaaggaacgaagaacttgaagcggcagaagaagcggcggcgcaggaggcattgggtcgggagcaggaagtcgaccgcgtatccgaatgggaagaacgctacaagctgtcgcgcagcgagttcgagcaattctggaaaggattgcctcaaaccatacagaataagctgcaagcctcacagaaaacatggaaaagcgggatggataaaatctgtgccaacaatgcgaaagctgaaggtgaaacgccaaacggcataaaattcagcgaactggcatgcaaaacggcggaaaccgaagcacgcttggaagagctgcacaaccgtaaaaaagcccttatcgacgaaatggccagggaagcggacaagaaagaactgccaaagcggctctga

SEQ ID NO: 60292 - DNA, 810 bp, Neisseria meningitidis; identical to SEQ ID NO: 54624

SEQ ID NO: 60293 - DNA, 900 bp, Neisseria meningitidis
atgtggttcaagcagattagtttttatccgctcaacaaagaaaagctgcctgaggcagacgtacttgccgacaaacttgctgaagctgaatttacccattgccaaggcttagactggttcagcgaaggctttgccgcaccggtttcgttctctcccgaactcgttttccctgccgactttaccttgcgcgtcgccctgaaaaaagaagaaaaagtcctgcctgccggcgtcatccgcgatattttggaagagaaggtagcggaaatccaaaacaatgaagcccgcaatgtcggccgtaaagaaaaacaagagcttaaagagcaaattacagacgacctgctgccccgagcgtttacccgcagcagccgtacagaagcggtgtttaacacccgccacggctacctgctcgtcaataacgcggcttccgccaaagcagaaaacatcctgaccaagctgcgcgaagctttgggcggtttggaagcctcgctgccgaataccaagcaatcgccctcttccttgatgaccggctggctgttgcaagggcattgcgaaggcggttttgaattagacagcgattgcgaactcaaaggtacgggcgatattgttcccgtcgtcaaagtatccaaacaagatttaaccgccgacgaagtggttcaacacgtcaaaaacggtaaaaccgttacccaactgggcttggtgtggcgcgaacaaattgcctttatcctcactcaagacttcacactcaagcgcatccaatacctcgacgtattgcaggaagaagccgaaagcaacggcgacgatgccgccggccttgccttcgcctcgcaaattctgatggcggaatccgtcagcaccatgttggaagaactggtttcctatttgggcggctggcaagattga

SEQ ID NO: 60294 - DNA, 477 bp, Neisseria meningitidis; identical to SEQ ID NO: 55969

SEQ ID NO: 60295 - DNA, 273 bp, Neisseria meningitidis; identical to SEQ ID NO: 59575

SEQ ID NO: 60296 - DNA, 1743 bp, Neisseria meningitidis
atgaaattttttcctgctccatgtctgttggttatcctggctgtcataccccttaaaaccttagctgccgatgaaaacgatgcagaacttatccgttccatgcagcgtcagcagcacatagatgctgaattgttaactgatgcaaatgtccgtttcgagcaaccattggagaagaacaattatgtcctgagtgaagatgaaacaccgtgtactcgggtaaattacattagtttagatgataagacggcgcgcaaattttcttttcttccttctgtgctcatgaaagaaacagcttttaaaactgggatgtgtttaggttccaataatttgagcaggctacaaaaagccgcgcaacagatactgattgtgcgtggctacctcacttcccaagctattatccaaccacagaatatggattcgggaattctgaaattacgggtatcagcaggcgaaataggggatatccgctatgaagaaaaacgggatgggaagtctgccgaaggcagtattagtgcattcaataacaaatttcccttatataggaacaaaattctcaatcttcgcgatgtagagcagggcttggaaaacctgcgtcgtttgtcgagtgttaaaacagatattcagattataccgtccgaagaagaaggcaaaagcgatttacagatcaaatggcagcagaataaacccatacggttcagtatcggtatagatgatgcgggcggcaaaacgaccggcaaatatcaaggaaatgtcgctttatcgttcgataaccctttgggcttaagcgatttgttttatgtttcatatggacgcggtttggcgcacaaaacggacttgactgatgccaccggtacggaaactgcaagcggatccagaagttacagcgtgcattattcggtgcccgtaaaaaaatggctgttttcttttaatcacaatggacatcgttaccacgaagcaaccgaaggctattccgtcaattacgattacaacggcaaacaatatcagagcagcttggccgccgagcgcatgctttggcgtaacagacttcataaaacttcagtcggaatgaaattatggacacgccaaacctataaatacatcgacgatgccgaaatcgaagtgcaacgccgccgctctgcaggctgggaagccgaattgcgccaccgtgcttacctcaaccgttggcagcttgacggcaagttgtcttacaaacgcgggaccggtatgcgccaaagtatgcccgcacctgaagaaaacggcggcggtactattccaggcacatcccgtatgaaaatcataaccgccggattggatgcagcggccccgtttatgttgggcaaacagcagtttttctacgcaaccgccattcaagctcaatggaacaaaacgccgttggttgcccaagataaattgtcaatcggcagccgctacaccgttcgcggatttgatggggagcagagtcttttcggagagcgaggtttctactggcagaatactttaacttggtattttcatccgaaccatcagttctatctcggtgcggactatggccgcgtatctggcgaaagtgcacaatatgtatcgggcaagcagctgatgggtgcagtggtcggcttcagaggagggcataaagtaggcggtatgtttgcttatgatctgtttgccggcaagccgcttcataaacccaaaggctttcagacgaccaacaccgtttacggcttcaacttgaattacagtttctaa

SEQ ID NO: 60297 - DNA, 687 bp, Neisseria meningitidis; identical to SEQ ID NO: 39393

SEQ ID NO: 60298 - DNA, 828 bp, Neisseria meningitidis; identical to SEQ ID NO: 36245

SEQ ID NO: 60299 - DNA, 657 bp, Neisseria meningitidis
atggattttgaaaaagcgcggttcaatatggtcgaacagcaaatccgtccgtgggatgtattggattttgacgttttggacgctttggcggagattccgcgcgagctttttgtcgatgaggacttgcagggtttggcgtatgcggatatggcgctgccgcttgccaacggtcataagatgctggagccgaaagtcgtggcgcggctggcgcagggcttgaagctgacgaaaaacgatacggttttggaaatcggcacgggttcgggctatgcgaccgcgctgttggcaaaattggctagtcgtgtggtttcggacgacatcgatgccgaacagcaaaagcgcgccaaagcggttttggacggcttgtctttggaaaacattgattatgtgcaaaacaacgggctgaccgaactttccgcaggcgcgccgtttgatgcggtttatgtcggcggcgcggtaaaccttgtgcctgaagtgttgaaagaacagttgaaagatggcggacgcatggcggttatcgtaggccgcaagcctgttcagcgcgcgcttttgattacgcgcaagggcgatgtgtttgaagagaaggtgctgttcgatactttggtggcgcatttggatgataaggatgccgatccgtttggcggtttcgatttttaa

SEQ ID NO: 60300 - DNA, 444 bp, Neisseria meningitidis; identical to SEQ ID NO: 38644

SEQ ID NO: 60301 - DNA, 1170 bp, Neisseria meningitidis; identical to SEQ ID NO: 46588

SEQ ID NO: 60302 - DNA, 1392 bp, Neisseria meningitidis
atgcttttggttatgcgtgcgaagcagggtaagaaaacaccgaagcgcaaatcccaaggtgtcggcaatacgcaggggcagacacccggaagcaatgattcggactgggtcgatcagattggacaatcggtttcagacggcacgcaacccgactggtcttggaacgaaagtgccgagaccgcatccgccgccgtatccgcgcaagaagtcgatccgcttacggagtatcaggtttataagcaattcggttatcagggcaaggctgccgaatctttggctgcctatctggacggcattccggatggtgaagcgaaacctgaaaaccttatccgcgagctgctcgatatcaatctcgaagtgggggatgtcgatgttttggcagacaatctgcaaaaatacggcaaactgattccttccgaacttttggcaaaatatatcgaacaggcattacagcgcgattcaaaccatttgcgtatccgtgtcttggcggaagaaggtttgggatggggcactcaggagattgaaaaacgtgcggaaggcggttctgcgacggcagcttccgcatcgcccccgccggatgccggcggtaaggcttatgaagccgaagaaatcaagcgcatcccgattgtgcggggcaaaaaagacgtgtccggaatcagtcaagaggaaatcggtgcgattgccggtttggttcgcgccgatcaaggtgcgaaaatccttaaagacaaagtcagctatgaaacggcatcgaaacaatacgaccgtgccatccaaacttccgaaaaacctgcaaacctgattatcgatgcgttgaaactcgattaccaacacgcggacatagaccgttttgccggacatttgtggaaactttaccaaacgttgggtaactacggcaggcaggttaaagagcggatgctggggtgggggtacagcttgggttaccatgaagttttcgatgatttggaaaaagggccgaacgaccggcaaatcaaagacatcggtatggggcacgggtatctgccgaaaaatatacagaaattcaaatcgcaacatcgggatttggtgcttcaagattcttcgttgatcaacaccggttcgtctccggcagacgatgcggttaaggaagtagagtcgttgctgatgtatggtcagattgaagcggcaatggatgtgttggagcaggcggtattgaaatatcccgacgagtcccagctttatattacgttgatcgatatttatgaacgtactgaagattgggataggttggggcagtttttaagggtattgagggaacgtgcggacaggcttcctgaagaggtcgttatgctgatgagccggctgctgcagcgtatgaatcaaaatattaaaaaaataaaacggtacggaaaataa

SEQ ID NO: 60303 - DNA, 1146 bp, Neisseria meningitidis; identical to SEQ ID NO: 55157

SEQ ID NO: 60304 - DNA, 1128 bp, Neisseria meningitidis; identical to SEQ ID NO: 44813

SEQ ID NO: 60305 - DNA, 282 bp, Neisseria meningitidis; identical to SEQ ID NO: 55698

SEQ ID NO: 60306 - DNA, 618 bp, Neisseria meningitidis
atggtcattgcagccattatggcgatgatagccctccccaatatgagccaatggattgcatcccgccgcattgccagtcacgcggagcggattgccaaccttttgcgtttctccaggggcgaagccgtccggctcaatctccctgtctatatctgtcctgttcaagttaaaaaagacggtacggtcaacaataaatgtgactccggcaagaaggggcagggaatgttggctttcggcgacaaaaacggcaataagggatatgacaatgatacggcggatgttctcctccgcagtgtggtattgaatgatgatatcaatgataagcggattaattatgccttcaaccatatcgcttttggtcagactcagccgaccaccgaccgtgtagtttggacattcaatcaaaacgggacgttcggttatacgaaagaccagcatcttacaaaacaatccagctttttttattccgacggttatatccaaatcgtgctgacagatgcgagagcagtttcagatgccgataagaaattccgttcggcggtggttttgattgacagcagcggcagggttgaggtttgtcctagaaacgataggcgtaccgtatgccaatataaatga

SEQ ID NO: 60307 - DNA, 1050 bp, Neisseria meningitidis; identical to SEQ ID NO: 54699

SEQ ID NO: 60308 - DNA, 741 bp, Neisseria meningitidis
atgctgattgtccgaccgtcgggcagggcgaaggacgatgtggaaacctgccgtcgtgccggatggcaggcggaagtgttgagcccgattgaaatcgaagcagatgctgccggactggaacttttgtccgaacaatatgcccgtgcggatgccgtgttttgggtcagtccgaccgccgttgaaaccgccgtcccgtaccttaacctttcagacggcataaagatacacattgccgtagggcagggcagccgccgcgcattggaacgctatttgggcagaacggtcattgcgcctcatgacggaaacgacagcgaggcggttttgcgcctgccggtttggaacagtctgcccgaaggtgcacgcgtattgtttgtgcgcggacacggcgggcgggattttctgatgaatgccttgcaggagaaaggttttcggacggagatggcagaagtctatttcagacggcataaacctttgaactttcaaaatttccaaaccgaaaatattgccgccgcctatattacgtcgaccgagctggtgcgcttgctgttcgggcagcttccgccgcaattttcccgattcttcaaatccttgctatactttacccatcatccgcgcattgcggaggcattgaagcgcgaaggcgtgtgttcggtcgaaaccgtccctacgctggaagccgcgctttcccattcttccatttccgtttcagacggcatggtctttcccggaacctcaaattaa

SEQ ID NO: 60309 - DNA, 1008 bp, Neisseria meningitidis
atgagcaccttcttccagcaaaccgcccaagccatgattgccaaacacatcgaccgtttcccgctattgaagttggatcaggtaattgattggcagccgatcgaacagtacctgaatcgtcaaaaaacccgttacctcagagaccaccgcggccgtcccgcctatcccctgttgtccatgttcaaagccgtcctgctcggacaatggcacagcctctccgatcccgaactcgaacacagcctcatcacccgcatcgatttcaacctgttttgccgttttgacgaactgagcatccccgattacagcaccttatgccgctaccgcaactggttggcgcaagacaacaccctgtccgaattattggaactgatcaaccgccaactgaccgaaaaaggcttaaaagtagagaaagcatccgccgccgtcattgatgccaccattattcagactgccggcagcaaacagcgccaggccatagaagtcgacgaggaaggacaagtcagcggtcaaaccacactgagtaaggacaaaaatgcccgttggacaaagaaaaacggcctctacaaactcggttacaaacaacatacccgtaccgatgcggaaggctatatcgagaaactgcacatcacccccgccaatgcccatgagtgcaaacacctgtcgcctttgctggaaggactgcccaaaggtacgaccgtctatgccgacaaaggctatgacagtgcggaaaaccggcaacatctggaagaacatcagttgcaggacggcattatgcgcaaagcctgccgcaaccgtccgctgacggaaacgcaaaccaaacgcaaccggtatttgtcgaagacccgttatgtggtcgaacaaagcttcggtacgctgcaccgtaaattccgctatgcgcgggcagcctatttcgggctgattaaagtgagtgcgcaaagccatctgaaggcgatgtgtttgaacctgttgaaagccgccaacaggctaagtgcgcccgctgccgcctaa

SEQ ID NO: 60310 - DNA, 1053 bp, Neisseria meningitidis; identical to SEQ ID NO: 55130

SEQ ID NO: 60311 - DNA, 2226 bp, Neisseria meningitidis
atgactcaaaaatccaccattatttatacccataccgacgaagcccccgcgctggcgacccaatcgctgctgccgattgtgcaggcttttgcccgccacgccgatattgatgtcaaaactgccgacatttccctgtccggccgtattttggcggcatttcccgaatatctgaccgaagcgcagcgcgtacctgatgcgcttgccgaattgggcgaactggtgaaacaacccgatgcaaacgtaatcaaactgccgaacatcagcgcatccgtaccgcaactgactgccgcgattaaagaattgcagtctaaaggctttgccgttcccgactatcctgccgaccctcaaaccgatgaagaaaaagccgtacgcgaacgctacgaccgcatcaaaggcagcgcggtaaaccctgtcctgcgtgaaggcaactccgaccgccgcgcccccaaagcagtgaaaaactttgccaaaaaaaatccgcacagtatgggcgcgtgggcgaaagactccaaaacccacgttgccaccatgcaaagcggcgactttttccataacgaacaatccgttaccgtacccgaagcgacttccgtatccatcgtgttcaccgacaaacaaggcaacaaaaaagagctgcgcgcgcctgttgccctgaaagccggcgaaatcatcgacgcaaccgtgatgagcaaaaaagccctgctcgccttccttgccgaacaagtgaaagacgcgaaggcaaaaggcgtattgttctcactgcatatgaaagccacgatgatgaaagtgtccgacccgattatcttcggacacgccgtcaaagtgttcttcgcgcctgtatttgaaaaattcggcggcaaactggctgccgcaggtgtcaacgtcaacaacggtttcggcaacctgcttgccaatctggacaaactggatgcggacacccgcgccgccgtcgaagctgaaatcgccgccgtttacgccgccaaccctgatttggcgatggttgattccgacaaaggcatcaccaacctgcacgttcccagcgatgtcatcgtcgacgcttctatgcctgcgatgattcgtaattccggccgtatgtgggacaaaaacggcaaagcacaagacaccaaagccgtgattcccgacagcagctatgccggcgtttaccaagcaaccatcgacttctgccgcgaacacggcgcatttgacccgacaaccatgggtactgtgcccaacgtcggactgatggcgcaagcggcggaagaatacggctcgcacaacaaaacctttgaaatcgaagccgacggtcaggttcaagtagttgatgcggcaggaaaagtcctgatgcagcacgacgttgaagcaggcgacatctggcgtatgtgccaaaccaaagacgctccggttaaagactgggtacaactcgccgtcaaccgcgcccgcctgagcaatacgcccgccgtgttctggctcgacgaaaaccgtccgcatgacaagagcctgctcgccaaggttaaagcctaccttgccgaactggataccaacggcctcgacatccgcgtcctcgctcccgaagaagccgccaagttcagcctgggccgtctgaaaaacggcgaagacaccatctccgtaaccggtaatgtcttgcgcgactacctgaccgacttgttcccgattttggaactcggcacaagcgcgaaaatgctgtctatcgttccattgatgaacggcggcggtatgtttgaaaccggcgcgggcggttctgcaccgaaacacgtccaacaattccttgaagaaaaccacttgcgttgggactctttgggcgaattcctcgcgctcgccgtatcgtttgaacatttggcacaaaaaaccggcaacaccaaagcccaagtcctcgccgacactttggatgccgccaccgaaaaactgctgctaaacgacaaatcgcccaaacgcaaaaccggcgaactcgacaaccgcggcagccatttctacctcaccctctactgggcgcaagaattggcggcgcaagacaaagatgccgaattgaaagccgcatttgcgccgttagccaaatcgttggcggaaaacgaagccaaaatcgttgaagaactctctgccgtacaaggcaaagcggtcgacatcggcggctactacgccgccaatcctgaaaaagcggcacaagcgatgcgcccaagcgcaacctttaatcaggcactaagcaccttataa

SEQ ID NO: 60312 - DNA, 495 bp, Neisseria meningitidis; identical to SEQ ID NO: 54206

SEQ ID NO: 60313 - DNA, 834 bp, Neisseria meningitidis; identical to SEQ ID NO: 55636

SEQ ID NO: 60314 - DNA, 417 bp, Neisseria meningitidis
atgcgcttactccatactatgctccgcgtgggcaatctcgaaaaatcccttgatttctaccaaaacgttttgggcatgaaactgctctgccgaaaagactatcccgaaggcagatttacccttgccttcgtcggttacggcgatgaaaccgacagcacggttttggaactgacgcacaactgggatacggaacgatacgacttgggcaacgcttacggacacatcgcgattgaagtggacgatgcctacgaagcctgcgaacgtgtgaagcggcagggcggaaacgtcgtccgcgaagccggcccgatgaaacacggcacaaccgtgatagccttcgtcgaagaccccgacggatacaaaatcgagttcattcaaaagaaaagcggtgacgattcggttgcctatcaaactgcctga

SEQ ID NO: 60315 - DNA, 291 bp, Neisseria meningitidis
atgaacatccaacttcaaggtcacatcgtcggcgttaaaaaattcaacggacaaatcgaaggcaagagcttcgactattgccgcctgattgtcgccacacccttagacagctcccaaggcaacgcattgggcagctctactactgaatacgatttcggcggctctgccaatttcgagcagttccgaaacgcccaatttccgatcgaagcaaacctgaacgtagaaatcgtcactacgggcaaaacccaaaaactgaaagtcatcggttttcaactcgtgaagaaaggctga

SEQ ID NO: 60316 - DNA, 1176 bp, Neisseria meningitidis
atgcagaatatttttgaccctttggttattcgtggaaaatcccttacccccatcgtgcaaggcggtatgggggtcggtgtttccgcatcgggtttatccagcgcggtggcacgtgaaaacggtatcggaacgattgccagtgtggatttgcgccaccttcacgaagacctactcgccgaatcccaaatcaatccgagtgaagagaaatatacgtctttgaactgtaccgcattggacagggaaatccaaaaagccaaaagtgcttcagagggaaaagggctgattgcggtcaacgtgatgaaggcggtcaaagaccacgccgcatatgtccgccaggcttgcgaatcaggggcggatgcggttgtaatgggtgccggtctgcctttagacctgccggaaatgaccgagggctatcataaatatgtcgcgctgctgccgattctgtccgaatcgcgcggtattaatatcgttttgaaacgttggatgaaaaaaggcatattgcccgatgcgattgtagtcgaacatcctgcccacgcggccggacatttgggtgcatcaaccgttgaaggcgtaaacgatgccaagttcgacttcaaacgcgtgattgaggaaacgtttgaagttttcaaaagtttagggctggaaagcgaaaaaatcccgcttattcttgcgggaggcatggcaaattttgaaaaagtcaaaaccgccctaaagaactggggagcatccgccgttcaaatcggtacggcttttgccgttaccgaagaaggagatgcacaccttaacttcaaaaaaacgctcgccggtgcggaaactgaaaaagtagtcgaatttatgtctgttgccggtttgccggcgcgcggtgtccgcaccaaattcctagacagctacatcaagcgtgaaagcaaacttcagacaaacgccaaagccgacccgcgccgctgtacccaaggtttaaactgcctaaccagttgcggtctgcgcgacgggctttccaaagccggacaattctgcattgatatccagcttgctgccgcatttcgtggagaagtagataaaggcctgttcttcagaggtaaagacccgctgcccttcggtaatgccatccgcaccgtccgcgagacgatacaatatctgctgacggggagcgaacctgttgcaacgctcggacgctga

SEQ ID NO: 60317 - DNA, 318 bp, Neisseria meningitidis; identical to SEQ ID NO: 54948

SEQ ID NO: 60318 - DNA, 1470 bp, Neisseria meningitidis
ttggcactggcacttgccgtcattacccgccgcgtactgctgtctttaggcatcggtattctggtcggcgttgcctttttggtcggcggcaaccccgtcgacggtctgacacacctgaaagacatggtcgtcggcttggcttggtcagacggcgattggtcgctgggcaaaccaaaaatcttggttttcctgatacttttgggtatttttacttccctgctgacctactccggcagcaatcaggcgtttgccgactgggcaaaacggcacattaaaaaccggcgcggcgcgaaaatgctgaccgcctgcctcgtgttcgtaacctttatcgacgactatttccacagtctcgccgtcggtgcgattgcccgccccgttaccgacaagtttaaagtttcccgcgccaaactcgcctacatcctcgactccactgccgcgcctatgtgcgtgctgatgcccgtttcaagctggggcgcgtcgattatcgccacgcttgccggactgctcgttacctacaaaatcaccgaatacacgccgatggggacgtttgtcgccatgagcctgatgaactattacgcactgtttgccctgattatggtgttcgtcgtcgcatggttctccttcgacatcggctcgatggcgcgtttcgaacaagccgcgttgaacgaagcccacgatgaaactgccgcttcagacgctaccaaaggtcgtgtttacgcactgattattcccgttttggccttaatcgcctcaacggtttccgccatgatctacaccggtgcacaggcaagcgaaaccttcagcattttgggtgcatttgaaaatacggacgtgaacacttcgctggtattcggcggcacttgcggcgtgcttgccgtcgtcctctgcacgctcggcacgattaaaaccgccgattatcccaaagccgtttggcagggtgcgaaatccatgttcggcgcaatcgccattttaatccttgcctggctcatcagtacggttgtcggcgaaatgcacacgggcgactacctctccacgctggttgcgggcaacatccatcccggcttcctgcccgtcatccttttcctgctcgccagcgtgatggcgtttgccacaggcacaagctgggggacgttcggcatcatgctgccgattgccgccgccatggcggtcaaagtcgaacccgcgctgattatcccgtgtatgtccgcagtaatggcgggggcggtatgcggcgaccactgctcgcccatttccgacacgaccatcctgtcgtccaccggcgcgcgctgcaaccacatcgaccacgttacctcgcaactgccttacgccttaaccgttgccgccgccgccgcatcgggctacctcgcattgggtctgacaaaatccgcgctgttgggctttggcacgacaggcattgtattggcggtgctgatttttctgttgaaagataaaaaacgcgccaacgcctga

SEQ ID NO: 60319 - DNA, 426 bp, Neisseria meningitidis; identical to SEQ ID NO: 42184

SEQ ID NO: 60320 - DNA, 366 bp, Neisseria meningitidis; identical to SEQ ID NO: 54775

SEQ ID NO: 60321 - DNA, 474 bp, Neisseria meningitidis; identical to SEQ ID NO: 36318

SEQ ID NO: 60322 - DNA, 1281 bp, Neisseria meningitidis
atggaaaactcattgaaagaagccgccctcaagttccacgaattacccgttccgggcaaaatctccgttaccccgaccaaatctctggccacgtctaaagacctggcgttggcgtactctccgggcgtagccgctccttgtatggaaatccatgccgatccgcaaaatgcctacaaatacaccgccaaaggcaacttggtcgccgtcatttccaacggtacggccgttttgggcttgggcgacatcggcgcgctggcgggcaaacccgtgatggaaggtaaaggcgtattgttcaaaaaattcgccggtgtggacgtgttcgacatcgaaatcgatgaaaaagacccgcaaaaactcgtggacatcatcgccgctttagagccgaccttcggcggcatcaacctcgaagacatcaaagcacccgagtgtttctacatcgaacgcgaattacgcaaacgctgcaaaatccccgtattccacgacgaccagcacggcacggccatcattaccgccgctgccgtattgaacgccctgcgttttaccggccgtaaaatcgaagaagcgactttggtgtgttccggcgcaggtgcggccgcgattgcctgcttgaaccaattgctggatttgggcttgaaacgcgaaaacgtgaccgtttgcgactccaaaggcgtgatttaccaaacccgcgaagacaaagatcgcatggacgaatccaaaaaattctacgccgttgaagacaatggccagcgcgtacttgtcgatgccgtcaaaggtaaagacatcttcttgggcctctccggcgcgaacctgctgacccccgaaatgttgaacacgatgaacgaaaaacccatcgtgttcgccatggccaacccgaatccggaaatcctgccgccgctggcaaaagaaacccgtccggacgtggttatcggtaccggccgttccgacttcccgaaccaagtgaacaacgtattgtgcttcccattcatcttccgtggcgcgttggatgtcggcgcgacgaccatcaacgaagaaatgaaacgctcctgcgtgtatgctttggcggatttggcgatggaagaagtaaccgaagaagtggttgccgcttacggtaagaaatttgaattcggcgcggaatacctgattccgactccgttcgattcccgcctgctgccgcgcgttgctacggctgccgccaaagcagcgatggaaagcggcgtggcaacccgtccgattgccgactttgaagcctacgccgccaagctgggcgaatggaagctgtaa

SEQ ID NO: 60323 - DNA, 561 bp, Neisseria meningitidis; identical to SEQ ID NO: 54395

SEQ ID NO: 60324 - DNA, 321 bp, Neisseria meningitidis; identical to SEQ ID NO: 55167

SEQ ID NO: 60325 - DNA, 1923 bp, Neisseria meningitidis
atgattgaaatcaaaaacctcaccctgcaacgcggtttgaaagtcctgctcgacaaagccaacgctaccgtcaatcccggtcagcgcgtcggtttgatcggcaaaaacgggacgggcaaatcgagcctgtttgccttaatcaagggtgaaatcactcaggacggcggcgatgtctcgattccgaaaaactggcggctcgcttccgtttcccaagaaacgcccgatttggatatttccgctttagattacgttttgcagggcgatgccgagttacagacccttcagacggcattgaggcaggcggaagcgcaaaacgacggtatgaaacaggcggaatatcatgccaaattggaagaaatcgacgcttataccgcgccggcccgcgcggcaaaattgttgaacgggctgggtttttcgcaagaagaacacagccgccccgtcaaatccttttccggcggctggcgtatgcgcttgaatcttgcgcaagccctgatttgccgcgccgatttgctgcttttggacgaaccgaccaaccacttggatttggaaaccgtcttgtggctggaaaaccaccttgcctctttaccctgcacgcaaatcatcatttcccacgaccgcgatttcctcaatgcggcaaccacccaaaccatcgaattgtcccagcaaaagctcacgcaatacggcggcaattacgatttttaccaaaacgaacgcgcgcagcgtctcgcgcagcaacaagccgcctatgtcaaacagcaggcgcaaatcaaacatctgcaatcctttatcgaccgcttcaaagccaaagccaccaaagccgttcaggcgcaaagccgcatgaaggctttggcaaagctcgaacgcatcgctcccgcgcatttggacagcgagttttcctttgagttttacaatcccgagcatctgcccaatcctttgctgaagctggaacacgcagatttgggttacgaaggcaaaactgttttgcacgacattaccctgtcgctggaaagcggcgcgcgctatggtttattgggtgtcaacggcagcggtaaatctacatttatcaaagccttggcgggcaaaatcgatttgctctctggcagcatcgtccgttccgaaaaactcaatatcggctattttgcccaacaccaactcgataccatccgcgccgaccaaaaccctgtttggcatattcagcagctttctcccgaagtacgcgaacaagaaatccgaaatttcctcggcggcttcaattttgttggcgatatggcgttacagaaaaccgaacctttttccggcggagaaaaagcccgccttgcccttgccatgattatctggcaaaagccgaacctgttgctgcttgacgaaccgaccaaccatttggacttggatatgcgccacgccttaacgctcgcgttgcaaagtttccaaggcgccttaatcatcgtatcgcacgaccgcagcctgcttgaagcgactaccgacagcttcctcctgatcgacaaaggccgtctgaagaacttcgacggcgatttgaacgattaccgccaatggcgtttggcacaggaaaacgccgccgccgcacccgcagcatccgcacaaagccaaagccgcaaagacaccaagcgcatcgaagcgcaaatccgtcaggaaaaagcccgacgcggcaagccgatacagcagaaaatagaccgtgccgaaaaagaaatggcgcagctttccgaaattcagacggcatgtgaagcatttttagcacaagaagacgcttaccttgaagcaaacaaagaaaaattgcaaaataccttatcccagctggcaaaagtcaaaacacaacttgcccaaatcgaagaggtttggctggcttgtcaagaagaattggaacggattgaaactgaaatcgagaaacagtttgccgagcgataa

SEQ ID NO: 60326 - DNA, 2472 bp, Neisseria meningitidis; identical to SEQ ID NO: 55140

SEQ ID NO: 60327 - DNA, 1155 bp, Neisseria meningitidis
atggatacgcacgcggacgaaacaaaacttcaaaacacgcaagccaaacgcaaacgccgcctgacggcattgacgctgctgttcgcgcttgccgccgcagccgccgggtcggcgttttttttatggtggcagcacgaagaggaaacggaagacgcttatgttgccggacgcgtggttcaggttacgccgcaaaagggcggtacggtgcggaaggttttgcacgacgatacggatgccgtgaaaaaaggcgacgtgctggcggtattggacgacgataatgatgtgctggcttacgagcgggcaaaaaacgagctgattcaggcggtgcggcaaaaccgccggcaaaatgccgccacttcgcaggcgggggcgcaggttgccttgcgccgagcggatttggcacgtgcgcaggatgatttacgccgccggtctgctttagcggaatcgggcgcggtgtccgccgaagagctggcacatgcccgtgcggcagtgtctcaggctcaggcggcagttaaggcggctttggcggaagagtcttcggcacgtgcggctttgggcggtcaggtttctttgcgcgaacagccggcggttcagacggcaatcggcaggttgaaagatgcgtggttgaaccttcagcggacgcaaatccgcgcgccggcggacggtcaggtggcgaagcgttcggtgcaggtcgggcagcaggtggcggcaggcgcgccgctgatggcggtggtgccgctgtcggatgtgtgggtggatgctaattttaaagagacgcagttgcggcatatgaaaatcggacagcctgccgagctggtgtccgatttgtacggcaaacaaattgtttatcgcggcagggtggcaggtttttcggcaggtacgggcagcgcgttttcgctgattccggcgcaaaacgcaacgggcaactggattaaagtggtgcagcgcgtccccgtccgtatcgtgctgaaccgcgaagatgtggacaggcatccgttgcgtatcggtttgtcgatgacggttaaagtggatacttccgccgcaggcgcgcctgtttcaaaaacgccgggtgcggcattgccggaaatggaaagtaccgactggtcggaagtcgatcggacggtcgatgaaatcctcgggcaatccgcgccctga

SEQ ID NO: 60328 - DNA, 198 bp, Neisseria meningitidis; identical to SEQ ID NO: 36305

SEQ ID NO: 60329 - DNA, 1011 bp, Neisseria meningitidis; identical to SEQ ID NO: 38121

SEQ ID NO: 60330 - DNA, 669 bp, Neisseria meningitidis
atgacgacccatctgtccaatgtcgcaccggacctgcaaaactatttgaacgccatcggcgaacccgaacatcccgttttgacgcggctgcgtgagaagaccgagcatcaccgtatgggcaaaatggcgattgcgcgcgaacaggcggcggttttggtttggctggcaaagctgattcgcgcggaaaaatatctggaagtcggcgtatttaccggatacagcagcaccgtgcttgcattggcgttgccaaaacacgggcggattaccgcctgcgacatcaatgtaacctttaccgatacggcgcgtcaggtttggaacgaggcaggcgtggcacataaaatcagcctgcatctgcaacccgcattgctgacattggatgatttgattgcacagggtgaagccggaagctacgatttggcactgatagacgcagacaaaccgcccacgccgcaatatttcgagcgttgcctcaagcttgtccggcaaggcggcatcattgccatcgacaatattttgttgaacggaagggtgatgcgcgaagcggcttccgatgcgccgcccagcgtcggcatcctcaaagattttaatcaaaacctgccgaacgacccgcgcatcgtccccatcaccctgcccgtcggcgacggtttgaccctgcttctgaaaaaataa

SEQ ID NO: 60331 - DNA, 687 bp, Neisseria meningitidis; identical to SEQ ID NO: 54972

SEQ ID NO: 60332 - DNA, 987 bp, Neisseria meningitidis; identical to SEQ ID NO: 37169

SEQ ID NO: 60333 - DNA, 891 bp, Neisseria meningitidis
ttggcacttttggcggcgatgacgtggggaacgctgccgattgccgtgcggcaggtattgaagtttgtcgatgcgccgacgctggtgtgggtgcgttttaccgtggcggcggcggtattgtttgttttgctggcactgggcgggcggctgccgaagcggcgggatttttcttggtgctcattcaggctgctgctgctcggcgtggcgggcatttcggcaaactttgtgctgattgcccaagggctgcattatatttcgccgaccacgacgcaggttttgtggcagatttcgccgtttacgatgattgttgtcggtgtgttggtgtttaaagaccggatgactgccgctcagaaaatcggcttggttttgctgcttgccggtttgcttatgttttttaacgataaattcggcgagttgtcgggtttgggcgcgtatgcgaagggcgtgttgctgtgtgcggcaggcagtatggcatgggtgtgttatgccgtggcgcaaaagctgctgtcggcgcaattcgggccgcaacagattctgctgttgatttatgcggcaagtgccgccgtgttcctgccgtttgccgaaccggcacacatcggaagtttggacggtacgttggcgtgggtttgttttgcgtattgctgcttgaatacgttaatcggttacggctcgttcggcgaggcgttgaaacattgggaggcttccaaagtcagcgcggtaacaaccttgctccccgtgtttaccgtaatattttctttgctcgggcattatgtgatgcctgatacttttgccgcgccggatatgaacggtttgggttatgttggcgcactggtcgtggtcgggggtgcggttacggcggcggtgggggacaggctgttcaaacgccgctag

SEQ ID NO: 60334 - DNA, 258 bp, Neisseria meningitidis; identical to SEQ ID NO: 55093

SEQ ID NO: 60335 - DNA, 600 bp, Neisseria meningitidis; identical to SEQ ID NO: 38221

SEQ ID NO: 60336 - DNA, 1392 bp, Neisseria meningitidis; identical to SEQ ID NO: 55953

SEQ ID NO: 60337 - DNA, 1233 bp, Neisseria meningitidis
atgggcttgaaacattttctggaaaaaatcgaaccgcacttcctgccgggcggcaaacatgaaaaatggtatgccctctacgaagctgcggcgacgattttctatacatccggtgcggtaacgcgcaaagcggcacacgtccgcgatgcgctcgactccaaacgcatgatgattttggtgtggctggctttgttccctgccatgttctacggtatgtacaacgtcggcgcacaggcattcggtgcgttaacgcccgatttgctgcaacaaagcatcgccaacgactggcattacgcccttgccaacgctttgggcatcaatatgtcgtctgaagcgggcgtgttgggcaaaatgctgttcggcgcgatttacttcctgccgatttacgcgaccgtatttattgtcggcggtttctgggaagttttgttcgccaccgtgcgcaaacatgaaatcaacgaaggtttctttgttacctcgattctgtttgccttaatcgttccgcccacgctgccgctgtggcaggcagctttgggtatttctttcggcgtggtggttgcgaaagaagtattcggcggtacaggtaaaaacttcatgaaccctgcgctggcaggccgtgccttcctgttcttcgcctaccctgccaacttgagcggcgatgcggtttggacggcggttgacggctattccggcgcaaccgcgctggcgcaatgggcggcacacggtgcagacggcctgaaaaacgccgtaaccggtcaaaccatcacttggatggatgcgtttatcggcaaactgcccggctccatcggcgaagtatccactttggcactcttaatcggcggcgcgtttatcgtgtttgcccgcatcgcttcttggcgcattattgccggcgtgatgatcggtatgattgccatgtcttcgctgttcaacttcatcggttcggacaccaacgctatgtttgctatgccttggtactggcatttggtcgtcggcggcttcgccatcggtatgctgtttatggcaaccgaccccgtttctgcttcctttaccaatgtcggcaaatggtggtacggcgcgctaatcggtgtgatgtgcgtattgatccgtgtggtcaatccggcttaccccgaaggcatgatgttggcgattctgtttgccaacctgtttgccccgattttcgactatttcgtcgcacaagcgaacatcaaacgcagaaaggcgcgcagcaatggctaa

SEQ ID NO: 60338 - DNA, 456 bp, Neisseria meningitidis
atggtcgacgcggtcgttaaaactcccgaatttttaccttttacttctgtaggaatattccgttttggtgcggatataacagagtacaaaaacatactggaaacttttatgtatgaacctcctgatgagtttagaacagaatattatgaatctcccgactcaaatttactcatttccgtcaaaaaaaacaaaattatttcgatattttgttatcaggagctatattttatgggcgttaatataataggtctgaattttgaagattttaaacagcttttccatcaccctaaatcatacggtgttgataaatattatttatcaaatgaatcttatccgacatatgtctatgagtttgatgaaataggagtacaagcatgggaagcaaaagggaaaattgttactatcattgccgggggcaaagacaattattcaacagaaccttactacgatgaataa

SEQ ID NO: 60339 - DNA, 909 bp, Neisseria meningitidis
atgaatcaaaccgccatcaaccgcgccgatgtgcgtacccgctttatcttcgacgatatgcccgtgcgcgggctgcacgtccgtctggaaaacgtgtggcagcacattgtaaaacagaaaaactatcccgccgccatccgccgcgccttgggcgagctgttggctgccggtgttctgctgtcgggcaacctcaaaaacgaaggcacgctgattgtgcaggttcaggggcaggggcggctgaaaatgctggttgcggaagcgacttccgaccgtaccgtccgtgcgaccgcgcggtgggacgaggcggcagaaatagccgatgacgaaagcctcggcgaccttttgggcggcaacggcgtgttcgtattgacgctgcagcccaaagacggcgaaccctggcagggcgtagtgcctttggaaggcgacggtatcgcgcaaatgttgatgaactatatgaaacgttccgaacagcttgatacgcacatcgtcctgtctgcaagcgatgaagcggcgggcggtctgctggtgcagcgtctgcctgaagaggtgttggatgaagaggcatgggaacacgtcagtacgctggcgcgcacgctgacggcggaggagctggcagaattggatgcgcaacacgttttataccgcctgttccacgaaacgccgccgcgcgtgttcgagccggaaacgtttgaattttcatgcacctgttcgcgcggcaaagtcagcgatatgctgttgatgctgggcggggaagaagtcggcggcgtggtggcggaacaaggcagcatcgaagtcgattgcgatttctgccacagcaaatatgtgtttgacgaaaccgatgtcaacgcgctgttcggggaggatgtggtcggcgttgccaaagggctgccccggcataccgtccaataa

SEQ ID NO: 60340 - DNA, 627 bp, Neisseria meningitidis
atgaggaaaatccgcaccaaaatctgcggcatcaccacaccggaagacgcagcggccgccgcagcggcaggtgcggatgccgtcgggctggtctttttccaaggcagcagccgggtcgtcgatattgcccgcgcaaaaaaaatcaccgccgcactgccgccgtttgtcagcgttgtcgcccttttcgtcaacgaaagcgcgcaaaacatccgccgcatccttgccgaagtgccgatacacatcatccaattccacggcgacgaagacgacacattctgccgtcagttccaccgcccctatatcaaggccattcgtgttcagacgacatcagacatccgaaacgccgccgaccgcttccccgacgctcaggcactgcttttcgatgcctaccatccttcggaatacggcggcaccggacaccgcttcgactggacgctgctggcggaatattcgggcaaaccgtgggtacttgccggcgggctgacccctgaaaacgtcggcgaagccgtccgcatcaccggagcggaagcggtcgatgtatccggcggcgtggaagcgtctaaaggcaaaaaagacccagccaaagtcgccgcctttatcgcaaccaccaaccgcctatcccgttaa

SEQ ID NO: 60341 - DNA, 732 bp, Neisseria meningitidis; identical to SEQ ID NO: 55917

SEQ ID NO: 60342 - DNA, 432 bp, Neisseria meningitidis
atggatatccaaaccatcctcgaaaaaaccctgcccggcctgggctacgaactggtcgatttcgaactgaccgcgcaaggaacattgcgcgtgttcatcgacaaagaaagcggcattaccgtcgaagactgcgcaaccgtcagcaaccatttgagccgcgtcttcatggttgaagacatcgactacaaaaacctggaaatttccagccccggactcgaccgtcccttgaaaaaagccgccgacttcgtgcgctttgccggtcagaatgccaaaatcaaaacccgcctgccgatagacggtcagaaaaactttatcggtaaaatcgaaggctgcgaaaacgataccgttaccatatccttcgacggcaaaaccgtacaaatcgaattgggcaacatcgacaaagcccgcctgcgccccgaattcaaattctaa

SEQ ID NO: 60343 - DNA, 873 bp, Neisseria meningitidis; identical to SEQ ID NO: 47176

SEQ ID NO: 60344 - DNA, 1134 bp, Neisseria meningitidis; identical to SEQ ID NO: 55923

SEQ ID NO: 60345 - DNA, 1557 bp, Neisseria meningitidis
atggatttcagttggttggcagaaccgcatacctggataggttttgccacgcttttggtgttggaagtcgtattggggatagacaaccttgtctttgtggcgattttggcaaacaaggtccagcccgcacggcgcgaccgcgcacggattatcgggctggggctggcagtcgtcatccgcatcattatgcttgcttttatggcgcacatcatcacgctgaccgagccgctgttccaaatcggcggcctcgccgtttccggcaaggacatgattatgctcgcgggcggtattttcctgctttacaaagccaccaccgaactgcatgaacgcctcgaagggcacaaccgttttactgttgccgacaaccaaaaaaaacacgcgccgttttggggcgtggtcgcgcaaatcctgatactggatgccgtgttttccatcgattcggtcattactgcggtggcgatggtcgatcatatcgtcgtggcgatgggtgcggtcgtcgtcgcaatggctgtaatgatttctgccagcaaactcttgaccgaatttgtcgacagacaccctaccgtcgtgatgctctgccttggttttttgttgatgatcggtttcagcctgattgccgaagccttccatttccacattcccaaaggctacctctacgccgccatcggcttctcgattttaatcgaactgtttaaccagatttcccagcgcaacagccgcaaaaacgactacatcggcagctcgtggcgcaaacggactgctgaaaacgttttgggtatgatgggcatacgcgaaagcgtgcttgccgacgcgggcggcgaatccggggacgacgcgcattttgaagaaaacgaaaaatcgatgatacgcagcgtgctgacgcttgccgaacgcccgattatgggggtgatgatcccacgccgcgacatcgaacggctggacatttcccaaagccgcgaagaacagtgtgcccaactgcaaaacacgccttacagccgcctgctcgttgtcggaaaggcgggcgtggacgaacctttgggctacatcaacaaaaaagacctgctgtcccaactgctggaaacaggcggtctcgacattcagacggcattgcgccagccgctcgtcctacccgacggcacgaccgccttgggcgcgctcgaactcttccgccaaagcagcgcggattatgctttggtggtggacgagttcggcgcggtattgggcatggtaaccatgaaagacctgctcgaaaccatcgcaggcgagttccccgaagaatttgagcgcgaagaagaaccagccgttcaggggaatcccgatgaaagcctgacggtggaaggcgcgttggaatatgtggagctggcatcccaactcaatctgccgcagcaggaggaagatgccgatttccatacggttgccgggctgattatggaagaattgcaaaccatccccgatgtcggcgattttgccgatttccacggctggcggtttgaagtggtcgaaaaagaagggcagcgcatcgagcgggtcaaaatcaccaaattgcccgaagaataa

SEQ ID NO: 60346 - DNA, 450 bp, Neisseria meningitidis
atgagccttatcggcgaaattttgcctttgtcccatattgttttggatatggaggtgggcagtaaaaaaaggctgtttgaggaagcaggcctgcttttggaacgcgaatcctcattgtcccatgctgatgttttcgaatgtctttttgcccgtgaaaaactcggttcgaccggtttggggcagggcgttgccatcccgcacggccgtcatgccggcgtgaagcaggcgacgggcgcgttcatccgcacgcgcgaacccgtcggatttgacgcaccggacggcaaaccggtttccctggtttttatcttgctggttcctgagaatgcaacgggcgagcatttggaggtattgtccaaactggccggcaagttttcccaaaaaagcatccgcgaatcgctgatgacggtttcttctgcggaagaagcccgcgccatcctgaccgaagaataa

SEQ ID NO: 60347 - DNA, 372 bp, Neisseria meningitidis
atgagaaaaccccaacgcggctacgcccgccaagaccgtgtcaaagaacaaattatgcgcgagcttgccgaactcgtccgtaccggactgaaagacccgcgcgccggcttcattaccgtcaacgaagtcgaagttacccgcgattacagccacgccaccgtgttctacaccattttaaaccaagacgcgcgcgaaattacggaagaagtgctggaacacgcgcgcggacacctccgcagcgaattggccaaacgcatcaagctgttcaaaacgcccgaactgcatttcaaatacgacgaatctttggaacgcggtttgaacctgtccgcccttatcgatcaagtggcggcggaaaaaccggttgaagactga

SEQ ID NO: 60348 - DNA, 324 bp, Neisseria meningitidis; identical to SEQ ID NO: 59444

SEQ ID NO: 60349 - DNA, 1077 bp, Neisseria meningitidis
atgatttgccgaaaacctatcggacacaaaccatattttgatatgaataaaacaatctgccgcactgctgcactattgataagcggtttttcatacgcaaacaccgtcattcccgatgtctcccccgtcgcacaaggtcaacatgtcttcattaacatccctcagcaacgcctgttcctctacaccgacggcaaactgaccaaggtttatcccgttgcagtaggtcgggcgatgacgcaaaccaatctaggcgaacataaaatcggtgcgaaagcctataaccctgtttggtacatccccaaatccatacagaaagaacgcggcgacggcgtaaaaaccatagccgccggcccggacaaccctttggggccggtttttgtccgcttaggcgaccctaaactcggtttgggcatacacgggaccaatgcgccggccagcgtccccggggttcggagtcacggctgcgtccgcatgaaatcgcccgacgcgctcgagtttgccaaaaccatcgccagcggctcgcccgcctccgtcatctatcaaatggcgggtctcaatgaagatgcggatcgcaacctgtggcttgccgccttccgcgacccttacggtaagaacaaccttgacatcgcctctctgaaaaaaagtattgcgcaatgggcaaaaacacagggtaaaaccatcgcgcccgagaaagtcgatgctgtactcaaagaccgcaccggatcggccgtctgcctgacctgcggcaaaaacggcaagatgaagatgccgctcaaatcgctggcgtggatacagggttcttcctcatacagccaagctgaagtcattgaacaaactgaggaaaccaactctgccgaaatatccgagacacgcacgcccgaagtgcctgatgtacacacgcccgaggcacaaccgcatttaaatacccaatccgacggcacgccgactgcctataccgaaccggctgccgattcatcgccgcaagtagaaacacctgatcaggctgcttccgagccggttgatgtattattttcaatagatgtgatacggcagggaaatttgcgtttaggtaattga

SEQ ID NO: 60350 - DNA, 504 bp, Neisseria meningitidis; identical to SEQ ID NO: 54429

SEQ ID NO: 60351 - DNA, 2262 bp, Neisseria meningitidis
ttgaaagtaaccaaacgagacggaagattagaagccattgatttggataagattcaccgtgtcgttacttgggcggcggaaggattggaaaatgtttccgtgtcgcaggtcgagttgaaatcgcacatccagttctacaacggcatccgcaccgacgacatccacgaaaccatcatcaaggccgctgccgatttaatttcggaagatactccggactaccaataccttgccgcgcgtttggcgattttccatctgcgtaaaatagcctacggcgaatacgagccgccgcacctttacgaccacgttaaaaagctcaccgatgccggaaaatacgacaggcatatccttgaggattacagccgcgaagaatttgatgaactgaacgcctatatcgaccacgaacgcgatatgtccttttcctatgccgctgtcaaacagctcgaaggcaaatatctggtacagaaccgcgttaccagccagatttatgaaacaccgcagttcttatatgttctggtggcgatgtgtcttttcagcaaatatcccaaagaaacacgcctcgattacgtcaaacggttttacgatgccgtttccacatttaaagtatcgctgccgaccccgattatgagcggcgtgcgtacgcctacgcgccagttctcaagctgcgtactgatcgaatgcgacgacagcctggattccatcaacgccaccaccagcgcgattgtgaaatacgtttcccagcgtgcgggcatcggcatcaatgccggacgtatccgcggtttggacagcgaaatccggggcggcgaagcgcggcataccggctgcattccgtttttcaaaatgtttcaggcggcggtcaaatcctgttcgcaaggcggcgtgcgcggcggagcggcaactttgttctaccccttgtggcatatcgaagccgaaagcctgctggtgttgaaaaacaaccgcggtgtggaagacaaccgtatccgtcagcttgattacggcgtgcaaatcaaccgcctgctgtacacccgcctgattaagggcggcaacattacgctgttttcgcccaacgaggttccggggttgtacgaagcgttttttgccgaccaagacgaatttgagcggctctatacgaaatacgagcaagacccgaacatacgcaagcgtatcattccggctgccgacctgttttccacgctgatgcaggagcgtgccgggaccgggcgcatctacattcaaaacgtcgatcactgcaatacgcacagcccgttcgatccgtgcgtcgcgcctgttcatcagtccaacttgtgtatggaaatcgccctgccgaccaaaccgctggacaatatcaacgatccgaacggcgaaatcgccctgtgtacactgtctgcctttaacttgggcgcattaaacagcttggacgaattggaagggcttgccgacttgaccgtgcgtgcgctcgatgcacttttagattatcagggatatccggtagaagccgcgcgtacctctactatgggtcgccgttcgctcggcatcggcgtgattaactatgcttattatctggcgaaaaacggtgtccgctacagcgacggctccgcgctcggtctgacccaccgtacctttgaagccatacagtattacctgctcaaagcatcggcaaaccttgccaaagaatacggtgcgtgcacgctctttaaccaaaccgtttattcgcaaggcaaactgcccatcgacacttacaaaaaagatttggatgccgtctgcggcgagcctttgcattacgactgggaaagcctgcgtgccgacatcgtcaaatacggcctgcgtaactccaccctgaccgcgctcatgccgtctgaaaccagttcgcaaatcgccaacgccaccaacggcatcgagccgccgcgcggattggtaacggtcaaagcatcgaaagacggcattttgaaacaagtcgtgccggagtttgaaaccctgaaaaatgcctatgaaaccctgtggcagcttcccggcaacgaaggctacctgaaacttgtcggcgtgatgcaaaaattcgtcgatcaatcgatttccgccaataccgcctacgacccgggcaaattcgaaggcggcaaagtttctatgaaacaaatgctcaaagacctgctgaccgcctacaaatacggcgtcaaaaccctgtactaccataacacccgcgacggcgcggacgatacgcagaccgatattcaggatgacggctgcgcgggcggggcttgtaagatttga

SEQ ID NO: 60352 - DNA, 693 bp, Neisseria meningitidis; identical to SEQ ID NO: 55087

SEQ ID NO: 60353 - DNA, 738 bp, Neisseria meningitidis; identical to SEQ ID NO: 37627

SEQ ID NO: 60354 - DNA, 1002 bp, Neisseria meningitidis; identical to SEQ ID NO: 36643

SEQ ID NO: 60355 - DNA, 405 bp, Neisseria meningitidis; identical to SEQ ID NO: 59240

SEQ ID NO: 60356 - DNA, 264 bp, Neisseria meningitidis; identical to SEQ ID NO: 39198

SEQ ID NO: 60357 - DNA, 525 bp, Neisseria meningitidis
atgtcattgaacaaagtcatcctcatcggccgcctcggacgcgatcccgaagtgcgctatatgcccaacggcgaggcggtgtgtaatttcagcgtcgccaccagcgaaacttggaacgaccgcaacggccaacgtgtagagcgtactgagtggcacaacatcacgatgtaccgcaaactggcggaaattgccgggcaatacctcaaaaaaggcgggctggtttatctggaaggcagaatccaaagccgcaaataccaaggcaaagacggcatcgaacgcaccgcttacgatattgtcgccaacgaaatgaaaatgttgggcgggcgcaatgaaaacagcggcggtgcgccttacgaggaaggttacggtcagagtcaggaggcttaccaacgccccgcgcagcaaagccggcagcccgcctccgacgcgccgtcccatccccaagaagcaccagccgcgccgcgccgccaacccgtgcctgccgccgccccggtcgaggacattgacgacgatatcccgttctga

SEQ ID NO: 60358 - DNA, 1056 bp, Neisseria meningitidis
atgaaaacctacgcaccggcactctataccgcagccctgctcaccgcctgcagccccgcagccgattcaaaccatccgtccggacaaaatgccccggccaataccgaatccgacggaaaaaacattaccctgctcaacgcctcatacgatgtggcacgggatttttacaaagaatacaaccccttatttatcaaaacataccaatccgaacaccccggcacatccgtcagcatccaacagtcccacggcggctccagcaaacaggcattatccgtagccaacggccttcaagccgatgtcgtaaccatgaaccaatcctccgacatcgacctgctcgaaaaaaaaggactggtagaaaaaggctggcaacaagccctccccgaccacgccgcgccctacaccagcactatggttttccttgtccgaaaaaacaaccccaaacagatccgcgattggaacgaccttgccaaagacggcgttaacatcgtcatcgccaatcccaaaacctcgggcaacggacgctacgccttcctcggcgcatacggttacggtctgaaagccaccaacggcaacgaacaggaagcccaaaaactcgtcgcatccatcctcaaaaacacccccgtttttgaaaacggcggacgcgccgccaccaccaccttcacacaacgcaacatcggcgacgtactcattacttttgaaaacgaagccaactacgtcagcaaaaaactgacccaaggacagtttgaaatcgtctatccgagctacaccatttccgccgaaagccccgtcgccgtcgtcaacagcgtcgtcgcgaaaaaaggcacgcaaaaaaccgcccgcgcctatctcgaatacctttggagcgaaccggcgcaagaactcgccgcctcactctacctgcgcccccgcaaccccgaagtattggcaagacacaaagccgacttcccagacttagacaccttctctcccgaagaaaaattcggcggatgggacaacatcatgaaaacctacttcgctgacggcggcatattcgaccgcctgaccgcacaaaaatga

SEQ ID NO: 60359 - DNA, 1008 bp, Neisseria meningitidis
atgagcaccttcttccggcaaaccgcacaagccatgattgccaaacacatcgaccgtttcccactattgaagttggagcaggtgattgattggcagccgatcgaacactacctgaaccgtcaaaaaacccgttaccttagagaccaccgcggccgtcctgcctatcccctgctgtccatgttcaaagccgtcctgctcggacaatggcacagcctctccgatcccgaactcgaacacagcctcattacccgcatcgacttcaacctgttttgccgtttcgacgaactgagcatccccgattacagcaccttatgccgctaccgcaactggctggcgcaagacgacaccctgtccgaattgctcaaactgattaaccgccaactgaccgaaaaaggtctaaaaatagagaaagcatccgccgccgtcattgacgccaccattattcagaccgccggcagcaaacagcgccaggccatagaagtcgacgaggaaggacaagtcagcggccaaaccacaccgagtaaagataaagatgcccgttggacaaagaaaaacggtttatacagactcggttacaaacaacatacccgtaccgatgaggaaggctatatcaagaaactgcacatcaccccagccaatgcccatgagtgcaaacacctgtcgcctttgctggaaggactgcccaaaggtacgaccgtctatgccgacaaaggctacgacagtgcggaaaaccggcaacatctggaagaacatcagttgttagacggcattatgcgcaaagcctgccgcaaccggccgctgtcggaaacgcaaaccaaacgtaaccgatatttgtcgaagacccgttatgtggtcgaacaaagcttcggtacgctgcaccgtaaattccgctacgcccgggcagcctatttcggactgattaaagtgagtgcgcaaagccatctgaaggcgatgtgtttgaacctgttgaaagccgccaacaggctaagtgcgcccgctgccgcctaa

SEQ ID NO: 60360 - DNA, 417 bp, Neisseria meningitidis; identical to SEQ ID NO: 54296

SEQ ID NO: 60361 - DNA, 270 bp, Neisseria meningitidis; identical to SEQ ID NO: 48993

SEQ ID NO: 60362 - DNA, 1467 bp, Neisseria meningitidis
atgatgaaattgggtttcaaaccgatacccctcgccattgccgcagtattgtgcgccttggttttggcactgcccgtacccgacggggtcaagcctcaggcttggacgctgctggccatgtttatcggtgtgattgccgccattatcggcaaggccatgccgttgggtgcgctgtcgattattgccgtcgggttggtcgcagtaaccggcgtaaccgccgacaaaccgggtgcggcgatgagcgatgcgttgagtgcgttcgccaatccgttgatttggctgattgccatcgcagttatgatttcgcgcggtttgctcaaaacagggctggggatgcgtatcggatatttgtttatcgccgtttttggaagaaaaacgctgggcatcggttacagtctcgctctttccgaactgctgctggctcccgttaccccttccaataccgcgcgcggcggcggcattatacatccgattatgcagtcgattgccggcagttacggctccaatcccgcaaaaggcacagaaggcaagatgggtaaatatttggctttggtcaactatcattccaatcccatttcgtcggctatgtttattactgcaactgcccccaaccctttaatcgtcaacttgattgccgaaaatttaggcagtagtttccgtctttcttggggggcgtgggcgtgggcaatggctgttcccggcgttatcgcctttttcgttatgcctttgattttatattttttgtatccgcctgaaattaaagaaacgcccaatgccgttcaatttgccaaagaccgtctgagggagatgggtaaaatgtcggcagacgaaatcattatggcggtcattttcggtatcttgttgctgttgtgggcagatgttcccgcccttattaccggcaatcacgcttttagtatcaacgccaccgccaccgcatttatcggattaagcctgcttttgctttccggtgtattgacttgggacgatgttttgaaagaaaaaagcgcgtgggatacgattatttggtttggcgcattgattatgatggctgcatttttaaataaactcggactgattaaatggttctccggagtgttggcggaaagtgtcggcggtttgggcgttagcggcacggctgcgggcgtaatcctcgtgcttgcttatatgtatgcgcattatatgtttgccagtactactgcacatattaccgctatgttcggcgcatttttcgctgctgccgtttcactgaatgccccggcgatgccgaccgcgctgatgatggcggccgcatccaacattatgatgaccctcactcattatgcgaccggtacttcgcctgtgattttcggttcgggctacaccacaatgggagaatggtggaaggcgggttttatcatgagcgtggtcaattttctgatttttttcgttatcggcagcatttggtggaaagttctggggtattggtaa

SEQ ID NO: 60363 - DNA, 723 bp, Neisseria meningitidis
atgaaacccgcctatttcatctccgacctgcatttgagcgaaaagcaccccgaactgaccgcgctgctgctgcgttttttacgttcttccgccgccgggcaggcgcgggcgatttatattttgggcgatttgtttgatttttgggtgggcgatgacgaagtttccgagttgaatacttcggttgcgcgggaaatcaggaaattgtccgacaaaggcgttgccgtgttcttcgtcaggggcaaccgcgacttcctgatcggtcaggatttttgccggcaggcgggtatgacgctgctgccggattactcggttttggacttgttcggctgcaaaaccctcatctgccacggcgacactctgtgtacggatgacagggcataccaacgtttccgcaaaatcgtgcatcggaagcggctgcaaaaactgttcctgatgctgcccctgaagtggcgcacgcgccttgccgccaaaatcaggcgcgtcagcaaaatggaaaaacaggtcaagcccgccgatattatggatgtcaatgccgcctttaccgcgcggcaggttcgcgcctttaacgcggaaaggctgatacacggacacacccaccgcgagcatatccatcacgaaaacggctttacccgcatcgttttgggcgactggcataacgactatgcttcaatcctccgcgtggacggggacggcgcggtattcgtgccgctggaaaaatgctga

SEQ ID NO: 60364 - DNA, 846 bp, Neisseria meningitidis
atgaatattgcggacggacggcaggcgtttcccgcacctgcaaaactgaatctcgatttgaggattactggaaagcgggaagacggttatcacaatatcgaaagcatattctgcctgatagatttgcaggataccgtatatttgaaactaagggacgacggcaaaatcatcctgcacaatccggttgatggaatgccgcaggaagtagatttaagctaccgtgccgcatcgttgctgcaaaaatatgcgcgcaaccccgccggcgtggaaatatggctggacaaaaaaatcccgacaggggcgggtttgggcggcggaagctcggatgcggcaaccgttttgctggtgttgaaccgttggtggcagtgttcccgaacgacgcagcagctgattgacttgggcgcaactttgggtgcggacgtaccattttttattttcggaaaaaatgcttttgcaagcgggataggtgaaaaactgataggaatggatattccgaaacagtggtatgtcatcgtcaaaccgcccgtccacgtttccactgcaaaaattttcacacacgaaggcttgacacgaaattccgcctcaagcataatgccgactttccaaaacctgcaaccgtttagaaatgatatgcaggcagttgtatttaaagaataccctgaagtttggaaagcctattccgaattgtcccgatatggatttgccttaatgacaggttctggtgcgtgtgtattcacggcgtgtcaagatagggatagcgcatacaatatataccgacaagtttcagatttgtacgaggcatatttggcagagggtctttcaaaacatccttggttgtccgtataa

SEQ ID NO: 60365 - DNA, 486 bp, Neisseria meningitidis; identical to SEQ ID NO: 39660

SEQ ID NO: 60366 - DNA, 1392 bp, Neisseria meningitidis; identical to SEQ ID NO: 56132

SEQ ID NO: 60367 - DNA, 507 bp, Neisseria meningitidis; identical to SEQ ID NO: 54410

SEQ ID NO: 60368 - DNA, 672 bp, Neisseria meningitidis; identical to SEQ ID NO: 42198

SEQ ID NO: 60369 - DNA, 4476 bp, Neisseria meningitidis; identical to SEQ ID NO: 55788

SEQ ID NO: 60370 - DNA, 687 bp, Neisseria meningitidis
atgacggtgttgcaagaacgttattgtgaggtgtccgaccgtatcggaaaattggttctgcaggcgggcagggagccgcattccgtcagcctgattgccgtcagtaagactttcccttcagacggcatccgcgaagtttacgccgccggacagcgtgatttcggcgagaactatattcaggagtggtacggtaaaacggaagagttggcggatttgactgacatcgtgtggcacgtcatcggcgatgtgcagtccaataaaaccaaatttgtcgccgaacgcgcgcattgggtgcataccgtatgccgtctgaaaaccgccgtccggctgagcgggcagcgtccttcctcaatgccgcctttgcaggtgtgtattgaggtgaatattgcaggcgaggcggcaaagcacggtgttgctcccgaagaagcggtcgcgcttgcggttgaagtggcgaagttgccgaatatcgtcgtacgcggcttgatgtgtgttgccaaagccaacagcagtgaaacggagttgaaggtgcaatttcaaacgatgcggaaactgcttgccgacctcaatacggctggcgttaaggcagacgtgctgtctatggggatgtcggacgatatgcctgccgccattgagtgcggtgcgacacacgtccgtatcggcagcgcgattttcgggaaaaggggctga

SEQ ID NO: 60371 - DNA, 1116 bp, Neisseria meningitidis
atgggcttgaaaaaggcttgtttgaccgtgttgtgcctgattgttttttgtttcgggatattttatacatttgaccgggtaaatcagggggaaaggaatgcggtttccctgctgaaggacaaactcttcaatgaagagggggaaccggtcaatctgattttctgctataccatattgcagatgaaggtggcagaaaggattatggcgcagcatccgggggagcggttttatgtggtgctgatgtctgaaaacaggaatgaaaaatacgattattatttcaatcagataaaggataaggcggagcgggcgtattttttccacctgccctacggtttgaacaaatcgtttaatttcattccgacgatggcggagctgaaggtaaagtcgatgctgctgccgaaagtcaagcggatttatttggcaagtttggaaaaagtcagcattgccgcctttttgagcacttacccggatgcggaaatcaaaacctttgacgacgggacaatcaatttaattcaaagcagcagctatttgggcgatgagttttctgtaaacgggacgatcaagcggaattttgcccggatgatgatcggagattggagcatcgccaaaacccgcaatgcttccgacgagcattacacgatattcaagggtttgaaaaacattatggacgacggccgccgcaagatgacttacctgccgctgttcgatgcgtccgaactgaaggcgggggacgaaacgggcggcacggtgcggatacttttgggttcgcccgacaaggagatgaaggaaatttcggaaaaggcggcaaaaaacttcaacatacaatatgtcgcaccgcacccccgccaaacctacgggctttccggcgtaaccacattaaattcgccctatgtcatcgaagactatattttgcgcgagattaagaaaaacccgcatacgaggtatgaaatttatacctttttcagcggcgcggcgttgacgatgaaggattttcccaatgtgcacgtttacgcattgaaaccggcttcccttccggaagattattggctcaagccggtgtatgccctgtttacccaatccggcatcccgattttgacatttgacgataaagattaa

SEQ ID NO: 60372 - DNA, 390 bp, Neisseria meningitidis; identical to SEQ ID NO: 37209

SEQ ID NO: 60373 - DNA, 1002 bp, Neisseria meningitidis
atgctcgccgaagaagttttcggtttcggtctctacaaagagtccaaaggctcgggcggtcgtttttatgagcgctgttggttgatgggttcggaagacgtcctatacggtcgcgtccattttggcggacaaaacaataccattcttttcgaactgaccggcaccggttgcggcgtcgcaaaagaaggctgggaatcacgacttttcgcattcctgactaatgcaatccgcccaaaaatcacacgcgttgacatcgcaaaagactttttcaacggcgaatacagcccgaaccaagcccgtgaagaccgaaataaaggtatgtttacctgtcatcacgtcaaaccaaaaggcgaatgtttggggtcagattgggaagaagacgatgaagccaaaatgaccaaaggcaagacctatggtatcggctcccgtgaatcgtccaaatatgtccgcgtctatgaaaaaggcaagcagttgggcgataaaacaagcacatggacgcgatttgaaattgaattcaaagcaaaagatatcgttatccctttcgaagttttgcagaatccgggcgaatatttcggcggcgcatatccgatttgcgaacgattcgtccaaaaggcaacgcgcatacacgcggttaaggaagataaggtcatttcagccgaccgctaccttgaatgggtaaaaaaacagttcggacgtgcggcaaacggtctgaaattcatttttcccgaattggacaaagccaaactgtttgaactgattgagccgagtcatcacaagctgcccaagtctttggctcccgaagcctacgactgcgcctttttgaaagctcaagccattcatgaacagcccgcattcaaaccgtacaaagacccttactatatgtacgaatattacgagaatcttgaaaaacagcttgaacagcaaaaacacgtcaacaatgaagaaagctataacaacttcatttacgacaaattcgcaagactaccgatttcatgggcttaa

SEQ ID NO: 60374 - DNA, 1266 bp, Neisseria meningitidis
atgaacacactccaacgccgcaagacgcatcaagtccgcatcgatcatattaccgtcggttcagaagcacccgtcgttatccaatctatgaccaacaccgacactgccgatgcaaaagccaccgcattgcagattaaggaattgagcgatgccggatccgaaatggtgcgtattactgtcaacagccccgaagccgcgtccaaagttgccgaaatccgccgccgcttggacgatatgggctatgccacaccgcttatcggcgatttccacttcaacggcgaacgcctgttggcggaatttcccgaatgcggcaaagcattgtccaaataccgcatcaatcccggcaatgtcggcaaaggcgtaaaaggcgatgaaaaatttgcctttatgattcggactgctgctgaaaacgataaagccgtccgcatcggcgtaaactggggttctttggatcaaagcctcgccaaacgtatgatggatgccaacctcgctttttccgcgccgaaaccgcccgaagaagtgacgaaggaagcactgattgtctccgctttggaatctgccgaaaaagccgttctattgggactgcccgaagacaaaatcatcctgtcgtgcaaagtcagcgcggttcaggatttgattcaggtttaccgcgaactgggcagccgttgcgcctatccgctgcatttgggtttgaccgaagccggtatgggcagcaaaggcattgtcgcatcaacggcggcattatccgtcttgcttcaagaaggaatcggcgacaccatccgcatttcactgactccggaacctggcagcccgcgtactcaggaggtcgtcgtcgggcaagagattttacagactatgggattgcgttcgtttacgccgatggttaccgcctgccccggctgcgggcgtaccaccagtaccgtatttcaagagctggcacaagatgttcaaaattacctgcgccaaaaaatgtctatatggcgtaccctttatcccggggttgaatccctgaacgttgccgtaatgggctgcgttgtcaatgggcccggagaaagcaaattggccgacatcggcatcagcctgcccggtacgggggaaacacccgtcgcgccggtttatgtggacggggagcgcaaagtcacactgaaaggtgataatattgcaactgaattcctagctattgtagaggaatatgtcaaaaccaactatggtgaaaacggctccaaacgcaaccagaacaaaatcatccctatacagtccctataa

SEQ ID NO: 60375 - DNA, 918 bp, Neisseria meningitidis
atgtctgtttataccagtgtttccgatgatgaaatgcgcggctttttggatgattacgatttgggagaatttgtttccctgcagggcatcgcgcaggggattaccaacagcaattattttctgacgacgacttcgggacgttatgtgctgaccgtgtttgaagtgttgaaacaggaagagctgccgttttttctggagcttaaccggcatttgagtatgaagggcgtggcggttgccgcgccggttgcgcgcaaagacggccggcttgattccgttttggcgggcaagcctgcctgcctggttgcctgcctgaaaggttcggatactgcgctgccgacggcggagcagtgcttccataccggtgcgatgttggccaaaatgcaccttgccgccgctgatttccctttggaaatggaaaacccgcgttacgatgcgtggtggacggaggcgtgcgcccggctgctgcccgtcctgtcgcaagacgatgccgcactgctgtgttccgaaatcgatgcgttgaaggacaatctcggcaatcatctgccttcgggcatcatccatgccgatctgtttaaagacaatgtgttgcttgacggcggtcaggtatcgggtttcatcgatttctattatgcctgccggggcaattttatgtatgacttggcgattgcggtcaacgattgggcaaggacggcggacaataagttggatgaggcgttgaaaaaggcgtttatcggcggttatgagggcgtgcgccccttgagtgccgaagaaaaggcgtatttcccgaccgcccaacgtgcaggctgcatccgtttttgggtgtcgcgcctgttggattttcattttccgcaggcgggcgagatgacgtttatcaaagacccgaacgcgttccgcaacctgctgttgagtttgggttga

SEQ ID NO: 60376 - DNA, 1200 bp, Neisseria meningitidis; identical to SEQ ID NO: 54632

SEQ ID NO: 60377 - DNA, 345 bp, Neisseria meningitidis; identical to SEQ ID NO: 42101

SEQ ID NO: 60378 - DNA, 639 bp, Neisseria meningitidis; identical to SEQ ID NO: 45470

SEQ ID NO: 60379 - DNA, 141 bp, Neisseria meningitidis; identical to SEQ ID NO: 44879

SEQ ID NO: 60380 - DNA, 750 bp, Neisseria meningitidis
atggtattgcgcagggattttctgacttggtgtaatgaaacattgcagacagcgttgtttaaagattacgcccctaacggtttgcaggttgaagggagggaatatatcgggaaaatcgttacgtcggtaacggcaagcagggcagcgattgattttgctgtggagcagaaggcagatttgcttttggtacatcacggtatgttctggaaaaacgagttgccgaccgttactggttggaaaaaagaacggattgccgcactgttacggcacgacatcaatatggcaggctaccatctgcccctggatgcacatcccacactgggcaacaatgcccaactcgccgacagattgggttttgcgacagaaaaacggttcggcgaacaaaacctgctcaactcgggcagcctgaaacaagccaagacactcggcgcattggcggcgcatattgaaacagttttgcaacgtaagcctgtcgtcatcggcaaacccgaacgcgaaatccgacgggttgcatggtgcagcggcggggcgcaggggttttttcagacggcaatagacgaaggtgtcgatctgtatttgacgggggaaatctctgaagctcaataccaccttgccaatgaaacgggtacggctttcatttcggcagggcatcacgcgacggaacgttacggcgtacgcgcgctggcagaatcggcggcagaggttttcgggttggaagtgtgccattttgacgaaaacaatccggcttga

SEQ ID NO: 60381 - DNA, 624 bp, Neisseria meningitidis; identical to SEQ ID NO: 39191

SEQ ID NO: 60382 - DNA, 204 bp, Neisseria meningitidis; identical to SEQ ID NO: 37144

SEQ ID NO: 60383 - DNA, 1110 bp, Neisseria meningitidis; identical to SEQ ID NO: 54329

SEQ ID NO: 60384 - DNA, 1008 bp, Neisseria meningitidis
atgagcaccttcttccagcaaaccgcccaagccatgattgccaaacacatcaaccgcttcccgctattgaagttggaccaggtgattgattggcagccgatcgaacagtacctgaaccgtcaaaaaacccgttaccttcgagaccaccgcggccgtcccgcctacccgctgttgtccatgttcaaagccgtcctgctcggacaatggcacagcctctccgatcccgaactcgaacacagcctcattacccgcatcgatttcaacctgttttgtcgttttgacgaactgagcatccccgattacagcaccttatgccgctaccgtaactggctggcgcaagacaacaccctgtccgaattgctggaactgatcaaccgccaactgaccgaaaaaggtttaaaaatagagaaagcatccgctgccgttgttgacgccaccattattcagaccgccggcagcaaacagcgtcaggccatagaagttgacgaagaaggacaaatcagcggccaaaccacaccgagtaaagacagcgatgcccgttggataaagaaaaacggcctctacaaactcggttacaaacaacatacccgtaccgatgtggaaggctatatcgagaaactgcacattacccccgccaatgcccatgagtgcaaacacctgccgcctttgctggaagggatagctgaaggtacgaccgtctatgccgacaaaggctatgacagtgcggaaaaccggcaacatctggaagagcgtcagttgttagacggcattatgcgcaaagcctgccgcaaccgtccgctgtcggaagcgcaaaccaaacgcaaccgatatttgtcgaagacccgttatgtggtcgaacaaagcttcggtacgctgcaccgtaaattccgctatgcgcggtcaacctatttcggactgattaaagtgagtgcgcaaagccacctgaaggcgatgtgtttgaacctgttgaaagccgccaacaggctaagtgcgcccgctgccgcctaa

SEQ ID NO: 60385 - DNA, 1902 bp, Neisseria meningitidis
atgactacgccaaaaaaaaccgccaaaacttccggcaacgaagcgcgcgaacttgccgacttgagcgaagacatcggcatccgcttcaaatatccgaactcggaacgcgtgtatctgcaaggcagccgtggcgacatccgcgtgcctttgcgcgaaatccgccaggacgacacctacacggcgcaaggcacggaagccaacccgccgattcccgtctatgacaccagcggcgtgtatggcgatccggcggcgcacatcgacctgaaacaaggcctgccgcacatccgcaccgcatggctgaacgaacgcggcgataccgaaatcctgcccaagctctccagcgaatacggcatcgaacgcgcacacgatccgaaaaccgcccatctgcgcttcaaccaaatcacccgcccgcgccgcgcgaaaagcggcggcaacgttacccagcttcactacgcgcgccgcggcatcatcacgcccgaaatggagtttgtcgccatacgcgaacgtttaaaattagacgaattgtcccaaaaaccggaatacgccaaactcttgaaacagcacgcagggcaaagtttcggcgcgaatatcccgacccatcccgaccaaatcacgcctgaattcgtgcgccaagaaatcgccgccggacgcgcgattatccccgccaacatcaaccaccccgaactcgaaccgatgattatcggccgcaacttccgcgtcaaaatcaacggcaatttgggcaactccgccgtcacctccagcctgaccgaagaagtcgaaaaaatggtgtggtcgctgcgttggggcgcggacacaattatggacttatccacaggcgcgcacatccacgaaacgcgcgaatggattatccgcaacgcgcccgtccccatcggcactgtgccgatttaccaagcgttggaaaaaaccggcggcatcgccgaagatttgacttgggatttgttccgcgacaccttaatcgaacaggcggagcaaggcgtggactatttcaccatacacgcgggcgtgttgctgcgttatgtaccgatgaccgccaaccgcctcaccggcatcgtctcgcgcggcggttcgattatggcgaaatggtgtttggcacatcatcgggaaaatttcctctacacgcatttcgacgaaatctgcgaaattatgaaagcgtatgacgtatcgttcagcctcggcgacggcctgcgccccggctgcattgccgatgccaacgacgaatcccaattcgccgaactgcacaccttgggcgaattgaccgataaagcgtggaaacatgacgtacaagtcatgatcgaaggccccggccatgtgccgctgcaacgcgtcaaagaaaatatgaccgaagagctgcaacactgttttgaagcgccgttttacaccctcggcccgctcgttaccgacatcgcccccggctacgaccacatcacctcgggcataggcgctgccaatatcggctggtacggcacggcgatgctctgttacgttacccccaaagaacatttgggactgcccgacaaagaagacgtgcgtaccggcatcatcacctacaaactcgccgcccacgccgccgacctcgccaaaggctggccgggcgcacagttgcgcgacaacgccctgagcaaggcgcgtttcgagttccgctggcgcgaccagttccgcctaagcctcgaccccgaacgcgccgaaagcttccacgacgaaaccctgcccgccgaaggcgcgaaaatcgcccacttctgttcgatgtgcggccccaaattctgctcgatgaaaatcacgcaggaagtgcgcgactacgccgacaagcaaaaagcccaacggcagggcatggaggaaaaagcggtcgagttcgtcaaaaaaggcgcgaagatttacagttga

SEQ ID NO: 60386 - DNA, 1287 bp, Neisseria meningitidis
atgatttacatcgtactgttcctcgccgccgtcctcgccgttgtcgcctacaatatgtatcaggaaaaccaataccgcaaaaaagtgtgcgaccagttcggacactccgacaaagatgccctgctcaacagcaaaaccagccatgtccgcgacggcaaaccgtccggcgggtcagtcatgatgccgaaaccccaaccggcggtcaaaaaaacggcaaaaccccaagaccccgccatgcgcaacctgcaagaacaggatgccgtctacatcgccaagcagaaacaggcaaaagcctccccgttcaaaaccgaaatcgaaaccgccttggaagaaagcggcattatcggcaactccgcccacaccgtttccgaaccccaaaccggacattccgcaccgaaacctgccgacgcgccggcaaaacctgcacccgttccgcaaacacctgcaaaaccgctgattacgctcaaagaactgtcaaaagtcgaattaccctggtttgacgtgcgcttcgacttcatctcctatatcgcgctgaccgaagccaaagaactgcacgcactgccgcgcctttccaaccgctgccgctaccagattgtcggctgcaccatggacgaccatttccagattgccgaacccatcccgggcatccgctatcaggcatttatcgtgggtattcaggcagtcagccgcaacggacttgcctcgcaggaagaactctccgcattcaaccgccaggtggacgcattcgcacaaagcatgggcggtcagacgctgcacaccgaccttgccgcctttatcgaagtggcttccgcactggacgcattctgcgcgcgcgtcgaccagaccatcgccatccatttggtttccccgaccagcatcagcggcgtagaactgcgttccgccgtaacgggcgtgggtttcgtcctggaagacgacggcgcgttccactataccgacacgtcgggctcgaccatgttctccatctgctcgctcaacaacgagccgtttaccaatgcccttttggacaaccaatcctataaaggcttcagtatgctgctcgatattccgcactctccggcaggcgaaaaaaccttcgacgatttgtttatggatttggcggtacgcctgtccggccagttgaacctgaatctggtcaacgacaaaatggaagaagtttcaacccaatggctcaaagacgtacgcacttatgtattggctcgtcagtccgagatgctcaaagtcggtatcgaaccgggcggcaaaaccgcattgcgcctgttctcctaa

SEQ ID NO: 60387 - DNA, 1089 bp, Neisseria meningitidis; identical to SEQ ID NO: 54909

SEQ ID NO: 60388 - DNA, 2082 bp, Neisseria meningitidis
atgaaatcactcaaaaccttcctcatttggggcatagtggtactggtcggcttagcatcctttaccactctggccctcagccgaggcgaacaggtcagcgcggtatggatggtcaccgccgccatatccgtttactgcatcgcctaccgtttttacagcctctacatcgccaaccgcgtgatgcggctcgatcctaaccgcctgactccggcagaacgccacaacgacggcttggactacgttccgacgcacaagggcgtattgttcggacaccactttgccgcgattgcgggcgcgggccccttggtcggcccggttttggcggcgcaaatgggttacctgcccggtactttgtggattatcttcggcgtggtatttgccggcgcggtacaggatatgatggtcttgttcgtctctatgcgccgcgatggtaagtctttgggcgatattgtgaaacaggaactcggcactgtccccggcgtgattgcctccatcggtattttgatgattatggtcatcattatggcggtgttggcgttgattgtcgtaaaagcactggttcacagcccttggggtacgttcaccatcgccgccactatgccgattgccctgtttatgggtatttacacgcgctatatccgtccgggcaaaatcggcgagatttccatcgtcggctttattttgctgatgctggcggtaatttacggcgaagatgtggcgaaaagttccatcggacattggttcgaccttgacggcatccagctcacttgggcgattatgatttacggctttgtcgcctccgtattgcccgtatggttgctgctcactccgcgcgactatctctccaccttcctgaaaatcggtacgattgcggccttggctttgggcatcgtcatcgtcaatcccgctttgcaaatgcctgccgtaacccactttatcgacggttcgggtccggtattctcaggcgcattgttcccgttcctcttcatcaccatcgcctgcggtgcggtttcgggcttccacgcgctgatttcctccggcaccacgccgaaaatgctggaaaacgaaacccacgtccgtatgattggttacggcggtatgttgatggaaagtttcgtagccattatggcgcttgccgccgccgcatcgcttgatcccggcgtgtacttcgccatgaacagccctgccgccctgatcggtacggatgccaataccgccgccgaagtgattaccaccaagctgcaattccctgtcgatgcggcaaccctgttgcacaccgctaaggaagtgggcgaaaacaccatcctttcccgtgcaggcggtgcgcccaccctcgcagtcggtatggcgcacattatgagccgcctgattccgggcgaggcgatgatggcgttctggtatcacttcgccctattgtttgaagccttgttcatcctgaccgccgtcgatgccggtacgcgcgtcgcacgttttatgattcaagacttgggcagcatcttctacaaacctttcggcaacaccgactccatccccgccaacctgattgcgaccttcttcgccgtggcattgtggggctacttcctctacacgggcgtgaccgacccgttgggcggcatcaactcgctctggcctttgttcggcatcgccaaccaaatgctggcaggcgtagccttgattatgtgcgccgtggtgctgattaagatgaaacgcgaccgttatgtctgggtggtactcgttcccgccgtcggcgtactgttcgtaacctgctacgccggcctgcaaaaactgttccacagcgacccgcgcatcagcttccttgcccacgccggcaaatacagcgacgcattggctaaaaacgaaatccttgcgcctgccaaagacatcggcgaaatggcgcaaatcatcttcaacgacaagattaatgccggtctgaccatcctcttcttgtcggttgtcgtgattgtcgccgcgtacggtttgcgtaccgccctcaaagcacgcaaagtcggctggccgaccgccaaagaaatcccggcggtgtaccgcgacggcaagcagccggaggcacaaagtgaagcataa

SEQ ID NO: 60389 - DNA, 654 bp, Neisseria meningitidis
atgaagataacgcactgcaaattaaagaaaaaagtacagaaagaactgctccgtttttttgtgctggaagttaccgcccgttctgccgccgatattttgggtatccatcccaattcggcagcactgttctaccgtaaaatccgcacggttatcaaccatcatttggccctggctgccgatgaggtttttgagggccctgtcgagccggacgaaagcgatttcggcggacggcgtaaaggcagacgtggtcgcggtgcggcaggaaaagtggttgtcttcggcattctgaaacgtaacggacgggtctataccgttgtcgtagataatgccaagtccgatactttaatgcctgttatcaaacagaaaatcatgccggacagcattgtttataccgacagcctgagcagttacgacaagttggacgtaagcggttttatccattaccgcatcaaccattccaaggaatttgctgaccgtcagaaccacataaacggcattgagaacttttggaatcaggcaaaacgcgtcttgcgaaaatacaacggaatcgattgcaaatctttcccgctgttcttgaaagaatgcgaatttcgatttaacttcggcacaccgtctcaacagcttaaaatcctgcgggattggtgtggaatttag

SEQ ID NO: 60390 - DNA, 951 bp, Neisseria meningitidis
atgagcaccttcttccagcaaaccgcccaagccatgattgccaaacacatcgaccggttcccactattgaagttggaccgggtaattgattggcagccgatcgagcagtacctgaatcgtcaaagaacccgttaccttagagaccaccgcggccgtcccgcctatcccctgttgtccatgttcaaagccgtcctgctcggacaatggcacagcctctccgatcccgaactcgaacacagcctcatcacccgcatcgatttcaacctgttttgccgttttgacgaactgagcatccccgattacagcaccttatgccgctaccgcaattggctggcgcaagacgacaccctgtccgaattgctggaactgattaaccgccaactgaccgaaaaaggtttaaaaatagagaaagcatccgccgccgtcgttgatgccaccattattcagaccgccggcagcacacagcgtcaggtcatagaagtcgatgaagaaggacaaatcagcggccaaaccacaccgagtaaagacaaagatgcccgttggataaagaaaaacggcctctacaaactcggttacaaacaacatacccgtaccgatgcggaaggctatatcgagaaactgcacatcacccccgccaatgcccatgagtgcaaacacctgccgccgttgttggaaggactgcccaaagatacgaccgtctatgccgacaaaggctacgacagtgcggaaaaccggcaacatctggaagaacatcagttgcaggacggcattatgcgcaaagcctgccgcaaccgtccgctgacggaagcgcaaaccaaacgcaaccgatatttatcgaagacccgtggcgatgtgtttgaacctgttgaaagccgccaacaggctaagtgcgcccgctgccgcccaaaaggcgaccggatgcctgattatcgggtatccagggaggattaa

SEQ ID NO: 60391 - DNA, 1098 bp, Neisseria meningitidis
atgaaccagacatttaccttgcccgatacgcgcccgtatccccaaaatccgattaagaaccacctgctgctcaatgcctaccagttggcgcataattcttcccaggcttcgcgcaaactctcgtccggccaacttcaaaccgaaatcagggggatgcttgagcaaaaccactatatcaacctttccctcgcgttgacgatgtcgcccgatgccggaacttatgccgcgctgctttccagtgtgaacgcggtactcgattgcgagaaagaaggcgaagtgcagtggttcgccctgccggtcgtgctggtgtccggctgcaagaaagaacgggcaatcgagatgaagctgccgacggaggcattgtttgcctgcctgcaaaactatccgcacctgcgcgcgttgacgcaagagacacaatggctgccttatcttgtgcattcgtccgatttgagtgcggtcgcgccggatgagtggtggcgtgccaaacaaaataccgaagcggcggcgcaacacttacgccgtttcgccccgcgccctttgctgttgcccgaagggcagtccgtccacgtcgtttacgcgctgggtttcggcagcggcaaggttcagacggcattgggtcagaaccttcttcaggcaggcctgcccttaatgcaggtatggcaggaaaatcttgcatcggaaggtgttacgctgtttgccaatccactttccccggattctccggtacgcgcgctttcagacggcagccacacgcgccagcgtatggcgatggatgtttttgcggcaaacgcgatacgcgccgtccgtatgcagagtccgcgcgtcggcgtggtcgctgcggcaaaggcgggcggacaggttttattcgggtttaatgcgaccgacggcgcgtttgaagtcgtgccgcaggtgttttcgtggcagctttcctttaccgacaacatcgccgtcatccagcaaaatttcctcgacctgatggcggagtgccgcgtggaacacgtttacctgttgcacaatcccttgggcgaacaggaaagcatcccgagctatgcggaagcattgaaacgggaagggcacaatccgtttttcagcgcatag

SEQ ID NO: 60392 - DNA, 1860 bp, Neisseria meningitidis
ttggaagacggttttttacgctcactgggcttaggcgtggccggttatccgcccttcgcactggtttacgacgatatcggcatctattacgacacaacccgcccatcgcgtttggagcagttgattttagccgcaaacatgccgtctgaaatgcttaaccaagcgcagcaggccattgatttgattttgacgcaccgtttgtctaaatataaccatgctctggatttttcagacggcctcgtacaagacagcaaaaacattgttttggtaattgatcaaactttcggcgatatggcgattcaatatggcggcgcagatgaagccacattccgccaaatgtttcagacggccttagccgaaaatcctgatgcggaaatctgggtcaaaacccatcccgatgtattgagcggcaagaaacagggttaccttactgatttggcacagcagccgcgtgtgcgtttattggctgaagacattaatccgatttcgctgctgcaagcggtggacaaagtgtattgcgtgacctcgcaaatgggttttgaagccttgttgtgcggcaagcctttggtaacgtttggtttgccgtggtatgccggatggggcgtgagtgacgaccgccatcctaaaatcgacagccttgttcaaacccaacgccgcgccccccgcaacttgctgcagctcttcgctgcagcctatctgcaatacagccgctacctcaaccccaataccggcgaagcaggcagcctctttgatgtcatcgactatctggcgacggtcaaacgcaaaaacgacaaattgcgtggcgagttgtattgcgttggtatgtctttgtggaaacgcgcggttgccaaaccgttctttaacgtaccctcttgccgtctgaaatttatctcttccacccaaaaactggcaggggtcaaactgtccgacgatgcacgcatccttgcctggggcaacggcaaagaggccatcgtccgctttgccgaacaacaccacatccccctgctgcgcatggaagacggctttatccgctcggtcggactcggctccaacttagtgccgccgctgtcgctcgttaccgacgatatgagcatttatttcaatgccgaaaccccgtcccgtcttgaatacatcctacaaaaccaaaacttcgacgatcaagactttcagacggccttgaagctgcaaaaaatgctgaccgaaaaccacatcagtaaatacaacgtcggcagctcagacttcaccgccccgtcaaccgacaaaaccgtgatcctcgttcccggccaggttgaagatgatgcgtctatccgctacggttcgccccaaatctaccgcaatctggatttgctccgtaccgtacgcgaacgaaaccccaatgcctatatcatctacaaaccgcatcccgatgtagtcagcggtaaccgcatcggccatatttcccctgaagatgctgcacgatatgccgaccaaaccgccgagcaaaccgacatcctgacctgtctccaatacgcagacgaagtacataccatgacttcgctgaccggttttgaagccttgttgcgcggcaaaaaagtcagctgctacggcctgcctttttacgcaggctggggacttacccaagatctgctccccattccgcgccgtagccgcagacttgagctttggcagctgattgccggcacgctcatccactatcccgactacatccaccccgaaacccatcaggccataaatgcagaaaccgcagcccaaatcctgatacgacaaaaaaatatgcaaaaaaacaacaacggattacatcgcgggtactttgccaaaaaattaggtaaaatcaaacaactatatcgatctttcaaataa

SEQ ID NO: 60393 - DNA, 1893 bp, Neisseria meningitidis
atgcctatccttaccatccgtgaagtgtgcaacattaatcattggggcataggttattatgatgttgacgattccggcgaaatcatcgtccgccccaatccctcgcaacacaatcaaactgtttcactgcaaaaactgactgaagccgtgcaacaaaaacatcaggcgcgcctgcctgttttgttttgttttccgcaaatcctcgaacaccgcctccgcgacattaaccgcgcctttcagacggcacgggaagagtgcggctataagggcggttattgtttggtttaccctatcaaggtcaaccaacaccgccgcgtcatcgaatcgcttatgtcaagcggacaaccgcatggtttggaagctggttctaaagccgaactgatggcggttttggcacacgccggcacccggcaaacattaatcgtctgcaacggctataaagaccgtgaatatatccgtttcgccttgatgggcgaaaaactggggcatcaggtttatttggtgattgagaagctgtccgaaatacaaatggtattggaagaggcggaaaaactcggcatcaagccccgtttgggtgtgcgcgccagactggcttcccaaggttcgggaaaatggcagtcttcgggtggggaaaaatcaaaattcggcttgtcggcttcccaagttttgcaactggtcgatattttgaaacaaaaaaacaggctggactgcctgcagcttttgcatttccatttgggctcgcagcttgggaacatccgtgatgttgccacaggtgtacacgaatcggctcggttttatgttgagttgcacaaactgggggtaaatatccgctgttttgatgtaggcggcgggcttggcgtggattacgaaggaaaccgcacacaatcggattgttccgttaattacagcctcaacgaatatgccgccacagtcgtatggggcatcagccaggcttgtctcgaacacgggctgccgcatccgacaatcatcaccgagagcgggcgcggcattaccgcacatcacgccgttttggttgctaatgttataggcgttgaacgttacaaaccgcgccggctggatgcgccatcgcccgaagcaccgcgtgtgttgcacagtatgtgggaaacttggacggatatttccgcctcgcgggaaaaacgttccttacgcagctggatacacgaagggcagtttgatcttgccgatgtgcataatcagtataatgtcgggctgttgagtttggcgcaacgtgcgtgggcggagcaactgtatttaaatatctgtcatgaagtcggcgaattgtttaatgaaaaacaccggtctcaccgaaccattattgacgaattgcaagaacgttttgccgataagctgtatgtcaatttctcactcttccaatctttgcccgatgcttggggcatagatcaacttttccctgtttgtcccattaccggtttgaatgaaccgattgcgcgccgcgccgtgttgttggacattacctgcgattcagacggtacgattgaccactacatcgacggcgacggcatcgccggtacgatgcctatgcctgattatcccgaagaagagccgccgcttttaggcttttttatggtgggagcatatcaggaaatactcggcaatatgcacaatcttttcggcgacactgccactgccgatgttgttgtaggggaagacggacaatttaccgtcatcgattacgatgaaggaaacaccgttgccgatatgctcgaatacgtttatcaagatccgaaagagctgatgaaacgctatcgcgaacaaatcgaacattcagaccttcctgcctcgcaggctatgtctttcttaaaagaactcgaagcggggcttaatggttatacctatttggaagacgaatag

SEQ ID NO: 60394 - DNA, 579 bp, Neisseria meningitidis; identical to SEQ ID NO: 45203

SEQ ID NO: 60395 - DNA, 285 bp, Neisseria meningitidis; identical to SEQ ID NO: 39658

SEQ ID NO: 60396 - DNA, 546 bp, Neisseria meningitidis; identical to SEQ ID NO: 38361

SEQ ID NO: 60397 - DNA, 1245 bp, Neisseria meningitidis; identical to SEQ ID NO: 55921

SEQ ID NO: 60398 - DNA, 321 bp, Neisseria meningitidis; identical to SEQ ID NO: 37031

SEQ ID NO: 60399 - DNA, 465 bp, Neisseria meningitidis
atgacttatgaaaaactttatgagcttcgccaaacactcagaccgactaccaaagacggtctctatacagataatgaaaaaaatcgagaaatcctaacggttagatggagcggcaacacagaaaatcctaaaaatttctcagctgtcgctataggaattaatccaagtaaagcaaatgatgaaagaagcgacaaaacccttacccaacttgcacgtttcttggatatgtacggttttaccaacttcaaaatgttaaatattttttccagttactctacacagcaaacaggaattaggacaaacacccaaaccgatttttccaaatttaaaggatgtttggaagatgctgatatgattattcttgcatggggtacagaccgcggtgcttataaggatgaaaaaaaacagaatactggaatttctaaaagcagaaaaatttatggaaaaagtattctgtatttctga

SEQ ID NO: 60400 - DNA, 660 bp, Neisseria meningitidis
atgaccacgcccaaactcatcatcttcgactgggacggcacgcttgccgatacgacccaacccatcatcgacaccatgcgccgcagcttcgccgaatgcggttttccgccgcccgaagcggaacgcgtccgcagcctgattggctacagcctgcccgaaatcatccgcgacctgctcgaaatgccgtctgaaaccgccattgccgacatcacacgcacttattccgcacattacctcaatcccaacaaccgcaatatgacgctctttcccgatgccctgccctgtctggacaagctcaaagcacaaggatactggcttgccgtcgccacgggcaaagggcgggcgggtttggacaacgccatcagccaaaccgccaccggcggctattggctcgccaccgcctgcgcgggggaatatccctccaaaccctcgcccgaaatggtattcggaatctgcggcgaactggggttcgacccgaaagaggcattggtcgtcggcgatacggcgcatgacctgcatatggcggcaaacgcaggcgcggcggcagtcggcgttgccaccggcgcacattcgcgcgaacagctccttagcgcaccgcatctcgccgtattggacggtttgtccgaactgcccggttttcttgcacagcattacgcctga

SEQ ID NO: 60401 - DNA, 198 bp, Neisseria meningitidis; identical to SEQ ID NO: 54740

SEQ ID NO: 60402 - DNA, 285 bp, Neisseria meningitidis
atgaaaaaactgttattggtcgccgttgtttccctgagtgccgcagccgcatttgccggcgactctgccgagcgtcagatttacggcgatccccattttgaacaaaaccgcacaaaagccgtgaaaatgttggaacagcgcggttatcaggttcacgatgtcgatgccgacgaccattggggcaaacctgttttggaagtggaagcctataaagacggccgcgaatacgacatcgtgttgtcttaccccgacctgaaaatcatcaaagagcagctcgatcgctga

SEQ ID NO: 60403 - DNA, 822 bp, Neisseria meningitidis; identical to SEQ ID NO: 55883

SEQ ID NO: 60404 - DNA, 1662 bp, Neisseria meningitidis; identical to SEQ ID NO: 54520

SEQ ID NO: 60405 - DNA, 663 bp, Neisseria meningitidis
atgatacacgccgtactcttcgacctcgacggcacacttgccgacaccgccctcgacctcggaggcgcactcaacaccctgctcgctcgccacggactacctgcaaaaagcatggacgagatccgcacccaagccagccacggcgcggcaggactgatcaaactcggcgcaggcatcacccccgaccaccccgactatgcccgatggcgcaccgaatatctggaggaatacgaccgccgctacgcccaagacaccgagctctttgacggcgtgaacgaactcattgccgaactcaaccaacgcggcatcaaatggggcatcatcaccaacaaacccatgcgcttcaccgacaaactcgtccccaaactcggcttcatcatcccacccgccgtcgtcgtcagcggcgacacctgcggcgaacccaagcccagcatcaaacccatgctgtatgcgtgcggacaaatccacgccgacccgcaacacacactctacgtcggtgatgccgaacgcgacatccaagcaggccgcaacgccggcatgaaaaccgtcctcgccgaatggggctacatctcagatgaagacgataccgactcatggcaggcggatttccacatccgaacgccgctcgatctgctcgaatgtctggacaaaatacagccctga

SEQ ID NO: 60406 - DNA, 777 bp, Neisseria meningitidis; identical to SEQ ID NO: 39426

SEQ ID NO: 60407 - DNA, 990 bp, Neisseria meningitidis
atgaaaattaccgttatcggcgcaggttcgtggggtacggcgctcgccctgcacttttcccaacacggcaaccgcgtatccctgtggacgcgcaacgcagaccaagtccgccaaatgcaggaagcgcgtgaaaacaaacgcggactgcccggcttttcctttcccgaaaccttggaagtgtgtgcggatttggcagacgcgctcaaagacagcggacttgtccttatcgtaacctccgttgccggattgagaagcagcgcagagctgctcaaacagtacggcgcgggacacctccccgtcctcgccgcctgcaaaggattcgagcaggatacagggctgctgacctttcaagtattgaaagaagtattgcccgacaataagaaaatcggcgtactctccggcccgagttttgcacaggaactcgccaaacaactgccctgtgccgtcgtcctcgcctccgaaaaccaagagtggattgaagaactcgtaccgcagctcaacacgactgtcatgaggctttacggcagtaccgacgttatcggcgtggcggttggcggcgcggtaaaaaatgttatggcgattgccaccggattgtccgatggcctagagtacgggcttaacgcccgtgccgcactggttacgcgcggattagctgaaattacccgccttgcctccgcaatgggcgcacagcccaaaaccatgatggggctggcaggcatcggcgacctcatcttgacctgcactggcgcactctcacgcaaccgccgcgtcggcttgggtttggcagaaggcaaggaactgcatcaggtgctggtcgaaatcggacacgtttccgaaggggtcagcacgatagaagaagtcttcaatactgcctgtaagtaccaaatcgatatgccgattacccaaaccctgctgcaactcatccgtaaggaaatgacccctcagcaggtcgtcgaaagactgatggaacgcagcgcgcgtttcgaataa

SEQ ID NO: 60408 - DNA, 438 bp, Neisseria meningitidis; identical to SEQ ID NO: 59505

SEQ ID NO: 60409 - DNA, 513 bp, Neisseria meningitidis
ttgggcgatggttgcagaaacggcattaatatgtctattaaatatattgccatgcctgctgcgtggaagtatatgcctacggatgtatcacgggttgccaaagaagtttttggctatttatataactcacaaggggcatctacaagatttgacaagtatttcaacaccattgacaatcgtgcagatttctttgctgccagcaatctttatgagcaaaatttgggttcaaaagcacgatggtttggtggagctgattttgtatcgcgtgctgctataactgggttaggggcagacggagaagcttcttatataacttttgcggcaggtaaagttgttggtaatcctccaatttatgaatggagggctgcgtcaggcaatgcactgatagtaaatggattttataattttagagacttgttcaataaaaaaactaatcctagggagtgggatattcaacagttgaaaagcgagcaaaagttattacagcctattcaaccaaaaatatttgagtaa

SEQ ID NO: 60410 - DNA, 1422 bp, Neisseria meningitidis; identical to SEQ ID NO: 56091

SEQ ID NO: 60411 - DNA, 207 bp, Neisseria meningitidis; identical to SEQ ID NO: 45170

SEQ ID NO: 60412 - DNA, 3606 bp, Neisseria meningitidis
atgtttcattttgcatttccggcacaaactgccctgcgccaagcgataaccgatgcctaccgccgtaatgaaatcgaagccgtacaggatatgttgcaacgtgcacagatgagcgacgaagagcgcaacgccgcctccgagcttgcccgccgtttggttacccaagtccgcgccggccgcaccaaagccggcggcgtagatgcgctgatgcacgagttttcactctccagcgaagaaggcatcgcgctgatgtgtctggcagaagccctgctgcgtatccccgacaacgccacgcgcgaccgcctgattgccgacaagatttcagacggcaactggaaaagccatttgaacaacagcccttccctcttcgtcaacgccgccgcctggggcctgctgattaccggcaaactgaccgccacaaacgacagacaaatgagttccgcactcagccgcctgatcagcaaaggcggcgcaccgctcatccgccaaggcgtaaattacgccatgcggcttctgggcaaacagttcgtaaccggacagaccattgaagaagccctgcaaaacggcaaagaacgcgaaaaaatgggctaccgcttctccttcgatatgttgggcgaagccgcctacacccaagccgatgccgaccgctactaccgcgactatgtcgaagccatccacgccatcggcaaagatgcggcaggacaaggcgtttacgaaggcaacggcatttccgtcaaactttccgccatccatccgcgctactcgcgcgcccaacacggccgtgtgatgggcgaactgttgccgcgcctgaaagagctgttccttttgggtaaaaaatacgatatcggtatcaacatcgatgccgaagaagccaaccgtctggagctgtctttggatttgatggaggctttggtttcagaccctgacttggctggctacaaaggtatcggtttcgttgtccaagcctaccaaaaacgttgtccgttcgttatcgactacctgattgacctagcccgccgcaacaaccaaaaactgatgatccgcctcgtcaaaggcgcgtattgggacagcgaaatcaaatgggcgcaagtggacggcttgaacggctatccgacctacacccgcaaagtccacaccgacatctcctacctcgcctgcgcgcgcaaactgctttccgcgcaagacgcggtattcccgcaatttgccacgcacaacgcctacactttgggcgcgatttaccaaatgggcaaaggcaaagactttgaacaccaatgcctgcacggcatgggcgaaaccctgtacgatcaagtcgtcggcccgcaaaacttaggccgccgcgtgcgcgtgtacgccccggtcggcacacacgaaaccctgctcgcctacttggtgcgccgcctgttggaaaacggcgcgaactcgtctttcgtgaatcaaatcgttgatgaaaacatcagcatcgaccgcctgattaagagcccgttcgacaccatcgccgaacaaggcatccacctgcacaacgccctgccgctgccgcgcgatttgtacggcaaatgccgtctgaactcgcaaggcgtggacttgagcaacgaaaacgtattgcagcagcttcaagaacagatgaacaaagccgccgcgcaagacttccatgccgcatccatcgtcaacggcaaagcccgcgatgtcggcgaagcgcaaccgattaaaaaccctgccgaccacgacgacatcgtcggcacagtcagctttgccgatgccgcgcttgcccaagaagcggttggtgcagccgttgccgcgttccccgaatggagtgcgacacctgccgccgaacgcgccgcctgcctgcgccgtttcgccgacctgctcgaacagcacaccccagcactgatgatgcttgccgtgcgcgaagcaggcaaaacgctgaacaacgccattgccgaagtgcgcgaagccgtcgatttctgccgctactacgcaaacgaagccgaacataccctgcctcaagacgcaaaagccgtcggcgcgattgtcgccatcagcccgtggaacttcccgctcgccatctttaccggcgaagtcgtttccgcattggcggcaggcaacaccgtcatcgccaaacccgccgaacaaaccagcctgattgccggttatgccgtttccctcatgcacgaagccggcatcccgacttccgccctgcaactcgtcctcggcgcaggcgacgtgggtgcggcattgaccaacgatgcccgcatcggcggcgtgatttttaccggctcgaccgaagtggcgcgcctgatcaacaaagcccttgccaaacgcggcgacaatcccgtcctgattgccgaaaccggcggacaaaacgccatgattgtcgattccaccgcacttgccgagcaagtctgcgccgacgtattgaactccgccttcgacagcgcgggacaacgctgctccgccctgcgcattttgtgcgtccaagaagacgttgccgaccgtatgctcgacatgatcaaaggcgcgatggacgaactcgtcgtcggcaaaccgattcagctcactaccgatgtcggccccgtcatcgatgccgaagcacagcaaaacctgttgaaccacatcaacaaaatgaaaggtgttgccaagtcctaccacgaagtcaaaaccgccgccgatgtcgattccaaaaaatccacgttcgttcgccccatcctgtttgaattgaacaacctcaacgaactgcaacgcgaagtcttcggtcccgtcctgcacgtcgtccgctaccgcgccgacgaactcgacaacgtcatcgaccaaatcaacagcaaaggctacgccctgacccacggcgtacacagccgcatcgaaggcacggtacgccacatccgcagccgcatcgaagccggcaacgtttacgtcaaccgcaacatcgtcggcgcagtcgtcggcgtacagcccttcggcggacacggtctgtccggcacaggccccaaagcaggcggttcgttctacctgcaaaaactgacccgcgccggcgaatgggttgccccgaccctgagccaaatcggacaggcggacgaagccgcactcaaacgcctcgaagcactggttcacaaactaccgttcaacgccgaagagaaaaaagccgcagcggccgctttgggacacgcccgcatccgcaccctgcgccgtgccgaaaccgtccttaccggaccgaccggcgagcgcaacagcatctcatggcacgcgcccaaacgcgtttggatacacggcggcagcacggttcaagcctttgccgcactgaccgaacttgccgcctccggcatacaggcagtggtcgaacccgacagccccttggcttcctacaccgccgacttggaaggtctgctgctggtcaacggcaaacccgaaaccgccggcatcagccacgttgccgccctgtcgcctttggacagcgcacgcaaacaggaacttgccgcccacgacggcgcactcatccgcatcctcccttcggaaaacggactcgacatcctgcaagtgtttgaagaaatctcttgcagcgtcaacaccacagccgccggcggcaacgccagcctgatggcggtcgccgactga

SEQ ID NO: 60413 - DNA, 1383 bp, Neisseria meningitidis; identical to SEQ ID NO: 55427

SEQ ID NO: 60414 - DNA, 2838 bp, Neisseria meningitidis
atgttagacaaatactcccccgccgaaatcgaatccaagcactatcaaaactgggaaagccaaggctatttccaacctgatatggatttgaccaaaccgtctttttccatccaactgccgccgcccaatgtaaccggcacgctgcacatgggtcatgccttcaaccaaaccattatggacggcctgacccgctactaccgtatgaaaggctgcaacaccgcctggattcccggcaccgaccacgcgggcatcgccacgcaaatcgtggtcgagcgtcagcttgccgcgcaaaacgtgtcccgtcataacttggatcgtgaaaaattcttggaaaaagtgtgggaatggaaagaagtttccggcggcacgattacgcagcagatgcgccgtgtgggctgttctgccgactggacgcgcgagtatttcacaatggacgatgtacgcgccgaaaccgtaaccgaagtgttcgtacgcctgtatgaacagggcttgatttatcgcggcaaacgcttggtgaactgggatccggtattgggtaccgcagtgtctgatttggaagtggaaagcgtggaagaacaaggctctatgtggcacatccgctatccgctggcggacaatcctgccgaagccgtcatcgtcgccaccacccgtcccgaaacgctgttgggcgacgttgccgttgccgtcaatcccgaagacgaacgttatacccacttaatcggcaaagaattaatcctgccgctgaccggccgcaccattcccgtgattgccgacgaatacgttgaaaaagacttcggcaccggctgcgtgaaaatcacgcctgcgcacgacttcaacgactacgaagtcggcaaacgccacgatacgcgcttggttaatgtgttcgacttggaagccaaagtattggcaaacgccgaagtgttcaacttcaaaggcgaagcgcaaccaagctttgccatgcctgaaaaatacgcaggcttggaccgctttgccgcgcgcaaacaaatggttgccgatttgcaggaacaaggtttcttggtcgaaatcaaagcgcacacgctgatgacgccgaaaggcgaccgaacaggctcagtgattgagccgatgctgaccagccaatggtttgtcgccatgtccgctacgccaaacggcggcgagcctgacagcgaattcaaaggcttgagcctcgccgacaaagccaaaaaagccgtcgacagcggcgcggtacgctttatccccgaaaactgggtcaacacctacaaccaatggatgaacaacatccaagactggtgcatctcgcgccaactgtggtgggggcatcaaatccccgcgtggtacgacgaagcaggcaatgtttacgtcgcccgcaatcaggtggaagccgaaaaacaagccggcaaaacaggcttgacccgcgaagaagacgtattggacacttggttctcctccgcgctcgtgccgttctccacgctcggctggccgtctgaaaccgacgaactcaaagccttcctgccgtccaacgtcttggttaccggctacgaaatcatcttcttctgggtggcgcgtatgattatgatgaccacccacttcaccggcaaagtaccgtttaaagacgtgtatatccacggcatcgtgcgcgaccacgaaggcaaaaaaatgtccaaatccgaaggcaacgtcattgaccctgtggatttgatcgacggcatcggcttggaaaaactgctggtaaaacgcaccaccggcctgcgcaaacccgaaaccgcgccgaaagtggaagaagccacgaaaaaactcttccccgaaggcattccgagtatgggcgcggacgctttgcgcttcactatggcgagctacgccagcttggggcgttcggtcaacttcgacttcaaacgcgccgaaggctaccgcaacttctgcaacaaaatctggaacgccaccaacttcgtcttgatgaacaccgaaaaccaagactgcggttacggcgcaaccgctgccgaaccgcgcggctactccttccccgatatgtggattgtaggccgtctgaatcagaccatcgagcaagtaacgcaagcctacgaaacctaccgctttgatttggcggcggaaaccctgtacagcttcgtgtggaacgactattgcgactggtatctggaacttgccaaagtgcagctccaaaccggctgcgccagccgccaacgcgccacacgccataccttattgcgcgtactcgaagccgccctgcgcctgctgcacccgattatcccgttcatcaccgaagaactgtggcaaaccgtcgcccctatgtgcgacgcgaaaaccgccgacagcatcatgctcgcccgcttccccgaagccgacggcggcgatattgttcagacggcattcgggcaaatgaccgtgttacaggatttgattggcgcagtccgcaacctgcgcggcgaaatgggcatccagcccaacgtgaaagccccgctgtttgtcgaaagcgcagacgacttggcggactacctcaaatacctgccgatgatgacccgactgaccgaagcacagcaagtcgccaccctgcccgaaagcgaagacgcgcccgtcgccgtctgcaacggcgcgcgcctgatgctgaaagtcgaaatcgacaaagccaccgaaaccgcccgtttgagcaaagaagccgaaaagctgcaaaaagccttggacaaactcaacgccaaactctccaaacccggctacaccgaaaaagccccggcgcatttggtggaaaaagacaaagccgatttggcggaattggaagacaaaatggcaaaagtgcaaactcagttgtcgaagttgaaagactga

SEQ ID NO: 60415 - DNA, 783 bp, Neisseria meningitidis
atgaaaaccaagttaatcaaaatcttgaccccctttaccgtcctcccactgctggcttgcgggcaaacgcccgtttccaatgccaacgccgaacccgccgtcaaagccgagtccgccggcaaatccgttgccgcctctttgaaagcgcgtttggaaaaaacctattccgcccaagatttgaaagtgttgagcgtcagcgaaacaccggtcaaaggcatttacgaagtcgtcgtcagcggcaggcagattatctacaccgatgccgaaggcggctatatgttcgtcggcgaactcatcaacatcgacacgcgcaaaaacctgaccgaagaacgcgccgccgatttgaacaaaatcgacttcgcctccctgcctttggacaaagccatcaaagaagtgcgcggcaacggcaagctgaaagtcgccgtcttttccgaccccgattgtccgttctgcaaacgcttggaacacgagtttgaaaaaatgaccgacgtgacggtttacagctttatgatgcccattgccggcctgcaccccgatgccgcgcgcaaggcgcaaatcttatggtgtcagcccgaccgcgccaaagcgtggacggattggatgcgtaaaggcaaattcccggtcggcggcagcatctgcgacaatcccgtcgcggaaaccacttccttgggcgaacaattcggcttcaacggcacgccgaccctcgtcttccccaacgggcgcagccaaagcggctacagcccgatgccccaactggaggaaatcatccgcaaaaatcaataa

SEQ ID NO: 60416 - DNA, 186 bp, Neisseria meningitidis; identical to SEQ ID NO: 39217

SEQ ID NO: 60417 - DNA, 1689 bp, Neisseria meningitidis; identical to SEQ ID NO: 48512

SEQ ID NO: 60418 - DNA, 627 bp, Neisseria meningitidis
atggctgatatgaaacgcttgaaacatttgatgttttcaccctttatcaacaacaacccgattgccttgcaggttttgggtatttgttcggctttggcggttaccaccaaacttcagacggccatcgtgatgggtatttccgtagctttggtaaccggtttttccagcttcttcatttcgctggtacgcaactacatccccaacagcatccgtattatcgtgcaaatggcgattatcgcgtcgctggttacgctggtcgaccaactcttgcaggcatttgcctacgaattgtccaaacagctttccgtattcgtcggtctgattattaccaactgtatcgtgatgggccgcgccgaagcatttgcgatgaaagagccgccgctggaaagcctgatcgacggcatcggcaacggcgcgggctacgggataatgctgcttgtcgtcgccaccgtccgcgaactgattggctcgggcaaactcttgggctacaccgttttccaaaccgtgcaggacggcggctggtatcagaccaacggcttgttcctgctcgcccccagcgcgttcttcatcatcggctttttgatttggggactgcgtacctggaaacccgaacaggcggaggaataa

SEQ ID NO: 60419 - DNA, 1101 bp, Neisseria meningitidis
atgacccgtatcgccatcctcggcggcggcctctcgggaaggctgaccgcactgcagcttgcagaacaaggttatcagattgcacttttcgataaaggctgccgccggggcgaacacgccgccgcctatgttgccgccgccatgctcgcgcctgcggcggaagcggtcgaagccacgcctgaagtcatcaaactgggcaggcagagcatcccgctttggcgcaacatcagaggccatctgaaaacgcctgccatgatgcaggaaaacggcagcctgattgtgtggcacgggcaggacaagccattatccagcgagttcgtccgccatctcaaacgcggcggcgtggcggatgacgaaatcgtccgttggcgcgcagatgaaatcgccgaacgcgaaccgcaactcggcggacgtttttcagacggcatctacctgccgaccgaaggccagctcgacgggcggcaaatattgtctgcacttgccgacgctttggacgaactgaacgtcccctgccattgggaacacgaatgcgtccccgaaggcctgcaagcccaatacgactggctgatcgactgccgcggctacggcgcaaaaaccgcgtggaaccaatcccccgagcacaccagcaccctgcgcggcatacgcggcgaagtggcgcgggtttacacacccgaaatcacgctcaaccgccccgtgcgtctgctccatccgcgttatccgctctacatcgccccgaaagaaaaccacgtcttcgtcatcggcgcgacccaaatcgaaagcgaaagccaagcccccgccagcgtgcgttcagggttggaactcttgtccgcactctatgccgtccaccccgccttcggcgaagccgacatcctcgaaatcgccaccggcctgcgccccacgctcaaccaccacaaccccgaaatccgttacaaccgcgcccgacgcctgattgaaatcaacggccttttccgccacggtttcatgatctcccccgccgtaaccgccgccgccgtcagattggcagtggcactgtttgacggaaaagacgcgcccgaacgtgatgaagaaagcggtttggcgtatatccgaagacaagattaa

SEQ ID NO: 60420 - DNA, 213 bp, Neisseria meningitidis; identical to SEQ ID NO: 55644

SEQ ID NO: 60421 - DNA, 129 bp, Neisseria meningitidis; identical to SEQ ID NO: 43085

SEQ ID NO: 60422 - DNA, 1935 bp, Neisseria meningitidis
atgagcttgatcgaatgtaaaaacatcaaccgctatttcggcagcggcgagaaccgcgtccatattttgaaagacatcagcctgtcgatagagaagggcgattttgtcgccatcatcgggcagtccggttcgggcaagtccacgctgatgaacatactcggctgtttggataccgccggttccggttcgtaccgaatcgacgacatcgaaactgccaaaatgcagcctgacgagctggcggcattgcgccgcgaacgcttcggtttcatcttccaacgctacaacctcttaagctcgctgaccgcaagggacaacgtcgcgctgccagccgtctatatgggcgcgggcggcaaagagcgttccgcgcgtgcggagaagttgttgcaggatttgggtttggcaagcaaagagggcaacaagcccggcgaactctcgggcggacagcagcagcgcgtctccatcgcccgcgccctgatgaacggcggagaaatcatcttcgccgacgagccgaccggtgcgctcgataccgccagcggcaaaaacgtgatggaaatcatccacaagctgcacaaagccgggcataccgtcattatggtcacgcacgaccccggcatcgccgccaatgccaaccgcgtcatcgaaatccgggacggcgaaatcatttccgacacctcgaaaaatcccgaaatccccgcaagcaatgtcgggaggattcgggaaaaagcctcgtggtcgttttattacgaccagtttgtcgaagccttcagaatgtcggtgcaagcagtattggcgcacaaaatgcgttcgcttctgacgatgctcggcatcatcatcggcatcgcgtcggtggtttccgtcgtcgcattgggcaacggttcgcagaaaaaaatccttgaagacatcagttcgatagggacgaacaccatcagcatcttcccggggcgcggcttcggcgacaggcgcagcggcaggattaaaaccctgaccatagacgacgcaaaaatcatcgccaaacaaagctacgttgcttccgccacgcccatgacttcgagcggcggcacgctgacttaccgcaataccgacctgaccgcttctttgtacggcgtgggcgaacaatatttcgacgtgcgcggactgaagctggaaacggggcggctgtttgacgaaaacgatgtgaaagaagacgcgcaggtcgtcgtcatcgaccaaaatgtcaaagacaaactctttgcggactcggatccgttgggtaaaaccattttgttcaggaaacgccccttgaccgtcatcggcgtgatgaaaaaagacgaaaacgctttcggcaattccgacgtgctgatgctttggtcgccctatacgacggtgatgcaccaaatcacaggcgagagccacaccaactccatcaccgtcaaaatcaaagacaatgccaatactcaggttgccgaaaaagggctgaccgatctgctcaaagcgcggcacggcacggaagatttcttcatgaacaacagcgacagcatcaggcagatagtcgaaagcaccaccggtacgatgaagctgctgatttcctccatcgccctgatttcattggtagtcggcggcatcggcgtgatgaacatcatgctggtgtccgttaccgagcgcaccaaagaaatcggcatacggatggcaatcggcgcgcggcgcggcaatattttgcagcagtttttgattgaggcggtgttaatctgcgtcatcggcggtttggtcggcgtgggtttgtccgccgccgtcagcctcgtgttcaatcattttgtaaccgacttcccgatggacatttcggcggcatccgttatcggggcggtcgcctgctcgaccggaatcggcatcgcgttcggctttatgcctgccaataaagcagccaaactcaatccgatagacgcattggcacaggattga

SEQ ID NO: 60423 - DNA, 330 bp, Neisseria meningitidis; identical to SEQ ID NO: 46537

SEQ ID NO: 60424 - DNA, 1746 bp, Neisseria meningitidis
atggaacggcagacagatgaatttgcccaagcggcggcaagggcggcaatctggtttttggcacgctatgcgggttcaggcagcgaagtgcttgcaaactgcaccgaacgcctgtttcaggcattgcaaaacggtcattcgtttatccgtttgagcggtggcgaggctgacgcgctgtcggcactcgcacccgtggtcggaacatccgccgcgcctttgattttggaaggcagaaggctgtttttgggcaggatgtggcagttggaatacgatttggctgccgagataaaacgcttggcggcagccggcacgtccgcccccgacgcggcaggcgcgcggcaaaacctcgcaaaatggtttcaaggcacgggcagcgaagggcagcgcgatgccgccgccttggcactgttgcagtcttttatggtgattaccggcgggccaggaacgggcaaaacgacaacggttgccaaactgctggcgctgatttgcggtgaagacgaaaatcttcccaacatcgcgcttgccgcaccgacaggcaaagcggcggcacatatggcgcgcgcgctgcaccgtgcaatcaacggttttgacgcgccggaggccatccgccgccatttgctcaaactggaagggcaaaccgtccaccgactgctgaagctgcgcccgcccaaaatgcaggcggcgttcaaccctgtttacccgctgccgttggacgtattggttatcgatgaagcctccatgttggataccgcattgatgttgcaacttttaaaagcggtcaaaaccggcgcgcgcgtgattctgctgggggatgaaaaccagctcccgtccgtcggaatcggggcggtgctgtccgttttgtcgcacaaaaccgttttggacggagaaacgcaccaaaggctggccggcttccttccggaacacggtttcagcgtcagcgcaaatccgcccgtgttggcgcaaaacaccgcccatctgtcgttcagccaccgcttcggcgacaacagtggcatcggctgccttgcccgtgccgccgtatcgggcgatgagggggcgtgggcattgtttgaccggtttccggacgaactggaacattcggaatgcagtccgaacgctcgagtcgaaaggttgtaccgggcgcacaaagcctattggcaggcggtaaaagacggcaatatcgaagccgcatacgcaggcatctcggatatcgtggtcctggcagcttggcggcaggatgcggaagacttcaacgaagcctattgcagccatgtacgccgcaaaatgaacataccggaacatcaggcctatttcgccggagaaccgattatgatcagacagaacgactacgcgcttgaactgttcaacggcgacatcggattgattatggaagatgtcggacggcagggcagccttgccgcctattttgccgatgcggacggatttaaaaaggtagcggtaagctgcctgcccgatttcgaacccgcattcgccatgaccgtccacaaaagccaaggttcggaatatcgggaagtctggctgctgccgccttccgccgcaccttcggacgaaggggacgatgcattgtccggattgagtaaggagctgttatataccgccattacccgcgcgagggagaagttcgtattcttcggcggagaagaaaccttccggcaagctgccgccactgtcaaaacgcgtcagacggcattgggcagtatgctcgagcgggtattttcacaagaataa

SEQ ID NO: 60425 - DNA, 654 bp, Neisseria meningitidis; identical to SEQ ID NO: 36293

SEQ ID NO: 60426 - DNA, 1071 bp, Neisseria meningitidis; identical to SEQ ID NO: 42097

SEQ ID NO: 60427 - DNA, 1806 bp, Neisseria meningitidis; identical to SEQ ID NO: 54709

SEQ ID NO: 60428 - DNA, 447 bp, Neisseria meningitidis
atgatttttgaagattattttagtgaattacaagcagatatggtttctatttgtttggaatatgttcaaggtaaggctgataaaatttacatttatgcagcttttgagcctcgtgttagtggtgctggatgttttttctctgttaaaggaaaacttgtacaacgacatcttgttaatcaagaaattccagaagttaatcttgaccatcaaattcaagtattagacatacttatggaagatttagaaaaactaaattctatttgtcagaaatttaaccaacctatgccaactgaaattaaaatgatttatgatgtaaaaaagaatagcttatcagcaaattatcaatataatttaatcttgtcatctgaatctggattacttgctttaccgcaagatgttgaagatgcatggtttgaagaaattaagaagcaaatggaagataattaa

SEQ ID NO: 60429 - DNA, 612 bp, Neisseria meningitidis; identical to SEQ ID NO: 54543

SEQ ID NO: 60430 - DNA, 606 bp, Neisseria meningitidis
atgaataccgacttccaaaacatcctcaaacaactgggcaaacaagcccaaaaagaagcggcagaaaaacaggcagccgaaaaaaacaagcaaaaacaagaacaggatttcgatttttcacaagcagtcggacaagtctccccattaaaaaaccggcagcaatattatgcgccgcccgacaaaccccccatcaaagtccgtcccaaagacaaccgcgccgacgaagaaaactacttctacatcggcagcacatacaacgacccgcccgccagcttcagcaaaaacggacagggaaaaaacgacatccaacgcctgaaaaacggatactatcccgtcgttaccgatgtcgacctgcacggctacacacaggaagaagcccaaaaagtcctcaacgaattcatcgcattcacccaaaaacgcggcgtatgcggcgaaatcatccacggcagcggattaggttccaaaggctacaaacccgttctgaaaaatatgacccgaaactggctgatgcaacaccccgacgtactcgcctacgccgaaccccgggaaggcaacgacggctgcgtccgcatcctgctcaaacgcaaattaaggcagcaagactga

SEQ ID NO: 60431 - DNA, 1065 bp, Neisseria meningitidis
atgaaagcagcacgtttttacgataaaggcgacatccgcatcgaagacatccccgaaccgaccgtcgcccccggcactgtcggcatcaatgtcgcctggtgcggcatctgcggtactgacctgcacgaattcatggaaggcccgattttcattccgccttgcggtcatccgcacccgatttccggcgagtccgcacccgtaacgatgggacacgagttctccggcgtggtctatgccgtcggcgaaggcgtggacgacatcaaagtcggccaacacgtcgtggtcgaaccctacatcatccgcgatgacgtaccgaccggagaaggcagcaactaccacctctccaaagatatgaactttatcggcttgggcggctgcggcggcggtctgtccgaaaaaatcgccgtcaaacgtcgttgggtgcatccgatttccgacaaaatcccgttggatcaagccgctttgatcgaaccgctgtctgtcggacaccacgcctatgtacgcagcggcgcgaaagcaggcgacgtcgcattggtcggcggcgcaggtccgatcggtttgctgttggctgccgtgttgaaagccaaaggcatcaaagtcatcatcaccgagttgagtaaagcacgcaaagacaaagcgcgcgaatccggcgttgccgactacatcctcgacccgtccgaagtcgatgttgtcgaagaggtgaaaaaactgaccaacggcgaaggcgtggacgtggcattcgaatgtaccagcgtgaacaaagtgttggatactttggtcgaagcctgcaaacctgccgccaatttggttatcgtatccatctggagccaccctgcaaccgtcaacgtccacagcgtcgtgatgaaagagctggatgtgcgcggcacgattgcctactgtaacgaccacgccgaaaccatcaaactggtcgaagaaggcaaaatcaacctcgaacccttcatcacccagcgcatcaagctggacgaactggtttccgaaggcttcgagcgtctgatccacaacaacgaatccgccgttaaaattattgtgagtccaaacctgtaa

SEQ ID NO: 60432 - DNA, 1512 bp, Neisseria meningitidis
atgagcgaacaaaaccatccgcaaaccgagccgcagttggacgaaaaccaaatcatcgccctgcgccgcgaaaaactgcacaacatccgccaacagcgcaacgcctatcccaacgacttcaaacgcgacagcttcgccgccgatttgcacgcccaatacggcgaaatcggcaaagaagaactcgatccgcaaggcattcccgtcaaagtggccggccgcatgatgctgaagcgtcaaatgggcaaggcgagctttgccaccattcaagacgtgtccgggcaaatccagctttatctgaacaacaaaggcgtgagccaagaagttttggacgacttcaaccattgggatttgggcgacatcgtcggcgcggaaggcactttgttcaaaaccaaccacggcgaactgaccgtacgcgtgtccgacatccgcctgttgtccaaatccttgcgtccgctgccggacaaacacaaaggcttgagcgatcaggaaaccaaataccgccaacgctatgtcgatttgattgccaacgaagaatcgcgcaatacctttatcaaacgcagccaaatcatccaatccgtgcgtaattttatggtgggcgagcattatctcgaagtcgaaaccccgatgatgcacccgattcccggcggcgcgacggcaaaacccttcgttactcatcacaatgccttagatattccgctttacctgcgtatcgcgcctgagctgtatttgaaacgcctggttgtcggcggcttggaacgcgtgtttgaaatcaaccgcagcttccgcaacgaaggcatgtccgtgcgccacaaccccgaatttacgatgattgaattttacgaagccttctccgactacgaacgtatgatgcagatggcggaagacatcatccgcaacgcatcgcgcacagtaaacggtacggcaaacatcacttacaatggcaaagaagtcgatttggaaagcccgttcgagcgtctgaccatcctcgaagccatcaaaaaatacaatccgcactacaccgacgagcagttgaacgatgcggaatggctgaaaaaagaaatcgtcaaacacggtgaaagcctgccgccgtccccgggcatcggcagcctgcaactcgcgctgtttgaaggttgcgccgagggcaagctgtggaacccgactttcatcatcgattacccggtcgaagtttccccgttggcgcgcgcttcggataccaaacaaggtctgaccgaacgtttcgaattgttcgttgtcggccgcgaactggcaaacggctattcagaattgaatgaccctgaagaccaagccgaacgcttcaaatcgcaagtcgcacaaaaagacgcgggcgacgacgaagccatgcattacgatgccgactacatccgcgcgatggagttcggtctgccgccgacaggcggttgcggcatcggtatcgaccgcttagtgatgctgctgaccgattcgcaaaccatccgcgatgtgattctgtttccgcagatgcgccccgagtaa

SEQ ID NO: 60433 - DNA, 330 bp, Neisseria meningitidis
atgaaacaaaatatcgaaaaactcgaaagcagcgtttatacgctggtacaaaaattcgaaaccctcgtcagcgaaaaccgccgcctcaaagaaaccgtcgccgaactcaaacgggcgcacgagcggcaaaaactcgaacacgaaaccgccgtcgacgaactcagcgaagccctgctcgtccaagtcggcaaactcaaagaagacctgcaaaacaaaattgacagcctgacagaagaaaatacacgataccgcagcctgctcgaacagagcagggaaaaaatcagcgcactggcagcgcgcctcccccaatggcaggaaacgcagcaataa

SEQ ID NO: 60434 - DNA, 1350 bp, Neisseria meningitidis
atggcaaaccaaaccaatagcaaagcaaaagcattgttaggctggatggacgctcgtttccccctgtctaaaatgtggaatgagcatttggctcaatactacgcaccgaaaaactttaatttttggtactacttcggctctttggccctgcttgtcctcgtgattcaaatcgtcagcggcattttcctgaccatgaactacaaacccgacggcaacctgaacgcctaccatctgcctgctgcctttactgcagtcgagtacatcatgcgcgacgtgtccggcggttggattatccgctacatgcattccaccggcgcatctttcttcttcattgttgtttatctgcacatgttccgtggtttgatttacggttcgtacaaaaaaccccgtgagttggtgtggattttcggttctctgattttcttggcattgatggcggaagcctttatgggctacctgctgccttggggtcagatgtccttttggggggcgcaggtaattattaacctgttctccgccatccctgttatcggtccggatttgtccacttggattcgcggcgacttcaacgtttccgacgttaccctgaaccgtttctttgccctgcacgttatcgcggtacctctggtattgctcggcttggttgtggcgcacatcatcgccctgcacgaagtgggttctaacaaccctgacggcgttgaaatcaagaaaaacaaagacgaaaacggtatcccgcgcgacggtatcccattccatccttactataccgttaaagacatcttgggtgtggttgtattcctgattgtcttctgtgccgtattgttcttcgcaccggaaggcggcggctacttcctcgaagcgccgaacttcgatgcggcaaatgcgctgaaaacacccccgcacattgcgccggtatggtatttcacaccgttctacgccattttgcgtgcgattccctcgttcttgggaacgcaggtttggggtgtaatcggtatgggcgcggcggtcgtgttgattgccctgctgccttggctggataggggcgaggtgaaatccgtccgttaccgcggcccgattttcaaaaccgcattggtcttgttcatcatttcctttatcggtttgggtattttgggcgcgatggtggcaaccgatacgcgtactttggtcgcgcgcatcctgtccttcgtctatttcgcattcttcctgggtatgccgttctataccaagctggataaaaacaaaccggttcccgaacgcgtaaccatgagcaccgccaaacaaaaaatcatgttctttgtttacgtcggcattaccgccgtgggtgcttacctgtttgcaaccaacatctga

SEQ ID NO: 60435 - DNA, 423 bp, Neisseria meningitidis; identical to SEQ ID NO: 39423

SEQ ID NO: 60436 - DNA, 1155 bp, Neisseria meningitidis; identical to SEQ ID NO: 55724

SEQ ID NO: 60437 - DNA, 171 bp, Neisseria meningitidis; identical to SEQ ID NO: 45116

SEQ ID NO: 60438 - DNA, 1497 bp, Neisseria meningitidis
atgtcgcttgccttggtttacagccgcgccttgagcggtatgaatgcgccgttggtcgaagtggaagcccaccttgccaacggcctgccacatttcaacatcgtcggactgcccgatacggaagtcaaagaaagtcgcgaccgcgtccgtgccgccattattcaaagcggttttgaattccccgccaaaaaaatcaccgtcaacctcgcccccgccgacctgcccaaagagtcggggcgtttcgatttgccgattgcaatcggcatccttgccgcatcggggcaggttgcgcccgaaaaactggcggaatacgagtttgcgggggaattggcactgtcggggctgttgcgccccgtgcgcggcgcgttggcgatggcgtggcagggtatgcaggcaaaacgtgcatttgttttgcctgaagaaaacgcaggacaagccgccgtgatgcgcggcattaccgtttacggcgcgcgctctttgggcgaagtcgccgcccatttgaacggtatcgaacctttggcgcaaaccgaatgttccgtaccgcaaatgccgtctgaacatggcggacaacctgatttgtgtgatgtgaaaggtcagcacactgcccgccttgctttggaaatcgctgccgcaggcggacacagcctcttgatgatgggtccgccgggaacgggcaagtctatgctctcccaacggctgccaggcatcctgccgccgctgaccgaagacgaattggttgaagtttgggcattgcgttcgctcctgcccaaccaccagcaacaactcgacagccaccgtcctttccgcagtccgcatcacagtgccagcgcggcggctatggtcggcggcggttccgacccgcgtccgggcgagatttcattggcgcaccacggcgtattgtttttggacgagctgcccgagttcgaccgcaaagttttggaagttttgcgcgaaccgttggaaaacggcgaaatccacatttcccgcgcggcgcgccaagccgtctatcctgccaaattccaacttgttgccgccatgaacccctgcccgtgcggttatctcgggcatcccgtcaaaccctgccgctgcacgcccgaaagcgtcgcgcgttaccgcagcaaaatttccggcccgctgctcgaccgcatcgatttgaccatcgaagtccccagcctgtccgccgccgaactgatgcagcaggaagcgggtgaaagcagcgcgtccgttttggaacgcgttatcgccgcccgcgacaaacaatacgcgcggcagggcaaagtcaacgccgctttgagtgtcagcgaactcgattcccaagcccgcattcaaaaagaagcgcaggaagcattgggcggcctgctggaaaaactctccctttccgcccgcagcttccaccgcattatgcgcgtggcgcgtacattggcggatttggcgggcgacgaagaagtcggcagaagccacgtcatgaaagccataggtttccgtcgtgctttatag

SEQ ID NO: 60439 - DNA, 141 bp, Neisseria meningitidis; identical to SEQ ID NO: 49273

SEQ ID NO: 60440 - DNA, 342 bp, Neisseria meningitidis
atgcccaaaatcaccgtacttccacacacgacattatgccccgaaggcgcggttatcgaagacgcgcccgaaggcaaaaccgtccttgacgtgctgctcgaccatgatatcgaagtcgatcacgcctgcgaaaaatcctgcgcctgcacaacctgccacgtgattatccgcaaaggtttcgacagcctggaagagccgaccgaattggaagaagacctgctcgatcaggcttggggtttggaagccgattcgcgcctgagttgtcaggcggttgtcgccggcgaggatttgattgtggaaatccccaaatacaccatcaaccacgcgcgagaagaacactga

SEQ ID NO: 60441 - DNA, 2007 bp, Neisseria meningitidis
atggctgatatgaagaaaattacccctcaaaacctgcgccccctgctttcggaaagcttgggacataccgattttgtcaacgtcctcaacgcactgattaaatttttgcgccgtggcggcaaaaaatgtgcgggggagcgtttcgacctgattatcgacacattcaaacaagacagggaattgctgtcccgcttcagccggtgtttttacatctggctcgcgcaaatacacatttatccggcactcatcaaactcggcatcttctcgcgccacagctttgcccgagaaatgggcatacgcatctacgaacgcttcagcccgtcatataaagattttgccaacttgggcgaagtcttcctttatcttttccattccgaaaacgacgacaaatggctgcaaacgctcaatatccgccaatggctggttttatacgaactcatccggagccacgccgagccgtccaaattgcagacggcgggcatccgccttgccgatgcgcgtttgcgcgccatcgaaatgctgtctgtctggacggcatccgaagccatcgaacccgacctcatccgcatcgccccgcgcctgctggaagccgattcttccttcgtcgccctccaacgcgaaaccgccaaactggtcgaacactaccgcaacggcaccacgccttacgacaccgcccacctcgaagtgatgttcgaccaatgtttcagccagattgactatttgcgccgcaaagggacgggcgccggctccggttcgtcggtcaaagtcgcccacctgctcgaacggctccggcagaccgtagaccgtctaaagctgctcaccgacatccaaaccggtgccggcaacagcaaccgcctgaccatcgcgctgatgaactccctcatctacgcggcggtcgaacaatacagcacccgccacctgcgccgcagcagcatccgtatgctcgcccgcagcattaccgaaaacaaaagccaccacggcgaacactacatcacccgcaaccgcaaagaatatttcaaaatgttctactcggcggcaggcggcggcatcatcatcgccctgatggcgctgctcaaaatccgcatcggcacactcggcctcagccccttcctgacttccttgtcggctgggttcaactacggcatcggctttatgatcatccatatgctgcactgcaccgtcgccaccaagcagcccgcgatgactgccgccagctttgccgaacaggtcgatctcaacgaaggcggcaaagcggtggacaacaaactcgccaagctcctcatcgacgtatgccgctcccaaagtgtcgccgtcttcggcaacgtttccatcgccatccttttggcgtgcgccatatcgttcggctatgcccatctgtaccggctgcccatactcgatgcccacaccgccgcctaccagttcaaatccatagacatcatcgcttacccgacgctgtggtatgccgccattgcaggtctgtggctgttctgctccggcatcatcgcaggttttttcgacaaccgcgccgactacctcaacctgcgccaacgcctgcccttcaaccccttgctgcgtaaaatcatgcgccccgggccccgccgcgtcctcgccgcctacatccacaaacactacggctcgttggtaggcaacttcatcttcgggatgctcttgggtatgaccggctatttcggacacctcctcgggctgccgctggacatccgccacgtcgccttttcctccgccaacctcggctatgccgccgtcagcggcaacgtcggtttgggcacgttcgtactcggcattttcagcgtcctcaccatcggcctggtcaacctctgcgtcagtttcagcctcgccctcttcgtcgccctgcgctcgcgcggcacgaaaatcggcagcatccgcaatctgattaagagtttttggaatcagattaaaagcaatccctgcatacttttcctcccgcccgccaaagaacagggacatcctccttcggacaagccttga

SEQ ID NO: 60442 - DNA, 117 bp, Neisseria meningitidis; identical to SEQ ID NO: 42842

SEQ ID NO: 60443 - DNA, 210 bp, Neisseria meningitidis
atgattctcaacatacgcaaaatgggaaactcgcaaggcgtgattctgcccaaatcattattgggtcaaataggggcagtagacagcttggctgttacagttgaaaagggcaatattattttaagctgtcctaccgttcgcaggggatgggcagaagctgccgcaatgcttgtcgaaaccgagcaggagcatttttttttccgaaattga

SEQ ID NO: 60444 - DNA, 306 bp, Neisseria meningitidis
gtggcaacctccaccgacattaaaggcaaatatgttcaaagcgttgaagtcaaaaacggcgtcgttaccgccacaatggcttcaagcaacgtaaacaacgaaatcaaaggcaaaaaactctccctgtgggccaagcgtcaaaacggttcggtaaaatggttctgcggactgccggttacgcgcaacaacgccaaagccaacgccgccaacgccgacgacgtcgccaagaccggtaccgacagcgaaaaaatcaacaccaagcacctgccgtcaacagcaccgacaagaaaatcgacaccaaactag

SEQ ID NO: 60445 - DNA, 288 bp, Neisseria meningitidis; identical to SEQ ID NO: 36916

SEQ ID NO: 60446 - DNA, 1242 bp, Neisseria meningitidis; identical to SEQ ID NO: 37141

SEQ ID NO: 60447 - DNA, 807 bp, Neisseria meningitidis; identical to SEQ ID NO: 52106

SEQ ID NO: 60448 - DNA, 1116 bp, Neisseria meningitidis; identical to SEQ ID NO: 55264

SEQ ID NO: 60449 - DNA, 471 bp, Neisseria meningitidis
atgaccgatacggatacccaagccgaccgcttcgaacagatgatgtggcaggcggtggacaaactttttgaacagcatgacggcaaactcgaaagcatggacggacgtgaacaggagctggttttgatttggcgggcggaagccgacatcggcaacggcggcatactgcaatttgtctgcaattggggttttcccgccgccgaaaagacttgttccgttctgaaaaaaatcggcgcgatacacagcgcaatgctgatccatcgggcggcagacgcattgagaaaagaaatccgccacctccaatcggaaggtaaaaacctgaaagaaatgtgggatataacaaaacatctcgacaacaaaaccgcctcactgccgaacagtctggatgaacaatattggcaagaccccgacaaactgtatctgccgggatggcaatactattccggcaaccctgttcagacgctgttttaa

SEQ ID NO: 60450 - DNA, 498 bp, Neisseria meningitidis
atgaataacctccccgttgccgacctcctcgtcttcgccatcatcgccgcctgcatcgtcatttccacgatgcgcggcgtgattgcggaggcaggttcgatggcggcatgggtggtttccttcttttttgccaaactctttgccgcacccttcgccgacctcgcctttgcctcgttccaaccccgcctgtttgcattggctctgtcgttcatttccctgttcgtcattgcctgtctgatccagaaaatgctccgttcgctgctgaccggcgcagtttcggcggtcggtttgggctttgccaaccgcattttgggcggcgtattcggtgcattgaaaggcgttttgattgttaccctgctggtcatgcttgcttcaaaaaccgacctgcccgataccgaagaatggcggcaatcttacacactgccgtttttcgtatcgctttccgaagccgtgttgaaccatagcggcggcacggcggaaactccggaagacgattga

SEQ ID NO: 60451 - DNA, 369 bp, Neisseria meningitidis; identical to SEQ ID NO: 55405

SEQ ID NO: 60452 - DNA, 312 bp, Neisseria meningitidis; identical to SEQ ID NO: 55809

SEQ ID NO: 60453 - DNA, 1974 bp, Neisseria meningitidis
atgcaccccatcgaaacccccgacaagaccttccacgacggcgacggcgtgtccgaattgggcaccatcctgcccgcgtggtggctcaaccaagtgcaatccgagctgctggccgtgctgactgcggccggtatccagccggataagtcgcagcctaatcaattactggcagcactaaataggctggctgtagttaccaccggcgaccaaaccatcaccggccaaaaaacctttactgcccaaacccaattccaaagcggcatccatttatccgccaaccagacgaactggaacggcggccacaaagcctacatcggcgcggctgccgacaacgcccacatcgtcttcggcgacaacaccctccgcctgcacggcgcaaacaaccgcatttcctacaacaaccacgacatcttccacaaagccaacaaaccgcgttttgccgaagacatcaaaggcaaaccgaacacactgtccggatacggcatcggcaatttcaaagtcgaaacattccggggcgatttgaacaccctcaaaacagacggcatctattccctgccgacggcggtcggcagctccaacctgcccgttgaaaacaccgcctgccatatccaagtcatcgccggaacgcaacccggctggtgcaggcagttgggttatcccgcctacacgtccgacgtgtacgaacgccaccaaacgagcagcgcaaacgacaactggtccgcatggaaaaaactcaattcggacggcatccccgccggcgcgatcgtatcctttcccaaagccgtacaaaaccccgcaggctatctcaaagccaacggcacgacctttgcgcaaaacaccttccccgacctctaccgcgccttgggcaacagcaaccgcctgcccgatttgagccgtaccgacatcggcatcaccgcgtggtttccgtccgaccaaatcccgaccggctggctggcgtttgacgacatccgcacgcgcgtaaccgaaaccgcttatcccgagctgtaccgtctgctgaccggaaaatacggcagcatccaaaacgtcccgcaggcggaagaccgctttatccgcaacgcaggcaacagcttggcagtcggaacgaagcaggaagacgaaatcaaacggcacgtccacaaagtattttcacactggacaaaccacacagacacggcagccgtcggttacgaagaccacaacgaaaggcagagaagcgcgctcgtatcgacttggacggacggcgatttaaacgacaacggctttttaaccccgcgctcggacagcaaaatggcaacgggcggcgacgaaaaccgccccaaagccctggttttaaaactgtgcatcaaagccgccgacaccttgggcgaagccgtgttttggataaagtcccacggcgaaaccatcaacgcaggcgcgctggacgcgggcacgctggcgcaaggtttgcaagacaaagccgaccgcgaccacacccacaccgccgcccaaatccaagggctggacgaaaaaatcagcaccgccgttgccgcgcaattcacacgccaaaccatcggcggcgtggatattgtcagattccccgacggcacaatgatacagaccggcagttacaggtttacaagaagcggcggccccatcgaaaacgaagtcgtcttccccgtcgcctttgccgacggcaacgtcaaatgcttcgtatccgaacgccattcgggacgcgttaccggcgatcgaaggcaacacaactggctgtttatccgcgcaaaaaaccacgccgccgccattattaccaactggtacgaaggcagttgcgactggatggccatcggcaaagccgcctcgggaaacgccgccagctccccgataggccccgaaatacctgaaaccaacgaagaaccgcaaagagagagtggaagaacatcaaccggaccccgaaaccgccgccgccgagacggcttgctcgaggcactgcaagactag

SEQ ID NO: 60454 - DNA, 804 bp, Neisseria meningitidis; identical to SEQ ID NO: 43212

SEQ ID NO: 60455 - DNA, 1389 bp, Neisseria meningitidis; identical to SEQ ID NO: 54790

SEQ ID NO: 60456 - DNA, 501 bp, Neisseria meningitidis; identical to SEQ ID NO: 55016

SEQ ID NO: 60457 - DNA, 606 bp, Neisseria meningitidis; identical to SEQ ID NO: 51171

SEQ ID NO: 60458 - DNA, 270 bp, Neisseria meningitidis; identical to SEQ ID NO: 40667

SEQ ID NO: 60459 - DNA, 678 bp, Neisseria meningitidis; identical to SEQ ID NO: 37180

SEQ ID NO: 60460 - DNA, 402 bp, Neisseria meningitidis; identical to SEQ ID NO: 54772

SEQ ID NO: 60461 - DNA, 381 bp, Neisseria meningitidis; identical to SEQ ID NO: 39549

SEQ ID NO: 60462 - DNA, 1863 bp, Neisseria meningitidis
atggctcttttgcagatttcagaaccgggtatgtccgccgccccgcaccggcaccgtttggcagcaggcatcgatttgggtacgaccaacagcttggttgccaccgtccgcagcggcagtgccgcctgcctgcccgatgccgaagggcgcgttaccctgccttccgtcgtccgctatctggaaaacggcggcattgaagtcggcaaaaccgccctgtccgcccaaaaaaccgacccgctgaacaccgtcagctccgccaaacgccttatcgggcggacgcttgccgatctgcatcaaaatacgcactacctgccttaccgtttcggcgacaatcaacgcgttatcgaattgcatacgcggcagggggtgaaaacgcctgtcgaagtgtcggcggaaatcctcaaaacccttaaatcgcgcgccgaagaaaccttgggcggcgatttggtcggcgtggtgattaccgtccccgcctatttcgacgatgcccaacgccaggccaccaaagatgccgcgcggctggcgggtttgaacgtattgcgcctgctcaacgaacccaccgccgccgcaatcgcctacgggctggacaacgcctcggaaggcacgtttgtcgtgtacgacttagggggcggcacattcgacgtatccgtattgcaactgaccaaaggactgtttgaagtcaaagccaccggcggcaacagcgcgttgggcggcgatgacttcgaccatcgtttgttctgctacctgctcgaacaaaacggactctcccaactcaacgaacaagacagccaactcctgctttcgctcgtccgcgccgccaaagaacaattaaccacgcaaaccgaagcgcgcattcaggcgacgctttcagacggcatggcaatcgacacaagcatcagtcgcgccgagttccacaacctgacgcagcatttggtgatgaaaacgctcgaaccggtcaaacaggcgttgaaagatgccggtgtcggtaaaaacgaagtcaaaggcgtaattatggtcggcggttcgacccgtatgctgcacgtccagcaggcagtcgccacctttttcgggcaaaccccgctgaacaacctcaaccccgacgaagtcgtcgcgctcggcgcagccatacaggcgaacgtcctcgcaggcaacaaagccgacggcgaatggctgctgctggacgttacgcccttgtcgctcggtttggaaacctatggcggcttggcggaaaaaatcatcccgcgcaattccaccatccccaccgcgcgcgcgcaggactttaccaccttcaaagacggtcagaccgcgatgacgatacacgtcgtacaaggcgaacgcgaactggttgccgactgccgcagccttgccaaattcaccctgcgcggcattccgccgatggcggcgggtgcggcgcgtatccgcgtaaccttccaaatcgatgcggacgggctgctgtccgtttccgcccaagaacaaagtaccggcgtacacgcgcaaatcgaagtcaaaccttcctacggtttggatgacggcgcgattacccgaatgcttaaagacagtatggacaacgccgccgaagatatggcggcacgcgcccgcgccgaagccgtggtcgaagccgaaagcctgaccgatgccgtcaacgccgccctcgagttggacagcgatttgctggatgccgaagaattgcaacagattcggcaaggtatcgccgatttgcaaggccgtctgaaagacggaaaagccgaagacatccgcgccgccgccgccaaactcggcagcatcaccgacaatttcgccgccaaacgcatgaaccgcaacatccaacgtgcgctgacaggccagagtgtcgataatatttga

SEQ ID NO: 60463 - DNA, 558 bp, Neisseria meningitidis
atgaaacccaaatttaaaaccgttttaaccgcgctgcttttggcggtttccctgccgtctatggcggcaacccatgttttgatggaaaccgatatgggcaatatccgtttggttttggacgagtccaaagcccccaaaaccgttgctaatttcgtgcgctatgcccgaaaaggcttttacgacgacaccgtttttcaccgcgttatcgacggtttcgttatccaaggcggcggatttaccgaagacttggtacaaaaggcaaccgataaagccgttgccaacgaatccggcaacggcttgaaaaacaccgccggcaccatcgccatggcgcggacggcagaccccgattccgccaccagccaattctttatcaatctcgcggacaacgcttcgctcgactacaaaaacggacaatacggctataccgttttcggcagggtcgaaagcggaatggacacagtttccaaaatcgcccgcgtcaaaaccgccacgcgcggcttttatcaaaatgtacccgtacagcccgtcaaaatccgtcgcgttgttgtcggacagtaa

SEQ ID NO: 60464 - DNA, 480 bp, Neisseria meningitidis; identical to SEQ ID NO: 54952

SEQ ID NO: 60465 - DNA, 792 bp, Neisseria meningitidis
atgaatttatttttcgataccaaattgggaaagcaacaaaataaagcaacccataaaatccgtgtaatgagtgaggcttggctggaaaaaaacggctactgcccctgttgcggaagcaagccgatgcagagatttgccaataacaaacctgttgcagacctcttttgctcaaattgccacgagcaatatgaattaaagagtaaaaatcaaaaaaccataggtaacagtgtgcctgacggtgcatatcgcactatgttggagcgcatccggtcagataccaaccccaactttttctttcttgcatataaaaaagcggattactctatacggcaattggtgcttgtacccaaacatttcatcacgccggacatgattattcccagaaataaaggcattaaaaaccggccgaaccacattatgtgttccatcaatctcgcccctttgcctgaaagcggaaaaatattcttaatagacgattctcgcattatcgaacccgaaaccgttctgaaaaaatggcaatccaatctgtttttacgcaaccaaaatgcggagcgcaaaggctggcttttggctgttatgaaatgtatcgaccaactccccgaagaattcacattgtcgcaaatgtatgaatttgaaaacaaactatccatccaatttccccaaaacaagcatattaaagacaaaatccgccaacagttgcaaattttgcgcgaccaaaatacgatcgaattcattggtcgcggactttacaaaaaaatcgacaaattgcccccgacttccaaggcgttttaa

SEQ ID NO: 60466 - DNA, 855 bp, Neisseria meningitidis
atgttttaccaaatccttgccctgattatctggagcagctcgtttattgccgccaaatatgtctatggcggcatcgatcccgcattgatggtcggcgtgcgcctgctgattgctgcgctgcctgcactgcccgcctgccgccgtcatgtcggcaagattccgcgtgaggaatggaagccgttgctgattgtgtcgttcgtcaactatgtgctgaccctgctgcttcagtttgtcgggttgaaatacacttccgccgccagcgcatcggtcattgtcggactcgagccactgctgatggtgtttgtcggacactttttcttcaacgacaaagcgcgtgcctaccactggatatgcggcgcggcggcatttgccggtgtcgcgctgctgatggcgggcggtgcggaagagggcggcgaagtcggctggttcggctgcctgctggtgttgttggcgggcgcgggcttttgtgccgctatgcgtccgacgcaaaggctgattgcacgcatcggcgcaccggcattcacatctgtttccattgccgccgcatcgttgatgtgcctgccgttttcgcttgctttggcgcaaagttataccgtggactggaacgtcgggatggtattgtcgctgctgtatttgggcttggggtgcggctggtacgcctattggctgtggaacaaggggatgagccgtgttcctgccaacgtttcgggactgttgatttcgctcgaacccgtcgtcggcgtgctgctggcggttttgattttgggcgaacacctgtcgcccgtgtccgccttgggcgtgtttgtcgtcatcgccgccaccttggttgccggccggctgtcgcatcaaaaataa

SEQ ID NO: 60467 - DNA, 336 bp, Neisseria meningitidis
ttggaaatgtttgatggcgaagtagaagcagatgaaagttattttggcggacaacgcaaaggcaaacgcggtcgcggtgctgccggtaaagtcgccgtattcggtcttttgaagcgaaatggtaaggtttatacggttacagtaccgaatactcaaaccgctactttatttcctattatccgtgaacaagtgaaacctgacagcattgtttatacggattgttatcgtagctatgatgtattagatgtgcgcgaatttagccattttagcttcgctgaaacttcgttttcgtatcaatcacagcacacattttgccgaacgacaaaaccatattaa

SEQ ID NO: 60468 - DNA, 1131 bp, Neisseria meningitidis
atgaaacaaaccgattcaaccatcaaatctcgtgcggcggtggcattcgcccctaaccaacccttacaaattgtggaaatcgacgtagaaatgccgcgtaaaggcgaggtgttaatccgcaatacccacactggcgtgtgccatactgatgcgtttacgttatcaggaagcgatcctgaaggcgtattccctgtggtgcttggacacgaaggtgcgggtgtggtcgttgctgtgggcgaaggtgtgtcaagcgtaaaaccgggtgatcacgtgattccgctttacaccgccgaatgtggcgaatgtgagttttgttgttcaggtaaaaccaacttgtgcgtctcagtgcgtgatacacaaggtaaaggcttaatgccggacggcacgacgcgtttttcttatcaaggtcagccaatctatcactatatgggctgttcgactttcagtgaatactccgttgttgccgaagtttcactggcgaaaatcaaccctgaagccaaccatgaacaagtatgtttgctcggctgcggcgttaccacaggtattggtgcggtacataatacggcaaaagtgcaagaaggcgactctgttgccgtgtttggcttaggcgcgattggtttggcggtggtgcaaggtgcgcgtcaagccaaagccggccgtattatcgccattgataccaatcccgcaaaattcgagttggcaaaacagtttggtgcaaccgattgtttgaacccgaacgattacgataaaccgatcaaagatgtgttgttagacatcaacaaatggggcatcgaccacacctttgaatgtatcggcaatgtaaatgtaatgcgtcaggcattagaaagcgcacaccgtggttggggacaatccattatcatcggcgtagcgggtgctggccaagaaatttccactcgtccgttccagttggtaaccggccgtgtttggaaaggcactgcatttggcggcgtgaaaggccgctccgagcttccgaaaatggtggaagattcaatgaaaggcgacatcgagttagaaccgtttgtgacccacacaatgacgctcgatcaaatcaatgaagcctttgatttaatgcatgaaggtaaatcgatccgcgctgttattcattactaa

SEQ ID NO: 60469 - DNA, 285 bp, Neisseria meningitidis; identical to SEQ ID NO: 47739

SEQ ID NO: 60470 - DNA, 3834 bp, Neisseria meningitidis
atgaccacgactactgcccctcagcgtattcgagaaattccctataactatacttcttataccgaccgcgaaatcgtcatccgcctgctgggcgacgaagcgtggcagattctgcaagacttgcgcggacagcgtaaaaccggacgttcggcacggatgctgtttgaagtgttgggcgatatttgggtagttgtgcgcaatccatatctggtcgatgacttgttggagcacccgaaacgccgcgccgcgctggtgcgggaaatgcgccaccgtttgaacgaaatccgcaaacgccgcgacgataatcggcaagtggatgtattggttgcggcagcggaaaaggcagtcgagcgttttgatagcagttttgatgaaaccagccaaaaacgccatcaaattttggaacgcttaagcaaaattaccaagccgcacaatattatgttcgacgggctggcgcgggtaacgcatgttaccgatgcaaccgactggcgcgtcgaatatccgtttgtcgtcgtcaatcccgacacggaggcggaagtcgcgcctttggtgcgcgccttaattgagttggacttggttattatcccgcgcggcggcggtacgggttataccggcggcgcgattcctttggacgcaatgagcgcggtcatcaatacggaaaagctggacaaacatcgcggcgtggaatttgtcgaactggcgggcttggatggcagacatccgattatccggtgcggcgcgggcgtggttacgcggcgagtggaagaaaccgcgcatcaggcaggtttggtgttcgccgtcgatccgacttctgccgacgcgtcctgcgtgggcggtaatgtagcgatgaacgcgggcggtaaaaaagccgtgctgtgggggacggcgttggacaacctcgcctactggcaaatggtcaaccctcaaggcgaatggctgcgtatcgaacgcgtgcgccacaatttcggcaaaatccacgacgaagaaaccgcaatatttgacgttcacacactggattcagacggcctcaatgtcgtcaaaaccgaacgcttggaaattcccggtcacaaattccgcaaagtcggtttgggcaaagacgttaccgacaaattcttgagcggcctgcccggcgtgcagaaagaaggcacggacggcatcatcaccagcgttgccttcgtgttgcataaaatgccgaaatacacgcgcaccgtgtgtatggagtttttcggcacggttgccaccgccacgccatctattgtcgaaatccgcgactttttgcttgcccatgaaagcgtacggctggcaggtttggaacatttggactggcgttatgtccgcgccgtcggctacgccaccaaagcggcgggcaagggacggccgaaaatggttttgctggcggacgtggtttcagacgacgaagccgccgtagaggcagccgccgaacacatctgcgaacttgcccgcgcccgcgacggcgaaggctttatcgccatatctcccgaagcccgcaaaaccttctggctcgaccgcagccgcaccgccgccatcgccaaacacaccaacgcctttaaaatcaacgaagacgtggtcatcccactcgaaaggctcggcgagtattcagacggcatcgaacgcatcaacattgagctttccattcaaaacaaactcaaactctgtgccgccttggagcaatatctgtccggcaaactccccatcgacaaaatgggaaccgacctgccgaccgccgaactgttgggcgaacgcggcaaacacgccctggcccacgtttccgccgtcaaagcgcgttgggactggttgctcgccaatctcgacacgccgcttgccgactacaaggcccgctacggcgcagccgtccacgccgcgcccgaagccaaagacaatgaaagctgctttaccgcattccgcgatttccgcctgcgcgtgtctgtcaaagcagacgtaatgaagccgctttctgaaatcttcagcggcaaaaccgacaccaaaatcatcgaaggcttgggcaaaatccacgccaaaaccgtgcgcggcagagtctttgtcgccctgcatatgcacgccggcgacggcaatgtccacaccaatatccccgtcaattcagacgatgccgaaatgcttcagacggcataccgttctgtggaacgcattatgaaaatcgcccgttcgcttaacggcgtgatttcgggcgaacacggcatcggcatcaccaagctcgaatttttaagcgatgaagaaatgcagccgttttggaactacaaaaaccaagtcgatcccaaacacaccttcaaccgccacaaactgatgaaaggatcggacttacgcaacgcctacacgccgtcgttcgagcttttgggtgcggaatcgctgattatggaaaaatcagatctcggcacgattgccgattccgtcaaagactgcctgcgctgcggcaaatgcaaacccgtctgctctactcacgttccgcgtgccaacctgctgtacagtccgcgcaacaaaatcctcggcgtgggcttgctgaccgaagccttcttatacgaagaacaaacccgccgcggcgtttccgtcaaacactttgaagaactcatggacatcggcgaccactgcaccgtgtgccaccgctgcgtcaaaccctgccccgtcaacatcgacttcggcgacgtaaccgtagccgtccgcaactaccttgccgattccggccacaaacgatttgcgcctgccgcagctatgggtatggcgtttttgaacgccaccggcccgaaaaccatcaaagcccttcgcgccgccatgatacagaccggcttcccagcgcaaaactttgcctacaaaatcggcaagcttcttccgatcggcacgaaaaagcaaaaagccgaacccaaggcaaccgtcggcaaagccccaattaaagaacaggttatccatttcatcaaccgtcctttgccgaaaagcgtacccgccaaaacaccgcgctccttattgggcatcgaagacggcaaaagcatccccatcatccgcaaccccgccgcgcccgaagatgccgaagccgtgttctacttcccgggttgcggttcggaacgcctgttcagccaaatcggacttgccgttcaagccatgctctggcacgtcggcgtacaaaccgtcctgccgcccggctatatgtgttgcggctatccgcaagacgcgggcggcaacaaggctaaagccgaagaaatgagcaccaacaaccgcgtggctttccaccgtatggcaaacaccctcaactacctcgacattaagaccgtcgttgtcagttgcggcacttgttacgaccagctcgaaaaataccgctttgaagaaatcttccccggctgccgcatcatcgacatccacgaatacctgctcgaaaaaggcgtgaaactcgacggcgtgcaaggtcagcaatacctctaccacgacccctgccacacccccatcaaaaccatgaacgccacccaaatggccagcagcctgatggggcagaaagtcgtcttaagcgaccgctgctgcggcgagtccggtatgttcgccgtcaaacgacccgatatcgccacccaagtcaaattccgcaaacaagaggaaatcgagaaaaacctcaaagagctgccgcagggtgaacccgtcaaaatgcttacttcctgcccagcctgcctgcaaggcttgagccgctacaccgacgacaacaatatgcctgccgactacatcgtcatcgaaatggcgaaacacatcctcggcgaaaactggctagacgagtttgtgaaaaaagccaacaacggcggcgtggaaaaagtattgctgtaa

SEQ ID NO: 60471 - DNA, 828 bp, Neisseria meningitidis
atgccggaattgccggaagtggaaacgacgttgcgcggcatcacgccgcatattgaaggaaaaacggtggaagccgtggtattgcgccaactgaagctgcgctggcagattaatcccgatttgggggagattttgtccggccggcaggttttgtcctgcggcaggcgggcgaaatatctgattgtccgtttccaaacggggattttgctgattcacttggggatgtcgggcagcttgcggatttttacgccgtcggacgaacgtatcggcaggccggacagacacgatcacgtcgatattgtgttttcagacggcacggtcatgcgttaccgcgatccgcgaaagttcggcgcgatactttggtatgagggaatcgaagaacatcatccgctgttggaaaaactggggccggagcctttgtctgaggcattttgtgcggattatctgtatgcaaggctgaaggcgcagaagcgcgcggtcaaacttgccctgatggacaatgcggtcgtggtcggtgtgggcaacatttatgccaacgagagcctgttcagagcgggcatttcgccctaccgtcctgccaaccgcctgaaaaagaaagagtgcgcgcttttggttgaaaccgtcaaagcggtgttgcagcgcgccattgaaacgggcggcagtacgctgagggattttgtggacagcgacggcaaaagcggctacttccaacaggaatatacagtgtacgggcggcacaatcagccgtgcccccagtgcggcggtttggttgtgaaagaaactttggggcagcgcggcacgttttattgcccgaactgtcagaaatag

SEQ ID NO: 60472 - DNA, 618 bp, Neisseria meningitidis; identical to SEQ ID NO: 49402

SEQ ID NO: 60473 - DNA, 897 bp, Neisseria meningitidis; identical to SEQ ID NO: 54990

SEQ ID NO: 60474 - DNA, 192 bp, Neisseria meningitidis
ttgctgcccacgcgttctgtttcaagtttattattgggtgaatatttggaatttgaagaaaacggtacaaagattgctgcggaaatcggcagtgcatggcattttttggacgcggcttgttggatttcaataaatggaaagtattatgcgggtaatcggattgtttggtttgccaaaaaagccgaaagctag

SEQ ID NO: 60475 - DNA, 843 bp, Neisseria meningitidis
atgttagtctgcaacccctacgaagtcgtcatccacggcacaacgagttccggcaagattttccgtcccagcgactgggcggaacgcctgtgcggcattctgtcctcgtttaccaaagacaacaggctttcctactcgaaatgggtgcgccccatgctggtggacaacatccgctgcgtcgccgtcgataaaaaactggaaaccgacaacccccagatgttccgcttcctgatggactttgccgccgacaacgacctgcgcgtcatcgactgcaaagccctgctcgaagaacgcgaacagggcggacaaaacgaccctaccgacgagcgcgtcctgctggcacaggcaatcgaagaaaaacacgccgccgagaaagcacaggaacagaccgtctcgggcgcatcctacgttttgcgcgaaatcggcgcggacgacaccgccaccgcctttgcagccttgagcgttttgcgttccgccctgaccgacatcaaccgctttaccgaacagatcaacaaagtccaacgcccccaaggctaccgcctgctgggcatttttgaagaaggcaaacacaacgccgtcgccgtctgcggcttccgcgaagcctgcaccctcgccggcggccgccacatccacatcgatgacatcgttaccctgccgcaaagccgccgcaaaggctacgcctcgcgccttttggaagaagtccgcaaaatcggcgcggaaacaggggtaaccaaaatccacctcaacgtccacgtcaaccacgaccgtgccgacgcgcaccgcctgtatttcaaaaacggttttgaaatctgcgcataccacttccgttgcgaccccaaatga

SEQ ID NO: 60476 - DNA, 729 bp, Neisseria meningitidis
atgcttttaggtgtcaacatcgaccacatcgctaccgtccgcaatgcgcgcggcacgacttatcccagccccgtggaggcggcactggttgccgaaacgcacggtgcggatttgattaccatgcacctgcgcgaagaccgccgccacatcaaagacgcggatgtgtttgccgtcaaaaacgccatccgcacgcgcctgaaccttgaaatggcgttgacggaagaaatgctcgaaaacgcgcttaaagtgatgccggaagacgtgtgcatcgtgcctgaaaaacgtcaggaaatcacgaccgaaggcggcttggacgtattggcgcaacaggaaaaaatcgccgggttcaccaaaatcctgaccgacgcaggcatccgagtctctctctttatcgatgccgacgacaggcaaatccaagccgcctatgatgtcggcgcgcccgttgtcgagctgcacaccggcgcgtatgccgacgcgcgcagccacgccgaacaactcaagcaattcgagcgtctgcaaaacggcgcgcattttgccggcgatttgggcttggtcgtcaacgccggacacggactgaccatacacaacgttacccccatcgcccaaatcctcgccatccgcgaactgaacatcgggcattcgctgattgcccaagccctcttcctcggactgcccgaagccgtgcgccagatgaaggaggcgatgttcagggcaaggctgctgccgtaa

SEQ ID NO: 60477 - DNA, 270 bp, Neisseria meningitidis; identical to SEQ ID NO: 48223

SEQ ID NO: 60478 - DNA, 1470 bp, Neisseria meningitidis; identical to SEQ ID NO: 43805

SEQ ID NO: 60479 - DNA, 789 bp, Neisseria meningitidis
atgagcaccttcttccagcaaaccgcccaagccatgattgctaaacacatcaaccgcttcccgctattgaagttggaccaggtgattgattggcagccgatcgaacagtatctgaatcgtcaaagaacccgttaccttagagaccaccgcggccgtcccgcctaccccctgttgtccatgttcaaagccgtcctgctcggacaatggcacagcctctccgatcccgaactcgaacacagcctcatcacccgcatcgatttcaacctgttttgccgttttgacgaactaagcatccccgattacagcaccttatgccgttaccgcaaccggctggcgcaagacgacaccctgtccgaattgctcaaactgattaaccgacaactgaccgaaaaaggcttaaaagtagagaaagcatccgccgccgtcattgacgccaccattattcagaccgccggcagcaaacagcgtcaggccatagaagttgacgaagaaggacaaatcagcggtcaaaccacaccgagtaaggacagcgatgcccgttggataaagaaaaacggcctctacaaactcggttacaaacaacatacccgtaccgatgcagaaggctatatcgagaaactgcacattactcccgccaatgcccatgagtgcaaacacctgtcgccgttgttagaagggatagctgaaggtacgaccgtctatgccgacaaaggctatgacagtgcggaaaaccggcaacatctggaagaacatcagttgcaggacggcattatgcgcaaagccacctga

SEQ ID NO: 60480 - DNA, 417 bp, Neisseria meningitidis; identical to SEQ ID NO: 37115

SEQ ID NO: 60481 - DNA, 459 bp, Neisseria meningitidis
atgaatattcaaacccgccttgccgcaaccgccctcgccctattcctttccgcctgcggaaacggcggcgcgcccgcacagcccaaaggcgaaatttccgaaaaccgcaccgccgcgttcaaatccatgatgcccgaattcacacgcatgggcaaaatggtcaaagacgaagaaccttacgatgtcgaaaaattcaaacaggctgccgcggcgtttgccgaaagcagcaagaaaccgttcacactttttgagtccgatccgcaaggcaacggccgcgccctgcccgccgtttggtcggatggtgcaaaatttgaagccgaaaaaacaaaattcgccgccgccgtcgaaaaactcaacgccgcagcacaaaccggcaaactggatgaaatcaaagccgcctacggcgaaaccggcgcaagctgcaaatcctgccacgacagtttccgcgcgcccgaataa

SEQ ID NO: 60482 - DNA, 2664 bp, Neisseria meningitidis
gtgctgaagacaccccctacgcttgctgcagaactttcgggtaaaaccggtgtgagcattagcgcaccgtatgccaatgagaacagtcgcatcctgctcagcaccacggatatcagttcggaaaacggcaaaatcaaaattcaatcttacggtgaccaatattactatgcgagacagagcgaactctatacctttgaacgccgcagctacaaaactggcaaatggtacaaccgcaaacacattaccgaagtcaaagaacacaaaaacgccaagcccgacgcagtaaacctcagcgcatcccaaggcatcgacatcaaatctggtggcagcatcgacgcctacgccaccgcattcgatgcccccaaaggcagcattaacatcgaagccgggcggaaattgacactctatgccgtagaagagctcaactacgacaaactagacagccaaaaaaggcgcagatttctcggcatcagctacagcaaagcacacgacaccaccacccaagtcatgaaaaccgcgctgccctcaagggtagttgcagaatcagccaacctccaatcgggctgggataccaaactgcaaggcacacagtttgaaaccacactgggtggcgcaaccatacgcgcaggcgtaggtgagcaggcacgggcagatgccaagattatcctcgaaggcatcaaaaccacgatccacaacgaaaccgtgagcagcagcaaatctgctctatggcaaaaacaggcaggacggggcagtaacatcgaaaccttgcaattgccgagtttcaccggtcccgttgcgcccgtactgtccgcacccggcggttacattgtcgatattcccaaaggcaatctgaaaaccgaaatcgaaaagctggccaaacagcccgaatacgcctacctgaaacagcttcagacggccaagaacgtcgattggaaacaggtgcagctggcctacgacaaatgggactataaacaggaaggcttgaccggagccggtgcagcgattgtggtgattattgtaaccgctctaacttatggatacggagcggctgcagcgggtagcgtaactgccgcaggaagtagtacagccgcagctgcaacaacgacagcggcagcaactaccactgtttctactgcagctgccatgcaaaccgcagctttagcctccttgtatagccaagcagctgtagccatcatcaataataaaggcgatgtaggcaaagcattaaaagatctcggcaccagtgatacggtcaagcagattgttacttccgcactgacggcgggtgcattaaaccagatgggagcagatattgcccaattgaacagcaaggtaagaaccgaactgttcagcagtacgggcaatcaaaccattgccaaccttggaggcagattggccaccaacctcagcaatgcaggtatctcagctggtatcaataccgccgttaacggcggcagcttgaaagacaacttaggcaatgccgcattgggagcattggttaatagcttccaaggggaagccgccagcaaaatcaaaacaaccttcagcgacgattatgttgccaaacagttcgcccacgctttggcgggttgtgttagcggactggtacagggaaaatgtaaagatggggcaattggcgcagcagttggggaaatcgtagctgaatccatacttggcggcagaaaccctgctacactcagcgatgcagaaaagcataaagttatcagttactcgaagattattgcgggcagcgtggcggcactcaacggcggcgatgtgaatactgcggcgaatgcggctgaggtagctgtggtgaataatgctttgaattttgacagcacccctaccaatgcgaaaaagcatcaaccgcagaagcccgacaaaaccgcactggaaaaaatcatccaaagtattatgcctgcacatgcggcaggtgcgatgactaatccgcaggataaggatgctgccatttggataagcaatatccgtaatggcatcacaggcccgattgtgattaccagctatggagtttatgcagcaggttggacagctccgctgatcggtacagctggtaaagcagctatcagcacctgtatggctaatccttctggttgtactgtcatggttacgcaggctgctgaagcgggcgcgggaatcgccacgggtgcggtaacggtaggcaacgcttgggaagctccagtaggagcgttgtcgaaagcgaaggcggctaagcaggctataccaacccagacagttaaagaacttgatggcttactacaagaatcaaaaaatataggtgctgtaaatacacgaattaatatagcgaatagtactactcgatatacaccaatgagacaaacgggacaaccggtatctgctggctttgagcatgttcttgaggggcacttccataggcctattgcgaataaccgttcagtttttaccatctccccaaatgaattgaaggttatacttcaaagtaataaagtagtttcttctcccgtatcgatgactcctgatggccaatatatgcggactgtcgatgtaggaaaagttattggtactacttctattaaagaaggtggacaacccacaactacaattaaagtatttacagataagtcaggaaatttgattactacatacccagtaaaaggaaactaa

SEQ ID NO: 60483 - DNA, 630 bp, Neisseria meningitidis; identical to SEQ ID NO: 56153

SEQ ID NO: 60484 - DNA, 1596 bp, Neisseria meningitidis; identical to SEQ ID NO: 39529

SEQ ID NO: 60485 - DNA, 537 bp, Neisseria meningitidis; identical to SEQ ID NO: 55545

SEQ ID NO: 60486 - DNA, 282 bp, Neisseria meningitidis
atgaaaaaatccctgtttgccgctgctttgttgtctttggtcctggcagcctgcggcggtgaaaaagccgctgaagctcccgctaccgaagcacctgccgctgaagctcccgctactgaagcacctgccgccgaagctcccgctaccgaagcacctgccgccgaagctcccgctgctgaagctgccgctactgaagcacctgccgccgaagctcccgctgctgaagctgccgctaccgaagcacctgccgctgaagctcctgctgccgaagctgcaaaataa

SEQ ID NO: 60487 - DNA, 1371 bp, Neisseria meningitidis
atgccgcaaaacactttaaacatcgttatcctcgccgccggcaaaggcacgcgcatgtattccaaaatgcccaaagtgctgcaccgcatcggcggcaagcccatgctcgggcgcgttatcgacaccgccgccgcgctgaatccgcaaaacatctgcgtcgtcatcgggcacggcaaagaccaagttttaaacgctgtcaaacgcgatgtcgtttgggttgaacaaaccgaacagctcggtaccggccacgccgtcaaaaccgccctgccccaccttgccgccgaaggccgcacgctggtgttgtacggcgacgttcctttaattgacgttgaaaccctcgaaaccctgctcgaagccgcaggcaacgaagtcgggctgttgaccgacgtgcccgtcgacccgtcaggtttggggcgcatcatccgcgacggcagcggcagcgtaaccgccattgtcgaagaaaaagacgccgacgccgcccaaaaagccgtgaaagaaatcaataccggcattttggttctgcccaacgccaaactggaaaactggctgaacagcctctccagcaacaatgctcaaggcgaatattatttaaccgacctcattgccaaagccgttgccgacggtattaaagttcatcccgtccaagtccgcgcctcccacctcgccgccggcgtgaacaacaaacgccagctcgccgaactcgaacgcatcttccaaaccgaacaggcgcaagaattgctcaaagcaggcgtaaccctgcgcgatccggcacgtttcgatttacgaggccgtctgaaacacggacaggatgtcgtaattgatgtgaactgtatctttgaaggcgaagtcgaactcggcgacaacgtcgaaatcggcgcaaactgcgtcatcaaaaacgccaaaatcggcgcaaacagcaaaatcgcccccttctcccacctcgaaagctgcgaagtcggcgaaaacaaccgaatcggcccctatgcccgcctgcgtccgcaagccaaactagccgccgacgtacacgtcggcaacttcgtcgaaatcaaaaacgccgccatcggcaaaggcaccaaagccaaccacctcacctacattggtgatgccgaagtcggcagcaaaaccaacttcggcgcaggtacgattattgccaactacgacggtgtgcacaaacacaaaaccgttatcggcgacgaagtccgcatcggttcaaactgcgtcctagtcgcccccgttaccctcggcaacaaagtaaccacaggcgcaggcagcacgattacccgcaatatcgaagacaacaaactcgccctcgcccgcgcccgccaaaccgtcatcgaaggctggatgcggcctgaaaaagacaagcaataa

SEQ ID NO: 60488 - DNA, 696 bp, Neisseria meningitidis
atgaaagcgatgatactggcggcaggacgcggcgagcgtatgcgccctttgaccgataccactccgaagccgctgctcgatgtggcgggtaagcctctaatcggttggcacctatgccgtctgaagcaggcggggtttaccgaaatcgtcatcaaccatgcttggttaggtcggcagatagaagaggctttgggcgacggctcggcttatggcgtgaacatcgcctattcgcccgaacccgcaggcggcttggaaacggcaggcggcatcgcgcaggcattgccgctgttgggcgatgccccgtttttggtcgtcaatggcgacgtgctgaccgacatcgattttaccgccgcgtttcaggcggcatcgtccctgcccgagcacatttccgcccatctgtggctggcggacaatccgccgcacaaccccgacggcgatttttccctgctgcccgacggcagcgtgcggccggaagtaaatggcggcaacggattgacatttagcggcgtgggtatttaccgtcctgaaatgtttgatggaatcgaagcgggcagtgtggcgaaactcgcgcccgtattgcggggcgaaatgcggcaaaaccgcgtcagcggacagaagcatacgggcttgtggctggatgtcggcacggtatgccgtctgaaagaggctcaagcccttgcaggggcttggaagtga

SEQ ID NO: 60489 - DNA, 780 bp, Neisseria meningitidis
atggcagcctcgcccgaagcaaaattcactgaagaaaagattttgtgggtcaaacaccacacgccgaaactcatcactttcgccatcagccgtcccgaatcctaccgttttaaagccggacagttctcccgactcggtttctacgaaggggaaggctttatttggcgtgcctactccatcgtttccgcagaatatgccgacacgctcgaatattttgccgtactcatccaagacggccccatgtcggcccgtttcgccaaaatgcaacagggcgacaccatcctgctcgataaaaatgccaccggcttcctcctgcccgaacgcttccccgacggcaaggatttggtaatgctctgcaccggctccggcatcgcccccttcctttccattctcgaacaacccgaaatccggcagcgtttcgataccgtcaacctgatacattccgtatcttttcccgaagaattgattttcaacgaccggctcgccgcattgtccgaacatcccctggtaggtgaatacggacactcgctccgtttcgtccctgttaccacccgtgccgccaacccctcgggcttaagcggaaaacgcattccggaactcttaaaaaacaacagcatcgaacaggcactgcataccaagttcaccctggaatccacacggtttatgatttgcggcaacccggaaatggtcaaagacactttccaaacgctgcttgacatgggttacgccatgcaccgcaaccgcattcccggtcaaatcatgatggaaaacggcttctaa

SEQ ID NO: 60490 - DNA, 2178 bp, Neisseria meningitidis; identical to SEQ ID NO: 54291

SEQ ID NO: 60491 - DNA, 366 bp, Neisseria meningitidis; identical to SEQ ID NO: 37248

SEQ ID NO: 60492 - DNA, 351 bp, Neisseria meningitidis; identical to SEQ ID NO: 54522

SEQ ID NO: 60493 - DNA, 390 bp, Neisseria meningitidis
atgaaaaacgttcaaaaaggctttacgctgctcgagctgatgattgccgtcgccatcctcggcatcctgacgcttatcacctacccttcctataaaacctacatccggcgcgtccgcctgtcggaagtcaggacgaccctgctgcacaacgcgcagaccatggaacgttactaccgccaaaaagggacgtttgcaacctacgacaaaaacaaactgaaacaaaacgaatatttcaagattaccttaagcgaagtcagccccgaccacttcacccttcaggcagcccccgatccgatgaccaacgacggcgaaacctgcgtcgttacgctcaacgacggcggtaccattgccgcttccggtacaaaccaatcctgccccggcttcgactaa

SEQ ID NO: 60494 - DNA, 198 bp, Neisseria meningitidis; identical to SEQ ID NO: 37567

SEQ ID NO: 60495 - DNA, 1953 bp, Neisseria meningitidis
atgcgctttgcagtcgctttgctcagtctgctgggtattgcatcggttatcggtacggtgttgcagcaaaaccagccgcagacggattatttggtcaaattcggatcgttttgggcgcagatttttggttttctgggactgtatgacgtctatgcttcggcatggtttgtcgttatcatgatgtttttggtggtttctaccagtttgtgcctgattcgcaatgtgccgccgttctggcgcgaaatgaagtcttttcgggaaaaggttaaagaaaaatctctggcggcgatgcgccattcttcgctgttggatgtaaaaattgcgcccgaggttgccaaacgttatctggaagtacaaggttttcagggaaaaaccattaaccgtgaagacgggtcggttctgattgccgccaaaaaaggcacaatgaacaaatggggctatatctttgcccatgttgctttgattgtcatttgcctgggcgggttgatagacagtaacctgctgttgaaactgggtatgctgaccggtcggattgttccggacaatcaggcggtttatgccaaggatttcaagcccgaaagtattttgggtgcgtccaatctctcatttaggggcaacgtcaatatttccgaggggcagagtgcggatgtggttttcctgaatgccgacaacgggatattggttcaggacttgccttttgaagtcaaactgaaaaaatttcatatcgacttttacaataccggtatgccgcgcgattttgccagtgatattgaagtgacggacaaggcaaccggtgagaaactcgagcgcaccatccgcgtgaaccatcctttgaccttgcacggcatcacgatttatcaggcgagttttgccgacggcggttcggatttgacattcaaggcgtggaatttgggtgatgcttcgcgcgagcctgtcgtgttgaaggcaacatccatacaccagtttccgttggaaattggcaaacacaaatatcgtcttgagttcgatcagttcacttctatgaatgtggaggacatgagcgagggcgcggaacgggaaaaaagcctgaaatccacgctgaacgatgtccgcgccgttactcaggaaggtaaaaaatacaccaatatcggcccttccattgtttaccgtatccgtgatgcggcagggcaggcggtcgaatataaaaactatatgctgccggttttgcaggaacaggattatttttggattaccggcacgcgcagcggcttgcagcagcaataccgctggctgcgtatccccttggacaagcagttgaaagcggacacctttatggcgttgcgcgagtttctgaaagacgggaaggggcgcaaacgtctggttgccgacgcaaccaaagacgcacctgccgaaatccgcgaacaattcatgctggctgcggaaaacacgctgaacatctttgcacaaaaaggctatttgggattggacgaatttattacgtccaatatcccgaaagagcagcaggataagatgcagggctatttctacgaaatgctttacggcgtgatgaacgctgctttggatgaaaccatacgccggtacggcttgcccgaatggcagcaggatgaagcgcggaaccgtttcctgctgcacagtatggatgcgtacacgggtttgaccgaatatcccgcgcctatgctgctgcaacttgatgggttttccgaggtgcgttcgtcgggtttgcagatgacccgttccccgggtgcgcttttggtctatctcggctcggtgctgttggtattgggtacggtattgatgttttatgtgcgcgaaaaacgggcgtgggtattgttttcagacggcaaaatccgttttgccatgtcttcggcccgcagtgaacgggatttgcagaaggaatttccaaaacacgtcgagagtctgcaacggctcggcaaggacttgaatcatgactga

SEQ ID NO: 60496 - DNA, 552 bp, Neisseria meningitidis
atgaaagcgtatctggctctgatttctgccgccgttatcggtttggctgcctgctctcaagaacctgccgcgcctgctgccgaggcaactcctgctgctgaagcacccgcttccgaagcgcctgccgccgaagctgctcctgcagatgctgccgaagcccctgctgccggcaactgtgcggcaactgtcgaatccaacgacaatatgcagttcaacaccaaagacatccaagtcagcaaagcatgtaaagagtttaccatcactctgaaacataccggtacgcaacccaaagccagcatgggtcacaatctcgtgattgccaaagctgaagacatggacggcgtatttaaagacggcgtaggtgctgccgataccgactatgtcaaacctgatgatgcacgcgttgttgcccataccaaactgatcggcggcggcgaagaagcttccctgactctggatcctgctaaattggccgacggcgaatataaattcgcttgtaccttcccaggtcacggtgctttgatgaacggcaaagtgactttggtcgattaa

SEQ ID NO: 60497 - DNA, 1554 bp, Neisseria meningitidis
atgaaccggacttatgccaatttctacgaaatgctgaccaccgcctgccgcaaaaacggcaacggcacggcagtgttcgacggcaaggaaaaaaccgcctaccgcgcgctcaagcaggaggccgaagccgtcgcggcgtatctgcaaaatatcggcgtgaagttcggcgacacggtcgcgctggcggtttccaattccacagaatttattaccgcctatttcgccatctccgccatcggcgcggtcgccgtaccgatgaacacatttttgaaaaacagcgaatacgcgtatatcctgaacgactgcaaggcgcgcttcctgttcgcctcggtcggcctgtcaaaagaattggcgggcttgaaggcgcaaacgcccatcgaaaaaatcatttggacgggcaaaagccggccggtcggcgaaacggcggaaggcgatgccttttttgaagacgtgcgccgcttccccgaaaaacccgacttgggccgacaaccccggataaatgatttggcacacatcatctacacctccggcacgacggggcatcccaaaggcgcgctaatcagttacgccaacctgttcgccaacctgaacggcatcgaacgcatctttaaaatttccaaacgcgaccgctttatcgttttcctgccgatgttccacagcttcacgctgacggctatggtgctgctgccgatttatatggcgtgttcgattattttggtcaaatccgttttcccgttttccaatgttttgaaacagaccctgctcaaacgcgcgaccgtgtttttgggcatacccgcgatttacaccgcgatgagcaaggcgaaaatcccttggtatttcagatggttcaaccgcattcgcctgtttatcagcggcggcgcgcctttggcggaacaaaccatcctcgatttcaaagccaagttcccccgcgccaaattgctggaaggctacggactgagcgaagcctctcccgtcgtcgccgtcaatacgcccgagaggcaaaaagcccgcagcgtcggcatccccctgcccggtttggaagccaaagccgtcgatgaagaattggtcgaagtgccgcgcggcgaagtgggcgaactgattgtcaggggcggttcggtgatgcggggctacctcaatatgcctgccgccaccgatgaaaccatcgtcaacggctggttgaaaacgggcgatttcgttaccatagacgaagacggcttcatctttatcgtcgaccgcaaaaaagatttgattatttccaaaggtcaaaatgtctatccgcgcgagatcgaagaagaaatctacaaactcgatgccgtcgaagccgccgccgtcatcggcgtgaaagaccgttatgccgacgaggaaatcgtcgccttcgtccaattgaaggaaggtatggatttgggcgagaacgaaatccgccgccacctgcgtaccgtgctggcaaatttcaaaatccccaaacaaatccactttaaagacgggctgccgcgcaacgctacgggcaaggtattgaaacgggtgttgaaggagcagtttgacggaaacaaatga

SEQ ID NO: 60498 - DNA, 1392 bp, Neisseria meningitidis; identical to SEQ ID NO: 55796

SEQ ID NO: 60499 - DNA, 324 bp, Neisseria meningitidis; identical to SEQ ID NO: 37673

SEQ ID NO: 60500 - DNA, 1458 bp, Neisseria meningitidis
atgcacaaaatcctgcccatcgcccacgtcctctcccgactgggtatgctgttttcctttatcctgctgatacccgccgccctctcctacgccttttcggacggcgcgtacaccgccttcgccaccaccgcgaccgttaccctttccggctcgtgcatcgtccggctcgccaccctccggttcaggcgcgaactgcgcccgcgcgacggcttcaccctcgtcctgatgttgtggctggcgtttgccgctatggcggcgatgccgatgtacctgtatttcccgaatatgggctttaccgacgcattttttgaatcgatgtcgggactgaccaccaccggcgcgaccgtcatcccccacgtcgacgggctcgccccctccgtcaacttttggcggcatatgctcaactggctgggcgggatgggcatcatcgtccttgccgtcgccatcctgcctatgctcggcgtaggcggcacgcagttattcaaagccgaaatccccggcattgacaaagaaagcaaaatgtcgccgcgcatttcccaagtggcgaaaaaactttggttcggctacaccctgatcaccatcctcgcggcagcctgcctgcattttgccgggatgggctggttcgatgccgtctgtcacgcgatggcgaccctctcgctgggcgggttttccacccacgatgccagcatagcttattacaactcccccctcatcgaagcggtcatcatcgttttcaccattgtcggcggcatcaattttgccaaccatttcgccgccctcaacagccgcagcctcaaaacctattggaaagacgaagaatgccggacgatgctgctgctgctctccggcagcatccttgccgccgccctgtacctgtggcacaccggctattacgccggttttaccgaatccctgcgctacaccgccttcaacttcgtctccatcggactggcaaacgggctggccaacaccgacttcgcacaatggccgctcctgatttccctgtggatgtttttcctcgccaacatcctcgccaactccggctcgaccggcggcggcatcaaaaccatacgcgccctcgtcctgttcaaattcagcctgcgcgaaatgatggtgctgctgcaccccaaagccgtccgcaccgtcaaaatcagcggcaaggccatacccgaccgcctcgcgctgaccgttatgtccttcatcttcatctactttatgaccgtcgtcctcttcagcttcctgctgatggcgagcggtatggaatttaccaccgccttcaccgccgtcatcgcctgcatcaccaacgccggccccggcctgggcgaagtcgggcccgccggcaattacgccggtttggacgtgatgcagaaatggatctgcgttaccgccatgctcttgggcaggctggaaatcttcaccgtcttcatcctcttcacccccgcctactggaagaaataa

SEQ ID NO: 60501 - DNA, 1770 bp, Neisseria meningitidis
atgaccgtacagaccaagacaaaaggtttggcgtggcaagaaaaaccgctatccgacaacgaacgtctgaaaaccgaaagcaattttttacgcggcacgattttggacgatttgaaagacccgctcacgggcggcttcaaaggcgacaacttccaactcatccgcttccacggtatgtatgagcaggacgaccgcgacatccgcgccgaacgcgccgaggcaaaactcgagcctttgaaatttatgcttttgcgctgccgactgccgggcgggatcatcaaaccgtcccaatggatagaactggacaaatttgcccgggaaaacagtcattaccgctccatccggctgaccaaccggcaaaccttccaatttcacggcgtgccgaaagccaagttgcagacgatgcaccgcctcttgcacaaactgggtttggattccatcgccacggcggcggatatgaaccgcaacgtgctttgcacgtccaacccgatcgagtccgaactgcaccggcaggcttacgaatacgcgaaaaagatttccgaacacctgctgccgcgcacgcgcggttatctggatgtgtgggtggacggcaaaaaagttcaaagttccgacgacttccttcaagaagacgagccgattttgggcaaaacctatctgccgcgcaaattcaaaaccgcagtcgtcatcccgcccttaaatgatgtggactgctacggcaacgacttggattttgtcgccatttcagacggcggcggacagcttgccggttttaatgttttggcaggcggcgggctttcaatggaacacggcaacaccaaaacctatccgaacatttcactggaactgggtttcgtacctccggaacacgcgctgaaggccgccgaagcggtggtaaccacacagcgcgacttcggcaaccgcagcgaccgcaaaaacgcccgcacccgctacaccattcaaaatatgggcttggacaacttccgcgccgaagtcgaacgccgtatgggtatgccgttcgaacccatacgcccgttcaaatttaccgggcgcggcgaccgcatcggctgggtaaaaggcatagacggcaactggcatttgacccttttcatcgaaagcggccgtttggttgacgaaggcgggaaacagcttctgaccggcgtgttggaaatcgccaaaatccacaaaggcgatttccgcattaccgccaaccaaaacctcatcgtggcaaatgtcgccgaagcagacaaagcaaaaatcgaagaacttgcccgaacatacggattaatccgcaacgatgtcagcaaactgcgcgaaaatgcgatgtcgtgcgtttccttcccgacctgcccgctggcaatggcggaagccgaacgcgtgctgccggacttcatcgacgagctggataagattatggcgaaacacggcacgtcggacgactacatcgttacccgcattaccggctgccccaacggctgcggacgggcaatgttggcggaaatcgggctggtcggcaaagccgtcgaacgctacaacctccatatcggcggcgaccgtgaaggcgtacgcatcccccgcctttataaagaaaacatcaccctgcccgaaatccttgccgaattggacgacctgatcggcaaatgggcggcagaacgcaatatcggcgaaggtttcggcgatttcgccatacggacgggcatcgtcaaacccgtattaaatgcacccgttgatttttgggacgcatccaaagccgtcgcgattgcccgcgcctga

SEQ ID NO: 60502 - DNA, 963 bp, Neisseria meningitidis; identical to SEQ ID NO: 55174

SEQ ID NO: 60503 - DNA, 1350 bp, Neisseria meningitidis
atgaaattaccggtgatgtcgcccgaacattcggcgcaacttcaggcgtttgaggcaaaaatcctgtccaatcacgccaaaatcgaggcgtggttccgcacgcagtggagcgtacactgcccgccgttttacggttcggtcgatatacgcaatgccggttacaaaatttcgtctatcgatatgaatttgttccccggcggcttcaataatctgaatcccaactttatcccgctggcggcggttgccgcgcaagatgcggtgcaacgcgcctgcgaaacggcgaaatccgtattgattattcctgaaaaccacacgcgcaatacgttttacctgcaaaacgtttacgccctcggcgagattttgcgttcggcagggtatgaagtgcgcttgggcagcctgaatccggaagtaaccgaaccgaccgaatttgaaaccgcattgggcgacaaaatcctgttggaacctttattgcgtacccgcgatcgcgtccatcttgcagacggcttttcgccttgcgtggttttgttgaacaacgatttgtccgccggcattcccgacatcctcaaaggcatcagccaaaccgttttgccgccgttgcacggcggttggacgacgcgccgcaaaacaaatcatttcggcgcgtacaaccaagttaccgccgaatttgccaagttaatcggcatcgacgaatggcaaattaacccttattttgaaaaaatcggcggtttggacttccaagggcgtgaaggcgaagacgcgttggcggaagcggtagaacgtgtgctggcgaaaattcaagccaaatacgacgaatcgggcattaccgacaaacctttcgtcatcgtcaaagccgatgccggcacttacggcatgggcgtgatgagcgtcaaatccgccgacgaagtgcgcggattgaaccgtaaaaaccgcaataaaatggcgaaagtcaaagaaggcttggaagtcagcgaagtgattgtccaagaagggatttatacttatgaaaccttaaacggcgcggtgtgcgaacccgtcgtgtatatgatggaccgcttcgtcatcggcggctttttccgcgtacacgaagggcgcggtgcggacgaaaacctcaacgccggcggtatggtgtttgttccgctgtctaacagcattcctaccggtaacggcgataattcccaagaagcgcccgaagcctgcaagcgcgtattcgaacaatgggactcgctgggtatgccgcgctctgaaaaagactgcgacgtggacaacgaacacaaccgcctctacgtttacggcgtaatggcacgcctgtcgcttctggcggcttcaatcgagttggaagaaacggcgtaa

SEQ ID NO: 60504 - DNA, 210 bp, Neisseria meningitidis; identical to SEQ ID NO: 43717

SEQ ID NO: 60505 - DNA, 123 bp, Neisseria meningitidis; identical to SEQ ID NO: 38799

SEQ ID NO: 60506 - DNA, 174 bp, Neisseria meningitidis; identical to SEQ ID NO: 55983

SEQ ID NO: 60507 - DNA, 1011 bp, Neisseria meningitidis; identical to SEQ ID NO: 55225

SEQ ID NO: 60508 - DNA, 465 bp, Neisseria meningitidis; identical to SEQ ID NO: 49248

SEQ ID NO: 60509 - DNA, 2076 bp, Neisseria meningitidis
atgctgtgcgtgttggcgggcgcggcttacggcgtattcaggacggaggcggcattgtcttcccaatggtgggcagaagccgtttcaggcgtgcctttgacggtggaagtggcggatatgccgaggtcggacgggcggcgtgtgcagtttgcggcaaaggctgtggacagcggtggtcggacgtttgatttgctgctgtcggactacaaacggcgcgaatgggcggtcgggagcagatggcggataacggcacgtgtgcaccctgtcgtcggggagttgaacctgcgcggtttgaaccgtgaggcgtgggcattatccaacggaataggcggcgtggggacggtcggtgcggacagggttttgctgcatggcggaagcggttgggggattgcggtttggcgcagccgcatcagccgtaattggcagcaggcggatgcggacggcgggctttcagacggcatcgggctgatgcgcgcgttgagcgtgggcgaacagtcggcattgcgccccgaattgtggcaggcgttccggccgttggggctgacgcatttggtcagtatttcgggtttgcacgttacgatggtggcggtaatgtttgcgtggctggcgaagcggctgcttgcctgttccccgcgccttcctgcccggccgcgcgcgtgggttttggcggcggggtgtgcaggcgcgctgttttacgcgctgcttgccggtttttccgtgccgacgcagcgcagcgttttgatgttggcggcgtttgcgtgggcttggcgcaggggaagattgtcggcgtgggcgacgtggtggcaggcgttggcggcggtgctgctgttcgacccgtcggcggtcttgggtgtggggacttggctgtctttcggtttggtggcggccctgatatgggcgtgctcggggcgtttgcacgagggaaaacggcaaactgctttgcgcgggcagtgggcggcttcggtgttgtcgctggttttgctcggttatctgtttgcttcgctgcctttggtcagccctttggtcaatgcggtggcaattccgtggttttcttgggtattgacgccgctggcgttgctgggttcggtcgtgccgtttgcgcctttgcaacagttgggggcatttttggcggaatatactttgcggtttttggtgtggcttgccgatgtgtcgcccgagtttgccgttgcctccgcacctttgccgctgttggtgttggcggtgtgtgccgctttgctgttgctgctgccgcgcggcttgggtttgcgtccgtgggcggtgttgctgttggcagggtttgtgttttaccgttcacccggcgtgccggaaaatgaggttgcggttacggtttgggatgcggggcagggtttgtcggtgtcggttcagacggcaaatcatcatcttttgtttgacaccggaacggcagcggcggcgcagatggggattgtgccgagcttgaatgcgtcgggaatcaggtatttggattatttggttttgtcgcatcacgacagcgaccacgacggcggttttcaggcagtcggcaagataccgaacggcgggatttatgccgggcagccggaattttatgagggggcgcggcattgtgcggaacagcgttggcaatgggacggcgtggattttgagtttttgatgccgtctgaacgcaaaaacatcgatgataatgggaaaagttgtgttttgcgtgttgtggcgggcggtgcggcactgctggtaacgggcgatttggatacgaagggcgaggaaagcctggtcggcaagtatggaggcaacctgtacagccaggttttggttttgggacatcacggcagcaatacgtcctcgtcgggcgtgttcctcaatgccgtctcgcccgaatatgccgttgcttcaagcggttatgccaacgcctacaaacatccgaccgaagcggtgcagaaccgtgtccgcgcacacggcatcaaactgctgcgtaccgatttgtcgggcgcactgcaattcggcttgggacgcggcggcgtgaaggctcaacgtttgagagggtataaattctattggcagaaaaaaccgtttgaatga

SEQ ID NO: 60510 - DNA, 1479 bp, Neisseria meningitidis; identical to SEQ ID NO: 55409

SEQ ID NO: 60511 - DNA, 720 bp, Neisseria meningitidis
atggcgacactgtccaacaaaaccatcttagttaccggcgcatcgcaaggtctgggcgaacaggtcgccaaagcctatgcggcggcaggcgcaaccgtgattctggtggcacgccatcagaaaaaactggaaaaagtctatgacgcgattgtcgaagccggacaccccgaacccttcgccatccgtttcgacctgatgagtgcggaagaaaaagaattcaatcagttcgccgccaccattgccgaagccacgcaaggcaaactggacggcatcgtccactgcgccggctatttttacgccctctcgccgctggatttccaaaccgtcgccgaatgggtcaaccaataccgcatcaacaccgtcgcacctatggggctgacccgcgccctgttcccgctgctgaagcagtcgcccgacgcgtccgtcatcttcgtcggcgaaagccacggcgaaacacccaaagcctactggggcggcttcggcgcgtccaaagccgcgttgaactacctgtgcaaagtcgccgccgacgaatgggaacgcttcggcaacctgcgcgccaacgtcctcgtccccggacccatcaattccccgcaacgcatcaaatcccatccgggcgaagccaaaagcgaacgcaaaagctacggggacgtgctgcccgcatttgtctggtgggcaagtaccgaaagcaaagggcgaagcggcgaaatcgtttacctctaa

SEQ ID NO: 60512 - DNA, 849 bp, Neisseria meningitidis; identical to SEQ ID NO: 37501

SEQ ID NO: 60513 - DNA, 441 bp, Neisseria meningitidis; identical to SEQ ID NO: 54348

SEQ ID NO: 60514 - DNA, 1275 bp, Neisseria meningitidis
atgccgtctgaaacctcttccccacgcaaagaaaacgaaacagaagtacacattcctgccgctccttttatcgtcaaacagtccggcagcaacgctttggcagtctgcgccctggtattggcggcattgggtttgggtacaagtggttttttgtttgtccaaggacagaatgtcttgaaaaaccaagagctggcattcaaccaaaaaatcgacaaagccgctttgggcgagtcggaaaacgccgccctgctcaaagacaacctcaaccggcaagccgccatacaatcagagctcgaccgtttggacggaaacgtcaaagcaaacggcgaacaaatcttggaaatgcaaaaatcctatcgcgagttgaccaaaggacgcgccgattggctggtggacgaaaccgagaccatactcaatctggcggcgcaacagctggtgttgactggcaatatccaaacggcagtcggcgtattggagcatatcgacagccgcctgtcccgtttcaatcaggcagagcttctgccgatcaagcaggcggtcagcagcgacttggcggaactgaaaaaccgtccctatgtcgatatttccggcacggcattgcgcctcgacaggctggaaatcgccgtatccggactgccgctgattttggacggcgtattgaaaccgagcgtacaggcacgcaacgaagccgtttccgcttcatggtggcagaacgtatgggaaaaatccctcggcacattgaaggggctggtcgaaatccgccgtttggaaaacaacgatgccatgctgatttctcccgaacaggcctattttgtgcgtgaaaacctgcgtctccgccttttggatgcgcggactgcattaatgcagcgcaacagcgaagtctatcagggcgatttgaacaatgccgaaaccgccgtcagacagtattttgatgccaaatcccccgccacgcagtcgtggttgaaggaattggcggaattgaaggcgttggatgtgcgcatgacggcggatgacggtttgaaaaacagcctaaatgccgtccgcgcctatcgcgacggtacgcgcatgacgacggcggaaaatcaagaagcggaacaggcgacttccgaaccggcaaacgaaaacacagcttccgaaccggctgccgcatcggatgtgaagaccatagaagcaccgtccctgccttcggaacgcaaaccggaacagcctgcaaaaaaacagcccgtaccggaaaaggcagggcgttcgccgtccgctaaaggagaacgcgcatga

SEQ ID NO: 60515 - DNA, 966 bp, Neisseria meningitidis
atgagctacacgcaactgacccaaggcgaacgataccacatccaatacctgtcccgccactgcaccgtcaccgaaatcgccaaacagcttaaccgccacaaaagcaccatcagccgcgaaatcagacggcaccgcacccaagggcagcaatacagcgccgaaaaagcccagcggcaaagccagactatcaaacagcgtaagcgacaaccctataagctcgattcgcagctgattcagcacatcgacacccttatccgccgcaaactcagtcccgaacaagtatgcgcctacctgtgcaaacaccaccagatcacgctccaccacagcaccatttaccgctaccttcgccaagacaaaagcaacggcagcacgttgtggcaacatctcagaatatgcagcaaaccctaccgcaaacgctacggcagcacatggaccagaggcaaagtacccaaccgtgtcgtcatagaaaaccgacccgctatcgtcgaccagaaatcccgtatcggcgattgggaagccgacaccattgtcggcaaaggacagaaaagcgcattattgaccttggtcgaacgcgttacccgctacaccatcatctgcaaattggatagcctcaaagccgaagacactgcccgggcagctgttaggacattaaaggcacataaagacagggtgcacaccatcaccatggataacggcaaagagttctaccaacacaccaaaataaccaaagcattgaaagcggagacttatttttgtcgcccttaccattcttgggagaaagggctgaatgagaacaccaacggactcatccggcaatacttccccaaacaaaccgatttccgtaacatcagtgatcgggagatacgcagggttcaagatgagttgaaccaccgaccaagaaaaacacttggctacgaaacgccaagtgttttattcttgaatctgttccaaccactaatacactag

SEQ ID NO: 60516 - DNA, 1266 bp, Neisseria meningitidis
atgagcaaaaaccaacccgcacaaccgaccaggcgcactctttttaaaaccgcgatcgcagccggagcagtcggcgcaatcggaggttatctcggcggcaaaaaacagggcgaaaccgccgaacgcaccgccgaaagccaacactcgccccaagcctatccctgttacggcgaacatcaggcaggcatcgttacgccgcagcaggcgttttcgattatgtgcgccttcgacgtaaccgcgcaaagtgccaagcagctggaaaacctgttccgcacgctgaccgcccgcatcgagtttctcacccaaggcggcgaataccaagacggcgacgacaaacttccgccagccggcagcggcattttgggcaaagccttcaaccccgacgggttgaccgttaccgtaggggtgggcagcagcctgtttgacggtcggttcggactcaaagacaaaaaaccgattcatttgcaggaaatgcgcgacttctccaacgataagctgcaaaaaagctggtgcgacggcgatttgagcctgcaaatctgtgccttcacccccgaaacctgccaagccgccctgcgcgacatcatcaaacacaccgtccaaaccgccgttatccgttggagtatcgacgggtggcagcccaaatccgaacccggcgcgatggcggcgcgcaacctgttgggcttcagggacggcacgggcaaccccaaagtttccgaccccaaaactgccgacgaggttttgtggacgggggtggccgccaacagcctcgacgaaccggagtgggcgaaaaacggcagctatcaggcagtccgccttatccgccactttgtcgagttttgggacaggacgccgcttcaagagcaaaccgacattttcgggcggcgcaaatacagcggtgcgccgatggacggcaaaaaagaagccgaccaaccggattttgccaaagaccccgaggggaataccacgcccaaagacagccatatacgcctggcgaatccgcgcgatcccgaattcctcaaaaaacaccgcctcttccgccgcgcctacagctattcgcgcggactcgcctcaagcggacagcttgatgtcgggctggtgttcgtctgctatcaggcaaaccttgccgacggattcatcttcgtgcaaaacctcctcaacggcgaaccgctggaagaatacatcagccccttcggcggcggctatttcttcgtcttgcccggcgtggaaaaaggcggctttttggggcaagggctgctgggcgtataa

SEQ ID NO: 60517 - DNA, 879 bp, Neisseria meningitidis; identical to SEQ ID NO: 54365

SEQ ID NO: 60518 - DNA, 705 bp, Neisseria meningitidis
ttgtggcaaaaccccaaatccatcgtcgaactctatgtccaagaaggcaaaaacgatgtacgcacgcgcgaagtgttggaaaaggcggcaaacgaaaacatccgcgtatattttgccgatgccgaccgcctcaacgccatcagcaaaggtgcgcgccatcagggcgtggtcggatttatcgatgcctccaaaaaccacgtccacctcgaagacgtattggaaaacttaagcgaaccgccgctgctgctgatactcgacggcatcaccgatccgcacaacctcggcgcgtgcctgcgtaccgccgacgcaatgggcgtacatgccgtcatcgcaccgaaagacaaaagcgcggggctgaacgccaccgtcagcaaagtcgccagcggcgcggcggaaaccgtcccctacatcaccgtaaccaacctcgcccgcaccctgcgcgagctgaaagaatacggcatttggatcatcggcaccgatatgggcggcaacgccgacctttaccattgcgatctgcccgacagcgcggcatgggtgatgggcaacgaaggcgacggtatgcgccgcctgacacgcgaacattgcgacatgctggtgtccatacccatgttcggcacggtcgaaagcatgaacgtctccgtgtctgccggaatggtattaagcgaaacccgccggcagcgcgtattaaaaaacgaaaaagcgtaa

SEQ ID NO: 60519 - DNA, 711 bp, Neisseria meningitidis
atgacctcatgtgaacctgttaatgaacaaaccagtttcaacaatcccgagccaatgacaggatttgaacatacggttacatttgattttcagggcaccaaaatggttatcccctatggctatcttgcacggtatacgcaagacaatgccacaaaatggctttccgacacgcccgggcaggatgcttactccattaatttgatagagattagcgtctattacaaaaaaaccgaccaaggttgggttcttgagccatacaaccagcaaaacaaagcacactttatccaatttctacgcgacggtttggatagcgtggacgatattgttatccgaaaagatgcgtgtagtttaagcacgactatgggagaaagattgcttacttacggggttaaaaaaatgccatctgcctatcctgaatacgaggcttatgaagataaaagacatattcctgaaaatccatattttcatgaattttactatattaaaaaaggagaaaatccggcgattattactcatcggaataatcgaataaaccaaactgaagaagataattacagcactggcgtaggttcctgtattaacggtttcccggtacggtattacccgtttattcgggaaaagcagcagctcacacagcaggagttggtaggttatcaccaacaagtagagcaattggtacagagttttgtaaacaattcaagtaaaaaataa

SEQ ID NO: 60520 - DNA, 855 bp, Neisseria meningitidis; identical to SEQ ID NO: 51563

SEQ ID NO: 60521 - DNA, 1314 bp, Neisseria meningitidis; identical to SEQ ID NO: 56016

SEQ ID NO: 60522 - DNA, 966 bp, Neisseria meningitidis
atgttacgtttgactgctttagccgtatgcaccgccctcgctttgggcgcgtgttcgccgcaaaattccgactctgccccacaagccaaagaacaggcggtttccgccgcacaaaccgaaggcgcgtccgttaccgtcaaaaccgcgcgcggcgacgttcaaataccgcaaaaccccgaacgcatcgccgtttacgatttgggtatgctcgacaccttgagcaaactgggcgtgaaaaccggtttgtccgtcgataaaaaccgcctgccgtatttagaggaatatttcaaaacgacaaaacctgccggcacgctgttcgagccggattacgaaacgctcaatgcctacaagccgcagctcatcatcatcggcagccgcgcagccaaagcgtttgacaaattgaacgaaatcgcgccgaccatcgaaatgaccgccgataccgccaacctcaaagaaagctcaaaagagcgtatcgacgcgctggcgcaaatcttcggcaaacaggcggaagccgacaagctgaaggcggaaatcgacgcgtcttttgaagccgcgaaaactgccgcgcaaggcaaaggcaaaggtttggtgattttggtcaatggcggcaagatgtccgccttcggctcgtcttcacgactgggcggctggctgcacaaagacatcggcgttcccgctgttgacgaagccatcaaagaaggcagccacggtcagcctatcagctttgaatacctgaaagagaaaaatcccgactggctgttcgtccttgaccgcagcgcggccatcggcgaagagggtcaggcggcgaaagacgtgttggataatccgctggttgccgaaacaaccgcttggaaaaaagaacaggtggtttacctcgttcccgaaacttatttggcagccggtggcgcgcaagagctgctgaatgcaagcaaacaggttgcggatgcgttcaacgcggcaaaataa

SEQ ID NO: 60523 - DNA, 663 bp, Neisseria meningitidis; identical to SEQ ID NO: 38761

SEQ ID NO: 60524 - DNA, 684 bp, Neisseria meningitidis; identical to SEQ ID NO: 42075

SEQ ID NO: 60525 - DNA, 1140 bp, Neisseria meningitidis
atgaaaaaaacactgatggcggcggcaatcctgagcctcgccttgactgcgtgcggcggcggaagcgataccgccgcccaccccccctccgccaagcccgaagccggacaatcgggcaaactcaatatctacaactggtcggattatgtcgatcccgaaaccgtcgccgcctttgaaaaagaaaccggcatcaagacgcgttccgattattacgacagcaacgaaacactggaggcaaaagtcctgaccggcaaatccggctacgacctgaccgcgccgtccatcgccaacgtcggccggcaaatcaaagcgggcgcgtatcagaaaatcgacaaggcgcaaatcccccattacggcaacatcgataaagatttgctgaaaatgatggaagccgtcgatccgggcaacgaatacgccgtcccctatttctggggcatcaacaccttggcaatcaacacgcggcaggtgcaaaaggcattgggtacggacaagctgcccgaaaacgaatgggatttggtgttcaaccccgaatacaccgccaaactcaaatcctgcggcatcagctatttcgacagcgcaatcgaacagattcccttggcgttgcactatttgggcaaagaccccaacagtgaaaatcccgaagacatcaaagccgccgtcgatatgatgaaagccgtccgaggcgacgtgaaacgcttcagctcttccggctatatcgacgatatggcggcgggcaacctgtgtgccgccatcggttacggcggcgatttgaacattgccaaaacccgtgccgaagaagcggcaaacggcgtggaaatcaaagtattgaccccgaaaaccggcgtgggcgtgtgggtggattcctttatgattccgcgcgacgcacaaaacgttgccaacgcccaccgctatatcgactacacgctcctgcccgaggtggcggcgaaaaacggcagcttcgttacctacgcacccgccagccgccccgcgcgcgagctgatggatgaaaaatacacctccgatgcatcgattttcccgaacaaagaactgatggaaaaaagtttcatcgtatcgcccaaatccgcagaatccgccaaactgggcgtgaagctgtggcaagggctcaaagcgggcaaataa

SEQ ID NO: 60526 - DNA, 1569 bp, Neisseria meningitidis; identical to SEQ ID NO: 44738

SEQ ID NO: 60527 - DNA, 486 bp, Neisseria meningitidis; identical to SEQ ID NO: 37367

SEQ ID NO: 60528 - DNA, 1542 bp, Neisseria meningitidis; identical to SEQ ID NO: 54963

SEQ ID NO: 60529 - DNA, 813 bp, Neisseria meningitidis
gtgacggaaagtactggcggtctcgaaatccccgccgccaaagccatccgccgagcaggcatagccgtgattatcgccaacccgcgtcagacgcatcagtttgcccaatcgcagccgctgaccaaaaccgacgccaaagatgccaaaatgctcgccttcttcgcacagatgatgacgcagaaagaagattggcaaaccatgccctaccaaccgcccacagaagcggaagaagtgttggaagccttggttaaccgccgcaaccaatcggcggatatgcggactgccgagaaaaaccgtctgcatcaggttcacgaaacgcaagtcggaagcgtcaaacaactgattgcccattttgaccggctgattgacgaattggacaaacaaatcgacgaccacacccacacgcattttgacggcaaagcccaagtggcggagcaaatcaaaggcatcggttcgataacgacggctacgctgatggcgatgctgcctgagttggggcggctgtcgcacaaacggatagcgagtttggccggcattgccccgcacccgagggagagcgaggaaaccaaattcaaaagccgctgcttcggcggaaggtctgcggtacgtaaggcgctgtatatggctaccgtggtagcgacacgttttaaaccgcttattcgggatttctaccaacgcctgccgtccgagggtaagccgtataaggttgccgttacggcatatatgcgcaaactgctgacgatatcgaatgcccggatgcgtgattattttgccgaaaacgataccgccgaaaacggtatccggacggcttga

SEQ ID NO: 60530 - DNA, 1428 bp, Neisseria meningitidis; identical to SEQ ID NO: 54570

SEQ ID NO: 60531 - DNA, 852 bp, Neisseria meningitidis
atgaccttactcggaataaagctcaaacagacccagcagctcaaccagcggctgcaacaatctttgcgcgtattgcagatgtcgggtatcgaacttgaacgcgaggtcgaaaactggctgtcggacaaccccctgctcgaacgcaaagacacggatgaattttccgatgctaggttttcccattacaccgcgcctgcccgtcaaatcggcggagacgaaggcgaagatatgctgtccaacatcgccggtgagcaggatttcaagcaatacctgcacgcgcaagtatgcgaacacccgctttccgaccaagaagccgcctgtgtccacatccttatcgatttccttgacgagcagggttatctgaccgacagcatcgaagacatcctcgaccatacgcccttggagtggatgttggatgaagcaatgctgaaacaagccctgactgcattgcaaaaattcgacccggcaggcgtggccgccgccgatttgaacgaatcgctgatactgcagatagaaagattgggcgaatgtgctgccaaacccgccgccctgcatatcgtccgaaacgccctcgacagcattgacggcaaccgcagccaaaccctcgcacgaataaaaaaacacctgccccaaaccgacagcggcacactcgaagccgcactcgacctcattgcttcgctcaatccctttcccgccgccggttttgcctcgtccacacccacgccgtattctgacgaggcactcgccaacctgctggctttccgcggcatggaggtttctcgccgcaccattgccaaatacagagaatcccttgagattccggcagcacacaaacgcaaaaccgcagaataa

SEQ ID NO: 60532 - DNA, 522 bp, Neisseria meningitidis; identical to SEQ ID NO: 55550

SEQ ID NO: 60533 - DNA, 798 bp, Neisseria meningitidis
atggataccgcacaaaaacaacgctgggcaataaccctatcctatgacggcagccgcttttacggctggcagaaacaggcgggcggcgtaccgaccgttcagacggcattggaaaccgcactcgcccaaatcgcaggagaatttgtcgccaccaccgttgccggcagaaccgataccggcgtgcacgccaccgcccaagtcgtccactttgacacaactgccgtccgtccccaacaggcatgggtgcgcggcgtaaatgcccacctgcccgaaggaattgccgttttgcatgctcgacaggtcgcccccgaatttcatgcacgatttgacgcatacggacgacactaccgctacctgctcgaatccgcccccgtccgttcccccctgctcaaaaacagggcaggctggacacacctcaaactcgacatcgaaccgatgcgtcgggctgccgcctatttgatcggcgaacaagacttctccagcttccgcgccgccgagtgccaggcaaaatcccccgtcaaaaccatctaccgcgccgaccttacccaaagcgcaggactcgtccgcctcgatttgcacggcaacgcctttttgcaccatatggtacgcaacatcatgggcgcgctcgtttatgtcggcagcggcaggctcagcgtcgaaggcttcgccgcactgattcaagaacgcagccgcctcaaagccccaccaaccttcatgcccgacgggctttacctgaccggcgtcgactatcccgaggcatacggcatcatccgccccaaaatccccgaatggctttaa

SEQ ID NO: 60534 - DNA, 465 bp, Neisseria meningitidis; identical to SEQ ID NO: 54821

SEQ ID NO: 60535 - DNA, 240 bp, Neisseria meningitidis; identical to SEQ ID NO: 39582

SEQ ID NO: 60536 - DNA, 618 bp, Neisseria meningitidis
atgtccgcttatcgaaaaggcaacatctttatcatttcggccgcttccggcacgggcaaaaccacgctggtgtcgcggctgttggcaaaccataacggtttgcgcgtttccgtgtcgcacacgacgcgcccgccgcgtgaaggcgaagcaaacggcgtacattatcactttgtttccaaagaagagtttgagtcgcttatcgcacaggaggcttttttggaatacgcagacgtattcggcaactattacggcacaagcgcggagggcgtgaatgcgttggcggcggcaggttatgacgtgattttggaaatcgacgttcagggcgcggcgcaggttcgagatgcgctgcctgaagctgtcggcatctttatcctgccgccgtctttcgatgtgcttgccgcgcgtctcaacggacgcgggacggacagtcaggaagttatccaaaggaggcttgcgaaggcaaggcatgaaatcgaacagtccgtattgttcgactttgtcgtggtcaatgacgacttggcgcgggcggaggaggatttgcgccatattgtgaatgcctgccgtctgaaaaggtcgcggcaactgggatttattgcagatttgttggaaaattcctaa

SEQ ID NO: 60537 - DNA, 996 bp, Neisseria meningitidis; identical to SEQ ID NO: 44670

SEQ ID NO: 60538 - DNA, 1470 bp, Neisseria meningitidis
ttgacactctatgccgtagaagagctcaactacgacaaactagacagccaaaaaaggcgcagatttctcggcatcagctacagcaaagcacacgacaccaccacccaagtcatgaaaaccgcgctgccctcaagggtagttgcagaatctgccaatctgcaatcaggttgggataccaaactgcaaggcacacagtttgaaaccacactgggtggcgcaaccatacgcgcaggcgtaggtgagcaggcacgggcagatgccaagattatcctcgaaggcatcaaaaccacgatccacaacgaaaccgtgagcagcagcaaatctgctctatggcaaaaacaggcaggacggggcagtaacatcgaaaccttgcaattgccgagtttcaccggtcccgttgcgcccgtactgtccgcacccggcggctatatcgccgacatccccaaaggcaatctgaaaaccgaaatcgaaaagctgtccaaacagcccgagtatgcctatctgaaacagctccaagtagcgaaaaacgtcaactggaaccaggtacagctggcgtacgacaaatgggactataagcaggaaggcttaaccagagccggtgcagcgattatcgcgctggctgttaccgtggttactgcgggcgcgggagtcggagccgcactaggcttaaacggcgcagccgcagcagcggccgatgccgcctttgcctcactcgcttctcaggcttccgtatcgctcatcaacaataaaggcgatgtcggcaaaaccctgaaggaactgggcagaagccgcacggtaaaaaatctggttgtagcggcggcaacggcaggcgtatccaacaaactcggtgcctcttcccttgccacttggagcgaaaccccttgggtaaacaacctcaacgttaacctggccaatgcgggcagtgccgcgctgatcaacaccgctgttaacggcggcagcctgaaagacaatctggaggcaaatatcctggcggcattggtgaataccgcgcatggggaggctgcgagtaagattaagcaattggatcagcactatatcgcccacaaagttgcccatgccgtagcaggctgtgcagctgcggcggcgaataagggcaagtgtcaggacggcgcgataggagcggcggtcggtgaaatcctcggcgaagccctactggacggcagagaccctggcagcctgaatgtgaaggacagggcaaaaatcattgctaaggcgaagctggcagcagggacggttgcggcgttgagcaagggggatgtgaatgctgcggcgaatgcggctgctgtggcggtagagagtaatgcgcttagcaaggaaagaatggataaattgacaaaatgcctttccggtaaaacttgttctactacgatggaaaaagtaaatgccatcaaaaaggatgaacaatttagcaaagtaattgatacggaaattcaaaaaagtctgttctag

SEQ ID NO: 60539 - DNA, 411 bp, Neisseria meningitidis
gtgaaactgctggcgaataactggcagccgattgccatcatcgcgcttgtcggcacgggtttggcggtgtcacaccatcaaggctacaaggcagcctttgcgaagcagcaggcggtcatcgacaagatggagcacgataaggcgcaagccctgctgttgtcggctcaaaactatgcgcgcgaactggaactggcacgcgcggaagcgaaaaaatatgaagtcaaggcgcacgctgtcggcatggctttggcgaaaaaacaggcggaagtcagccgtctgaaaacggaaaataaaaaggaaatcgaaaatgtccttactcaagaccgtaaaaatgcaggcggcggttgtattgacggctttggccatcacggcttgcagctctacaagcgcgccctcggctacggaaattaa

SEQ ID NO: 60540 - DNA, 1056 bp, Neisseria meningitidis
atgccgtctgaaacacgcctgccgaactttatccgcgccttgatatttgccctgggttttatcttcctaaacgcctgttcggaacaaaccgcgcaaaccgttaccctgcaaggcgaaacgatgggcacgacctataccgtcaaatacctttcaaataatcggggcaaactcccctcccccgccgaaatacaaaagcgcatcgatgacgcgcttaaagaagtcaaccggcagatgtccacctatcagcccgactctgaaatcagccggttcaaccaacacacagccggcaaacccctccgcatttcaagtgacttcgcatacgttaccgccgaagccgtccgcctgaaccgcctgacgcacggcgcactggacgtaaccgtcggccccttggtcaacctttggggattcggccccgacaaatccgttacccgtgaaccgtcgccggaacaaatcaaacaggcggcatcttatacgggcatagacaaaatcattttgaaacaaggcaaagattacgcttccttgagcaaaacccaccccaaggcctatttggatttatcttcgattgccaaaggcttcggcgttgataaagttgcgggcgaactggaaaaatacggcattcaaaattatctggtcgaaatcggcggcgagttgcacggcaaaggcaaaaacgcgcgcggcgaaccgtggcgcatcggtatcgagcagcccaatatcgtccaaggcggcaatacgcagattatcgtcccgctgaacaaccgttcgcttgccacttccggcgattaccgtattttccacgtcgataaaaacggcaaacgcctctcccatatcatcaacccgaacaacaaacgacccatcagccacaacctcgcctccatcagcgtggtcgcagacagtgcgatgacggcggacggcttgtccacaggattattcgtattgggcgaaaccgaagccttaaagctggcagagcgcgaaaaactcgctgttttcctgattgtcagggataaaggcggctaccgcaccgccatgtcttccgaatttgaaaaactgctccgctaa

SEQ ID NO: 60541 - DNA, 768 bp, Neisseria meningitidis
atggcactggcaaaacgcatcatcccctgtctcgacgtaaaagacgggcgcgtcgtcaaaggcgtgaacttcatcggtttgcgcgacgcgggcgaccccgtcgaagccgccaaacgctacaacggcgaaggcgcggacgaattgaccttcctcgacatcaccgcctcatccgacaaccgcgacaccatcctgcacatcatcgaagaagttgccggacaagtcttcatccccctgaccgtcggcggcggcgtacgcaccgttgccgacatccgccgcctgctcaatgccggcgcggacaaagtcagcatcaacaccgccgccgttacccgtcccgacctgattgacgaagccgccggatttttcggttcgcaagccatcgtcgccgccgtcgatgccaaagccgtcaaccccggaaacacacgctgggaaatctttacccacggcgggcgcaatccgaccggtttggatgcggtggaatgggcgatcgaaatgcaaaaacgcggcgcgggcgaaatcctgcttaccggtatggacagggacggtacgaaacagggtttcaacctgccgctgacccgcgccgttgccgaagccgtcgacatccccgtcatcgcctccggcggggtcggcaatgtccggcacctgattgaaggcataaccgaaggcaaagccgatgccgtacttgccgccggcgttttccatttcggggaaatcgccatccgcgaagccaaacgcgctatgcgcgaagccggcatcgaagtgcgcctctga

SEQ ID NO: 60542 - DNA, 843 bp, Neisseria meningitidis
atggataaagaacgaattttaacccccgcagtcgtgttttccgtcgcactgctgcatttggcaatggtggcattgctctggcaggcgcacaagctgcccgtgatagagtcaggaaatgttatcgaatttgtcgatttgggtgattttggcggaggggacggtgcacccgaaggcgcaggtgcgcctgctgcgcctgagccgcaacctgagcctgagccgcccaaacctgtcgagccgcccaagccggttttgaagccggtggttacgaaaaaggcggatgcggatattcagcagcctaaggaagagccgaaacctgaagaaaagccgaaacccgaagaaaaaccgaaaccagagcctaagccggaagcgaagcctgtcccgaaaccggcggaaaaaccggtcgagaggccgtctgaaaaacctgccgaacatcccagcaatgcttctgccaaagcagacagcgagcagggtaatggggaagataagggaaccggtatcaaaggagacggaacggggcgcggagaaggcagcggtaaaggtagcggcggtgtcaaaggcgaacacggggaaggagccggcagcagcaaaggcaatcctttacgcgccaatggcagcattccgcgcccggcttatcccacgctttctatggagaatgacgagcagggtacggttgttttgagcgttttggtttctccgggcggtcatgtcgagtccgttaaaatcgtgaaaagcagtggtttttctcggttggacaatgcggcacgcaaggcggcgcaaaacgggcattttcaagccaatgcctggacggagtttaaagtccccgtcaagtttgaattgaattag

SEQ ID NO: 60543 - DNA, 546 bp, Neisseria meningitidis
ttgatattggcggttgccttgggcagcctgtcggcatggttgggacgcatcagcgaagtcgagattgaagaagtcaggctcaatcccgacgaaccgcaatacacaatggacggattggatggcaggcggtttgacgaacagggatacttaaaagaacatttgagcgcgaaaggcgcgaaacagtttcccgaaagcagcgacatccattttgattcgccgcatctcgtgttcttccaagaaggcaggttgttgtacgaagtcggcagcgacgaagccgtttaccataccgaaaacaaacaggttctttttaaaaacaacgttgtgctgaccaaaaccgccgacggcaaacggcaggcgggtaaagttgaagccgaaaagctgcacgtcgataccgaatctcaatatgcccaaaccgatacgcctgtcagtttccaatatggtgcatcgcacggtcaggcgggcggcatgacttacgaccacaaaacaggcatgttgaacttctcatctaaagtgaaagccacgatttatgatacaaaagatatgtaa

SEQ ID NO: 60544 - DNA, 312 bp, Neisseria meningitidis; identical to SEQ ID NO: 37456

SEQ ID NO: 60545 - DNA, 300 bp, Neisseria meningitidis; identical to SEQ ID NO: 55526

SEQ ID NO: 60546 - DNA, 621 bp, Neisseria meningitidis; identical to SEQ ID NO: 44700

SEQ ID NO: 60547 - DNA, 1008 bp, Neisseria meningitidis; identical to SEQ ID NO: 44166

SEQ ID NO: 60548 - DNA, 738 bp, Neisseria meningitidis; identical to SEQ ID NO: 54918

SEQ ID NO: 60549 - DNA, 888 bp, Neisseria meningitidis
atgccctaccaacaaatcaccgtcaacgtcaacgatgccgtcgccgaacgcctcgccgacgcgctgatggaacacggcgcactctccgccgccatcgaagatgcctacgccggcacgcaaaacgaacaggcgattttcggcgaacccggtatgcccgccgaacaaatctggcagcagagcaaagtcatcgccctgttcggcgaacacgacgaagccgccgccatcatccaaaccgccgcacaagaatgcggattaaaagacttggcatacaccggcgaaacccttgaagaccaagactgggtacgcctgacccaagcgcaattcgaccccatccaaatttccgaacgcctgtggattaccccctcttggcacgaagcccccgaaggcactgccgtcaacctccgcctcgatcccggcctcgccttcggcaccggcagccacccgaccacgcgcctctgcctcaaatggctggatacgcaactcaaaaacggcgaaagcgtcctcgactacggctgcggttcgggcatcctgaccatcgccgccctcaaactcggtgcaggttccgccgtcggcgtggatattgacgaacaggccgtccgcgccggcagggacaacgccgcgcaaaacaacgtcgatgcacaattcttcctgcccgacggtctgcctcaagggcaattcgacgtagttgtcgccaacatcctcgccaaccctttgcgtatgctcggcgaaatgctcgcagcccgcaccaaacagggcggacgcatcgtgttgtccggtttgttggacgaacaggccgaagaactcggcggcatttacagccaatggttcgacctcgacccggcggaaaccgaagaaggctgggcgcgcttgagcggcgtaaaacgctga

SEQ ID NO: 60550 - DNA, 2058 bp, Neisseria meningitidis; identical to SEQ ID NO: 56052

SEQ ID NO: 60551 - DNA, 600 bp, Neisseria meningitidis; identical to SEQ ID NO: 37454

SEQ ID NO: 60552 - DNA, 1065 bp, Neisseria meningitidis; identical to SEQ ID NO: 54377

SEQ ID NO: 60553 - DNA, 1257 bp, Neisseria meningitidis; identical to SEQ ID NO: 54292

SEQ ID NO: 60554 - DNA, 777 bp, Neisseria meningitidis
atgcgcgcagtccccccgccccatatctccatcacaggcctaggttacctcggcctgccgctggcacaaaagttttaccaacacggcagccgcgtcgccgccataaaacgcagcctgacttcggacgacatcaacctgcccatacatctcgacaccttcgacctcggcagcaccgatgcctttcagacggcattgtggcggcaccacgccgacaaacccgtctggttcttcctgctaccgccctcctcgctgacgcattacgccgacaccgtcaaacaatgggcagaacttgcccgggcgtgcaacgtgcaacacctgattttcacaagcagcaccagcgtttacggcgatacagcgcgcgaatgcgacgaaaccgccacacccgatccgcaaaccgagtccgcccgccaaatcctcgccgccgaacaacacctgctcgacagcggcatctccaacatcgacatcctgcggctgggcgggctttattgcgccgaacgccatcccgtcagccgccttgttcaaaagcaaaacatcccgggcggcaaccgccccatcaacatcgtccaccgtaatatcgccgtcgaaagcctgtttcagacggcatttaaccccggcggcaggcggctgaaaaacattatcgaaccgcgccacccgacacgacgcgaattctacacggaagaagccgccaaactcggcctgcccgcgctggatttcgcacccgacgacagcgtgggcaaaatcatccgtaccgtttgcgataacggcttaagcctgtaa

SEQ ID NO: 60555 - DNA, 285 bp, Neisseria meningitidis
ttgaaattagctctcaaacgttcaggcaaatataacgtttacgacccccttgccctagatttggacggtgacggcatagaaactgtcgccgccaaaggctttgcaggtgcattgttcgaccaccgcagccaaggcatccgcaccgccacgggctggattgctgcatatgacggttttcctgtgcgcaaattaaacagtaacgggggcattattagcacgacagataccatattccaatctttgcatacatggcttgatcatcaaccaaatgatacatgccattga

SEQ ID NO: 60556 - DNA, 762 bp, Neisseria meningitidis
atgatgggcgattccgtcatttattatgtagaacaggcagacaaaccggtaaaccgtgccggcgaacgcgcccgtaaaacattcgaatatttttggcgcgagcttttttgggaacgccgccgcatcattcccgccttagattttgccatggtcaaagccccttttttccaagacggcgaagacggcgaaatttgcgaacatatgtggatcgacgatatttattttgacggtctttacatttatggcgtgctgaacaatgaacccggcgaactgaccaatgtcgaacaaggcgaaagcgtttgcgttccggttgacgacatcagcgactggatgttcgtgtgcaacggcattccctacggcggctttaccatacaggcaatgcgtggacagatgacggaagaggagcgtaccgaacacgatgccgcatggggaatcgatttcggcgatcccgggcaggtattgctggtgtatgaagaaaaagaacatcccgaaaatctggaagagcatccgatgtgccggaactgtattgacgattttcggcaacagttgtcccaaaatccggattttctgcatgagcaggacgaagacggctatacgccgcttcatcatgaagccatcgcaggaaatgcacttatggttcaagccatgcttgaatacggcgcaaatcctgcctcaaagacatcggaaggctataccgccctcgattttgcccgcctggcgggctggcaaaatgttgccgacctgctcgaaccgcgacattag

SEQ ID NO: 60557 - DNA, 1083 bp, Neisseria meningitidis; identical to SEQ ID NO: 54567

SEQ ID NO: 60558 - DNA, 756 bp, Neisseria meningitidis
atggggcgtttacttttgggcagtatccgcatgagcatcattgtcgaaaacctgaccgtcagctaccgccgccgacctgccgtgcaccatgtggacattacttttgaagaacatagtatgtgggcggttttcggtcccaacggcgcggggaaatccacctttctcaaatccttaatgggattgcagcctatcgatacgggcagcatccggctggacggattgacccgtcagaacattgcctaccttccccagcagtccgacatcgaccgctcgcagcctatgaccgttttcgacttggcggcaatggggctgtggtatgaaatcggttttttcaaagggataaataccgctcaaaaacaacgcgttcacgaagccttggagcgtgtaggaatgcggcagtttgccggccgccaaattgcccacctttccaacggacaattccagcgtgtcctttttgcccgaatgctggttcaaaacgccaaattcctacttctggacgaacctttcaacgctgttgatgtacggacaacctacgagcttctcgacgtgttgcaaaaatgccattgcggcggacacgccatcatcgccgtactgcacgattacgaacaagtccgtgcctactttcccaataccctgctgctcgcccgagaaaaaattgcggcaggcgcaaccgagaccattctgacagaaccctacctcgcccaagccaacgccaaaatgcagcaacaggaaagccccgagtggtgcgcgtcataa

SEQ ID NO: 60559 - DNA, 627 bp, Neisseria meningitidis
atgacgcaagaacgtttcccatcattcttcaaccaagccccgaccatcaccgtcagggacgcgcttgctgaattcctcggcgcggccgaaaatggcatcctcacttaccgctacgccgatgccgtgcgcctgtgcggccactcctgcccgaccgtcgccggcgcgtacctgatggttatcaaaggtctgaaagccctttacggcgaagagctgcccgaacgcggcggcatcgaagccgccatgcagggagcgcgcgacgaaggcacggtcggcgtaaccgcgtccgtcgtccaactcctcaccggcgcagccccggaaaccggcttcggaggcatcggaatgcagggacgcttcgcccgccgtaacctcttatcctttggtgcaggcgaaatcaacggcacactgaccctgcgccgcaaagacaacggcaaaaccgtcgccgtcagcctcaacgccgccctacaaccctttgcacccgaaatgcgcgaacttatgcccaaagccgtcggcggcagcgcaagcgcagaagaactcgaacgcttcggacaactctggcaggcacgcgttaaagcatttttgaccgaatcggcggacgacccgcagttcgtcatcgtccgcgaagtgtga

SEQ ID NO: 60560 - DNA, 1260 bp, Neisseria meningitidis; identical to SEQ ID NO: 45570

SEQ ID NO: 60561 - DNA, 999 bp, Neisseria meningitidis
atgagcagacccgtacccgccgtattcggcagcgtttttcacagtcaaatgcccgtcctcgcctaccgcgaaggcaaatggcagccgaccgaatggcaatcttcccaagacctctccctcgcaccgggtgcgcacgccctgcactacagcagcgaatgtttcgagggactgaaagccttccgtcaggcagacggcaaaatcgtactgttccgtccgactgccaacatcgcgcgtatgcggcaaagtgcggacattttgcacctgccgcgccccgaaacccaagcctatctcgacgcgctaatcgaattggtcaaacgcgccgccgatgaaattcccgatgcgcctgccgccctgtacctgcgtccgaccttaatcggtaccgatcccgttatcggcaaggccggttctccttccgaaaccgccctgctgtatattttggcttcccccgtcggcgactatttcaaagtcggctcgcccgtcaaaattttagtggaaaccgaacacatccgctgcgccccgcatatgggccgcgtcaaatgcggcggcaactacgcttccgccatgcactgggtgctgaaggcgaaagccgaatacggcgcaaaccaagtcctcttctgcccgaacggcgacgtgcaggaaaccggcgcgtccaactttatcctgattaacggcgatgaaatcattaccaaaccgctgaccgacgagtttttgcacggcgtaacccgcgattccgtactgacggttgccaaagatttgggctataccgtcagcgaacgtaatttcacggttgacgaactgaaagctgctgtggaaaacggtgcggaggcgattctgaccggtacggcagccgtcatctcgcccgttacttccttcgtcatcggcggcaaagaaatcgaagtgaaaagccaagaacgcggctatgccatccgtaaggcgattaccgacatccagtatggtttggcggaagacaaatacggctggctggtcgaagtgtgctga

SEQ ID NO: 60562 - DNA, 333 bp, Neisseria meningitidis; identical to SEQ ID NO: 36327

SEQ ID NO: 60563 - DNA, 8400 bp, Neisseria meningitidis
atgaaccgcaccctgtacaaagttgtatttaacaaacatcgaaactgcatgatagtcgttgctgaaaatgccaaacgcgagggcaaaaacacagccgacacccaagctgtaggtattttgccaaatgatattgcgggctttgcgggttttatccattctatctctgttatctcattctccctttcattactgctcggttctgcccttatcctgacttcttcttctgctaatgcccaaggtatcgttgccgacaaatccgcacctgcacagcaacagcctaccatcctgcaaacaggtaacggcataccgcaagtcaatattcaaacccctacttcggcaggggtttctgttaatcaatacgcccagtttgatgtgggtaatcgcggggcgattttaaacaacagtcgcagcaacacccaaacacagctaggcggttggattcaaggcaatccttggttggcaaggggcgaagcacgtgtggttgtaaaccaaatcaacagcagccattcttcacaaatgaatggctatattgaagtgggcggacgacgtgcagaagtcgttattgccaatccggcagggattgcagtcaatggtggtggttttatcaatgcttcccgtgccactttgacgacaggccaaccgcaatatcaagcaggagaccttagcggctttaagataaggcaaggcaatgttgtaatcgccggacacggtttggatgcccgtgataccgatttcacgcagatattgagccatgcggttaagattgatgggcctgtgtggggtaaagatgtgcgtgtgtcggcagggaaaaatgatgtctcagctgatggctctatccagtcttcacactcccctgctacgaatataaattccgacaactcactgtatgccatcgatacaggggcattgggcggtatgtatgccggtaagatcaccctgatcagcactgatcgtgatgcatccgtgcgcaatcaggggcaatggtttgcctcagccggcaatgtggcagtgaatgctgagggtaaactggtcaacacaggcatgattgcagcgacgggagaaaatcatgcggtttcacttcatgcccgcaatgttcataatagcggtacggttgcctcacaggatgatgccaatattcacagccagacgctggacaattcaggtacggtcttatcctcaggtcaattgactgtccgtaatttaggccgtctgaaaaaccataacaacggtacgatccaggctgcacgcttagatatgtcaacaggtggtttggataacacaggtaatattactcaaacaggttcacaagcattggatttggtatctgcaggcaaattcgataacagtggcaagattggtgtaagtgacgttccacagaccggtttgaatcccaatccatcagtcataccacagattccgagtactgcaacaggttcaggcagcagcactgtcttggcatctaagcctggttcaaacaatcccgtttcacctacagcacctgcaaaaaactacgccggaggacgcattcaaacaacaggagcatttgacaatgcaggatcaatcaatgcaggtgggcaaattgacattgccgcccaaaacggtttggaaaattcgggtagtctgaatgcggctaaactacgagtatcaggcgattcatttaacaatacggtaaaaggcaaactccaggcacacgatctggctgttaacactcaaactgctaaaaacagcggtcacttattaactctaaccggcaagattgacaaccgtgaactgcataatgccggagaaattgccgccaacaatctgacactcattcattcgggccgcttgagcaatgataaaaaaggcaatattcgagctgcacatttacagcttgataccgccggtttacataatgcaggtaacattcttgccgatagtggaaccgttaccaccaagaataatcttcgcaatacaggaaaagtttctgttgcacgactaaataccgaaggtcagactctagataatacgcacggacatatagaggctgaaacggttaacatccaaagtcagcaactgactaaccaaagtggccatattactgctaccgaacaactgactatcaatagtcgaaatgtagacaaccaaaacggcaaactcctatctgcaaaccaagcacaattagctgtttcagacggcctatacaaccaacatggtgaaattgccaccaaccggcagttgtctattcacgataaaaatcaaaacactttggcgttaaacaatgcggatggcacgattcaatctgccggtaatgtatcgctacaagccaaatcactcgccaacaatggcacattaacagccggtaacaaactggatattgctttgacggacgatttcgtcgtagagcgcgacctcactgcaggcaaacaattaaatctaagcataaaaggccgtctgaaaaatacccataccctacaagcaagccatacgctcaaactcaatgccggcaatatagataaccaagttacaggcaaaattattggtggagaacaaacggacatcacatccgaacagcatgttgacaacaggggcttgatcaacagcgacggtttgacccacatcggtgcaggtcaaaccctgaccaacaccgggacaggcaaaatctatggcaaccatattgccctggacgcgcaaatactgcttaaccgggaagaaacaacggaaggcagtaccaaagcgggggcaatagctgcaaggaaacgtttggatattggagcgaaagagattcataaccaagaaggtgccctactatccagcgaaggtatttttgccgtaggtaatcgactggatgaacaacatcatgcggcaggcatggccgatacctttgttaatggcagtgccggtttggaagtacaaggtgatgcattgatgtccgttcggaatatgcagaatatcaataatcactttaaaacagagacatacttagccaaagcagaaaagcaagttcgtgactacaccgtactggggcaaaatacctactatcaggcaggaaaagacggtttattcgacaactcgcaaggacaaaaagaccaaactactgctacgttccatttaaaaaatggttctcgtattgaggccaaccaatggcatgtccgagactaccacatcgagacttataaagaacgcatcatcgaaaaccggccggcacacattactgtgggcggtgatttgactgcctcaggtcaaaattggctgaacaaagacagccggattgtagtaggcgggcgtattatcactgatgatttaaaccagaaagaaattaccaatcaaagtacaacaggcaaaggtcgcacagatgctgtcggcacacagtgggattcagttacaaaaaaaggatggtacagcggtagaaaaagacaacgccgtactgaaagaaaccatactccttaccatgatacccaactatttacccacgacttcgacacgcctgtatccgtcatccaacagaatgccgcctccccttcctttcaacccgctgcatctgcaatcaaactgattgacggagtatccacggcagccgtcaatggtcagcgcatccataccggtaatgtggtctcgttaaataacgctactgttactctgcctaacagcagcctctataccacccatcctgacaataaaggctggttggttgaaaccgatcctcaatttgcagactaccgccgctggttgggcagcgactacatgttgcaacaactgcaattggacaccaatcatctacacaaacggctaggcgacggctactacgaacaaaaacttgttaatgaacaaatccatcagttaacaggctaccgccgactcgacggctacaggagtgatgaagaacaattcaaagctctgatggacaacggccttactgctgccaaaacattcggtctcaccccaggtatcgccttgagtgcagagcaagttgcccgcttaacttcagatatcgtttggatggaaaatcaaaccgtcaccctgtctgacggttcgactcaaaccgtactggttcctaaagtctatgccctggcgcgcaaaggtgatctcaatacctccggtggcctgattagtgccgaacaagtcttacttaaactgcaaaacggcaacctgactaacagcggtaccattgcggggcgacaggccgtactcatccaggcacggaatattaacagcaacggtaacattcaagccgaccaaatcggcttaaaagctgaaaaaagtatcaatatcgacggcgggcaggtacaagcaggcagactgctgactgcccaagcgcaaaatatcaaccttaacggtacaacccaaacttccggtaatgaacgtaacggcaataccgccatcgatcgtatggccggcattaacgtggtcggaagccatactgagcaagtagataacagaacttcagacggcatcctatccctgcatgccggcaacgatatcaacctcaatgcggccaccgtctctaaccaagttaaaggcggcactacccaaattaccgccggcaataatctcaacctcggcaccattcataccgaacatcgcgaagcctatggtacattagatgacgagaaccatcgccatgtccgccaaagtaccgaagtcggcagcagtatccgcacgcaaaacggcgcactgcttagagccggtaacgacttaaaaatccgccaaggcgaactggaggccgaagaaggcaaaaccgtccttgccgcgggacgtgatgtcactatcagcgaaggacgccaaataaccgaactggatacctcggtaagcggaaaaagcaaaggcatcctttccagtaccaaaacacaggatcgctaccgcttcagtcatgatgaagcagtcggcagcaacatcggcggcggcaaaatgattgttgcagccgggcaggatatcaatgtacgcggcagcaaccttatttctgataagggcattgttttaaaagcaggacacgacatcgatatttctactgcccataatcgctataccggcaatgaataccacgagagcaaaaaatcaggcgtcatgggtactggcggattgggctttactatcggtaaccggaaaactaccgatgacactgatcgtaccaatattgtccatacaggcagcattataggcagcctgaatggagacaccgttacagttgcaggaaaccgctaccgacaaaccggcagtaccgtctccagccccgaggggcgcaataccgtcacagccaaaagcatagatgtagagttcgcaaacaaccggtatgccactgactacgcccatacccaggaacaaaaaggccttaccgtcgccctcaatgtgcccgttgtccaagctgcacaaaacttcatacaagcagcccaaaatgtgggcaaaagtaaaaataaacgcgttaatgccatggctgcagccaatgctgcatggcagagttatcaagcagcccaacaaatgcaacaatttgctccaagcagcagtgcgggacaaggtcaaaacaacaatcaaagccccagtatcagtgtgtccatcacctacggcgaacagaaaagtcgtaacgagcaaaaaagacattacaccgaagcggcagcaagtcaaattatcggcaaagggcaaaccacacttgcggcaacaggaagtggggagcagtccaatatcaatattacaggttccgatgtcatcggccatgcaggtactgccctcattgccgacaaccatatcagactccaatctgccaaacaggacggcagcgagcaaagcaaaaacaaaagcagtggttggaatgcaggcgtagccgtcaaaataggcaacggcatcaggtttggaattaccgccggaggaaatatcggtaaaggtaaagagcaagggggaaatactacccaccgccacacccatgtcggcagcacagccggacaaaccaccatccgcagcggcggggataccaccctcaaaggtgcgcagctcatcggcaaaggcatacaggcagatacgcgcaacctgcatatagaaagtgttcaagatactgaaacctatcagagcaaacagcaaaacggcaatgtccaagttactgtcggttacggattcagtgcaagcggcagttaccgccaaagcaaagtcaaagcagaccatgcctccgtaaccgagcaaagcggtatttataccggagaagacggctatcaaatcaaagtcagagacaacacagacctcaagggcggtatcatcacctccacccgaagtgccgaaagcaaagggaaaaaccgctttcagacggccaccctcacccatcgcgacattcaaaaccacagccgctacgaaggcagaagcttcggcataggcggcagtttcgacctgaacggcggctgggacggcacggttaccgacaaacaaggcaggcctaccgacaggataagcccggcagccggctacggcagcgacggagacagcaaaaacagcaccacccgcagcggcatcaacacccgcaacatacacatcaccgacgaagcgggacaacttgcccgaacaggcaggactgcaaaagaaaccgaagcgcgtatctacaccggcatcgacaccgaaactgcggatcaacactcaggccgtctgaaaaacagcttcgacaaagacgcggtcgccaaagagatcaacctgcaaagggaagtaacgaaggagttcggcagaaacgccgcccaagccgtagcggccgttgccgacaaactcggcaatacccaaagttacgaacggtatcaggaagcccgaaccctgctggaggccgaactgcaaaacacggacagcgaagccgaaaaagccgccatccgcgcatccctcggccaagtaaacgcctaccttgccgaaaaccaaagccgctacgacacctggaaagaaggcggcataggcaggagcatactgcacggggcggcaggcggactgacgaccggcagtctcggcggcatactggccggcagcggcacttcccttgctgcaccgtatttggacaaagcggcggaaaacctcggtccggcgggcaaagcggcggtcaacgcactgggcggggcggcaatcggctatgcaactggtggtagtggtggtgctgtggtgggtgcgaatgtagattggcataatcggcagttgcatccgagtgaaagagattggataagaaaaaatgcacaagcttttgcgaaacaggaggtaggtggtagagaacccactatagatgaaattgcattagcagaaaaacgactagcacaacaggcggctaaagagacagatttgttttggatgctaacattagaaaaagtaacagatttatcagctcaaaaattcctaagacaagcaaaaggaacttttacaaatgaaaatggtacgcagcaacaattttttactacgcaagggaagcaatttatgcgtcctgaattgtttgctaatgaagtatatgatctgtctttttacaaaaaccatttacaatctcctaaaaatagtagtatcagcaagggtacaggagaattggctcgaagagttacttcatctacttgggataaagcaaaacaagatcctattttgacaggattgcaaatagctgcctcccctgtacatttagttcgggatgtaggtaaggcaagctggcagtgcgtaagcggctttggacaatgtttgcaacaaggaaaagagaattttgtagaaacaggttctgcaattggaacaggaactgcctcttttcaactaaacgaccttaagccgatttatggtcaagatgtacgtggtgcacaagcaggattggttgcactacaaacggcagatggaataactacggcattgggtgcagcaaaagcattaaatgttgcaggaaaaggtagtcgctattttataaatgaatgggctagtagtccgcctagtggttctcgtgctgcacagcgtggggcagtggggaatttaacccattcgcaacaagttttgacagatggttcacatattcaacgtggcggaaaacttttacctaatattcgctataaagcaggcgagtttgattatttatatgaaactgatactttaggtagaattaaaagttttgaaacagataatttgcaattaacacagagagatagattaaagcataattcaaaaactcctgataaagtcaaggggcaagaccatgcaggacatttaattggagatagatttggaggttcgcccaatttagataatttagtgtcacagcacaaagatgtaaacttaagtgcgtataaagttttggagaataaatgggcggaagcaattaaatcaggaaaaaatgttaaaatccaaatgcaaattgaatatgcagcaggtacaagacaccctacacgatttgttggatattattggattgatggtaaaccaactagaattaatattaataatttatga

SEQ ID NO: 60564 - DNA, 165 bp, Neisseria meningitidis; identical to SEQ ID NO: 54463

SEQ ID NO: 60565 - DNA, 789 bp, Neisseria meningitidis
atgctcaccctgtacagcgaaactttcccttcgcggctgctgctcggcacagccgcctacccgacccctgaaatcctcaaacaatccgtccgaaccgcccggcccgcgatgattaccgtctcgctgcgccgcgcgggatgcggcggcgaggcgcacggtcaggggttttggtcgctgcttcaagaaaccggcgttcccgtcctgccgaacacggcaggctgccaaagcgtgcaggaagcggtaacgacggcgcaaatggcgcgcgaagtgtttgaaaccgattggataaaattggaactcatcggagatgacgacaccttgcagccggatgtgttccagcttgtcgaagcggcggaaatcctgattaaagacggcttcaaagtgctgccttattgcaccgaagacctgattgcctgccgccgcctgctcgacgcgggctgtcaggcgttgatgccgtgggcggccccgatcggcacgggtttgggcgcggttcacgcctacgcgttgaacgtcctgcgcgaacgcctgccctacacgccgctgattatcgacgcgggcttgggtttgccctcacaggcggcacaagtgatggaatggggctttgacggcgtgcttttgaacaccgccgtttcccgcagcggcgatccagtcaatatggcacgcgccttcgcactcgccgtcgaatccggacggctggcatttgaagccggaccggtcgaagcacgcgacaaagcgcaagccagcacgccgacagtcggacagccgttttggcattcggcggaatattga

SEQ ID NO: 60566 - DNA, 399 bp, Neisseria meningitidis; identical to SEQ ID NO: 54535

SEQ ID NO: 60567 - DNA, 483 bp, Neisseria meningitidis; identical to SEQ ID NO: 40363

SEQ ID NO: 60568 - DNA, 1692 bp, Neisseria meningitidis
atgagcgcatcacaattactgtcaagactgacccaaaccgtaggcgaaaaatacatcattaccgaccccgcgaaaaccgaacaataccgccaaggttaccgcttcggcgagggtaaggcgttggcggtggttcgccccggaagcattctggaaatgtggaaaattctgcaggcgtgcgtcgaagcagacgtgattgtgattacgcaggcggcgaataccggactgaccggcggttcgacccccgacggcaacgattacgaccgcgacatcgtgattgtgaacaccatgcggatgaacatcatccaaaccatcaacaacaacgaacaagtcgtctgcctgcccggctcgaccctgaaccagcttgaattgctgctgaaacccttgggacgcgaaccgcattcggttatcggctcttcctgcatcggtgcgtccgtcttgggcggcgtgtgcaacaactccggcggcgcattggtacagcgcggcccggcctacaccgaaatggcactgttcgcccaaatcaacgaagaaggcaggttggaactggtcaaccacttgggcatagacttgggcgacacgcccgaagaaatcctgaccaacctgcaaggtcatcattatcaaaacaaagacatcaaacaagacgcgggcaaaggacacgaccacgcctattgcgaacacgtccgccaagtggacgaaccgaccgccgcgcgtttcaatgccgaccccgcccgccattacgaagcctcgggctgcgcgggcaaactgatggtttttgccgtccgtttggacaccttcccgcaagaaaaacaaaccgccgtgttctacatcggcacgaacgacatcaacgagctgaccgacatccgccgcgccgccttgggcgaatttgaaagcctgcctgtttccggcgaatacatccaccgccacgctttcgatattgccgacgtgtacggcaaagacacgttttacgtcatcaaaaaattcggtacgcaccaactgccgaaattatttgacttgaaggcgcgcgtggacaggttcggcaaaaaagccagcttcctgcccaaacatttttccgacaaggccatgcagttcgtcagcaaatacctgcccgaccacctgcccaaatccatgcgcgattaccgcgacaaatacgaacaccatttgattctgaaaatgggcgggaaaggcgtggatgaggcgcgcgcgttcttaaaagaatattttgcacaccacagcggcgcgtttttcgagtgcaacgccgaagaaacccaagccgcgatgctgcaccgtttcgccgtcgcctccgccgccatccgctaccgcgccgtgcatgatgacgaagtggaagacttggtcgcgcttgacatcgccctgcgccgcgacgaccgcgactggtttgaaaaactgccgcccgaaatcgacaataaaatcatccacaaactctactacggacatttcatgtgccacgttttccatcaggattacatcatcaaaaaaggcaacgactgcatggcgttggaacacgaaatgctgcatcttttagaccaacgcggcgcgcaatatcccgccgaacacaacgtcggtcatttgtatgaagccaaacccgcgctcaaacagttttaccgcaaacttgacccgaccaacagcttcaacccgggcgtaggcaaaaccagcaaaaagaaaaactgggcggaataa

SEQ ID NO: 60569 - DNA, 2121 bp, Neisseria meningitidis
atggcctatcaagttctcgcccgaaaatggcggcccaaaaccttttccgacctagtcggtcaggaacacgtcgtcaaagccctgcaaaatgccttggacgaaggcaggctgcaccacgcctacctgctgaccggtacgcgcggcgtgggcaaaaccaccatcgcccgcatccttgccaaaagcctcaactgcgaaaacgcgcaacacggcgaaccttgcggcgtatgcgaaagctgtacgcagatcgatgccggacgctatgtcgacctgctcgaaatcgacgccgcctccaacacaggcatcgacaacatccgcgaagtcttggaaaacgcccaatacgcgccgaccgccggcaaatacaaagtctatatcatcgacgaagtgcatatgctttccaaaagcgcgttcaacgctatgctcaaaacgctggaagagccgcccgaacacgtcaaattcatccttgccacgaccgatccgcacaaagtccccgttaccgtattaagccgctgcctgcaattcgtcttacgcaatatgaccgcgcagcaggttgccgaccaccttgcccacgtcctcgacagcgaaaaaatcgcctacgccccccccgccctgcaacttttgggacgcgccgccgccggatcgatgcgcgatgccttgagcctgctcgaccaagccatcgccatgggttcgggcagcgttgccgaacaagacgtccgccaaatgatcggtgcggtcgataaacaatacctgtacgaactgctgacaggcatcgtcaaccaagacggcgaagccctgctggcaaaagcacaggaaatggctgcgtgtgccgtcggctttgacaacgccttgggcgaacttgccatactgctgcaacacctcgccctgatacaggcagtgccgaatgccttggcgcacgacgaccccgattccgatattttgcaccgcctcgcccaaaccataagcggcgaacaaatccagctttactaccaaatcgccgtccacggcaaacgcgacctgagcctcgcccccgacgaatacgccggctttatgatgaccctgctgcgtatgctggcgttcgcacccttggcggcaacatcgtgtgatgcaaacgccgtgattgaaaataccgaacttcaatccccatcggcacaaaccgccgaaaaggaaaccgccgcaaaaaagccccaaccgcgccctgaaacggaaaccgcccaaacatccgttcagacggcatccgcagcggcaatgccgtctgaaagcaaaactgccgaacccgtttccaatcaagaaaacaacgatgttccgccttgggaagacgcgccggacgaagcccaaaccgcagccggcacggcgcaaacgtcggcaaaaagcattcagacggcatccgaagccgaaacgccgcccgaaaaccaagtttccaagaacaaggcagccgacaacgaaaccaatgcccccttgtccgaaacgccgtctgaaaaccccattcaggcaacaccgaataatgaagccgttgaaacggaaacatttgcacacgaagcccctgcagaacctttctacggttacggctttccggataatgactgccccgtagaagacaacgcagaaatcccgccgcccgattgggaacacgccgcccctgccgatgcggaagaagaaaacaacgccgacgaaggcagcaacgacgaaaacaacacgccgtccgccccgccgcccgaattttccaccgaaaactgggcagccatcgtccggcatttcgcccgcaaactcggcgcggcgcaaatgccggcgcaacactccgcgtggacggaataccatcccgacaccggcctgatggttttggcgatgaccgccgaagcccgcgccaccgccgacaaaaaacgcctcgacaaaatccgcgacacccttgcccaagcctacgggctgcaactcaccctgcaaacccaagactggcgcgacgaagccggcagggaaacccccgcgatgcaggacaagcgcgtccaagccgaagacaggcaaaaagcacaagcattgctcgaagccgaccccgccgcacaaaaaatcctccaagcattcggcgcgcaatggcagcccgaatcactggaattggcagcaaaccggccgtaa

SEQ ID NO: 60570 - DNA, 441 bp, Neisseria meningitidis; identical to SEQ ID NO: 55334

SEQ ID NO: 60571 - DNA, 780 bp, Neisseria meningitidis; identical to SEQ ID NO: 54254

SEQ ID NO: 60572 - DNA, 861 bp, Neisseria meningitidis; identical to SEQ ID NO: 47037

SEQ ID NO: 60573 - DNA, 1515 bp, Neisseria meningitidis
atgactacctccaaatgccctgtaacccatctgaccatgaacaacggcgcgcctgttgccgacaatcaaaacagcctgaccgccggtcctcgcggccctctgctggcgcaggatttgtggctgaatgaaaaactcgccgacttcgtgcgcgaagtcattcccgaacgccgtatgcacgccaaaggttcgggcgcgttcggtacgtttaccgtaacacacgacatcaccaaatacacccgcgccaaaatcttcagcgaagtcggcaaaaaaactgaaatgttcgcccgtttcaccaccgtggcaggcgaacgcggcgcagccgatgcagaacgcgacatccgcggttttgcattgaaattttataccgaagaaggcaactgggatgtggtcggcaacaacacgcccgtgttcttcctgcgcgacccgcgtaagttccccgacctgaataaagccgtcaaacgcgatccgcgcaccaatatgcgctctgccacaaacaactgggacttctggacgctgctgcccgaagccctgcaccaagttaccatcgtgatgagcgaccgcggcatcccagccggctaccgccatatgcacggcttcggttcgcatacttacagcttctggaacgaagcgggcgagcgtttttgggtgaaattccatttccgcagccaacaaggcattaaaaacctgaccaacgaagaagctgcaaaaatcatcgccgacgaccgtgaaagccatcagcgcgacctgtacgaagccatcgagcgcggcgagtttccgaaatggacgatgtacatccaagtcatgcctgaagccgatgcggaaaaagtgccgtatcatccgtttgacttgaccaaagtttggccgaaaaaagactatccgctgattgaagtgggcgaattcgagttgaaccgcaatcccgaaaacttcttcgccgatgtggaacaatccgccttcgcaccgagcaacctcgttcccggtgtcggcgccagcccagataaaatgctgcaagcgcgtttgttcaattacgccgacgcgcaacgctaccgcttgggcgtgaacttccgccaaatccctgtcaaccgtccgcgttgccctgttcacagcaaccagcgcgacggacaaggacgcgccgacggcaactacggcagcctgccgcactacgaacccaatagcttcggccaatggcagcaacaacccgacttcgccgaaccgcctttgaaaatcaacggcgacgcggcgcactgggactaccgccaagacgatgacgactatttcagccaaccgcgcgccctgttcaacctgatgaacgacgcgcagaaacaggcattgttcggcaacaccgccgccgcaatgggcgacgcgcccgacttcatcaaataccgccatatccgcaactgctaccgttgcgatccggcatacggcgaaggcgtggcaaaagccctcggactgactgtcgaagacgcacaagccgcccgcgcgaccgaccccgcactcggccagcccggtttgctgtaa

SEQ ID NO: 60574 - DNA, 1398 bp, Neisseria meningitidis
atgagccaaggcaaaatcgtacaaattatcggtgcggttgttgacgtggaatttccacgcgacatgattccgcgcgtttacgacgctttgaaattagacgaaaacggtctgactttggaagtccaacagcttttgggcgacggcgtagtccgtgccattgcgatgggcagctcggacggtttgaaacgcggcatgactgtgagcaataccggtgcgcccattactgtgccggtaggtaaaggtacgttgggacgcattgtcgatgtattgggaacgcctgttgacgaagcaggtccgatcgataccgacaagagccgtgccatccaccaagctgcccctaagtttgacgaactgtcttccacaaccgaattgctcgaaacgggcattaaagtgattgacttgctgtgtccgtttgccaaaggcggtaaagtaggtctgttcggcggtgccggtgtgggtaaaaccgtgaacatgatggaattgatcaacaacatcgccaaagcgcacagcggcttgtccgtgttcgcaggcgtgggtgagcgtacccgcgaaggtaacgacttctaccacgagatgaaagattccaacgtattggataaagtggcaatggtttacggtcagatgaacgaacctccgggcaaccgtttgcgcgtcgcattgaccggtttgaccatggcggaatacttccgtgacgaaaaagacgaaaacggcaaaggccgcgacgtattgttcttcgtggacaacatctaccgttacaccctggctggtaccgaagtatccgcattgttgggtcgtatgccgtctgcagtgggctaccaaccgacattggcagaagaaatgggtcgtttgcaggagcgtattacctctacccaaaccggttctattacttccatccaagccgtatatgtacctgcggacgacttgaccgacccgtctccggcaacaacgttcgcccacttggacgcaaccgtcgtattgagccgcgatattgcctctttgggtatttacccggcagtcgatccgcttgattctacttcgcgccaactggatccgatggtattgggtcaagagcactacgacgtagcgcgcggcgtacagtccaccctgcagaaatacaaagaattgcgcgacatcatcgccatcttgggtatggacgaattgtctgacgaagacaaactgaccgtaatgcgtgcgcgtaaaatccaacgcttcctgtcccaaccgttccacgttgccgaagtgtttacaggttctccgggcaaatatgtcgccctgcgcgataccattgccggcttcaaagccatcttgaacggcgaatacgaccatctgcccgaacaggcattctacatggtcggcagcatcgaagaagcggttgagaaagcgaaaaccttaaactga

SEQ ID NO: 60575 - DNA, 219 bp, Neisseria meningitidis; identical to SEQ ID NO: 36470

SEQ ID NO: 60576 - DNA, 552 bp, Neisseria meningitidis; identical to SEQ ID NO: 55745

SEQ ID NO: 60577 - DNA, 474 bp, Neisseria meningitidis; identical to SEQ ID NO: 54433

SEQ ID NO: 60578 - DNA, 1812 bp, Neisseria meningitidis; identical to SEQ ID NO: 55230

SEQ ID NO: 60579 - DNA, 1539 bp, Neisseria meningitidis
atggtttccaaactggacaaatactggcagcaccccgccctctactggcctttgctcatcctttttgccgccgccaccccctttaccttcgcaccctactaccacttttggctgatgcccttgattttcggtgccttcgtccgcctcatcgaactgcgtccgcgttttgctgtctcttccgcctacctgttcggcctgaccgcatacacgacacagttctactggatacacaccgccctgcacgacgtttccggcctgcccgacctctatgccgtaccgctgaccttcctactccccgcctaccttgccctttatccggcactgtgtttctggctgtggaaaaaatttaccctgcctcggggcataaaaatcggtttggtactgcccatcctgtggacgctgaccgagtttgcccgcgagcgtttcctgaccggattcggctggggcgcaatcggctactcccaaatcaccccggacagcccgctcgccggctttgccccattgggcggcatccacatggttacactggcaaccgcctttctcggtgtctggctggttttggcgagtgataacaccgcacgttcgggcaaacgcctgcttccgattatcctgattgccgccctgcttgccgcaggctacaccgcccgacaaaccgacttcacccgccccgacggcagccgcagcaccgtcgccctgcttcaaggcaacatcgaccaaaccctcaaatggcgtgaagaccaagtcatcccgaccatacagaaatattacgaacaggtcggcaaaaccactgccgacatcgtcatcctgcccgaaaccgccatccccgttatgcgccaaaacctgccggaaaacatactggcaaaatttgccgaacaggcgcaaaacaacggcagcgcgctcgccgtcggcatcagccaatacacttcggacggcaacggttacgaaaacgccgtcatcaacctgaccggttatcaggaaaacaatcaggacggcatcccctactacgccaaaaaccacctcgtccccttcggcgaatacaaaccgctgcccttcctgaccacgccgctttacaaaatgatgaatatgcccctttccgacttccgcaaaggcggcggtaagcaatccgccctgctgatgaaaaaccaaaaaatcgccttcaacatctgttacgaagacggattcggcgacgaactgattgccgccgccaaagatgccaccctgcttgccaatgccagcaatatggcgtggtacggaaaatccaacgccatgtaccagcacctccaacaatcgcaggcacgggctatggaactcggacgctatatggtccgtgccaccaacaccggcgcaaccgccatcatctcccccaaaggcaacatcatcgcccaagcccaacccgatacggaaaccgtattggaaggacacatcaaaggctatgtcggcgaaacgccctatatgaaaaccggcagttcatggtggttgatgggcatattgaccctagccgcactgattcttttcatcttccgaaacaaagaacactga

SEQ ID NO: 60580 - DNA, 180 bp, Neisseria meningitidis
ttggttttaggaaaaataaaaattgttgattttttaaaatcatataacaatttttattgttggcttggttttgatgagttgcctcaatctgagaaaataaaattcctaagctatcttaatatattaagtattcataaagaaatacaagatgaaactgtgaatagggtttataccgattga

SEQ ID NO: 60581 - DNA, 300 bp, Neisseria meningitidis
atgaagaaaatgttcgtgctgttctgtatgctgttctcctgcgccttctcccttgcggcggtaaacatcaatgcggcttcgctgcaggagttggaggcgctgccaggcataggcccggcgaaggcgaaggccattgcggaataccgtgcgcaaaacggtgcgttcaagtctgtagacgatttgaccaaggtaaagggcatcggccctgcggtgctggcgaagctgaaggatcaggcttccgtcggtgcgcccgcaccaaaagcccccgccaaaccggcaacgaccgcagtgaaaaaatag

SEQ ID NO: 60582 - DNA, 693 bp, Neisseria meningitidis; identical to SEQ ID NO: 54890

SEQ ID NO: 60583 - DNA, 975 bp, Neisseria meningitidis
atgctcgagaatctgccctatttccagcgacatctgcctgaagaccttgccaaagtcaatgaagtcatcaaccgtgcggtgcaatccgatgtcgcactgatttcgcaaatcggtacatatatcatcagcgcgggcggcaaacgcctgcgtccgattatgacgattttggcgggtaaggctgtcggttatgatgacgagaaactgtattcgctggcggcgatggtcgagtttatccacacttccaccctcctgcacgacgatgtcgtcgatgaaagcgatttgcgccgtgggcgggcaacggcaaacaatctgttcggcaatgcggcggctgtgttggttggcgactttttatacacgcgcgcctttcaactgatggttgcctcgggcagtatgcgcgttttggaagtgatggcggatgcaaccaacattattgccgagggcgaagtcatgcagctgatgaacatcggcaatacggacattaccgaagaacaatatatccaagtcatccaatataaaacggcaaaattgtttgaagctgccgctcaagtcggcgcaattttgggcaaggcttcccccgaacacgaacaggcgttgaaagactacggtatgtatgtcggtacggcattccaaattattgacgatgtgctggactattctggcgaaaccgaagaaaccggcaaaaacgtcggcgacgatttggcggaaggaaaaccgactttgcctttgatttatctgatgcgtcagggttccgaacaggttgcgaacgatgtgcgtactgctttggaaaatgcagatcgcagctattttgagaaaatccacgattatgtcgtccgttcggatgctttggcatattcgataggcgaggcgcgcaaagcagtcgattgtgccgttaccgccttggatgccctgcccgacagcgaagtgaaggatgccatgattcagctggcgaaggaatctttggtcagggtgtcttga

SEQ ID NO: 60584 - DNA, 1197 bp, Neisseria meningitidis
atggcgaaaatcattacgccgctgtcggcaaatcaggttaaaaatgcgaagccgcgcgataagctgtataagttgtcagacgggggcgggctggctttgtgggtctacccgacgggcgggcggagttggaagctgtcgtttgtgcaggatggaaggcagcagacaatttcgctggggcggtatcctgatttttcgctggccgatgcgcgggaatggcgggaggaggtgcgccgaaaacgggcgcacggggaaaatgtcgtcaataagaaggtgcgggcggattttgcttttgagaaggtggcgcgtgattggtttgtgcgttggtcgaaggggcggtctgaaaagtatgccggacaggttatgcggaattttgagcggtgggtttttccggctatcggcaatcttgatattcgtcaaatcaggacggcggatgtggtcggctgtctgcgtgtgatggaggcgcgcggtatcgttgatacgttgcgcaaaacgaaaaacagtctgaagatggtgtttgcgtttgcggtcggttcgggaatgatggaaatcaaccctgtcgcgcaaatcggttcgggtgtgtttgaacgggcgaaaacggggaatatggcagcgttgagtccgtctgaattgccgcgcctgattgattttttggagcagcgcaatgaatttgcggtttatgcgggcagggtgcgtatccatcctgtaacgcggctttgtatctattggctgctgttgacaatgacgcggattcaggaggcggcgttgatggagtggtcggagttggacggggaggtttggcgtatccccgccgaacggaaaaaggagcggcgggggcatgatgtgccgctgtcgcgggcgatgcagtgggtgttggatcaggcgcgggcgttgaatgtgaacgggcggtttgtgtttgaaagtgtgaattttcaagggcatatcaataaggaaagtccgcgcgtggcgatgcagcgggcggggctggatacgacggcgcacggtttgcgctcgcttgcgcgtacttatttgcgcgaggttctgaaggtggataatgatgtggcggaaaagctgcttgcccattcgttggggacgaggacgcaaacggcttacaaccgctcggagctttgggaggagcgtaaggatgcgctggaacggtgggggaatgatgttttgaggcttgccaaaaacggaaaatga

SEQ ID NO: 60585 - DNA, 969 bp, Neisseria meningitidis; identical to SEQ ID NO: 39511

SEQ ID NO: 60586 - DNA, 384 bp, Neisseria meningitidis; identical to SEQ ID NO: 54615

SEQ ID NO: 60587 - DNA, 594 bp, Neisseria meningitidis
atgcgcaaacagaacactttgacgggaatcccgacttctgacggacagagggggtttgcactgtttatcgtgctgatggtgatgatcgtcgtggcttttttggttgtaactgccgcgcagtcttacaataccgagcagcggatcagtgccaacgaatcagacaggaaattggctttgtctttggccgaggcggctttgcgggaaggcgaacttcaggttttggatttggaatatgatacggacagtaaggttacatttagcgaaaactgtggaaaaggtctgtgtaccgcagtgaatgtgcggacaaataatgataatgaagaggcttttgacaatatcgtggtgcaaggcaagcccaccgttgaggcggtgaagcgtttttgccctgcaaattctaccgacctgtgcattgacaagaaagggatggaatataagaaaggcaagggaagcgtcagcaaaccaccgcgctatattatcgaatatttgggcgtgaagaacggagaaaatgtttatcgggttactgccaaggcttggggtaagaatgccaataccgtggtcgtccttcaatcttatgtaagcaataatgatgagtaa

SEQ ID NO: 60588 - DNA, 1341 bp, Neisseria meningitidis; identical to SEQ ID NO: 54905

SEQ ID NO: 60589 - DNA, 2157 bp, Neisseria meningitidis; identical to SEQ ID NO: 54449

SEQ ID NO: 60590 - DNA, 504 bp, Neisseria meningitidis
atgcacgcgcttcatttttcggcttcggacaaggccgcgctttatcgggaggtgttgccgcagattgagtctgtggtggcggacgagacggattgggtggcgaatttggcgaacacggcggcggttttgaaggaggcgttcggttggttttgggtgggtttttatttggtcgatacgcgttcggacgaattggttttggcaccgtttcaggggcctttggcgtgtacgcggattccgttcggacgcggggtgtgcggtcaggcttgggcgaagggcgggacggtggtcgtcggggatgtcaacgcgtatcccgaccatattgcctgttcgtctttgtcgcgttcggagattgtcgtgccgctgttttcagacggccgctgtatcggcgtgttggacgcggacagcgaacatttggcgcagtttgatgagacagatgctttgtatttgggcgagctggcgaagattttggagaagcggtttgaggcttcgcgtcaggcggtttga

SEQ ID NO: 60591 - DNA, 486 bp, Neisseria meningitidis; identical to SEQ ID NO: 44610

SEQ ID NO: 60592 - DNA, 780 bp, Neisseria meningitidis
atgaaagaacacaaagcccgcaagcgtttcgggcagaattttttgcaggacacgcggattatcagcgatattgtcaacgccgtgcgcccgcaggcggatgatgtcgtgattgaaatcggtccgggtttggcggcgattaccgaacctttggcgaaaaagctgaaccgcctgcacgttgtcgaaatcgaccgcgacatcgtatgccgtctgaaaacgctgccgtttgcggacaagctcgtcattcatgaaggcgacgtgttgcagtttgatttcaacggcatcgcaggcaaaaagaaaatcgtcggcaacctgccgtacaacatttccacgccgcttttgttcaagctggcggaggtggcggacgatgtcgtcgatatgcactttatgctgcaaaaagaagtggtcgagcgtatggttgccgcgccgaaaagcaacgactacggccgcttgggcgtgatgttgcaatatttcttcgatatggaaatgctgattgacgtgccgcccgaatcgttcgaccccgcgccgaaagtcgattccgccgtcgtccgcatgattccggtgaaacaccgcatcggcagggcggacgatttcgagtatttcgccaaactcgtgaaactcgccttccaccaacgccgcaaaaccatacgcaacaatctgaaagagcttgcaggcgacgatgatttgcaggcagtcgacatcaatccgcaagaccgtgccgaacatatcgcgccggagaaatatgtggcgttgagcaattatctagcgggcaaggccgtctga

SEQ ID NO: 60593 - DNA, 759 bp, Neisseria meningitidis; identical to SEQ ID NO: 55256

SEQ ID NO: 60594 - DNA, 1110 bp, Neisseria meningitidis
atgttttccgaaacagatatttctatgatgcaaaacgccctcaaacttgccgctttggggcgtttttccacttcgcccaatccgcgcgtcggctgcgttatcgcacaaggcagccaaattgtcggacagggcttccacgtcaaagcgggcgaaccgcacgccgaagtccacgccctgcgtcaggcgggcgaaatggcacaaggcgcgaccgcctttgttaccctcgaaccgtgcagccattacggacgcacaccgccctgcgccgaagctctgctccgttccggcgtaacacgcgtcgttgccgccatgcgcgaccccaacccgctggttgcaggcaaagggcttgccctgctcgaagcagcaggcatcaagacggaatgcggtttactcgaacatcaggcaagggaactcaaccgaggcttcctgtcgcgcatcgaacgccgccgccccttcgtccgcctcaaatgcgccgtttcgctggacggcaaaaccgccctttcagacggcagcagcttttggattaccggcgaagacgcgcgtgccgacgtacaggttttgcgtgccgaaagctgcgcggtgctgaccggcatcggcacggtgttggcggacaatccccggctcaacgtccgcgcttttccaactttgcgccaacccgcacgcatcgtgttagacagccgcctgcgcctgcccttggacagccaccttctgaccgacggacaatctccaacctacatcgccaccttggaacgcgatgaagacaaactccgcccctatcgggaacacgcacatatccgcatcctgatgccgtctgaaacggcagacggcaaaatcgacctgcaccgcctgatgcgcctccttgccgacgaaggatacggcgaagtaatggtggaagccggcgcgaaactcacatccgcctttttggcggaagatttggcggacgaaatcgtgctgtaccgttcgcccaaaatcctcggcagcggcaaagacctgttttccctgcccgaaaaccgcgccgccctttccgcaccgcccttatggacacccgtttccaccgaaatcctcggacacgacgtcaaaaccgtattccggaaaaacggcaacgccttttaa

SEQ ID NO: 60595 - DNA, 777 bp, Neisseria meningitidis; identical to SEQ ID NO: 55779

SEQ ID NO: 60596 - DNA, 2136 bp, Neisseria meningitidis
ttgggcgcaagtgcgtccataagcggcaaaacactgggacagggcgcaaaaaataaacctcaaaacaaacacctgacaagcgtagccgataaaaacggcgcaagttcatcagtgggttatggcagcgaccaagacagtcaaagcagcatcacgaaaagcggcatcaacacccgcaacatacacatcaccgacgaagcgggacaacttgcccgaacaggcaggactgcaaaagaaaccgaagcgcgtatctacaccggcatcgacaccgaaactgcggatcaacactcaggccgtctgaaaaacagcttcgacaaagacgcggtcgccaaagagatcaacctgcaaagggaagtaacgaaggagttcggcagaaacgccgcccaagccgtagcggccgttgccgacaaactcggcaatacccaaagttacgaacggtatcaggaagcccgaaccctgctggaggccgaactgcaaaacacggacagcgaagccgaaaaagccgccatccgcgcatccctcggccaagtaaacgcctatcttgccgaaaaccaaagccgctacgacacctggaaagaaggcggcataggcaggagcatactgcacggggcggcaggcggactgacgaccggaagcctcggcggcatactggccggcggcggcacttcccttgccgcaccgtatttggacaaagcggcggaaaacctcggtacggcgggcaaagcggcggtcaacgcactgggcggggcggcaatcggctatgcggcgggcgggaatgtcggcacggcggcagtaggggcgaatgtcgattggaacaataggcagctgcacaacagcgagatcagaaaaattaaaaataatgccgctaaatttgccaaactccatcccggcatttcccaacggcaggcagaagagcggctggtggcacaagctatgcgtcaggtcgatgcggcttattatgccaaacatgccgacaccgacacggcggcggaacaattcctgcgcagcatagcgggaagtttcaaagccgacggggaaacgttcctggattttgccccgatgaagtattacagggacagcggtaaatttgccgaacatacaggctatcgagatctaagagcaaagttgggacagaatccggtccataccgaagcgcaaaggaacagaactattgaagaaaagacctacggcacaataggcagaggtgtaggtaaaggcatcggcaataccctagccaacaacctgcaggcgggtccgccacactatgtactcggcattacgaactattcgaactggggcaaagaacttattccatacgagaaccctgttgagcgcgccatcggcaaacaggcagaggatatgacggaaaaagcggtagcagctgtgtctttgggccggagtttgccgtcaaaggttgttaatgtaccctctaaattagctaaaagcattaagacagcggaaacacataaaccactggtacaaaagcgtacggaaacttattttagagttgaaggaggaggaagtggaaataatcaggcagccaaagccgctaaaaatacggaaaaaatgaaagccgcaatagatcaaacccacagtggagttgacctgccttatgattcgagacaaattcgagctaaactggaaaaaagatatggagctgagaatattgtatccactacgattccaaagaaaccggtccaaagtatcaataatcaaactaaaccggactactcatctattgtatatactaataaaagtggaaaggtagttaatgttaaatataaagatcctatatcaggggaaagtaaggctgttaatatcgcctatgataataggggattacctatatttgataacgtatcaaattttaccaccaaaatagataattcattgtcgtatacgggacagatgagggcagctactaaagatttatggaaagctattgaaagtggacaagtgcccaaaaatcaatttactaatgaacaactaacgaagattaaagcaggaaatgaaaaaattcctggttatacatggcatcataatgcgcaaagctctcctaataatatgcagttaattcctaatagtattcatacagctgttaggcatactggtcaaaaatcgttaaagaaaggtcagtaa

SEQ ID NO: 60597 - DNA, 1251 bp, Neisseria meningitidis
atgttttcaaaaagcgttaccctcgcacaatatgaccccgatttggcagcagccattgcccaagaagaccaacgccagcaagaccacgtcgagctgattgcctctgaaaactacgtcagctgcgccgtaatggaaacgcaaggttcccagctgaccaacaaatacgccgaaggctaccccggcaaacgctactacggcggctgcgaatacgtcgatattgtcgaacaattggcgattgaccgcgtcaaaaaactgttcggcgcgcagtacgccaacgtccaaccgcactccggctcgcaagccaaccaagccgtgtacgcttccgttttaaaaccaggcgacaccattttgggtatgtctctggcgcacggcggccacctgacccacggcgcgagcgttaatatctcaggcaaactctacaatgccgttacttatggtttggatgaaaacgaagtgctcgattatgccgaagtcgaacgcctcgcgctcgaacacaaacccaaaatgattgtggcgggtgcgtctgcctacgcgttgcaaatcgactgggcaaaattccgcgaaatcgccgataaagtcggcgcatacctctttgtcgacatggcgcactacgccggactgattgccggtggcgaatatcccaacccggtgccattctgcgacttcgttaccaccaccacccacaaaaccctgcgcggtcctcgcggcggcgtaattttgtgccgcgacaatacccacgaaaaagcgttgaactcttccatcttcccaagcctgcaaggcggcccgctgatgcacgttatcgccgccaaagccgtggcgtttaaagaagcattgcaacccgagttcaaacaatacgcaaaacaagtgaaaatcaatgcagccgccatggcggaagagttggttaaacgcggtttgcgcatcgtttccggccgcaccgaaagccacgttttcctcgttgacctgcaaccgatgaaaattaccggcaaagccgccgaagctgctttgggcaaagcgcacatcactgtcaacaaaaacgccatcccgaatgatccggaaaaacccttcgttacctccggcatccgcatcggttccgccgccatgaccacacgcggttttaacgaagccgacgcgcgcgtattggcgaacttggttgccgacgtattgtctaaccccgaagacgaagccaacctcgccaaagtccgcgaacaagtaactgctttgtgcaataaataccccgtttacggcgcgtaa

SEQ ID NO: 60598 - DNA, 1056 bp, Neisseria meningitidis; identical to SEQ ID NO: 54812

SEQ ID NO: 60599 - DNA, 1128 bp, Neisseria meningitidis
atgaacacctcgcaacgcaaccgcctcgtcagccgctggctcaactcctacgaacgctaccgctaccgccgcctcatccacgccgtccggctcggcggggccgtcctgttcgccaccgcctccgcccggctgctccacctccaacacggcgagtggatagggatgaccgtcttcgtcgtcctcggcatgctccagtttcaaggggcgatttactccaaggcggtggaacgtatgctcggcacggtcatcgggctgggcgcgggtttgggcgttttatggctgaaccagcattatttccacggcaacctcctcttctacctcaccgtcggcacggcaagcgcactggccggctgggcggcggtcggcaaaaacggctacgtccctatgctggcggggctgacgatgtgcatgctcatcggcgacaacggcagcgaatggttcgacagcggcctgatgcgcgccatgaacgtcctcatcggcgcggccatcgccattgccgccgccaaactgctgccgctgaaatccacactgatgtggcgtttcatgcttgccgacaacctgaccgactgcagcaaaatgattgccgaaatcagcaacggcaggcgtatgacgcgcgaacgtttggagcagaatatggttaaaatgcgccaaatcaacgcacgcatggtcaaaagccgcagccacctcgccgccacatcgggcgaaagccgcatcagccccgccatgatggaagccatgcagcacgcccaccgtaaaattgtcaacaccaccgagctgctcctgaccactgccgccaagctgcaatctcccaaactcaacggcagcgaaatccggctgctcgaccgccacttcacactgctccaaaccgacctgcaacaaaccgtcgcccttatcaacggcagacacgcccgccgcatccgcatcgacaccgccatcaaccccgaactggaagccctcgccgaacacctccactaccaatggcagggcttcctctggctcagcaccaatatgcgtcaggaaatttccgccctcgtcatcctgctgcaacgcacccgccgcaaatggctggatgcccacgaacgccaacacctgcgccaaagcctgcttgaaacacgggaacacggctga

SEQ ID NO: 60600 - DNA, 537 bp, Neisseria meningitidis
atgcaggcaatttctcccgaattacaggcgcgcgccgccaaaatcaaactgctgatcctggatgtggacggcgttttgaccgacgggcgcatctttatccgcgataacggcgaagaaatcaaatcgtttcacacactggacggacacggtctgaaaatgcttcaggcaagcggcgtgcagactgcgattatcacaggtcgggacgcgccctccgtcggcatccgcgtcaaacagttgggcataaattactacttcaaaggcatttcggacaaacgcgccgcgtatgaagagctgcgcgctcaggtcggcgtggaagaagccgagtgtgcctttgtcggcgacgacgtggtcgatttgccggtgatggtgcgttgcggattgccggttgccgtccccgacgcgcattggtttacgctgcaacacgccgcctatattgccaaacgccccggcggtgcgggcgcggtgcgcgaagtgtgcgacctgattatgcaggcgcaagggactttgggcgcggctttgaacgagtacatcaaatga

SEQ ID NO: 60601 - DNA, 1224 bp, Neisseria meningitidis; identical to SEQ ID NO: 55261

SEQ ID NO: 60602 - DNA, 1764 bp, Neisseria meningitidis
atgggttttcctgttcgcaagtttgatgccgtgattgtcggcggtggtggtgcaggtttacgcgcagccctccaattatccaaatccggtctgaattgtgccgttttgtctaaagtgttcccgacccgttcgcataccgtagcggcgcagggcggtatttccgcctctctgggtaatgtgcaggaagaccgttgggactggcacatgtacgataccgtgaaaggttccgactggttgggcgaccaagatgcgattgagtttatgtgccgcgccgcgcctgaagccgtaattgagttggaacacatgggtatgccttttgaccgtgtggaaagcggtaaaatttatcagcgtcctttcggcggccatactgccgaacacggtaaacgcgcggtagaacgcgcctgtgcggttgccgaccgtacaggtcatgcgatgctgcatactttgtaccaacaaaacgtccgtgccaatacgcaattctttgtggaatggacggcacaagatttgattcgtgatgaaaacggcgatgtcgtcggcgtaaccgccatggaaatggaaaccggcgaagtttatattttccacgctaaagctgtgatgtttgctaccggcggcggcggtcgtatttatgcgtcttctaccaatgcctatatgaataccggcgatggtttgggtatttgtgcgcgtgcaggtatcccgttggaagacatggaattctggcaattccacccgaccggcgtggcgggtgcgggcgtgttgattaccgaaggcgtacgcggcgagggcggtattctgttgaatgccgacggcgaacgctttatggaacgctatgcgccgaccgtaaaagacttggcttctcgcgacgttgtttcccgcgcgatggcgatggaaatctacgaaggtcgcggctgcggtaaaaacaaagaccatgtcttactgaaaatcgaccatatcggcgcagaaaaaattatggaaaaactgccgggcatccgcgagatttccattcagttcgccggtatcgatccgattaaagacccgattcccgttgtgccgactacccactatatgatgggcggcattccgaccaattaccacggcgaagttgtcgttccgcaaggtgaagattacgaagtgcctgtaaaaggtctgtatgcggcaggtgagtgcgcttgtgcttccgtacacggtgcgaaccgcttgggtaccaactccctgttggacttggtggtattcggtaaagctgccggcgacagcatgattaaattcatcaaagagcaaagcgactggaaacctttgcctgctaatgcaggtgagttgacccgccaacgtatcgagcgtttggacaaccaaaccgatggtgaaaacgttgatgcattgcgtcgcgaactgcaacgctctgtacaactgcacgccggcgtgttccgtactgatgagattctgagcaaaggcgttcgagaagtcatggcgattgccgagcgtgtgaaacgtaccgaaatcaaagacaagagcaaagtgtggaataccgcgcgtatcgaggctttggaattggataacctgattgaagtggcgaaagcgactttggtgtctgccgaagcacgtaaagaatcacgcggtgcgcacgcttcagacgaccatcctgagcgcgatgatgaaaactggatgaaacatacgctgtaccattcagataccaataccttgtcttacaaaccggtgcataccaagcccttgagcgtggaatacatcaaaccggccaagcgcgtttattga

SEQ ID NO: 60603 - DNA, 2835 bp, Neisseria meningitidis
atgaataagaaacacggttttcagcttaccctgactgccttggctgttgccgccgccttcccgtcatatgcggcaaaccctgaaacggcggcacctgatgcggcgcagacccaatccctgaaagaggttaccgtccgtgccgccaaagtgggacggcgatcgaaagaggcgaccggtttgggcaaaatcgtcaaaacgtcggaaacgttgaacaaagaacaggtactcggtatccgcgacctgacgcgctacgatccgggcgtggcggttgtcgaacagggcaacggcgcgagcggcggctactcgatacgcggcgtggataaaaaccgtgtggcggtttcggttgacggcgttgcccaaatacaggcgtttaccgtgcagggatcgttgagcggatacggcggacgcggcggcagcggtgcaatcaacgaaatcgaatatgaaaacatcagcacggtggaaatcgacaaaggtgccggttcgtccgatcacggcagcggcgcactcggcggcgcggtcgccttccgcaccaaagaggcggcagacctgatttcagacggcaaaagctgggggatacaggcaaaaactgcctacggcagtaaaaaccgccaatttatgaagtcgctcggcgcgggtttcagcaaagatggttgggaagggctgttaatccgaaccgaacgccaagggcgggaaacgcgcccgcacggcgatattgcggatggggtggcatacggcataaaccgtttggacgcgttccgccagacacacgatattcaaagccaagataaaacagggcaatttttcttagtagagggcgagaatacactcaagcccgtggcaaaattggcgggctacgggatatatttgaaccgccagcttaaccgctgggtaaaagaacgtattgaaaaaaatcagcctttaagtgctgaagaagaagcgatggtgcgggaggcgcaggcgcgccacgaaaacctgtccgcccaagcttacacgggcggcggcaggatattgcccgatccgatggattaccgcagcggctcttggcttgccaagctgggctaccgcttcggcggcaggcattatgtcggcggcgtgtttgaggataccaaacagcgttacgatatccgcgatatgacggaaaaacagtattacggtacggacgaggcggacaagtttagagacaagagcggggtgtacgacggcgacgatttccgcgacggcttgtattttgtgccgaatatagaagagtggaagggcgataaaaagttggtcaggggcataggtttgaaatattcccgcaccaaatttattgatgaacatcaccgccgccgccgtatgggtttgctgtaccgttatgaaaacgaagcgtattctgacaactgggcggataaggcggtgttgtcgtttgacaaacagggcgtggcaaccgacaacaacacgctgaagctgaattgcgccgtgtatcctgctgtggacaaatcctgccgcgcgtcggcggacaaaccgtattcctacgacagcagcgaccgtttccactaccgcgaacagcacaatgttttgaatgcctcgtttgagaaatcgctgaaaaacaaatggacgaaacaccatctgactttgggcttcggttacgatgcttccaacgcgatttcccgccctgaacagctttcccacaatgcggcaaggatttcggaatccacgggattcgatgaaaagaatcaagataagtaccgtttgggtaagcccgaagtcgtcgaagggtcggtctgcggctacatcgaaaccctgcgttcccgcaaatgcgtgccaagaaaaatcaacggcagcaatatccacatttctttgaacgaccgtttttcaatcggcaaatattttgatttcagcttgggtggcaggtacgaccggaaaaacttcaccacgtcggaagaactcgtccgcagcggacggtatgttgaccgttcgtggaacagcggcatcgtgttcaaaccgaaccggcatttttctttgtcttaccgcgcctccagcggcttcagaacgccctcattccaagaacttttcgggatagacatttatcacgattatccgaaaggctggcagcgtcccgccctgaaatcggaaaaggcagccaaccgcgaaatcggtttgcagtggaagggcgatttcggctttttggaaatcagcagcttccgcaaccgttataccgatatgattgccgttgccgatcacaaaaccaaattgccgaatcaggcaggacaattgacagagattgatatacgcgattattacaatgcccaaaatatgtcgctccaaggcgttaatatattgggaaaaatcgactggaacggtgtgtacggcaaactgcccgaaggtttgtacaccacattggcatacaaccgcatcaaaccgaaatcggtatccaaccggccggacttgtccctccgcagctatgctttggatgcggtacagccgtcgcgttatgttttggggttcggatacgaccagccagaggggaaatggggcgcaaacattatgctgacctattccaaagggaaaaaccctgacgagcttgcttatctggcaggcgatcaaaaacgatattcgacaaaaagagcgtcgtcttcttggtcgacggcagacgtttccgcctatctgaatctgaaaaaacggctgaccttgagggcggctatctacaatatcggcaactaccgctacgttacttgggaatccttgcgccagactgcggaaagcacggcaaaccggcacggcggcgacagcaactatggaaggtatgccgcaccgggcaggaacttcagcctcgcgctcgaaatgaagttttaa

SEQ ID NO: 60604 - DNA, 114 bp, Neisseria meningitidis; identical to SEQ ID NO: 43789

SEQ ID NO: 60605 - DNA, 1494 bp, Neisseria meningitidis
atgttgtcaggactccccatccccaaagacatcgcgcgcccgcccgaaacgatattggtcaacatcacgccgcaggaaacgcgcgtagcggtgttggaggaaaacaatatctgcgagctgcacatcgagcgcaacagcgaacacagcctggtcggcaatatctatctgggcgtggtgcgccgcgtgctgcccgggatgcagagcgcgtttatcgacatcggcttggaacgcgcggcgtttttacacatcgtcgatgtcctcgaacaacgccgcaaccccgaagaaacccagcgcatcgaacatatgctgtttgaagggcagtctgttttggtgcaggtcatcaaagacccgatcaacaccaaaggcgcgcggctttccacccaaatctcgctggcggggcgtttcctcgtccatcttccgcaagaagaccacatcggcgtgtcccaacgcatcgaagacgatgccgaacgcagcagcctgcgcgaacgcctcgacaagctcctgccggaaaatgcctgccggggctacatcatccgcaccaacgccgaaaacgccaccgacgaacagctccagtccgacatcgactacctgaccaaagtgtgggaacacatccaagaacaggcgaaaatccggccgccggaaaccctgctttatcaggatttgcccttgagtttgcgcgtattgcgcgatatggtcggctgcgacacgcaaaaaatcctcgtcgattccaccgtaaaccacgggcgcatgacgcgttttgccgaacaatacgtccacggcgcattgggcaggatagaattgttcaaaggcgaacgcccgctgtttgaaacccacaacgtcgaacaggaaatcagccgcgccctgcaaccgcgcgtcaacctcaacttcggcagctacctgattatcgaatccaccgaagccatgaccacgatagacgtgaacaccggcggcttcgtcggcgcacgcaacttcgacgaaaccatcttccgcaccaacctcgaagcctgccacaccatcgcccgcgaattgaggctacgcaacctcggcggcatcatcatcatcgacttcatcgatatggcgcaggaaagccaccgcgaagccgtgttgcaggagcttgccaaagccctcgccttcgaccgtacccgcgttaccctgcacggttttaccagcctggggctggtcgagctgacgcgcaaacgctcgcgcgaaaacttaaaccaagtcctctgcgaaccctgcccttcctgccaaggcagaggccgtctgaaaacgccgcaaaccgtgtgctacgaaatccagcgcgaaatcgtccgcgaagcgcgccgttacgatgccgaaagtttccgcatcctcgccgcccccaacgtcatcgatttgtttttggacgaagaatcgcaatccttggcaatgctgatagatttcatcggcaaaccgatttctctggcggtcgaaaccgcttacacgcaggaacaatacgatattgtgctgatgtaa

SEQ ID NO: 60606 - DNA, 1311 bp, Neisseria meningitidis; identical to SEQ ID NO: 46911

SEQ ID NO: 60607 - DNA, 345 bp, Neisseria meningitidis; identical to SEQ ID NO: 36231

SEQ ID NO: 60608 - DNA, 408 bp, Neisseria meningitidis; identical to SEQ ID NO: 55051

SEQ ID NO: 60609 - DNA, 618 bp, Neisseria meningitidis
atgccctatacggaagatatgcgcccgggcgataccgctaatccttatggcgcgtccaaagcgatggtggaacggatgttaaccgacatccaaaaagccgatccgcgttggagcgtgattttgttgcgttatttcaacccgatcggcgcgcatgaaagcggcttgatcggcgaacagcccaacggcattcccaacaaccttttgccctatatctgccaagtggcttcgggcaggctgccgcaactgtcggtattcggcggcgattatccgacccccgacggcaccggtatgcgcgactatattcatgtgatggatttggcagaagggcatatcgcggcaatgaaggcgaaaggcggtgttgccggcgtacatttgttcaacttgggttcggggcgcgcctattccgttttggaaatcatccgtgcctttgaagccgcatccggcttaaatattccctatcaaatccaaccccgtcgcgccggcgacttggcgtgttcctttgccgacccgtcccataccaaacaacaaaccggctgggaaaccaaacgcggtttgaaacaaatgatggaggattcgtggcgttgggtcagccgcaaccccaacggatatggggattaa

SEQ ID NO: 60610 - DNA, 1296 bp, Neisseria meningitidis
atgattcgtcctgattttcaagaatatctgccttcttattattttagttcggttaatcctcatactgtttatccgaaacttcaatgccgtctgaaaaccgatacctgtatcatcggcggcggattgagtggtttgtgcactgcattgcccttggcggagcagggacatgaaacggttgtgttggaagccgcgcgtatcggtttcggcgcgtcgggacggagtggcgggcaggttatcagcgattacgcctgcggtatgggggaaattgaaaaacaggtcggcttggagcaggcgcaatggttttggcaacagtctttgcaggcggtcgaactggtggacgaacgcgtccgcaaacatgccattgattgcgattggcagcgcggttatgccacggttgccgtccgtccgcagcattgggaagagttgcagcagtggcatgaacacgcccaacggcattacggtgcgagtcattatcaactttgggataaagccgagttgaaacagcagcttgacagcgatatgtaccaaggggcacaattcgaccccttatccggacacctgcatccgctcaattacactttgggcatcgctcgtgccgctgccgaagccggtgcgcagattttcgagcaatccccgatgacgtgcatcgaaccgcatcaaaacggttggctggtttacacgcccgaaggcagcgtcgagtgcaaaaatgtggtctatgctgtcaatacctatgccggtttgaatccgatattcaagcctttggagcgtaaggcgattgccgttagcacctttattattgccaccgaacccttgggggcgcgcgcaaaagggcttatccgcaacaatatggctgtatgcgacaaccgccatattttggattattaccgcctcagcgcggacggcagactgcttttcggcggtaaggataacgagtttatcgacaatcctgcgcgtatgaccgagcttgtccgccaagatatgcttaaagtttttccgcagcttgccgatgtcaaaatcgaatattcgtggggcggggagtgcgatattaccgccaaccttgtcccgcatttcggacgtttggccccgaatgttttttatacgcaaggttattccggacacgggatggcgataacaggcattgcaggtctggcggttgccgaagcaattttaggggacgaatgccgtctgaagccgtttgagcagttgcgccagccgaatatcatcctccaaccgtttttgagaaagctcggttctttcctcggctcgaaatattatcagtggaaagacagccgttaa

SEQ ID NO: 60611 - DNA, 897 bp, Neisseria meningitidis; identical to SEQ ID NO: 55764

SEQ ID NO: 60612 - DNA, 288 bp, Neisseria meningitidis; identical to SEQ ID NO: 36767

SEQ ID NO: 60613 - DNA, 798 bp, Neisseria meningitidis
atgaaccgtctttacccccacccgattatcgcccgtgagggctggccgattatcggcggcggtttggctttgagcctgctggtgtcgatgtgctgcggctggtggtctttgccgttttgggtgtttaccgtatttgcattgcagtttttccgcgaccctgcgcgtgagattccgcaaaatcctgaagcggtgttgagccctgttgacggccgcattgtggtggtcgagcgcgcacgcgatccgtatcgtgatgtcgatgctttgaaaatcagtatttttatgaacgtgttcaacgtgcattcgcaaaaatcgcctgccgattgtacggtaacggaagtggtctataacaaaggcaaattcgtaaatgcggatttggacaaagccagcacggaaaacgaacgcaacgcggttttggcgacgacggcttctggtcgtgaaattacttttgttcaagtggccggtttggtggcgcgccgtattttgtgctacacccaagcaggtgcgaaactgtcccgcggcgaacgctatggctttattcgcttcggttcgcgcgtggatatgtatctgcctgtcgatgcgcaggcgcaagtggcgattggcgataaagtaaccggcgtcagcactgtattggcgcgtttgccgctggctgcgccgcaaatcgaatccgagcctgaatctgagcctgctttacaaactgctccggttgaaacagcggcaaccccatctgccgaacaacggcaaatcgaggcagcggcggctaagattcaggcggctgtgcaagatgtgttgaaagattaa

SEQ ID NO: 60614 - DNA, 474 bp, Neisseria meningitidis
atggaacaaaaagggtttacattgattgagatgatgatagtcgtcgcgatactcggcatcatcagcgtcattgccataccttcttatcagagttatattgaaagaggctatcagtcccagctttatacggagatggtcggtatcaacaatatttccaaacagtttattttgaaaagtcccctggacgataatcagaccatcaagagcaaactggaaatatttgtctcaggctataagatgaatccgaaaattgccgaaaaatataatgtttcggtgcattttgtcaataaggaaaaaccaagggcatacagcttggtcggcgttccaaagacggggacgggttatactttgtcggtatggatgaacagcgtgggcgacggatacaaatgccgtgatgccgcttctgcccgagcccatttggagaccttgtcctcagatgtcggctgtgaagccttctctaatcgtaaaaaatag

SEQ ID NO: 60615 - DNA, 255 bp, Neisseria meningitidis; identical to SEQ ID NO: 55434

SEQ ID NO: 60616 - DNA, 942 bp, Neisseria meningitidis
atgaaaaccctgctcctcctcatccccctcgtcctaaccgcctgcggcacactgaccggcatacccgcccacggcggcggcaaacgctttgccgtcgaacaagaactcgtcgccgcatcgtcccgcgccgccgtcaaagaaatggacttgtccgccctgaaaggacgcaaagccgccctttacgtctccgttatgggcgaccaaggttcgggcaacataagcggcggacgctactctatcgacgcactgatacgcggcggctaccacaacaaccccgaaagtgccacccaatacagctaccccgcctacgacactaccgccaccaccaaatccgacgctctctccagcgtaaccacttccacatcgcttttgaacgcccccgccgccgccctgacgaaaaacagcggacgcaaaggcgaacgctccgccggactgtccgtcaacggcacgggcgactaccgcaacgaaaccctgctcgccaacccccgcgacgtttccttcctgaccaacctcatccaaaccgtcttctacctgcgcggcatcgaagtcgtaccgcccgaatacgccgacaccgacgtattcgtaaccgtcgacgtattcggcaccgtccgcagccgcaccgaactgcacctctacaacgccgaaacccttaaagcccaaaccaagctcgaatatttcgccgttgaccgcgacagccggaaactgctgattgcccctaaaaccgccgcctacgaatcccaataccaagaacaatacgccctctggatgggaccttacagcgtcggcaaaaccgtcaaagcctcagaccgcctgatggtcgatttctccgacatcaccccctacggtgacacaaccgcccaaaaccgtcccgacttcaaacaaaacaacggtaaaaaccccgatgtcggcaacgaagtcatccgccgccgcaaaggaggataa

SEQ ID NO: 60617 - DNA, 510 bp, Neisseria meningitidis
atgaaaaagaaactgctttcgggcatcaaatttgccgttcagacggcattggtgtttttattggtgtcgctgtttttggattggatacgcaagcccgacgaacctgccggtgcggcagggcggcctttgaccctgctgtcggggcagcggctgactttgggacagtttagccgggataaggcggttttggtgtatttttgggggagctggtgcggcgtgtgccgttatcagtcgccgataatcgatgatttggcggcggacggcgtgccggtcgtcggcgtggcggtacgttccggcagcgcgtccgaagtggcggcgtatatggcaaagcggggcttgggctttccgacggtcaacgatgaggacgggggtttggcaaggtcttggcggattgtcgcaacgcctgccgtcgttttggtcaaaaatgggaaaatggttcactatacgacgggaattagcagttattggggcttgcgcgcacgaatttttcaggcggatgttttcggttaa

SEQ ID NO: 60618 - DNA, 1068 bp, Neisseria meningitidis; identical to SEQ ID NO: 55503

SEQ ID NO: 60619 - DNA, 591 bp, Neisseria meningitidis
atgggtttggaactgcctttgattttgggtacgagttcggttttccgccgcgaacagatggaaaggctcggcattgcctttcaggcggcgtcccccgattttgacgaaacgccgatgttgggggaatccgcccctcagacggcattgcgccttgccgagggtaaggcgcggtcgttgaccgggcgtttcccaaaggcgttgattgtcggtgcggaccaggtggcgtggtgcgacggcaggcagtggggcaagccgatgaaccttgctaatgcgcaaaagatgttgatgcatttgagcggcagggagattgagttttacagcgcggtcgttctgctaaatacggttacgggcaggatgcagcggcatatcgataagacggtggtcgtgatgaggcagttggacgagttgcacatcctccgctatttggagcgcgagcctgatgcggtttattgttcgtgtgcgctgaagagtgaggatttgggtgcattgttgattgaaaggattgagagtaccgatccgaatgctttaatcggtttgccggttttccgtctggtcgattttttgaaaaatgagggcgtggatgttttgtaa

SEQ ID NO: 60620 - DNA, 2853 bp, Neisseria meningitidis; identical to SEQ ID NO: 45228

SEQ ID NO: 60621 - DNA, 201 bp, Neisseria meningitidis; identical to SEQ ID NO: 37363

SEQ ID NO: 60622 - DNA, 261 bp, Neisseria meningitidis
ttgacgaaggcggtacgccgaaaaaatgtgcaaacccccaaaatatgctatgcattccgaacgccctccgcatacgggcaataccttgccgacgcgggattcgactacctcagcttcgccaacaaccacagcaacgacttcggcgcgcaaggcatcacggcaacggcggcgggcggcagctcttttacatactcaatcgcgctaaagccgctgccgataacgaggccaaaattgcggaaaataccgccatcgcccagataa

SEQ ID NO: 60623 - DNA, 1380 bp, Neisseria meningitidis; identical to SEQ ID NO: 55627

SEQ ID NO: 60624 - DNA, 270 bp, Neisseria meningitidis
atgaaagaatacaaagtcgtcatttatcaggaaagcctgttgtccagcctgtttttcggcgcggcaaaggtcaaccccgtcaatttcagcgcgttcctcaacaaacaaatcccccgaaggctggcgggtcgtaacgatggaaaaagatttgcgccgtatgctgctgtttttcaaacgcgaggcctacgtcgtcattttggagcgggatcgtgtttaagctcggcgtttatgcctgtctcggactgtttgccggctgggtgctgctgctga

SEQ ID NO: 60625 - DNA, 426 bp, Neisseria meningitidis
ttgtggctgctgcgcgccctgactgccaaactgccccaacagcgttatgcggctttgtttattacactgttttttgccgcagtattggtgttcgggcggcatgattcgatgtattggtatcccgtcctcgtcaatctgatgatgttggcggtgttcggcggcagcctgtttgcagggcagacggtgattgaaaaacttgcgcggctgcaacagcccgacctgcctgaaaaagccgtgcgctatacccgccgggtaacgcaggtttggtgcgtattttttataatcaacgggacgcttgccgctttgttggcacggttggggcgatatgattggtgggcggtttatacaggcgtgattgcctatgtattgatggggatgctgtttgccggcgaatggctttaccgcaaactcgttttgaaagtctga

SEQ ID NO: 60626 - DNA, 906 bp, Neisseria meningitidis
atggacattctggacaaactggtcgatttcgcccaattgacgggcagtgtggatgtgcagtgccttttgggcggacaatggtcggtacggcatgaaaccttgcaacgcgaaggactggtacacattgttacatcgggcaacggctatctctgcatcgacggcgaaacttccccgcgtccggtcagtacaggggatattgtatttttcccgcgcggcttgggtcatgtgttgagccacgacggaaaatgcggagaaagtttacaaccggatatgcggcagcacggtgcgtttacggtcaaacagtgcggaaacggacaggatatgagcctgttttgcgcccgtttccgctacgacacccacgccgatttgatgaacgggctgcctgaaaccgtttttctgaacattgcccatccgagtttacagtatgtggtttcaatgctgcaactggaaagcaaaaaacctttgacggggacggtttccatggtcaacgcattgtcgtccgtcctgctggtgcttatcctgcgcgcctatctcgaacaggataaggatgtcgaactctcgggcgtattgaaaggttggcaggacaaacgtttgggacatttaatccaaaaggtgatagacaaaccggaagacgaatggaatgtcgacaaaatggtggcggctgccaatatgtcgcgcgcgcaactgatgcgccgtttcaaaagccgggtcggactcagcccgcacgcctttgtgaaccatatccgcctgcaaaaaggcgcgttgctgctgaaaaaaaacccggattcggttttgtcggtcgcactgtcggtaggctttcagtcggaaacgcacttcggcaaggcgttcaaacggcaatatcacgtttcgccgggtcaataccggaaagaaggcgggcaaaaataa

SEQ ID NO: 60627 - DNA, 873 bp, Neisseria meningitidis
gtgaaaggactcgactattgccgtcaaaaagcagaagaaagccgctccagttttttatcgggcttccgtttcctgactcaggaaaaacgggatgcggtaacgattttatatgccttttgccgcgaattggacgatgtggttgacgaatgttccaaccccgatgttgcacaggcaacattgaactggtggcgcggcgatttggacaaggtattcggcggcgcgatgccggaacaccccgtcaatcaggccttgcggcaagttaaggaaaccttcaagctgccgaaatatgaactggaagccttaatcgacgggatgcagatggatttggttcaggcgcgttacggcagttttgaggaattgaaactgtattgccaccgcgtcgcaggcgtagtcggctgcctgattgcgcggattttggggttttcagacagcaaaacactggaatacgccgacaaaatgggacttgcgctgcaactgaccaacatcatccgcgatgtcggcgaagacgcccgtaatgggcggatttacctgccgatggaggaaatgcggcggtttgatgtccccgcaagtgtgattttgcagtgccggccgacagaaaatttcaccgaattgatggcattccaaataaagcgtgcgcgtgaaacctaccgtgaagccgtatcgctgctgcctgatgccgacaaaaaagcccaaaaagtcggactggttatggcggcggtttattacgcgcttttaaacgaaatcgaccgagacggcgcgcaaaacgtcctcaaatacaaaatcgccctcccttcgccgcgcaaaaaacgcattgccctgaaaacctggttattcggattcaaaccgcgccccggcacgccggaacgggcataa

SEQ ID NO: 60628 - DNA, 936 bp, Neisseria meningitidis
atggggcacaatatgatgaccacccaaaaatggtatgagcatattactaatgtaatcataggcaatactgctaatttcaatagcggttgccctgaagctatagattatgtagatgaaagaaaaggcgttccacttgcagcaatgagacatattttaatgtacactgaagctgcggcttcccatgcctatctatttgaacatgatcttaataaattcaagcaatatgcttatgttgcaggaaagctgggtattttgcggagtgtaaattctacagaccctgaacccttcttctttccctgtgacatgctcaacattcaagatccgatgtttctgatgctgatgagcgacagcccgcagctgcgtgagtttctggtgcgcaatatcgacaacatcgccaacgatacagaagccttcgtaaaccgctacgacctcaaccgtcatatgatttacaatactctgctgatggtggagggtaagcagcttgatcggttgaaacaacgtagcgagaaagtcttggcgcatcccacccctagcaaatggctgcaaaagcggttgtacgattaccgcttcttcctcgctttcgccgaacaggatgccgaggcgatgaaggccgccttagagccgctttttgataaaaaaaccgcgcgtatggctgccaaagaaacattgtcctatttcgatttctacctgcagccgcaaatcgttacctacgccaaaatcgcatccatgcacggtttcgatttgggcatagaccacgaaatcgcgccgagggatttgactgtttacgatccgctgccggcagacgaatatcaagacatcttcgattttatgaaacagtatgacttgtcttacccgtatgaatatctgcaggattggatagattactatacgttcaaaaccgataagctggtatttggtaacgcgaagcgagagtga

SEQ ID NO: 60629 - DNA, 1635 bp, Neisseria meningitidis
atggcagcaaaagacgtacagttcggcaatgaagtccgccaaaaaatggtaaacggcgtgaacattttggcaaacgccgtgcgcgtaaccctgggtcccaaaggccgcaacgtagtggttgaccgcgctttcggcggcccgcacatcaccaaagacggcgtaaccgtcgccaaagaaatcgaactgaaagacaagtttgaaaatatgggcgcgcaaatggtgaaagaagttgcgtccaaaaccaacgacgtggcgggcgacggtacgactaccgccaccgtactggcacaatccatcgttgccgaaggcatgaaatatgttaccgcaggtatgaatccgaccgacctgaaacgcggtatcgacaaagccgtcgccgctttggttgacgagctgaaaaacatcgccaaaccttgcgatacttccaaagaaatcgcccaagtcggctcgatttccgccaactctgacgaacaagtcggcgcgattatcgccgaagcgatggaaaaagtcggcaaagaaggcgtgattaccgttgaagacggcaaatctttggaaaacgagctggacgtggttgaaggtatgcagttcgaccgcggctacctgtccccttacttcatcaacgatgctgaaaaacaaatcgctgctttggacaatccgtttgtattgctgtttgacaaaaaaatcagcaacatccgcgacctgctgcctgttttggaacaagtggcgaaagccagccgtccgctgttgattatcgctgaagacgtagaaggcgaagccttggcgactttggtggtgaacaacatccgaggcatcctgaaaaccgttgccgtcaaagctccgggcttcggcgaccgccgcaaagcgatgctgcaagacatcgctatcctgaccggcggcgtggtgatttccgaagaagtcggcctgtctctggaaaaagcgactttggaagacttgggtcaagccaaacgcatcgaaatcggtaaagaaaacaccaccatcatcgacggctttggcgacgcagcccaaatcgaagcgcgtgttgccgaaatccgccaacaaatcgaaaccgcaaccagcgattacgacaaagaaaaactgcaagagcgcgtggctaaattggcaggcggcgtggcagtgatcaaagtcggcgccgctaccgaagtcgaaatgaaagagaaaaaagaccgcgtggaagacgcgctgcacgctacccgcgcagccgttgaagaaggcgtggtcgcaggcggcggcgtagccctgttgcgcgcccgtgccgctctggaaaacctgcacaccggcaatgcagaccaagacgcaggcgtacaaatcgtcttgcgcgccgttgagtctccgctgcgccaaatcgttgccaacgcaggcggcgaacccagcgtggttgtgaacaaagtgttggaaggcaaaggcaactatggttacaacgctggcagcggcgaatacggcgacatgatcgaaatgggcgtactcgaccccgccaaagtaacccgttccgcgctgcaacacgccgcgtctatcgccggcctgatgctgaccacagactgcatgattgctgaaatccctgaagacaaaccggctatgcctgatatgggcggcatgggtggtatgggcggcatgatgtaa

SEQ ID NO: 60630 - DNA, 474 bp, Neisseria meningitidis
atggaaaataacaaagccaaatctgatgataattcagtttctattgaatttatacaagattttataactgcaagtacggatgtaattaatctgagttacgaaaattttcgtaaaaatttttatacacaaatgtcaactgattctaccaattatgcagccaaacatgaaagtttaggaaaatcggtacaacgtgaattacaaaaaacacaaagtcagttgagacaagttgtaagaaaaatgcagagtaaatataatataaataataaagcacgagtagcagaaatatctttgttaaggcaaatgcaaagccaattttctcgaaaagatgtaaacaaaaatcttggtaacggcaacactttggctcaacaaggcagctacaccaaaaaagacggcacaaccgcgcaagcaggcgattcgctgttggctgctgacaaacctgcacagcctcctcacggacaaaatgctatccattag

SEQ ID NO: 60631 - DNA, 624 bp, Neisseria meningitidis
atggaacgcaaagaacgcctgcgtgcaggcatcgccgcattgggtttggatatttccgcagcggcgcaggacaggcttttggcctatgtggatttgttgaaaaagtggaacaaaacctacaatctgaccgccctgcgcgacgaggaaaaaatgattgtccatcatcttttggacagcctgacgctgctgccccatatcgagggtgtgcaaacgatgctggatgtcggttcgggcggcggtcagcccggcattccggcggcggtgtgccgtccggatgtgcagataacccttttggatgcgaatacgaagaaaacggcttttttacagcaggcggttatcgagttgggattggacaatgtgcgcgtggtatccggacgcgtggaggcggtttcggacgtgcgtgccgatgtggttaccagccgtgcgtttgcagaactggcggattttgtgtcgtggacggtgcatctgttgaaagacggcggctactgggcggcgatgaagggcgtgtatccgcaggaagaaatcggccgcctgccgcaggatgtgtgcgttgaaaaagtccaaaggctcgacgtgccgggcttggaggcggaacgccatatcgttatcctgagcaagcgttga

SEQ ID NO: 60632 - DNA, 1770 bp, Neisseria meningitidis; identical to SEQ ID NO: 45705

SEQ ID NO: 60633 - DNA, 1068 bp, Neisseria meningitidis; identical to SEQ ID NO: 55570

SEQ ID NO: 60634 - DNA, 270 bp, Neisseria meningitidis; identical to SEQ ID NO: 37651

SEQ ID NO: 60635 - DNA, 384 bp, Neisseria meningitidis; identical to SEQ ID NO: 50847

SEQ ID NO: 60636 - DNA, 216 bp, Neisseria meningitidis; identical to SEQ ID NO: 53765

SEQ ID NO: 60637 - DNA, 3309 bp, Neisseria meningitidis
atgaatgagggtgaagttgttttaacaccagaacaaatccaaaccttgtatggttatgcttctcgtggcgatacctatggcggttggcgttatttggctaatttgggtgaccgttatgcggataatgctgccgcaattgtcggtaaggatgcaaacttaaatggtttgaatttatggatgaaaaaaggggtggaaaacctatgggatgatacggtcggtaaaaagacccgtttagagaaatttgatcgggttgcattgcaacatttcagccaatatgtagatctaattaatgaaaataatggtagattacctaacactagtgaaattgagagaagttactataaagccgttacctatcatggcgtttcttctagtgcagctattgatttagttattaatcgttcacttccggatatggcggatggttattgggcattaggtttggggatagaagccgaacgtatccacaatgagcaagcagtaaataatccgaacggtagcgaatcggataatagaaagcagttaatatctgctttagataaaggatttgatggatcttttaaagagaagcattttacttttttacaatctgtgataatggatgtaacaaagttaggtgttgaatatacaatagatggttggcaaaaaattggaggttggggtaatgggataatcaatgatttatataaaagtgttgcaaaaagagagtggactggaatatttgagatcgttaataataacatcaagcaatttagagatctgttcccaaatccggaaggctggatcgatgatggtcaccaatgtttcgctccttgggttaaagaaactaaaaaacgcaatggcaaatatcatgtctacgaccccctcgccctagacctagacggcgacggcatagaaacagtcgccgccaaaggcttttcaggcagcctcttcgaccataacggcaacggcatccgcaccgccactggctgggtttctgccgatgacggtttactcgtccgcgatttgaacggcaacggcatcatcgacaacggtgcggaactcttcggcgacaataccaaactggcagacggttcttttgccaaacacggctatgcagctttggccgaattggattcaaacggcgacaacatcatcaacgcggcagacgccgcattccaaaccctgcgtgtatggcaggatctcaaccaggacggcatttcccaaaccaacgaactccgcacccttgaagaattgggtattcaatctttggatctcgcctataaagatgtaaataaaaatctcggtaacggtaacactttggctcagcaaggcagctacaccaaaacaaacggtacaaccgcaaaaatgggggatttacttttagcagccgacaacctgcacagccgcttcaaagacaaagtggaactcactgccgaacaggcaaaagccgccaatcttgcgggcattggtcgtctgcgcgatttgcgcgaagctgccgcattgtccggcgatttggccaatatgctgaaagcttattctgccgccgaaactaaagaagcacagttggcattgttagataatttgattcacaaatgggcggaaaccgattcgaactggggcaaaaaatcgccaatgcgactttcaaccgattggacgcaaacggctaatgaaggtattgcactgacaccatcccaagtagcacaactaaaaaagaacgctttagtttccctttctgataaagctaaagcaactattgacgccgcccgcgaccgcattgccgtgcttgatgcctacacggggcaggattccaacacactctattacatgagcgaggaagatgcgcttaatatcgtcaaagtaaccaacgatacatacgaccatctcgccaaaaacatctaccaaaacctgttattccaaacccgtttgcagccatatttgaatcaaatcagtttcaaaatggaaaatgatacgttcactttggattttagtggtcttgttcaagcatttaaccatgtcaaagaaactaatccgcaaaaagcttttgtggatttggccgagatgcttgcatatggcgaacttcgttcttggtatgaaggccgaagactaatggccgattatgtggaggaggcaaaaaaagcaggtaaatttgaagattaccagaaagtgttgggtcaggagaccgttgcattattagctaaaacatcgggtacgcaagcagatgatatcctgcaaaatgtaggctttggtcataataaaaatgtttctttatatggtaatgacggcaacgacactctaatcggcggtgccggtaatgattacttggagggcggcagcggttcggatacttatgtcttcggcgaaggcttcagtcaggatacggtctataattacgactacgctaccggacgcaaagacatcatccgctttaccgacggtattacagccgatatgctgacttttacccgagagggcaaccatcttcttatcaaggcaaaagacggcagtggacaagtgactgttcagtcctatttccagaacgatggctcaggtgcttaccgtatcgacgagattcatttcgataacggcaaagtactggatgttgccactgtcaaagaactggtacagcaatccaccgacggttcggacagattgtatgcctaccaatccggaagtaccttaaatggcggattgggcgatgactatctgtacggtgccgacggggatgacctgctgaatggtgatgcaggcaacgacagtatctacagtggcaatggcaatgatacgctcgatggaggagaaggtaacgacgccctgtacggctataatggtaacgatgcactgaatggtggcgaaggcaatgatcatttgaacggcgaagacggtaacgacactctaatcggcggtgccggtaatgattacttggagggcggcagcggttcggatacttatatcttcggcaaaggcttcggtcaggatacggtctataattaccatgtggataaaaactctgacactatgcactttaaaggatttaaagcagcagatgttcattttatccgttccggaagtgatttggtgcttagcgcttctgaacaagacaacgtacgtatttccggattcttctatggtgaaaaccatcgtgtagatacatttgtctttgatgatgcagctatcagtaatccagattttgccaagtatattaatgctggcaataatttggtacagtctatgtctgtgttcggttctaatactgctgcgacaggaggaaatgtggatgccaatatacaatccgtacagcagccgttattggtaacgccatctgcataa

SEQ ID NO: 60638 - DNA, 1410 bp, Neisseria meningitidis; identical to SEQ ID NO: 54261

SEQ ID NO: 60639 - DNA, 837 bp, Neisseria meningitidis
atgttaccgctcaaaacgcccggcgtactgcccggcttcaaactcagcctcgggctgaccgtattgtgcctgtcgctgcttgtggtcttgccgtttgcgatgatggcggcgaaggcggcggaaatcggctggggcggcttttggaacacgattgccgagccgaacgtgttggcggcggtgtggctgagtttgcggatgtcgttttatgcgatgctgaccaatgtcgtgttcggcacgctggtggcgtgggtattggtgcgctatgaatttccgggcaagggtctggcgaacgcgctggttgatttgccgtttgcgctgccgacggcggttacgggtatcgcgttggcaaccctgtatgcgcccaacggttggataggccgttttttcgagcctttgggcatcaaaatcgcgtttacgcccgtcggcatttggattgcgctggtcgtcgtcagcctgccctttatcgtccgcgccgtgcagccggtgttggaggaattatcgggcgaatatgaggaagcggcggcgactttgggcgcaaaccgctttacgacgttccgccgcgtgctgctgccggaaatcacgccggcactcttgaccggcgcgggaatgatgttcgcgcgggcaacgggggaatacggctcggtgatttttatcgcgggcaatattccgatggtttctgaaatcctgccgctgattattacgggcaagctggaacagttcgacgtacagggcgcgtcggcggtggcgttgtttatgctgctggtttcgtttgtcattctgtttgcgctgaacgtgatgctgtgggcgttgggcaggcgttcgggcgcgaagggttga

SEQ ID NO: 60640 - DNA, 1539 bp, Neisseria meningitidis
atgttccattccatcgaaaaatacagaacgcccgcccaagtccttttgggcctgattgcattaaccttcgtcggcttcggggtcagcacggtatcccatccgggtgccgactacatcgtccaagtgggcgacgaaaaaatcagcgaccactccatcaacaacgccatacagaacgaacaggcggacggcggcggcccttcgcgcgacgcggtgttccaatccctgctgcaacgcgcctacctgaaacagggcgcgaagctgatgggcatttcggtttcttccgaacaaatcaagcagattatcgtggacgatcccaatttccacgacgcaaacggcaaattcgaccacgcgcttttaaaccgctacctttcccaacgccatatgtctgaagaccagtttgtcgaagaaatccgcgatcagtttgccttgcagaatttggtaaacctcgtccaaaacggcgtattggtcggcgacgcgcaggcggaacagctgatcaggctgacgcaggtcaaccgcaccatccgttcgcacactttcaaccccgacgagttcatcgcccaagtcaaagtgtctgaagccgatttgcagaaattttataatgcgaacaaaaaagactatctgctgccgcaggcggtcaaattggaatatgtcgccttgaatctgaaggattttgcagacaagcaaaccgtcagtgaaacggaagtgaaaaatgcgtttgaagagcgcgtggcgcgtttgccggcaaatgaagccaaactttctttcgagcaggaaaaagccgccgtcgaaaacgaattgaaaatgaaaaaggcggttgccgacttcaataaggcaaaagaaaagctgagcgatgacgcgttcaaccatcccgcttcgcttgccgaagccgccaaaaacagcagtttgaaagtcgaaacccaagaaacttggctgagcaggcaggacgcgcaaatgtccggactgcctgaaaacctgatcaatgccatattcagcgacgacgtattgaagaaaaaacacaattccgaagtgttgtctatcaataatgaaatcgcgtgggtcgtccgcgccaaagaagtccgcgaagagaaaaccctgccgtttgccgaagccaaagatgcggtgcgtcaggcttatatccgtgccgaagccgccaaacttgccgaaaacaaggcaaaagacgtgcttacccaactgaacggcggcaaggcagttgatgtgaaatggtcggaagtgtccgttttgggcgcgcagcaggcaaggcagtccatgccgcccgaggcttatgcggaactgctgaaagcaaaaccgacaaacggcaaacccgcctacgtcaggctgaccggtctgccggcacccgtgattgtcgaagtacaggctataaccccgccggatgatatcgccgcacagcttccgcttgcaaaacaggctttggcgcagcagcagtctgccaataccttcgacttgttgatacgttatttcaacggcaaaatcaaacagaccaaaggagcgcaatcggtcgacaacggcggcggtcagtaa

SEQ ID NO: 60641 - DNA, 999 bp, Neisseria meningitidis
gtggcggcacatatcggacgcattgatacggacgcgcctttgaaacccctgtacgtcatccacggcgaggaagaactgttgcgtatcgaggcattggacgcattgagggcggcggcgaagaaacaaggttaccttaatcgggaagtttatacggcagacaatgctttcgattggaacgagctgctgcaaaccgcaggcagtgcgggtctgtttgccgatttgaagctgttggaactgcatatccctaacggcaagcccggcaaaaccggcggcgaggcgttgcaggattttgccgcccgcctgccggaagatacggtaacgctggttttactgcccaaactggagaaaacccagctccagtccaaatggtttgccgcattggcggcaaagggggaagtgtgggaagccaaaccggtcggcgcggcggctttgccccaatggatacgcggacggctggacaaaatcggtttgggtatcggggcagacgcattggcactgtttgctgagcgcgtggaaggcaatctgttggcggcacgtcaggaaatcaacaagctcgggctgctgtatccgaaagggcataccgtcaatatcgatgaggcgcaaaccgccgttgccaacgtcgcccgcttcgacgcgttccaactggcaggcgcgtggatgaagggcgatgtcccgcgcgtatgcaggctcttggacggattgcgggaagaaggcgaagaaccggtactgcttctgtgggcggttgccgaagacgtgcggacgctgatccggcttgccgccgccctgaagcaggggcagagcatccaatccgtccgcaacagtctcagactttggggtgaaaagcagacgctcgcgccgcttgcggtcaagcggatttccgtcgtccgcctgcttgacgcgctcaaaacctgcgcccaaatcgaccgaatcatcaaaggtgcggaagacggcgacgcatggacggtattcaaacggcttgtcgtgtcgctggcggaataa

SEQ ID NO: 60642 - DNA, 384 bp, Neisseria meningitidis
atgttccgtactatgcttggcggaaaaatccaccgcgccaccgttaccgaagccgatttaaactatgtcggcagcattaccgtcgatcaagacctgttagacgcggcaggcatctaccccaacgaaaaagtcgccatcgtcaacaacaacaacggcgaacgttttgaaacctataccattgcagggaaacgcggcagcggcgtgatttgtctgaacggtgctgcggcaaggctggtgcagaaaggcgatatcgtcatcatcatgtcttacgtccaactctccgaacccgaaatcgccgcgcatgaacccaaagtcgtcttggtagacggaaacaacaaaatccgcgacatcatctcctatgagccgccgcacaccgtgctgtaa

SEQ ID NO: 60643 - DNA, 1194 bp, Neisseria meningitidis; identical to SEQ ID NO: 36281

SEQ ID NO: 60644 - DNA, 468 bp, Neisseria meningitidis; identical to SEQ ID NO: 54622

SEQ ID NO: 60645 - DNA, 633 bp, Neisseria meningitidis; identical to SEQ ID NO: 47747

SEQ ID NO: 60646 - DNA, 258 bp, Neisseria meningitidis; identical to SEQ ID NO: 55346

SEQ ID NO: 60647 - DNA, 810 bp, Neisseria meningitidis; identical to SEQ ID NO: 54386

SEQ ID NO: 60648 - DNA, 912 bp, Neisseria meningitidis; identical to SEQ ID NO: 43889

SEQ ID NO: 60649 - DNA, 444 bp, Neisseria meningitidis; identical to SEQ ID NO: 55663

SEQ ID NO: 60650 - DNA, 855 bp, Neisseria meningitidis; identical to SEQ ID NO: 42323

SEQ ID NO: 60651 - DNA, 1419 bp, Neisseria meningitidis
atgaatattcacgccctgctctccaaacaatggacgctgccgccattcctgccgaaacggctgctgctgtccctgctgatactgcttgcccccaatgcggtgttttgggttttggcactgctgaccgccaccgcccgcccgattgtcaatttggactatcttcccgccgcgctgctgatcgccctgccttggcgtttcgtcaaaattgccggcgtattggcgttttggctggcggttttgtttgacgggctgatgatggtgatccaactcttcccttttatggatctcatcggcgccatcaacctcgtccccttcatcctgaccgcccccgccccttatcagataatgaccgggctgttgctgctgtatatgctggcgatgccgtttgtgttgcagaaagccgccgccaaaaccgacttccggcacattgccgtctgcgccgccgttgtggcggcagccggctatttcaccggccatttgagttactacgaccgaggtcggatggccaatatcttcggcgcaaacaacttctactacgccaaaagtcaggcgatgctctacaccgtcagccagaatgccgactttattaccgccggcctggtcgatcccgtcttcctccccttgggcaatcaacagcgtgccgccacgcatctgaacgagccgaaatctcaaaaaatcctctttatcgtcgccgaatcttgggggctgccggccaatcccgaacttcaaaacgccacttttgccaaactgctggcgcaaaaagaccgtttttcggtttgggaaagcggcagttttccctttatcggcgcgacggtcgaaggcgaaatgcgcgaactgtgcgcctacggcggtttgcgcgggttcgcactgcgccgcgcgcccgacgaaaaatttgcccgctgcctccccaaccgtttgaaacaagaaggttacgccacctttgcgatgcacggcgcgggcagttcgctttatgaccgcttcagctggtatccgagggcgggctttcaagaaatcaaaaccgccgaaaacctgatcggtaaaaaaacctgcgccattttcggcggcgtgtgcgacagcgagctgttcggcgaagtgtcggcatttttcaaaaaacacagcaaaggattgttttactggatgacgctgaccagccacgccgactatcccgaatccgacattttcaaccacaggctcaaatgcaccgaatacggcctgcccgccgaaaccgacctctgccgcaacttcagcctgcacacccaattcttcgaccaactggcggatttgatccaacgccccgaaatgaaaggcacggaagtcatcatcgtcggcgaccatccgccgcccgtcggcaacctcaatgaaaccttccgctacctcaaacaggggcacgtcgcctggctgcacttcaaaatcaaataa

SEQ ID NO: 60652 - DNA, 963 bp, Neisseria meningitidis
atgcccagtatctctgtccgccgactgtttgacgacaaccaatacaagttgcaacttgcctgggccgccggcaattcgggtgcggacaaccgtatcggcgtagaggcggacaagcccgtcctcgctttggtcggacacctgaatttcatccaccccaaccaaatccaagtggtcggtttggcggagtcggaatatctgaaccgtctcgaatcgggggaaacgggttatcagttcggcgacctgttcgacatttctatgtctttggttattgtggcaaacggcttgccggtttccccgggactgcgcgactactgccataaaaacgatattccactgctgacttccaaactcgaaagcccctatctgatggacgtgttgcggatttacctgcaacgcaccctggcggcatcgtccgtcaaacacggcgtatttctcgatgtgtttgaaatcggcgtgctgattaccggacattcgggtttgggtaagagcgaattggcgttggagctgatttcgcgcggccacagcctgattgccgacgatgcggtcgagctgttccgcatcggcccggaaacgctggaagggcggtgttcgcctatgctgcgcgattttttggaagtgcgcggcttggggatactcaatatccgccatattttcggcgaaacttccatccgccccaaaaaaatcctgcaactcattatcaatttggtcgaggcagacgacgagtatatgaagcagctcgaccggttgagtatccgcaccgaaaccgaatccatcctcaacgtcaacgtccgttcggtaacgctgcctgtcgcggtcggacgcaaccttgccgtattggttgaagcggcggtacgcaattacattttgcagttgcgcggtaaggacagtacgcgcgaatttttggaacgccatcagaggcaacttaaagaaaacgaacagaatcatgaaaatcgtcctgattag

SEQ ID NO: 60653 - DNA, 822 bp, Neisseria meningitidis
atgtctttgcaaaacattatcgaaaccgcctttgaaaaccgcgcggacatcaccccgtccactgttgctcccgaagttaaagaagccgtgttggaaaccatccgccaactcgattcaggcaaactgcgcgttgccgaatgcttgggcgtgggcgagtggaaagtcaacgaatgggcgaaaaaagccgtgttgctgtccttccgcatccaagacaacgaagtcctcaacgacggcgtgaacaaatacttcgacaaagtgccgaccaagtttgccgactggtctgaagacgagttcaaaaacgcaggcttccgcgccgttccgggtgcggttgcccgacgcggcagctttgtggcgaaaaatgtcgtgctgatgccgtcttacgtcaacatcggcgcatacgtcgacgaaggcgcgatggtcgatacttgggcgactgtcggctcttgcgcgcaaatcggcaaaaacgtgcacttgagtggcggcgtcggtatcggcggcgtactcgaacccctgcaggccgcccccaccatcattgaagacaactgcttcatcggtgcgcgttctgaaatcgttgagggcgtgattgtcgaagaaggcagcgtgatttcgatgggcgtgttcatcggtcaatccaccaaaatcttcgaccgcaccaccggcgaaatctaccaaggccgcgtaccggcaggttcggtcgtcgtgtccggcagtatgccttccaaagacggcagccacagcctttactgcgccgtcatcgtcaaacgcgtggacgcgcaaacccgtgcgaaaaccagtgtgaacgaattgttgcgcggcatctga

SEQ ID NO: 60654 - DNA, 324 bp, Neisseria meningitidis; identical to SEQ ID NO: 38645

SEQ ID NO: 60655 - DNA, 915 bp, Neisseria meningitidis; identical to SEQ ID NO: 51855

SEQ ID NO: 60656 - DNA, 1446 bp, Neisseria meningitidis
atgagtacacaaacaaattttgatttggtgttgttcggtgcgaccggcgatttggcgatgcgcaagctgttgccctgtctgtaccaggcgcatgttgccggtctgcttcatcccgaagggcgtattttgggggtcagccgcagcgagttggataccgaaggttttctggcgaaggtggaaaccagttccaaaatccatgtgaaagaaaatttttccgatgaggcttgggcatcgtttgtcgaacgtttcgcatatctcaaagtcgatgttacgcagccggacgattttgccgctttgggcgatttggtcaaagcgcgcaaagaaaccgacaatgtcgtcatctatctttccaccgcgccgaaattcttcgcgcaaacatgtgaaaaccttgccaaaatcggtttgaacgccgacaacgtgcgtgtggttttggaaaaaccgttgggtacggatttggcttcttcccagcaaatcaataccgatgtcgcgcgttatttcaaagaagggcaaatttaccgcatcgaccactaccttggcaaagaaagcctgcaaaacctgcttgcgctgcgttttgccaatgtaatgttcgagccgctgtggaacaataaatacatcgaaagcgtgcagttgaccatcgccgagcagttgggcgtggaagaacgcggcgagttttacgacattaccggcgcgttgcgcgatatggtgcaaaatcacttgatgcaaatgctgtgcatgactgcgatggaagcccccgccagcttggatgccgacgcggtgcgcgatgaaaaagtcaaagtcatcaagtcattgaagccgctgaccgtcgaatctgtcaatgaaaatgtcgtgcgcggacaatataccgccgccaaaggcatgaacggctatcttgaagaaatcaacgttccgcaagacagctttaccgaaacctacgtcgccattaaagccgaaatcgaaaacgaacgctggaagggcgttcccttctacctgcgtaccggcaagcgcatggcgggcaaagtggcggaaatcgttttgaacttcaaagatttgaacagccatatttttgaaggcagccgcaccgcgcccaaccggctcgttatcgagttgcaaccatatgaatccgtgcgcctctatacgcagatgaaaaccccgggggcaggaaataaggtcgaaaccgtgccgctggcaaccgatttgggcaaagcattggaaagccgccgcgcggaagcttacgagcgcctgctgctggatgtgattaacggcaaactcgctttattcaaccgccgcgacgaactcgaagccgcgtgggaatatgtgatgccgattttggaaaactggacaaataacaccacgccgccgcacggctacggcgcacactcgtgggggcctgaagccgcgcgcgaactattggcgcgcgacggacacaagtggcacgaagagcagtaa

SEQ ID NO: 60657 - DNA, 2790 bp, Neisseria meningitidis
atgaccgattacagcaaaaccgtcaacctgctcgaaagcccgtttccgatgcgcggcaatcttgccaagcgcgagcctgcatggctgaaaagctggtacgagcaaaaacgctaccaaaaactgcgcgaaatcgccaaaggccgtccgaaattcatcctgcacgacggcccgccgtatgccaacggcgacatccacatcggtcacgccgtcaacaaaattctcaaagacatcattatccgcagcaaaacccaagccggttttgacgcgccttatgtgccgggttgggactgtcacggcctgcctatcgaagtgatggtggaaaaactgcacggcaaagacatgcctaaagcccgtttccgcgaattgtgccgcgaatacgccgccgaacagattgcccgtcagaaaaaagactttatccgcttgggcgtgttgggtgactgggaccatccttacctgaccatggatttcaaaacagaagccgataccgtgcgtatgctcggcgaaatctacaaatcgggctatctctaccggggcgcgaaaccggttcaattctgcttggactgcggttcttcattggccgaagcggaagtggaatacaaagacaaagtatcgcctgcgattgacgttgcctatccgtttaaagacaccgccgcgcttgccgccgcattcggtttggcaggtatcgaaggcaaagcgtttgccgttatttggacaaccacgccttggacgctgccggcgagccaagccgtgtctgccggtgcggacgtggtgtatcaattaatcgatacgcctacaggcaaattggtgctggcgaaagatttggcggaagatgcgctcaaacgttacggcttttcagacggcatcgccatccttgccgaaaccaccggcgacaagctggaaaacctgcacatgaaccatccgttcctcgaacgcgatattcccatgcttaacggcgaacacgttaccaccgatgccggtaccggcttggtgcatactgcgcccgcgcacggtttggaagactacgccgtctgcaacaaatacggcatcgagctttacaatcctgtcaacgccgaaggcaaatacatcggcgaaacgccgcgtgtcgccggtatgcgcgtttgggaggcgaaccccgtcatcctgcaatggttggaagaaaccagcaaccttttggcaagcagtaaaatcgaacacagctacgcccactgctggcggcacaaaacgccgctgatttaccgcgcgacaggtcaatggtttgtcggtatggacaaagccggtgccgacggcaaaaccctgcgcgacaaagccatcaaggccgtggacgacaccgaattcttcccgtcttggggtcgcgcgcgtttggaagccatgattgaaggtcgtcctgactgggtggtttcacgccaacgctattggggcacgccgatgactttctttgttcacaaagaaacgggcgagctgcatccgaactctgccgaacttttggaaaaagttgccctgaaaatcgaagaaaaaggcatcgaagcgtggttctccctcgataagagcgaactcttgagcgcggaagattgcgaaaattacgataaactttctgacacaatggacgtatggttcgattccggttcgacccattattccgttgtgaaacaacgcgaagaattggaatggccggcggatttgtatctcgaaggcagcgaccagcaccgcggctggtttcaatcgtccatgctgaccggctgcgcctcatcaatgggtcgcgcgccgtataaacagctgctgacccatggtttcgttgtcgacggcgaaggcaaaaaaatgtcgaaatccatcggcaacgtcgttgcaccgcaagaggtttataacgaattcggcgcagacatcctgcgcctgtgggcggcatctaccgattacagcggcgaattggcgatttccaaagaaatcctcaaacgcgtaaccgaaagctaccgccgtatccgcaataccttgagctttttgtttgccaacttgagcgactttaatccgattgaagatgccgtgcaacaggcggatatggtggaaatcgaccgctacgccgtggtattggcacgtcagctgcaagagcgtctggcaggcgattactatccgcgttatgccttccactttgccgtaaaagacattgtttctttctgctcggaagacttgggtgcgttctacctcgacatcctgaaagaccgcctctacaccaccaaagccgacagccatgcacgccgcagcgcacaaactgccctgtatcacatcacacgcagtttggttctcttgattgcaccgattttgtgcttcaccggcgaagaagcgtgggacatcatcggcggcggcgaagaagacagcgtcctcttccatacttggcacgagttcccgaccatcaacgaaaaaaccgaagccgaactggtgaaaaaatggacggcaatccgcgaagcccgcgaagcggtaaccgccgccatcgagcctttgcgcgccgacaaaaccgtcggttcgtccttgcaagccgaagccgaaattaccgcgccggaagaaatggccggctatctgaatgctttgggcgaagaattgcgctttgctttgctggtgtctaaagcagaagtgaaagtaggcagcgaacttgccgttgccgctaaagccagtgatggtgaaaaatgcgaacgctgctggcactacacccgcgatgtgggcgcggttgcaggctatgaaaccgtctgcaaacgctgtgcagagaatgtcggcggagaaggcgaaacgcgccattacgcctga

SEQ ID NO: 60658 - DNA, 1185 bp, Neisseria meningitidis
atggctaaggaaaaattcgaacgtagcaaaccgcacgtaaacgttggcaccatcggtcacgttgaccatggtaaaaccaccctgactgccgctttgactactattttggctaaaaaattcggtggtgctgcaaaagcttacgaccaaatcgacaacgcacccgaagaaaaagcacgcggtattaccattaacacctcgcacgtggaatacgaaaccgaaacccgccactacgcacacgtagactgcccggggcacgccgactacgttaaaaacatgattaccggcgccgcacaaatggacggtgcaatcctggtatgttccgcagccgacggccctatgccgcaaacccgcgaacacatcctgctggcccgtcaagtaggcgtaccttacatcatcgtgttcatgaacaaatgcgacatggtcgacgatgccgagctgttggaactggttgaaatggaaatccgcgacctgctgtccagctacgacttccccggcgacgactgcccgattgtacaaggttctgcactgaaagccttggaaggcgatgccgcttatgaagagaaaatcttcgaactggctgccgcattggacagctacatcccgactcccgagcgtgccgtggacaaaccgttcctgctgcctatcgaagacgtattctctatttccggtcgtggtacagtagtaaccggtcgtgtagagcgcggtatcatccacgttggtgacgagatcgaaatcgtaggtctgaaagaaactcaaaaaaccacttgtaccggtgttgaaatgttccgcaaactgctggacgaaggtcaagcaggcgacaacgtaggcgtattgctgcgcggtaccaaacgtgaagacgtagagcgtggtcaagtattggctaaaccgggtacaatcactcctcacaccaagttcaaagcagaagtatacgtactgagcaaagaagagggtggccgtcataccccgttcttcgctaactaccgtccgcaattctacttccgtaccaccgacgtaactggcgcggttactttggaagaaggtgtagaaatggtaatgccgggtgaaaacgtaaccatcaccgtagaactgattgcgcctatcgctatggaagaaggtttgcgctttgcgattcgcgaaggcggccgtaccgtgggtgccggcgtggtttcttctgttatcgcttaa

SEQ ID NO: 60659 - DNA, 270 bp, Neisseria meningitidis; identical to SEQ ID NO: 36672

SEQ ID NO: 60660 - DNA, 852 bp, Neisseria meningitidis; identical to SEQ ID NO: 55209

SEQ ID NO: 60661 - DNA, 780 bp, Neisseria meningitidis; identical to SEQ ID NO: 55964

SEQ ID NO: 60662 - DNA, 1179 bp, Neisseria meningitidis; identical to SEQ ID NO: 55008

SEQ ID NO: 60663 - DNA, 609 bp, Neisseria meningitidis
ttgaataccctctatttaggttcaaacagcccgcgccgaatggaaatcctgacacagttgggctatcaggtcgtcaagctgcctgccgacatcaatgaaacggtcagacagaacgaagaccctgcccgttacgttcaaaggatggcagaagaaaaaaaccgaaccgccctgaccctcttttgcgaaaccaacggcacaatgcccgatttccccctgattaccgccgacacctgcgtcgtttcagacggcatcatattgggcaaaccccgctcccaagctgaagcaatcgaatttttaaaccgattgtccggcaaacaacataccgtcctgactgctgtctgcattcattatcgcggcaaaacgtcaagccgcgtccaaaccaaccgcgtcgttttcaagcccctgagttcggaagaaatttccgcctatgtgcaaagcggcgaaccgatggacaaagccggcgcctacgccgtacaaggcataggcggcatctttatccaatctatcgaaggcagcttcagcggcattatgggactgcccgtttatgaaaccgtttcgatgttgcaggatttgggataccgctcccccttgtccgcccttaaaccgtaa

SEQ ID NO: 60664 - DNA, 132 bp, Neisseria meningitidis; identical to SEQ ID NO: 39343

SEQ ID NO: 60665 - DNA, 252 bp, Neisseria meningitidis; identical to SEQ ID NO: 51270

SEQ ID NO: 60666 - DNA, 423 bp, Neisseria meningitidis; identical to SEQ ID NO: 54466

SEQ ID NO: 60667 - DNA, 303 bp, Neisseria meningitidis
atgcaacgtcaatccttaacaaacgctgacggcgaagtgcgggaacttgccgccgaagattttgcgcttgcccgccccattgtcgaagccctgcccgaagacttggcacaggtgcttttttcccatcaaaaacaattggaagaaaagggcgtaatgcaaaaacgaaacacaggcaaaaccccgaaacaactcgttaccatacgcctgtccgccgatgtggtcgaaaaattccgcgccggcggcaagggctggcagacgcgcatcaacgaggttttgcgccaatatgtcgcccaattgaaataa

SEQ ID NO: 60668 - DNA, 1284 bp, Neisseria meningitidis
atgtccaaatcaatcaaactcaacgtaccgggtcaggcaggtttggagctgccggtattggaagccagcatcgggcacgatgtggttgacattcgggggctgacaaaaaatacaggtttgttttccttcgaccccggatttgtttcaaccgcaagctgtgagtctaaaattacttacatcgacggcgatcaaggcttgctttattatcgcggataccccatcgagcagctggccgaaaaatccgattatttggaagtctgctacctgttgatttacggcgaactgccgactcccgagcaaaaggcagaatttgacaataccgtccgccgccacacgatggtgcatgaacagctgacttggttcttccgggggttccgccgcgacgcgcatccgatggcgatgatggtcggcgtggtcggcgcgctgtctgcgttctaccaagacagcttggacattagcaatcccgaacaccgcaaaatcgcgatttaccgcctgatttccaaaatcccgaccattgcggcaatgtgctaccgctattcaaacggtctgccgttcaattatccgaagaataatctttcttattccgaaaacttccttcatatgatgttcgccacgccgtgtgaagactacaaacccaatcccgttttggcacgcgcgctcgaccgcatctttattttgcatgccgaccacgagcaaaacgcctcaacttcaaccgtccgtctggcaggctcttcgggtgcgaatccgtttgcctgtattgctgccggtatcgcctgcctgtggggtgcttcgcacggcggtgcgaacgaagccgtgttgaaaatgttggacgaaatcggcgatgtgtctaatgttgccgcatacatggaaggtgtgaaacaacgcaaataccgtctgatgggcttcggtcaccgcgtgtaccgcaatatggatccgcgtgccagcattatgcgcgaaacctgctatgaagttttgaaggaattgggcttggaagacagtccgaaattcaaactggcgatggaattggaacagattgcgctgaaagacccgttctttatcgaacgcaagctgtatccaaacgtcgatttctattccggcatcgtcctgtccgcgctgggcatcccgaccgaaatgtttaccgtcatcttcgccctgtcgcgcagcgtaggttggatttcgcactggcacgagatgatcagcgatccttcgctgaaaatcggccgcccgcgccagctttatactggttcggaacgccgcgattatgtgccggcaggagagaggtaa

SEQ ID NO: 60669 - DNA, 1044 bp, Neisseria meningitidis
atgcagattaccgacttactcgccttcggcgctaaaaacaaagcatccgaccttcacctgagttcgggcatatcccctatgattcgggttcacggcgatatgcggcgcatcaaccttcccgaaatgagcgcggaagaggtcggtaatatggtaacttcggtgatgaacgaccaccagcggaaaatctaccagcaaaacttggaagttgacttctcgttcgaactgcccaacgtcgcccgattccgcgtcaacgccttcaacatcggccgcggtcccgccgccgtattccgcaccattcccagcaccgtcttatcgctggaagaattgaaagccccgagcattttccaaaaaatcgcagaatcgccgcgcggcatggttttggttaccggccctaccggttcgggcaaatcgaccacgcttgccgcgatgatcaactacatcaacgaaacccagccggcacacatcctgaccatcgaagacccgatcgaattcgtccaccaaagcaaaaaatccctgattaaccagcgcgagctgcaccagcacaccctcagcttcgccaacgcgctgcgttccgcattgcgcgaagaccccgacgttatccttgtcggcgagatgcgcgaccccgaaaccatcggcttggcactgaccgccgccgaaaccggacacttggttttcggcacgctgcacacgaccggcgcggcaaaaaccgtcgaccgtatcgtggacgtattcccggcgggagaaaaagaaatggtgcgctctatgctgtccgaatcgctgaccgccgtcatctcccaaaacctgctgaaaacgcacgacggcaacggccgtgtcgcctcgcacgaaatcctgattgccaaccccgccgtccgcaacctcatccgcgaaaacaaaatcacgcagattaactccgtcctgcaaaccgggcaggcgagcggtatgcagacaatggaccaatcgctgcaatcgctggtgcgccaagggctgatcgcaccggaagtcgcacgcagacgcgcgcaaaacagcgaaagtctgagtttctga

SEQ ID NO: 60670 - DNA, 261 bp, Neisseria meningitidis; identical to SEQ ID NO: 42390

SEQ ID NO: 60671 - DNA, 531 bp, Neisseria meningitidis; identical to SEQ ID NO: 39309

SEQ ID NO: 60672 - DNA, 642 bp, Neisseria meningitidis
atgcaaaaacctgaaaccatacacatacccggccctgccggcattttagaaaccatccatatcccgtccgaacaagtaccggcacgcggtgttgccgtcatcaaccaccccaaccccctccaaggcgggacgaacaccaacaaagtcatccaaaccgccgccaaagccttaagcaaactcggcttccactgctacctgcccaaccttcgcggcgtaggcggcagcgaaggcacacacgattacggacacggtgaaacgcaagactgtatcgccgtcatcgactatgctcgtgcccaacatcccgaagcccccgaatttgccttatccggcttctccttcggcggttatgtcgccacatttgccgcacaagcgcgcatacccgatttattgctgctcatcggcgcggcagtctgccactataccggccgccccgagccgtccgccgttcccaatgttgccaaaacgctgatgatacacggcgcggaagacgaagtcgtcgaaatcgggaaagcactgaaatgggcggaaccgcaagatttgcccgtcattaccatcgccggttccacgcatttctttcacggcaaactcatcgtcctgcgcgacaccatcctccgcttcgcgcccgtatgcctgaacggataa

SEQ ID NO: 60673 - DNA, 423 bp, Neisseria meningitidis; identical to SEQ ID NO: 37313

SEQ ID NO: 60674 - DNA, 300 bp, Neisseria meningitidis
gtgttaaaaaacgggcagttcgctttgttttgcaagggtacccaaccaatcggttatatctcatgggcttattttgatgaagtggcgcaggcgcattatttagaatctgaccgccatttgcgcgacaacagcgattggaactgtggcgacaatatttggctgattcaatggtttgcgccattgggacacagtcatcaaatgcgctcagctgtgcgccagttatttcctagtacgacagtacgcgccttgtatcataaagggagcgataagggtttgagaattttaacttttaaaacttga

SEQ ID NO: 60675 - DNA, 426 bp, Neisseria meningitidis
atggcgattgaacgtaccatctccatcatcaaacccgatgccgtcggcaaaaacgttatcggcaaaatatacagccgctttgaggagaacggtctgaaaatcgttgccgccaaaatgaagcagcttaccctcaaagaggcgcaagaattttatgcggttcataaagaccgccccttctacgccggattggttgaatttatgaccggcggtccggttatgattcaggtattagagggtgaaaacgccgttctgaaaaaccgcgaactgatgggtgcaactaatccttccgaagccgccgaaggcacgatacgcgcggactttgccacttcggtcagcatcaatgccgtacacggctcggacactccggaaaatgccgctttggaaattgcctactttttcagccaaaccgaaatctgcccccgttga

SEQ ID NO: 60676 - DNA, 363 bp, Neisseria meningitidis; identical to SEQ ID NO: 43221

SEQ ID NO: 60677 - DNA, 789 bp, Neisseria meningitidis
atgatggaaaacggaaaaacagtcccgagatggcgttttgccttgaaaagtgcgggctggcatctcttaatcagcctgtcggttgcagggctggcggcattgctggtttttaaggtttggtatccttatccttatgccgagctgacgggagggctgtcgctttatcagctggtggtggctgtcgatattgtatgtggtccgctgctgactttaattttggcaagcccgaagaaaaagacaaaggcacgcatggtcgatttttccatggtcggcatcatccagctggcggctttggtgtacggtctgcacagcgtttctttggcgcgccctgtgatagaggcgtttgaaaaagacaggattaatgttgtgaccgccgccgaagtggcggttgaagatttgcacaaagcgccggaagggctgcaaagcctgtcgtggttcggcatccgccgcattgcattgaaagaacctgaggatgcggatgagaagaacaagacgctggatttgtccctgaaaggtatcgagccgagtatgcgtcccgaccggtggctgccgtattccgacaaggaagcagaaaaaatccgcaaacatctgaaaccgctgaaagtcttggcggatgcgagaaaaacgacggttgcggacattctgaaacaggcaggtctcgccgaaggggaggagctgtattacctgccgtttaccagcagcaggcagaaagagtggatagtcattaccgataaagagggcaacaccaaaggctacgcgccgatagacggcttcatcatcaccccttaa

SEQ ID NO: 60678 - DNA, 777 bp, Neisseria meningitidis; identical to SEQ ID NO: 37612

SEQ ID NO: 60679 - DNA, 489 bp, Neisseria meningitidis; identical to SEQ ID NO: 54926

SEQ ID NO: 60680 - DNA, 1209 bp, Neisseria meningitidis
atgaccggcatcatacattcgctgcttgacaccgacctctacaaattcactatgctgcaagtggttctgcaccagtttccgcagacgcacagcctttacgaattccgctgccgcaacgcctcgaccgtctatccgcttgccgacatcaaagaagacttggaagtcgaactcgacgcgctctgccaactgcgctttacccatgacgaactcggctacctccgcagcctgcgtttcatcaaaagcgactttgtcgattatctcgaactcttccagctccaacgccgctttgtcgaaatcggcacagacgataaagaccgtctgaacatccgcatcgaaggtccgatgatacaggcgatgttctttgaaatcttcatcctcgccattgtcaacgaactttacttccgccgcctggaaacccctgcagtcatagaagaaggcgaacgccgccttcaagccaaagccgcgcgcctcaaagaaatcgccgccgcacaaaaccccgacgaaccgcccttcctgatttccgacttcggcacgcgccgccgctacaagctcgcgtggcaggaacacgtcatccgcaccctgctcgaagccgccccaagcatcgtgcgcggcaccagcaatgtctttctcgccaaaaaactcggcatcacccccatcggcaccatggcgcacgaattcctccaagccttccaggccctcgacgtacgcctgcggaatttccaaaaggccgcgctcgaaagctgggtgcacgaataccggggcgatttgggcgttgccctgaccgacgtggtcggtatggatgccttcctgcgcgatttcgacctctatttcgccaaacttttcgacgggctgcgccacgacagcggcgacccttacgtttggggcgacaaagcctacgcccactatcaaaagctcaaaatcgacagccgcaccaaaatgctgaccttctccgacgggctggacatcgaacgctcttgggcattacaccaatatttcaaagaccgcttcaaaaccggcttcggcatcggcaccaacctcaccaacgatatggggcatacgcctttgaatatcgtgttgaaactggtcgaatgcaacgggcagtccgtcgccaagctgtccgactctccgggcaaaaccatgaccaacaacagcaccttcctcgcctacctgcgccaagtgttcgacgtacccgaacccgaaacgccgtaa

SEQ ID NO: 60681 - DNA, 1677 bp, Neisseria meningitidis
atgagcgtaggtttgctgaggattctggttcaaaaccaggtggttactgttgagcaggccgagcattactacaatgagtcgcaggcgggtaaggaagtgttgccgatgctgttttcagacggtgtcatttcgcccaagtcgcttgcggcattgattgcgagggtgttcagttattcgattcttgatttgcgtcattatccgcgccacagggtgctgatgggggtgttgacggaggagcagatggtggagttccactgtgtgccggttttccgtcggggcgacaaagtattttttgcggtttccgatccgacacagatgccgcaaattcagaaaaccgtttctgccgcagggattgaggttgagttggtcattgtcgaggatgaccagttggcgggtttgctcgattgggtgggttcgcgttcgacatcgctgcttcaggagcttggggaggggcaggaggaagaggaaagccacaccctgtatatcgacaacgaggaggcagaagatggccctgttccgaggtttatccataagactttgtcggatgccttgcgcagcggggcatcggacatccatttcgagttttacgaacacaatgcccgtatccgtttccgtgtggacgggcagctccgcgaggtggttcagccgcccattgcggtaagggggcagcttgcttcccggattaaggtaatgtcgcgtttggacatttccgaaaaacggataccgcaggacggcaggatgcagctgacctttcaaaagggcggcaagcctgtcgatttccgtgtcagcacattgccgacgctgtttggcgaaaaggtcgtgatgcggattttgaattccgatgccgcgtctttgaacatcgaccagctcggttttgagccgtttcagaaaaaattgttgttggaagcgattcaccgtccctacgggatggtgctggtaaccggtccgacgggttcgggtaagacggtgtcgctctatacctgtttgaatattttgaatacggagtcggtaaatattgcaacggcggaagaccctgccgagattaacctgccgggcatcaatcaggttaacgtcaatgataagcagggcctgacttttgccgctgctttgaagtctttcctgcgtcaggacccggacatcattatggtcggtgagattcgtgatttggaaactgccgatattgcgattaaggcggcacaaacagggcatatggtgttttccaccctgcacaccaataatgcgccggcgacgttgtcgcgtatgctgaatatgggtgtcgcgccgtttaatattgccagttcggtcagcctgattatggcgcagcgtcttttacgcaggctgtgttcgagctgcaaacaggaagtggaacgcccgtctgcctctgctttgaaggaagtcggcttcaccgatgaggaccttgcaaaagattggaaactttaccgcgccgtcggttgcgaccgttgccgggggcagggttataaggggcgtgcgggcgtgtatgaggttatgcccatcagcgaagaaatgcagcgtgtgattatgaacaacggtacggaagtggatattttggacgttgcctataaggagggtatggtggatttgcgccgggccggtattttgaaagttatgcagggcattacttcattggaagaggtaacggcaaataccaacgattag

SEQ ID NO: 60682 - DNA, 324 bp, Neisseria meningitidis
atggacaactgtattttctgcaaaatcgccgccaaagacattccggcgcaaaccgtctatgaagacggcgaaatggtttgtttcaaagacatcaaccccgccgctccggttcatctgctgctgattcccaaagtccatttcgattcgttggcacacgccgcgcccgaacatcagccccttttgggaaaaatgatgctgaaagttcccgaaatcgccaaagcggcaggactggcagacggcttcaaaaccctgatcaacaccggaaaaggcggcggacaagaggtcttccacctgcatatacacatcatgggcacacccgtataa

SEQ ID NO: 60683 - DNA, 363 bp, Neisseria meningitidis; identical to SEQ ID NO: 55741

SEQ ID NO: 60684 - DNA, 435 bp, Neisseria meningitidis; identical to SEQ ID NO: 55914

SEQ ID NO: 60685 - DNA, 477 bp, Neisseria meningitidis
atgcaaaaaatccccctgaccgtacgcggtgcggaattgctgaaacaggaattgcagcagcttaaaagcgtggcgcgccccgaagtgatcgaagcgattgctgaagccagatcgcacggcgatttgtccgaaaacgccgaatatgaagccgccaaagaacgccaaggttttatcgagggccgcatttccgagttggaacacaaactttccgttgcccacatcatcaatccgaccgaaatccacgccgaaggcaaaatcgtgttcggtacgacggttacgctggaagatttggaaacggaagaacacgttacctaccaaattgtcggcgaagacgaagccgacatcaaacagggcaaaatctatgtcggctcacccatcgcccgcgccttaatcggcaaggaagagggggatacggcggaagtccaagccccgggcggcgtgcgcgaatacgacattatcgaagtccgatatatttga

SEQ ID NO: 60686 - DNA, 354 bp, Neisseria meningitidis; identical to SEQ ID NO: 39616

SEQ ID NO: 60687 - DNA, 900 bp, Neisseria meningitidis; identical to SEQ ID NO: 55702

SEQ ID NO: 60688 - DNA, 5589 bp, Neisseria meningitidis
atgaataaaggtttacatcgcattatctttagtaaaaagcacagcaccatggttgcagtagccgaaactgccaacagccagggcaaaggtaaacaggcaggcagttcggtttctgtttcactgaaaacttcaggcgacctttgcggcaaactcaaaaccacccttaaaactttggtctgctctttggtttccctgagtatggtattgcctgcccatgcccaaattaccaccgacaaatcagcacctaaaaaccagcaggtcgttatccttaaaaccaacactggtgcccccttggtgaatatccaaactccgaatggacgcggattgagccacaaccgctatacgcagtttgatgttgacaacaaaggggcagtgttaaacaacgaccgtaacaataatccgtttgtggtcaaaggcagtgcgcaattgattttgaacgaggtacgcggtacggctagcaaactcaacggcatcgttaccgtaggcggtcaaaaggccgacgtgattattgccaaccccaacggcattaccgttaatggcggcggctttaaaaatgtcggtcggggcatcttaactaccggtgcgccccaaatcggcaaagacggtgcactgacaggatttgatgtgcgtcaaggcacattgaccgtaggagcagcaggttggaatgataaaggcgaagccgactacaccggggtacttgctcgtgcagttgctttgcaggggaaattacagggtaaaaacctggcggtttctaccggtcctcagaaagtagattacgccagcggcgaaatcagtgcaggtacggcagcgggtacgaaaccgactattgcccttgatactgccgcactgggcggtatgtacgccgacagcatcacactgattgccaatgaaaaaggcgtaggcgtcaaaaatgccggcacactcgaagcggccaagcaattgattgtgacttcgtcaggccgcattgaaaacagcggccgcatcgccaccactgccgacggcaccgaagcttcaccgacttatctctccatcgaaaccaccgaaaaaggagcggcaggcacatttatctccaatgatggtcggatcgagagcaaaggcttattggttattgataccggggaggacatcggtttgcgtaacggagcggtcgttcaaaacaacggcaaccgccctgctgctacggtattaaatgccggccgtaatttggttatcgaaagcaaagcaaatgtgaacaatgctaaaggttcgaccaatctgtcgaccggcggccgtaccgtcatcaaggaggccagtattcagactggcactaccgtatacagttccagcaaaggcaacgccgaattaggcaataacacacgcattaccggggcagatgttaccgtattatccaacggcaccatcagcagttccgccgtaatagatgccaaagacaccgcacacatcgaagcaggcaaaccgctttctttggaagcttcaacagttacctccgatatccgcttaaacggaggcagtatcaagggcggcaagcagcttgctttactggcagacgataacattactgccaaaactaccaatctgaatactcccggcaatctgtatgttcatacaggtaaagatctgaatttgaatgttgataaagatttgtctgccgccagcatccatttgaaatcggataacgctgcccatattaccggcaccagtaaaaccctcactgcctcaaaagacatgggtgtggaggcaggctcgctgaatgttaccaataccaatctgcgtaccaactcgggtaatctgcacattcaggcagccaaaggcaatattcagcttcgcaataccaagctgaacgcagccaaggctctcgaaaccaccgcattgcagggcaatatcgtttcagacggccttcatgctgtttctgcagacggtcatgtatccttattggccaacggtaatgccgactttaccggtcacaataccctgacagccaaggccgatgtcaatgcaggatcggttggtaaaggccgtctgaaagcagacaataccaatatcacttcatcttcaggagatattacgttggttgccggcaacggtattcagcttggtgacggaaaacaacgcaattcaatcaacggaaaacacatcagcatcaaaaacaacggtggtaatgccgacttaaaaaaccttaacgtccatgccaaaagcggggcattgaacattcattccgaccgggcattgagcatagaaaataccaagctggagtctacccataatacgcatcttaatgcacaacacgagcgggtaacgctcaaccaagtagatgcctacgcacaccgtcatctaagcattaccggcagccagatttggcaaaacgacaaactgccttctgccaacaagctggtggctaacggtgtattggcactcaatgcgcgctattcccaaattgccgacaacaccacgctgagagcgggtgcaatcaaccttactgccggtaccgccctagtcaagcgcggcaacatcaattggagtaccgtttcgaccaaaactttggaagataatgccgaattaaaaccattggccggacggctgaatattgaagcaggtagcggcacattaaccatcgaacctgccaaccgcatcagtgcgcataccgacctgagcatcaaaacaggcggaaaattgctgttgtctgcaaaaggaggaaatgcaggtgcgcctagtgctcaagtttcctcattggaagcaaaaggcaatatccgtctggttacaggagaaacagatttaagaggttctaaaattacagccggtaaaaacttggttgtcgccaccaccaaaggcaagttgaatatcgaagccgtaaacaactcattcagcaattattttcctacacaaaaagcggctgaactcaaccaaaaatccaaagaattggaacagcagattgcgcagttgaaaaaaagctcgcctaaaagcaagctgattccaaccctgcaagaagaacgcgaccgtctcgctttctatattcaagccatcaacaaggaagttaaaggtaaaaaacccaaaggcaaagaatatctgcaagccaagctttctgcacaaaatattgacttgatttccgcacaaggcatcgaaatcagcggttccgatattaccgcttccaaaaaactgaaccttcacgccgcaggcgtattgccaaaggcagcagattcagaggcggctgctattctgattgacggcataaccgaccaatatgaaattggcaagcccacctacaagagtcactacgacaaagctgctctgaacaagccttcacgtttgaccggacgtacgggggtaagtattcatgcagctgcggcactcgatgatgcacgtattattatcggtgcatccgaaatcaaagctccctcaggcagcatagacatcaaagcccatagtgatattgtactggaggctggacaaaacgatgcctataccttcttaaaaaccaaaggtaaaagcggcaaaatcatcagaaaaaccaagtttaccagcacccgcgaccacctgattatgccagcccccgtcgagctgaccgccaacggtatcacgcttcaggcaggcggcaacatcgaagctaataccacccgcttcaatgcccctgcaggtaaagttaccctggttgcgggtgaagagctgcaactgctggcagaagaaggcatccacaagcacgagttggatgtccaaaaaagccgccgctttatcggcatcaaggtaggtaagagcaattacagtaaaaacgaactgaacgaaaccaaattgcctgtccgcgtcgtcgcccaaactgcagccacccgttcaggctgggataccgtgctcgaaggtaccgaattcaaaaccacgctggccggtgccgacattcaggcaggtgtaggcgaaaaagcccgtgtcgatgcgaaaattatcctcaaaggcattgtgaaccgtatccagtcggaagaaaaattagaaaccaactcaaccgtatggcagaaacaggccggacgcggcagcactatcgaaacgctaaaactgcccagcttcgaaagccctactccgcccaaattgtccgcacccggcggctatatcgtcgacattccgaaaggcaatctgaaaaccgaaatcgaaaagctgtccaaacagcccgagtatgcctatctgaaacagctccaagtagcgaaaaacatcaactggaatcaggtgcagcttgcttacgacagatgggactacaaacaggagggcttaaccgaagcaggtgcggcgattatcgcactggccgttaccgtggtcacctcaggcgcaggaaccggagccgtattgggattaaacggtgcggccgccgccgcaaccgatgcagcattcgcctctttggccagccaggcttccgtatcgttcatcaacaacaaaggcgatgtcggcaaaaccctgaaagagctgggcagaagcagcacggtgaaaaatctggtggttgccgccgctaccgcaggcgtagccgacaaaatcggcgcttcggcactgaacaatgtcagcgataagcagtggatcaacaacctgaccgtcaacctggccaatgcgggcagtgccgcactgattaataccgctgtcaacggcggcagcctgaaagacaatctggaagcgaatatccttgcggctttggtgaatactgcgcatggagaagcagccagtaaaatcaaacagttggatcagcactacatagtccacaagattgcccatgccatagcgggctgtgcggcagcggcggcgaataagggcaagtgtcaggatggcgcgatcggtgcggtcgtgggggagattgtcggggaggctttggttaagaataccgatttcagcggtatgactgcttctgaaattgaaaaagctaaagcgaatattactgcgtatgcaaaactggtagccggagcgactgtaggtgttacaggaggcaatgttgatgtggcggcaaatgcttccgaaacagctgttaaaaataatgcattagatattatttgggatatcggcaacctcgtatgggacggcggtaaatggatttacgccaaatctattggcgataagcagatggctcgagaagcggcgattgattttggtgtggatgccgccgcagctgccgttccctttgttccggcaggtgcgactaaaatcagccgaggcggggcttatgttctgaaggcgggagacgaagcagttgatacggctaaagccatacaggaaattcagaagcagaccggaatcaagcttacttatgataaggttaataaggtttggacaacaccggcggggttagattatgggttagatgctaagcatggtaataggattaaacatgttttagcccatacaattccaaatccaaacaaacctgttcattctgtttttaatgtgtcccgtaaagaagttttgcctttggttgatgaagcttggagaatgaaaggaaatcctttgccaaatgattcatccgtatatcttgtagatatgaagaaacctattggaacaaaaggagaaacaaaagtgcggattgttgtgcaaaaaggaacaaataaaatcatttctgcatatcctcagaaataa

SEQ ID NO: 60689 - DNA, 471 bp, Neisseria meningitidis
atgagcaccttctttcagcaaaccgcccaagccatgattgccaaacacatcgaccgtttcccactattgaagttggaccaggtgattgattggcaaccgatcgaacaatacctgaaccgtcaaaaaacccgttacctccgagaccaccgcggtcgtcccgcctacccgctgttgtccatgttcaaagccgttctgctcggacaatggcacagcctctccgatcccgaactcgagcacagcctcatcacccgcatcgacttcaacctgttttgccgctttgacgaactgagcatccccgattacagcaccttatgccgttaccgcaactggctggcgcaagacgacaccctgtccgaattgctcaaactgattaaccgccaactgaccgaaaaaaacctaaaagtagagaaagcatccgctgccgtcgttgacgccaccattattcagaccgccggcagcaaacagcgctag

SEQ ID NO: 60690 - DNA, 819 bp, Neisseria meningitidis; identical to SEQ ID NO: 55934

SEQ ID NO: 60691 - DNA, 558 bp, Neisseria meningitidis
atggatgctttaaaattattgacgaaccgccgatcttccaaaaagctgaagccccccgcccccgatgcggcggagttggaacaaatatttcaggcggcaacccaagttcccgatcacggcaatatgcgccccttccgttttaccgtgattcaaggcgaggtaggattgcaacgttttcgcgatgtgttgaagcaaacggttgccgaattgaatttcggcgacgatgcgatgaaaaaggcggaaaaagtgggcaatatggcgccgatggttatcggggtaacgtttgcgccgaaccgcgatgtgcctaagccgaaaccggaatgggaacagatgctgacggcgggttgtgcggcgtatgcgctgcaactggcggcaacggcgcaaggtttcgacaatgtctggattacggggatgtgggtcaacagccccctgttgcgtgaggctttcggatgtgcggataaggataaaatcatcgggctgatgatggtcggcacgccgacagaggaagtgcataagcccaagaataccgatttggaagcgtttgtcagtcattggtaa

SEQ ID NO: 60692 - DNA, 411 bp, Neisseria meningitidis; identical to SEQ ID NO: 44723

SEQ ID NO: 60693 - DNA, 1128 bp, Neisseria meningitidis; identical to SEQ ID NO: 53259

SEQ ID NO: 60694 - DNA, 1113 bp, Neisseria meningitidis
atgagcaccttctttcagcaaaccgcacaagccatgattgccaaacacatcgaccgcttcccgctattgaagttggaccaggtgattgattggcagccgatcgaacagtacctgaaccgtcaaaaaacccgttaccttcgagaccaccgcggccgtcccgcctacccgctgttgtccatgttcaaagccgtcctgctcggacaatggcacagcctctccgatcccgaactcgaacacagcctcattacccgcatcgatttcaacctgttttgtcgttttgacgaactgagcatccccgattacagcaccttatgccgctaccgtaactggctggcgcaagacaacaccctgtccgaattgctggaactgatcaaccgccaactgaccgaaaaaggtttaaaaatagagaaagcatccgctgccgttgttgacgccaccattattcagaccgccggcagcaaacagcgtcaggccatagaagttgacgaagaaggacaaatcagcggccaaaccacaccgagtaaagacagcgatgcccgttggataaagaaaaacggcctctacaaactcggttacaaacaacatacccgtaccgatgtggaaggctatatcgagaaactgcacattacccccgccaatgcccatgagtgcaaacacctgccgcctttgctggaagggatagctgaaggtacgaccgtctatgccgacaaaggctatgacagtgcggaaaaccggcaacatctggaagagcgtcagttgttagacggcattatgcgcaaagcctgccgcaaccgtccgctgtcggaaacgcaaaccaaacgcaaccggtatttgtcgaagacccgttatagtggattaaatttaaatcaggacaaggcgacgaagccgcagacagtacaaatagtacggcaaggcgaggcaacgccgtactggtttaaatttaatccactatatgtggtcgaacagagcttcggtacgctgcaccgcaaattccgctatgcgcgggcagcctatttcgggctgctcaaagtgagtgcgcaaagccacctgaaagcgatgtgtttgaacctgttgaaagcggccaacaggctaagtgcgcccgctgccgcctaa

SEQ ID NO: 60695 - DNA, 582 bp, Neisseria meningitidis
atgaggaatgaggaaaaacgcgccctgcgccgcgaattgcgcgggcggcgttcgcaaatggggcgggacgtgcgggcggcggcaacggtaaaaattaaccgcctgctcaaacgttatatcaagcacggtcggaaaatcggcgtgtattggccgatgggcaaggaattgcgtttggacggctttgtccgcgcggcgcaaaaacgcggcgcaaaactttatctgccttatatcgaaccgcgttcgcggcggatgtggtttacgccgtatcctgaaagcggaatggaacgggagcgcatacggggcagggcgaggttgaacgtgccgcagtttgcagggcgcaaaatccgcgtgcacggtttgtcggtattgctcgttccgcttgtcggcatagaccgcgaaggctaccgtttggggcaggcaggcggctattacgatgcgacgcttgcagcgatgaaataccgtttgcaggcaaaaaccgtgggcgtgggctttgcctgccagttggtggacagactgtcggtcgaggcgcacgacctgccgctggacggttttgtgtcggaggcggggatattgtgtttttag

SEQ ID NO: 60696 - DNA, 702 bp, Neisseria meningitidis; identical to SEQ ID NO: 55714

SEQ ID NO: 60697 - DNA, 156 bp, Neisseria meningitidis; identical to SEQ ID NO: 41797

SEQ ID NO: 60698 - DNA, 2262 bp, Neisseria meningitidis
atgttacaaatcgaaatcgacggcaaacaagtatctgtggagcagggcgcgacggtgattgaagccgcgcacaagctcggtacttatattccgcatttctgttaccacaaaaaactttccatcgccgccaactgccgtatgtgtctggtgaacgtagaaaaagccccaaaacccctgcctgcctgtgccacgccggttacagacggcatgattgtgcgtacgcattcggcaaaagcccgagaggcgcaggaaggcgtgatggagttcctgctcatcaaccatccgcttgattgtccgacctgcgaccaaggcggggaatgccagttgcaggatttggcggtgggctacggaaaaaccaccagccgctacaccgaagaaaaacgttccgtcgtcggcaaagacatggggcctttggtttccgccgaggaaatgagccgctgtatccactgcacccgctgcgttcgtttcactgaagaaatcgccggtttgcaagaaattgcgatggtgaatcgcggcgaacactccgaaatcatgccctttatcggcaaaacggtggaaaccgagctgtcgggcaacgtcatcgatttgtgtcctgtcggcgcattgaccagcaaaccgttccgcttcaacgcgcgtacttgggaattgaaccgccgcaaatccgtttccgcccatgacgctttgggcagtaacctgattgtacaaaccaaagaccataccgtccgccgcgtactgccgctggaaaacgaagcgattaacgaatgctggttgtccgaccgcgaccgttttgcctacgaaggcctgtatcacgaaagccgtctgaaaaacccgaaaatcaaacagggcggcgagtggatggacgtggattggaaaaccgcattggaatatgtccgcagcgcgattgaatgtatcgccaaagacggcaaccaaaaccaagtcggcatttgggcgaacccgatgaatacggttgaagagctgtatctggccaaaaaacttgccgacggcttgggtgttaaaaactttgcaacccgtttgcgtcaacaagacaaacgtctttcagacggcattaagggtgcgcaatggttgggacaaagcattgaatctttggctgacaacgatgccgtattggtagtcggcgcgaacttgcgcaaagaacagccgctcctgaccgcccgcctgcgccgcgccgccaaagaccgtatggccttgagcgtattggccggcagcaaggaagaattgtttatgccgcttctgtttcaagaagccgcacatcccgacgagtgggcaggccgtctgaaaaacctgtctgccaatgcggaacacgccgttaccgccagcctgaaaaacgctgaaaaagcagcggtgattttgggcgcggaagtgcaaaaccatcctgattacgccgccatttatgccgccgcgcaagagctggcagacgcgaccggcgcagtgctgggtattttgccgcaagtcgccaacagcgtcggtgcggatgtcttgggcgtaaactccggcgagagcgttgccgaaatggcaaacgcgccgaaacaggcagtcttgctgctcaacgtcgagccggaaatcgatatggttgacggtgcaaaagccgtggccgcgttgaaacaggcgaaaagcgtgatggcgtttacaccgtttgtcagcgaaacgctgctggacgtgtgcgacgtattgctgccgattgcgccgtttaccgaaacatcgggcagcttcatcaatatggaaggccgtctgcaatcctttcacggcgtggtacaaggcttcggcgattcgcgtccgatgtggaaagtgttgcgtgtattgggcaacctgtttgacctgcaaggttttgaataccacgataccgctgcgattctgaaagatgcgttggatgcggaaagcctgccgtccaaactggacaaccgcagcacatggacaggggagggcgttcagacggcatcagaccgcctcgtccgtgtcggcggcgtcggtatttatcacactgattctatcgtgcgccgttccgcaccgttgcaggcaaccgtccatgccgccgtgcctgccgcgcgtgtgaatccgaacactttgggacgcttgggcctgcaagacggacaaaccgctgtcgccaaacaaaacggcgcaagcgtatcggttgctgtcaaagccgatgccggtttgcctgaaaacgtggtgcatctgccgctgcataccgaaaatgccgcgctgggtgcgttgatggacactattgaactggcgggagcttga

SEQ ID NO: 60699 - DNA, 231 bp, Neisseria meningitidis; identical to SEQ ID NO: 39231

SEQ ID NO: 60700 - DNA, 1581 bp, Neisseria meningitidis
atgtccgtcatcaaacgtgccctgatcagcctgtccgacaaggcaggcgcggtcgaatttgcccaaaccctgcacaagctcggtgtcgaaatcctctccaccggcggcacggcgaaactgcttgccgatgcgggcgttcccgtgattgaagtcgccgactataccggcttccccgaaatgctcgacggccgcgtgaaaacgctgcatccgaaaatccacggcggtattttgggtcggcgcgatttggacgaacacgttgccaagatggaagaacacggtatcggcaacatcgaccttgtgtgtgtcaacctctaccccttcgccgccaccattgccaagcccggctgcacgctggaagacgcgattgaaaacatcgacatcggcggcccgaccatggtgcgttctgccgcgaaaaactggaaacacgtcgccatcgttaccgacacagccgatttcccggccatagctgccgaaatggaagccaacaacggcgcattgagcgacaaaacccgcttcaacctctcacgcaaagcattcagccataccgcccaatacgacggcatgatttccaactacctgacctcgctttcagacgacgtcttgagcggccagccccaaatcggcgaattcccaagtcggttcaaccaaagctggattaaagtgcaagacatgcgctacggcgaaaatccgcaccaacgcgccgcgttctaccgcgatatttaccccgccgcaggcagcctcgctgcatacaaacaactgcaaggcaaagaattgtcctacaacaacatcgccgatgccgatgccgcatgggaagccgtcaaatcctttgacgcaccagcctgtgtgattgtgaaacacgccaatccgtgcggcgtcgccgttgcagccgatacattgaccgcctacaaactcgcctacgtcaccgacaccaccagcgcgttcggcggcatcatcgccttcaaccgcgaagtggacggcgaaaccgtcaaacagattaccgacaaccagtttatggaagtcttgatggcgccgaagtttaccgccgaagccctcgaaatcgccgccgccaagaaaaacgtgcgcgtattggaagtgccgcttgaggcaggcgcaaaccgcttcgaactcaaacgcatcggcggcggactgttggtacaaacccccgacatccaccgcatcagccgcgccgatttgaaagtcgtctccaaacgccaaccgaccgagcaggaatggaacgatttgctgtttgtctggaacgtcgccaaatacgtcaaatccaacgccatcgtcttcggcaaaggcggtcaaacctacggcatcggcgcaggtcaaatgagccgcgtggacagcactcgcatcgccgctcgcaaagcgcaagatgccaatctcgacctcaatggcgcatgtgccgcttccgatgctttcttccccttccgcgacggcgtagatgtcattgccgagcagggcatcaaagccatcatccatccggcaggctccatgcgcgatcaggaagtcttcgacgcagcggacgaacacggcatcgccatggtcgtaaccgacgtgcgccacttccgccattaa

SEQ ID NO: 60701 - DNA, 1044 bp, Neisseria meningitidis; identical to SEQ ID NO: 54262

SEQ ID NO: 60702 - DNA, 324 bp, Neisseria meningitidis
gtgaacattttggcatccgaccgaaattatgaattaaatattgaaatatttattgacaatataattcattttcaaataacagatgaatcttataaagtaaaattttcagaatatttatttgaaaataaagaaaaaaatgattgggatagaaatcctgctataaattattttttcgagataatagatgacagttatatggactggttgaaagaagaaagttttgatttttttgaaaagaaatattataaggcttatattttcttttttagcgattctgtaatagacgttatcagctcgacagaacctgtattttattcaaaataa

SEQ ID NO: 60703 - DNA, 1017 bp, Neisseria meningitidis; identical to SEQ ID NO: 54397

SEQ ID NO: 60704 - DNA, 1536 bp, Neisseria meningitidis; identical to SEQ ID NO: 40021

SEQ ID NO: 60705 - DNA, 366 bp, Neisseria meningitidis; identical to SEQ ID NO: 38043

SEQ ID NO: 60706 - DNA, 747 bp, Neisseria meningitidis
atgaaaagcagcacgcaggccgttttggaacacaccgccattcccaagcatatcgccgtgattatggacggcaacggccgttgggcgaaaaaacgtttcctcccgcgcataatgggacacaaacgcggtttggacgcattggaaaatatggtgaagcattgcgccaaactgggtgtgcaatatctgaccgtgtttgccttttcaaccgaaaactggcgccgccccgaagacgaagtttcgttcctgatggggctgtttttacaggctttgcaaaaacaggtacgccgtctgcacgaaaacaatatgcgcctaaaaatactgggcagccgcgaacgctttaatcggcagattctgcaaggcatcgaagaggcggaagccttgacggcaaacaataccggcctgaccctgagcattgccgccgattacggcggacgttgggatattttgcaggcggcaaacaaactgattgccgaaggcgtatccgagattacggaagacacgctggcgaaacacttgatgctgggcgatgcaccggaaccggatttgttcatccgcaccggcggcgaaacgcgcatcagcaatttcctgctctggcagatggcatatgcagaactgtatttcaccgatattttgtggcccgattttgacggcaaggctttggacgatgccgtcgcttcgttccaaaaacgcgaacggcggttcggacgcacctccgagcaactgcctatcgaacagcaaaggaactga

SEQ ID NO: 60707 - DNA, 735 bp, Neisseria meningitidis
atggcttcgcataatactacacatcagatgaaaacgctgtgttcttcctgttctttgcgggaactctgcctgcctgtcgggctgctgcccaacgagctcagccaactcgatgccgtcatccgtcaaagccgccgcctgaaaaagggcgcatacctgttctgtgtcggcgaagcctttacctcgctctttgccatccgttcgggcttcttcaaaacaaccgtcgccagtcaggacggccgcgatcaggtaacgggtttctttatgtcgggcgaactcatcggcatggacggcatctgttcccatgtgcacagttgcgacgcggtcgccttggaagacagcgaagtgtgcgaactgccgtttacccacatcgaagaactggggcaaaacatccccagcctgcgtacgcacttcttccgcatgatgagccgtgaaatcgtgcgcgaccaaggtgttatgctgctgttgggcaatatgcgcgccgaagagcggattgccgccttcctgctgaacctttcccaacgcctttattcccgaggttttgctgccaacgacttcatcttaagaatgtcccgcgaagaaatcggcagttatctcgggctgaaacttgaaaccgtcagccgcacattatccaagttccatcaggaaggattgatttccgtcgaacacaaacacatcaagatcctcaatctgcaggtgctgaagaagatggtatccggttgttcgcacgccatttga

SEQ ID NO: 60708 - DNA, 279 bp, Neisseria meningitidis; identical to SEQ ID NO: 37465

SEQ ID NO: 60709 - DNA, 867 bp, Neisseria meningitidis; identical to SEQ ID NO: 46579

SEQ ID NO: 60710 - DNA, 2691 bp, Neisseria meningitidis; identical to SEQ ID NO: 55966

SEQ ID NO: 60711 - DNA, 669 bp, Neisseria meningitidis; identical to SEQ ID NO: 51481

SEQ ID NO: 60712 - DNA, 225 bp, Neisseria meningitidis
ttgaaattaccggaagagttttttgatgtgcttcaagaagaggattttgaaatgctgcctataggtctgtttcatgcaaaacaggctggaagccttccggaaatacacaaagaccctttcgataggatgttgattgcacaaacccaagcggaaggctttgaactgatgactgtcgatgaatatattccgcaatatggaattagagttgtcaatgcatcaagctga

SEQ ID NO: 60713 - DNA, 510 bp, Neisseria meningitidis; identical to SEQ ID NO: 36289

SEQ ID NO: 60714 - DNA, 1011 bp, Neisseria meningitidis
atgcttccattccttccagaaccctccctttcctatacgcaacaaaaccgtaccgccgttttgctgttgaacctcggcacgcccgacgcgccgaccgcgcaggcggtacgaccttatctgaagtcctttctgaccgaccggcgcgtcgtcgaactgcccaaatggctgtggtatcccattctgcatggtctggtactgacgttgcgccccaaaaaaagcgcgcacgcctatgaaaaaatctggtttaaggaaggttcgcccctagaagtttacacagcacgccaagctgccgcgcttgccgaacgtatgcccgacctcatcgtccgccacgccatgacctacggcaatccttcggtggcagacgtattgtcggaactgaaggcgcaaggcgcgggcagactgctggtcatcccgatgtacccgcaatatgccgcttccagcagcggagcggcagtagataaggtgtgcgaacaattactgctgcaacggaaccaaatgagcgtccgcaccgtttcgcgcttttatgacgataccggctacattgatgcgatgaaaaaccacatcctccgatattgggcggaacacggacgtgggaaaaaactgatgttgagttttcacggcgtaccgcagaagcactacgacctcggcgacccctatcccgacgagtgccgccacaccgccaaactgcttgccgaagcactggaactgaccgaagaccaatatgtcgtatcgttccaaagccaattcggcagggcaaaatgggttacaccgagcacgcaggatttgttcggcaaactgcccaaacagggggtaaccgagctggacgtattctgcccgggctttttggcagactgtttggaaaccatggaagaaatcgccctgatggggcgggaacagttttacgaagcaggcggcaaaagctaccgctacatcccctgcctcaacgacaaccccgactggatagacgcactcgtcgcacttgccgaagaaaaccttggcggctggcgttga

SEQ ID NO: 60715 - DNA, 564 bp, Neisseria meningitidis; identical to SEQ ID NO: 54577

SEQ ID NO: 60716 - DNA, 531 bp, Neisseria meningitidis; identical to SEQ ID NO: 54201

SEQ ID NO: 60717 - DNA, 372 bp, Neisseria meningitidis; identical to SEQ ID NO: 40198

SEQ ID NO: 60718 - DNA, 225 bp, Neisseria meningitidis; identical to SEQ ID NO: 38642

SEQ ID NO: 60719 - DNA, 645 bp, Neisseria meningitidis
gtgacccgccccgccaaaatcaatacttacacacgcatcatcgacgccagccttgcgcttttcaacgaggaaggcgagcgcaacatcagcaccaaccatattgccgcccacttgggcatcagtccgggcaacctctattaccacttccgcaacaaagacgaaatcatcgtccaactgttcaaacgttacagcgaagccctgctggaatacctcaacgaagccgtgttgccgtctgatgtggaagactccatcaattatatggcgggcatttacgacgtgatgtgggaataccgcttcctattcagcgacgtgaacaccctgcttgcacgcagtgccgaactattgggcgaacacaataccttcacccaagccaaagtctccccgctcttggtcaacctgctgacccagctcaacggtctgaacatcatccaagccgaccaaaccgccatgaacgacctcgccgtcaatatgtggatgatcacgaaatactggttcgacttcgacagctccctgcgcggccgcaccaagctgaccgaagactccaaagcacgcggcgtccgtcgtaccttaagcctccttcgtccttatcttttgcccgaacaccgcgagaaatacgaccggaaaatcggcaacggcaacccgtaa

SEQ ID NO: 60720 - DNA, 831 bp, Neisseria meningitidis; identical to SEQ ID NO: 54954

SEQ ID NO: 60721 - DNA, 201 bp, Neisseria meningitidis
gtggcgcagccacgcacgcggtgttgggtatgcaggctacggcttgctgctgcagaaactcctgaagaaaaagccaaagacgccgctgaagaggctaaagaagaagcaaaagacgccgctgaagaggctaaagaagaagcaaaagacgcagcggaagatgccaaagaagctgctgaagacgctaaagaagaagctaaataa

SEQ ID NO: 60722 - DNA, 354 bp, Neisseria meningitidis; identical to SEQ ID NO: 51512

SEQ ID NO: 60723 - DNA, 492 bp, Neisseria meningitidis
atgaaataccgtcgtttttaccgcaatggcggcacttacttttttacggttgtagccaataaacggcagaagattttgaccgatgatgcggtgcgtttggctttacggcaggcggtaatggcggtgcgcgaacggtatccgtttgaaattttggcatgggtgttgatgcccgaccatctgcataccatatggcggctgccggacaatgattctgcttattcggaacgctggcggcagatcaagcggcacagccaatatttaatcggcggcaaactcaggctttggcaaaaacgcttttgggaacatactatccgcgatgaggccgattttgcctgccattttgattatctgcatttcaatccggtcaaacatggctatgtaggacaaatttccgattggcggttttctacgtttcaccgttatgtcaaacagggtatttatccgcataattggggtggcggcaatgcggacttttctattgaatacgattaa

SEQ ID NO: 60724 - DNA, 327 bp, Neisseria meningitidis
ttgaccggtgcccattacggtttgcgcgattgggtgatgcaacgtgcgactgcggttattatgttgatttataccgttgcacttttagtggttctattttccctgcctaaagaatattcggcatggcaggcattttttagtcaaacttgggtaaaagtatttacccaagtgagcttcatcgccgtattcttgcacgcttgggtgggtatccgcgatttgtggatggactatatcaaacccttcggcgtgcgtttgtttttgcaggttgccaccatcgtttggctggtcggctgtctcgtgtattcagttaaagtgatttgggggtaa

SEQ ID NO: 60725 - DNA, 2427 bp, Neisseria meningitidis
atgtcggcacaaaccgatccgggctactttttcatgcccaaccacattattctgataggcgcgagcgaacgtccgtacagcctgggcgaacgcgtactcagcaacctgctgagtacgccctttcaaggaaaaatcacccccgtaaacccgcgccaccacaccatagccgggcttcccgcctacaccagcctcaacaaaatccccggcaatgcagacctgattattgccgttaccctacccgacagttacgacaccctcttcaaaacctgccgcaaaaagcagctccgacacatcatcctcatacaggactgggacagcctgtctgccgcagaactgcacaccgccgaaactgccatccgcaaacaccacggcaacggactcaacatcaccgcctgcaccaccgcaggcatccaactgccctcactcggactcaacatcagtacccaagacggatacgccgcaggccataccgccatactgaccggcaatgccgccgtcagccgtcaaatcgacaacatcctgaacaaactccgtcaaggcacatctcgccacatcagcctgcatcccggcatcagccccatcacatccgccgattggctcaaccgcttcggacacagcctgcacaccaaaaccgccgtcctacaccacaaccctgaagaggatcagcgcaaactgttcagcgcaatccgccaatttacccgccatacgccgctgattctccacatcacctgccgcacgacagaaaccgaccgtgccgtactgcactgcctcgcccgacactgcaacttcctcatcagtttcaacgccgacgacctcgaagccgcactgcgcgcccaactgtccgacattccacccctgtcccgactcgacatcctgtccgacacgcctgccgaatggctgaacgcgcacgcgccaaaaaccctcgccctccactttcccaaccttccccaccacatccgcaacggacacctgaccggcacacccacaccctcaatctgccacgacatcgcctcacgtcagcttgcccgccccgacacccaagccgtcctgaccatcctcagcccctccggacacgaggattacaaaaaaacagcacgcgcccttatccgcctgtccgaacagaccgccaaacccctgctcgtcagcagccccttttcagacggcataacccatttcgacacccccactcaggcaatccgcaccctttcctaccgcaacaccgccgccgccctgaaacaggcacagctcgacattgcaccgccgcaaccgtgccgtctgaaaacaccgcaaccccaaaacatcaaaaaagcccttgcagcggcaaacccctccctgctcgccgaagccctgcacctccccccctaccggcacaccacccataacgccgtacaattccaattcgacagccaccccctctatggcgacatcctgaccgcacgctgcaacggacaaaccactgccgtactcccgccgtttaccacgctcgacagccgccaccttgcccgctttgccgaactcgacggcacacaaaccctcgaccagttcctgcacacactgaccgtcattcccgaataccgccaacacattctcggcatcaccctcaacctcaacggcggacaatacagcagcgatttcctcttaaagacacccgaaacacacgacacgcccaaacgcaagaacacaggcaaagccgcccaaaccctcgaacatgccgccgcaaaaatgcagagtgccgccgcatacctgaaacacaaaaacccgacagccgccgaatttctccgccacacaagcgaagccgccgcagaactgctcggcagcaaaaccgaaaccggagcagccgtacccaacgtacttgccccctatcccgcagcataccccaaaacactgtccctaagaaacaacacgaccgttaccattacccccattttgcccgaagacgcagaagccaaacagcagttcgtccgcagcctcggtcccgaagcacggtacacacgcttcatgacccacaccaacgaactgcccgcagccacgttggcacgcctgtgcaaccccgattaccactgtgaagccgcatggacggcaaaggatgccgacagcaacatcgtcgccgtcgtccgccacagccgcctgaatcgcaacgaatgcgaattcggcatcacactggcggaacatatgcgcggcagcggactggcacagaaaatgatggaactcatcatccaaaccgccgcacagcaaggctaccggactatgagcgccgacattctcaaaaccaatacccccatgatcaaacttgctgaaaaatcaggatttaccctcaaggaatcggacaccgaaaaaaacctgtaccgcgcatatctgaaccttgcggcagacaaaacaacagaaaaaacaaataaaaacttgcacaccgaccacaaaataacctaa

SEQ ID NO: 60726 - DNA, 786 bp, Neisseria meningitidis; identical to SEQ ID NO: 44566

SEQ ID NO: 60727 - DNA, 735 bp, Neisseria meningitidis; identical to SEQ ID NO: 55585

SEQ ID NO: 60728 - DNA, 309 bp, Neisseria meningitidis; identical to SEQ ID NO: 54941

SEQ ID NO: 60729 - DNA, 792 bp, Neisseria meningitidis
atgattactgtgaacacactgcaaaaaatgaaggcggcgggcgaaaaaatcgctatgctgaccgcttacgaatccagttttgccgcgctgatggacgatgccggcgtggaaatgctgctggtcggcgattctttggggatggcggttcaggggcggaaatcgacgctgcccgtcagcctgcgcgatatgtgttatcacaccgaatgtgtagcacgcggtgcaaaaaatgcgatgattgtcagcgatttgccgtttggtgcatatcagcagagtaaggagcaggcgtttgccgccgctgccgaactgatggctgccggcgcgcatatggttaaactcgaaggcggcgtgtggatggcggaaacgactgaatttttgcaaatgcgcggtattccggtttgtgcgcacatcggtctgaccccgcaatccgtgtttgctttcggcggatataaagttcaggggcgcggcggcaaggcgcaggcgttgcttaacgatgccaaggcgcatgacgatgcgggggcggcggtcgtgctgatggagtgcgtactggcggaactggcaaaaaaggtaactgaaactgtttcctgtccgactatcggtatcggtgcgggtgtggattgcgacgggcaggttttggtgatgcacgatatgctcggcattttcccgggtaagacggcgaaattcgtcaaaaactttatgcaggggcatgatagtgttcaagcggcggttcgggcgtatgttgccgaagtcaaagccaaaaccttccctgctgcggaacatatttttgcagattga

SEQ ID NO: 60730 - DNA, 807 bp, Neisseria meningitidis
atgccgacagttttcatctttttgacggcggtttacgcaggattgggtgcatttgcatggcactgccaacagcaggggcgcggtcgggattacccgtggaagacggaattgccggttttgggcgcggcattgaccgtccacggcgcggcactgctgatgccggtcattcaagacaaaatcatcattatgggcttcgggtattccggcagcctgattgtttggatgatgctgtttatttattttgccggcagcttcttttatccgctgcgcggagtgcagttgctgctgtatccttgcgccgcactgatgctgctgtcaggtttggtttttcctggaaaattctcgggatatgaaattaccgaccttccctttatgctgcatatcggaacttcgctgcttgcatacgggctgttcggcatcgcaacattattgtccgttttgaccctgctgctgaatcgcagcctgcaccgcaggagcttctccaagctcgcaggattcctgccgtcgctgctcagtttggaaaaactcatgttccaggccatgtgggcaggtttcatcctgctgacctattccgtcgtcagcggaacattttttgccgaagccgtattcggcaaacccatgacctttacccataaaaccgtattcggcatattgtcatggctgatttacggcggactgctgctcaagcacagcatgaccgcatggcgcggcaaaaaagccgccgtgtggaccatcatcggatttgtcagcctgatgattgcctatatgggcagcaagttcgtattggaaatcattctgaacagataa

SEQ ID NO: 60731 - DNA, 1629 bp, Neisseria meningitidis
gtgtttatcgaagccgaaaacctcgaagcactgaaaatcctgcaaaaatcctacgccggcagcgtaaagatgatttacatcgacccgccctacaataccggcaacgattccttcgtctatcccgacaaattctccgaaagccgcgaagaatacgcccgccgcgtgggcgataccgacgacgcgggttacctgaagcgcgacggcgtgttccagggcgcgtggcgcaaaaacggcaaagacagtggccattaccacagcaactggctctctatgatgctgccgcgcctgcatctggcgaaaaccctgctgcgcgaagacggcgtgatttttatcagcattgacgacaacgaacaggcgcagttgaaattgttatgtgatgaagtgtttggggcggagaattttgtcggtcagtttccttggcgcaaacgcacggcaaaatcggacgtgccgttcggcgtttccgccgattatgaatatctgcttgcctatgcccgcagtaatgcctttattgccagtatcgatgcggaagaacgcagatattttgaaaccgatgatttcccgaatcgcccgtggcggacgcatgatttgactactcaaagaaatgccagtgaacgaccaaatagttttttcactatggttaatcctaaaacaggcaaagaatatccggcgaatccaaatgcaacttggcgtgttactaaggatacatttcaagaatattacaatgcgggaaaaatcgttttccccgatgattacgatttcctcaaaattaaaaaccccgttatgcgttattttaaagatgacgacatgaagaaagacggagagcgcttcggacgtaaggcagtcagtacacggctacctgaaaatgtaggtatgtcgctgaacggtacaaaagaaattaccgaactgtttaaaagcaagttgtttgattttcccaaaccgtcatccctaattaaatatttactgcaaatcctccatgtttcagacggcctcatcctagacttcttctccggcagcggcaccaccgcccatgccgtgatgcaactgaatgccgaagacggcggcaaccgccgtttcatctgtgtccagctccccgaagaaaccgacgaaaaatctgaagcgcgcaaggcgggtttcgacacgattgccgaaattgccaaagaacgcatccgccgcgcaggcaggcagatttcagacggccttcaagacggatcggaaacagatacgggctttaaagttttcaaacttgccgaaagcggtttcaaacaatggcggcagcccgagcagtccgatacggaagccctgcaacgcgaattgtcgttgaatatcgattctgtgctgtccgaaacgtcgtctgaaaatctgctctacgaattgatgctgcgtatgggcttgaagctgacttgcaaggtttcgtttttagacgacgtatatttcgtggaagacgaggatacgggcgggctgtacgctttcctgctgaaacgcgtggatcaaggtttgattgatgccgtgctggcgaagcatcccgctaaggtggcggcattggacaggctgtttgagggcgacgatgcgcttaaaagcaataccgtattgcagatgaaggatgcgggcgtgatgttcgagtgtgtgtag

SEQ ID NO: 60732 - DNA, 1230 bp, Neisseria meningitidis
atggcgttcggcaaatccttatttcatgcgatcggccgcgtcagcctggtcaggcagattgccgccggtttggcgttgggtatcgtaatcggttcggtttccccgcaactgggcttggcggcaggcttgttcggcagcctgtttgtcggcgcgctcaaagcggtcgcgccggttttggtatttattttggtggcggccacaatcgcgcagcaccaaaaaggcaacaaggcgcatatcaggccgattatcgtcctttacctcatcggtacgttttccgcagccctgaccgccgtcatcgctggtatggttttcccgacgcacattgttttggcgggcgcgggcgatgtgtccgccgcgccgccttccggcattgtggaagtattgaaatcgctgctgatgaacctggtcgccaacccgattaacgcgattgccaatgccaactatatcggcattttggcttgggctttggttttgggcgcggcgttgcggaatcacggttcggacgttacgcggcaggtcgttgccgatttggcggaagcggtttccaccgtcgtgaaatggattatccgttttgcccctttgggcattttcgggctggtgtcgtccacaatcgcggagacgggtttcggcgcgctggcgggttatgcgaagctgcttgcggtactgttgggctgtatggcgtttatcgcgctggtggtcaatcccgccatcgtgtggtggaaaatccgccgcaacccttatccgctggtgtttacctgcctgcgcgaaagcggcgtgtatgccttctttacccgttcttccgccgccaatatccccgtgaatatggctttggcgaaaaaactggggctgcacgaagacacttattcgatttccatcccgttgggggcgaccgtcaatatgggcggcgcggcgattacgattaccgttttggctatggcggcggcgcacacccaaggcatacaggttgattttgccaccgcgctgctgttgagcctggtggcgacggtcagcgcgtgcggcgcgtccggtgtggcaggcggttcgctgctgctgattccgctggcgtgcagcctgttcggcatcagcaacgatgtcgctatgcaggtggtcgccgtcggctttatcatcggcgtgattcaggattcggcggaaacggcgttgaattcttcaaccgacgttttgtttaccgctgccgccgatttgggccgacagagaaaccgggcggaataa

SEQ ID NO: 60733 - DNA, 219 bp, Neisseria meningitidis; identical to SEQ ID NO: 46127

SEQ ID NO: 60734 - DNA, 993 bp, Neisseria meningitidis
atgaaacagaaaatttttgtcctttataccggcggcaccatcggcatgacgcaaagcagcgaaggcctgcgccccgataccgcgctggtcgggcaggcactcgcgccgttttcaaacggcatggatttcgattggcacgtttgtgggacgctgattgattcttccgccgtccaactgcaaaactggtgcgcttggctggacatcattgccgccgcgctgccgcagtacgacggcgttttggtgctgcacggcacggacacgctcgcctataccgccaatctgttcgccctcgccctgcagggtttggacaagccaatcgtcctgaccggctcccaatggccgtacaacgccgtgggcagcgacgcgccgcgcaatctggcgactgccgttgccgcattcccactcggattgaagcagacgcttattgcctttgacggcaaactttatcccgccgtcggcagcagcaaagtcagcaccgaaaccgccgccggtttcgacaatccgcatttcggcgcactggcggagtgggacgaaacccagggctggcacaatgtccgcatcccgaatcaggacgcggcagatgtttcagacggcctcaaaatccgttatcccgacccgcaggcaaaaatcgccgtccgcacgcttatccccggctttgccgtccaagaacttgccgacggactcggacagcttcccgcccacgcccttatcctgcaaagttacggacacggcaacacgcccgcagacgaaggtttcatccgcgccgtgcaagactttacgcagcaaggcaaactgctgctcaacatcagccaagtccgacaaggcagaaccgctgccgtttacgcgcaaggcaacgcgttccgcaactcaggcatcatcaacggcggcaaatgcaatttggaaaccgcaaccgcattgatgacgcttgccgtttctgaaggatggggcgcggacgaggtgaaacacgagttgcagcggttggggctggtgtga

SEQ ID NO: 60735 - DNA, 474 bp, Neisseria meningitidis; identical to SEQ ID NO: 55126

SEQ ID NO: 60736 - DNA, 1311 bp, Neisseria meningitidis
atggacacttcaaaacaaacactgttggacgggatttttaagctgaaggcaaacggtacgacggtgcgtaccgagttgatggcgggtttgacaacttttttgacgatgtgctacatcgttatcgtcaaccctctgattttgggcgagaccggcatggatatgggggcggtattcgtcgctacctgtatcgcgtctgccatcggctgttttgttatgggttttgtcggcaactatccgattgcactcgcaccggggatggggctgaatgcctatttcacctttgccgtcgttaagggtatgggcgtgccttggcaggttgcgttgggtgcggtgttcatctccggtctgattttcatcctgttcagcttttttaaagtcagggaaatgctggtcaacgcactgcctatgggtttgaaaatgtcgattgctgccggtatcggtttgtttttggcactgatttccctgaaaggcgcaggcattatcgttgctaatccggcaaccttggtcggtttgggcgatattcatcagccgtccgcgttgttggcactgttcggttttgctatggtggtcgtattgggacatttccgcgttcaaggcgcaatcatcatcaccattttgacgattaccgtcattgccagcctgatgggtttgaatgaatttcacggcatcatcggcgaagtaccgagcattgcgccgacttttatgcagatggattttgaaggcctgtttaccgtcagcatggtcagtgtgattttcgtcttcttcttggtcgatctgttcgacagtaccggaacgctggtcggcatatcccaccgtgccgggctgctggtggacggtaagctgccccgcctgaaacgcgcactgcttgcagactctaccgccattgtggcaggtgcggctttgggtacttcttccaccacgccttatgtggaaagtgcggcgggcgtatcggcaggcggacggaccggcctgacggcggttaccgtcggcgtattgatgctcgcctgcctgatgttttcacctttggcgaaaagtgttcccgcttttgccaccgcgcccgccctgctttatgtcggcacgcagatgctccgcagtgcgagggatattgattgggacgatatgacggaagccgcacccgcattcctgaccattgtcttcatgccgtttacctattcgattgcagacggcatcgccttcggcttcatcagctatgccgtggttaaacttttatgccgccgcaccaaagacgttccgcctatggtatggattgttgctgtattgtgggcactgaaattctggtatttgggctga

SEQ ID NO: 60737 - DNA, 1386 bp, Neisseria meningitidis
atgatggcaagagacaaccgcatccaaatgtttccgcacgaatggcgcgccagtacgacgctttccggcgtgtacgcgctgcgtatgctgggtatgttcctcgtgctgcccgtattggcggtgtatgccgcctcgctgcccggcgcggaaggcaacaaaacgctggtcgggctggcaatgggcatttacgggctgacacaggctctgctgcaactgcctttgggcatcgcttccgacaagttcgggcgcaagaaaaccatttatgtcgggctgattgtgtttgcagcgggcagcttccttgccgccgccgccgatacgctgcccatgctggtcgccgcacgcgccatacagggtgcgggagcggtcagtgcggcggttaccgcgctgctggcggatttgacgcgcgacggagtacgtacccgcgcgatggcgatgatcggtttgagtatcggtctgacgttttcggtcagcctcgtcgttgcccctgtgattgccgacgcggtgggcgtacgcggcttgtttctgctgaccggtattttgaccgttgccagtatcggcgtggtggcgtggatgactcccgacccggaggtttccaagctgcacgaagatacgcaggcgcagccttcgcgcataggcgaagttttgaaaaaccgtaggctgctgacgctcgatttcggcattttcgccctgcacgccgcgcaaatggcattgtttaccgcgctgccttttgcgatgacgcagctcggtttggaaaaaatccagcattggaaagtctatctgccctcgatcattacgggcttggtggtgatggttccgctgattatcgtcggcgagacgcgcaacaagctcaaacaggtttttgttttgggtatcgtctgtattgcggcggcgcagctcggtttgctgtccggtatgcgctcggtaggcttgattaccgcttatttggttgtttactttatcggttttaatgtgttggaagcgagcctgccgtctatggtttccaaaatcgcgccgtccgacctgaagggtacggcgatgggtgtgtacaacacgatgcagtcgctcggactgtttgccggcggcgcggcaggcggcttgctgtttcaaaaatacggcttttccggcgtgtttgccttttgcagcatattgatgctgctgtggctggtaattgccgttttatcgcctgcgcccaagcccgtcaaaaacctcagttaccctgtcggcggcgtgtggcagggcaatcgggacggtttgcaacgcgccttgtcggagcttgagggcgtggaagacatcggtttcagtttcgacgggcagaccgtctatcttaaagtgttgcagaagggtttcgatcaggctgccgctgaaaaaatcatcacaggagtttaa

SEQ ID NO: 60738 - DNA, 483 bp, Neisseria meningitidis; identical to SEQ ID NO: 54785

SEQ ID NO: 60739 - DNA, 204 bp, Neisseria meningitidis; identical to SEQ ID NO: 55124

SEQ ID NO: 60740 - DNA, 1620 bp, Neisseria meningitidis
atggacaatctcgtatgggacggcgttcccgacatccgcacactcgaccaaaccatccgcaaacacgcacacccgctcaacctgattgtctgcctccccgataatcagattcccgattttcaaaccgcacaagatgcttcggacgcggaatgccgtctgaagcaccgtttggatcaggcaacgcagtgcctccagttcgacagcatcaacctcatcgaacacatcctgcccgatgtccgcttctggctggttcccccttcacgcacccgccgcctgcacgaacacttccaccacatttcctggcagaccgaagccatcccgcaaaccgaaagcaaacccgacaaaccctggtttgcacttccacaaacatccgaacggcaaaaaccggaacacatcctcgttatcggcgcgggcatatccggcgcggcaaccgcccacgccttagcatcacacggcatttccgttaccgtattggaagcccgaaaagccgcccaagccgccagcggcaaccgccaagggctgctctacgccaaaatctcgccgcacgacaccgaacaaaccgaactgctgcttgccggctacggctacaccaaacgcctgctcggacacatcctgcccgaatccgaaacctggggcggcaacggcatcatccacctcaattacagccgcaccgaacaacaacgcaatcacgaattgggtttgcaaaaacaccataaccacctctaccgcagcatcacgcaggcagaagccgaaaaaatcgccggtatcccgctgaacacgccctacgccgaaccattatgcggactgttttggcagcacggcgtatggctcaatctacccgcattcgtccgcgccctcctccgccatccgctgattggactacacgaagacacaccgttaaccggtatttcccacgacggagaaaagtggattgcaagcacgccaaacggcatcttttctgccacacacatcgtctactgcaccggcgcgcacagcccctgcctgcccgaaatcaacctcgccgccctgcccctcaggcaaatacgcggacaaaccggcctcacaccgtccaccccgttttccgaacaactgcgttgcgccgtttcaggcgaaagctacatcagcccgtcgtggcacggactgcactgctacggcgcgagttttattcccaacagcagccataccggatggaacgaagccgaagaagcctcaaaccgccaagcattggcacaccttaaccccgcccttgccgaatcattgtttgccgccaacccaaacccccaaaaataccaagggcacgccgccatacgctgcgacagccccgaccaccttcccctagtcggcgcactcggcgacattgccgccatgcggcagacctacaccaaactcgcgctggacaaaaactaccgcatcgacaccccatgcccatacctgcctaatgcctacgtcaacaccgcccacggcacacgcgggcttgccaccgcccccatctgcgccgccgccgttgcagccgaaatcctaggcttgccccatcccctctcaaaacgcctgcgccacgccctacaccccaaccgcaccatcatccgcgccatcgtcagaaggaaggatctaaccccttaa

SEQ ID NO: 60741 - DNA, 927 bp, Neisseria meningitidis
atgtcagaagtgaaaaaaaccaaagtccacctgatttcaggttttctgggaacaggcaaaaccactgcgctcaaaagcctgatggcgcaaaaagacccgaacgaaaaatgggtcatcatcgtcaacgagttcggcgaaatcggcattgacggcgcggtattgagcgacaacggtatccctgtggcagaaatcgccggcggctgtttgtgttgcaccgccggcccgcaaatgggcgtaaccgtgcagaaaatgctgcgcgacgccaagcccgaccgcctgatgattgaagcaagcggactggctcacgcagccagcgtcatcgacgaactcaaagccaaaccgctggacagccttttggaaatcggcgccgtctttaccgtcgtcaatccgcgccagttcatcaaccccgattacgcgcaacaggcgttgtataaagaccaaatcggcatctgcgacgtattggtcgccagcaaaaccgatttatgcaccaccgaacagcttgccgaatttcacgacaaagcggcaaaactgttcccgcccaaagccaaagtggtcgaagtccaaaacgcacaactcgacatccggtggctcgatattcccgtcatcgaaaaatcacgctaccgcctcaaagccctgccggacaacaccatgggcttccagtcgcaaggtttcacattccccgccggacgcgatttcgacggcgaaaagctgaccaactttttcaacgacctgcccaaaatgaccgaaggactcgtccgcgccaaaggcgtgtttcaagtattgggaacgtgggtgtggctcaactgggtagacggacagtggggcgcgaaccaagtctcatggcggcgcgattcgcgttttgaattgattgccaaatcgtttgatgcggatttaatcgaacaaaaacttaaagatgcattggaatag

SEQ ID NO: 60742 - DNA, 666 bp, Neisseria meningitidis; identical to SEQ ID NO: 37717

SEQ ID NO: 60743 - DNA, 612 bp, Neisseria meningitidis; identical to SEQ ID NO: 55932

SEQ ID NO: 60744 - DNA, 1524 bp, Neisseria meningitidis
atgaccgtcatcaaacaggaagactttatccaaagcatttgcgatgccttccaattcatcagctactaccatcccaaagactacatcgacgcgctctataaagcgtggcagaaagaagaaaaccccgccgccaaagacgcgatgacgcagattttggtcaacagccgcatgtgtgccgaaaacaaccgccccatctgccaagataccggtatcgcgaccgtcttcctcaaagtcggtatggatgtgcagtgggatgcggacatgagcgtcgaagaaatggttaacgaaggcgtgcgccgcgcctacacttgggaaggcaatacgctgcgcgcttccgttctcgccgaccccgccggcaaacgccaaaataccaaagacaacacgcccgccgtcatccatatgagcatcgtgccgggcgacaaagtcgaagtaacctgcgcggcaaaaggcggcggttctgaaaacaaatccaaactcgccatgctcaatccttccgacaacatcgtcgattgggtattgaaaaccatcccgacgatgggcgcgggctggtgtcctcccggcatcttgggcatcggcatcggcggcacgcctgaaaaagccgtgttgatggcaaaagagtccctgatgagccacatcgacatccaagaattgcaggaaaaagccgcgtccggcgcggaattgtccaccaccgaagccctgcgcctcgaactctttgaaaaagtcaacgcgctgggcatcggcgcacaaggtttgggcggtctgaccaccgtgttggacgtgaaaatcctcgattacccgacccacgccgcctccaaaccgattgccatgattccgaactgcgccgccacccgccacgtcgaatttgaattggacggctcaggccctgtcgaactcacgccgccgcgcgtcgaagactggcccgatttgacttacagccccgacaacggcaaacgcgtcgatgtcgacaagctgaccaaagaagaagtggcaagctggaaaaccggcgacgtattgctgttgaacggcaaaatcctcaccggccgcgatgccgcacacaaacgcctcgtcgatatgctcaacaaaggcgaagaattgcccgtcgatttcaccaaccgcctgatttactacgtcggccccgtcgatccggtcggcgatgaagtcgtcggtccggcaggtccgaccacagccacccgcatggacaaattcacccgccaaatgctcgaacaaaccggcctcttgggcatgatcggcaaatccgaacgcggcgcggcggcgtgcgaagccatcgccgacaacaaagccgtgtacctgatggcggtcggcggcgcggcatacctcgtggcaaaagccatcaaatcttccaaagtcttggcgttccccgaattgggtatggaagccatttacgaatttgaagtcaaagatatgcccgtaaccgtcgccgtagacagcaaaggcgaatccatccacgccaccgccccgccccaatggcaggcgaaaatcggcatcatccccgtcaaatcttga

SEQ ID NO: 60745 - DNA, 699 bp, Neisseria meningitidis; identical to SEQ ID NO: 54590

SEQ ID NO: 60746 - DNA, 540 bp, Neisseria meningitidis; identical to SEQ ID NO: 47703

SEQ ID NO: 60747 - DNA, 1296 bp, Neisseria meningitidis; identical to SEQ ID NO: 55228

SEQ ID NO: 60748 - DNA, 951 bp, Neisseria meningitidis
atgaaattacaacaattgaaatacgccttagaagtttaccagcacaacctgaacgtttccgaagcggccgaagccttgtttacttcgcaacccggcatctccaaacaaatcaaattgctggaagaagaaatcggcattcagatttttatccgcagcggcaagcgcgtggtttcggtctcgcagccgggcaaggtggttttggatattgcggaacgtattttacgcgatgtacagaacattaaaaatatcggcagcgagtttaccggacaggacagcggttcgctgacggttgccacgacgcatactcaggcacgctatgccctacccttgattgttgccgattttgtgaaacgctatccgaaagtcaacctgaccatcaaacaggggagccctgccgccatcgcacgtatggttacctcaggcgaggcggacttggcgattgttacggaacggatagacgaccatcccgaactgggaaaacttccctgctatgactggactcatgcggttatcgtaccgaacgaccaccccttgctcgaatgcagaaaccccctccgcattgaagatttggcaagatttccactaattacctatgaatttgcattcaacacgggcagcagcattgcacgggcattcgccaaagctcgtttggaacaacccgatgtcgcattggctgcggcagatacggacgtattgaagacttatgtgcgcttgggtttgggcgtgggactgatggcgaaaatggcgtacaacccggatacggacggcgatttgcagcttgtggatgcggcacacctgttcgagccgtcgccgacgtggattgctttgcgcagcgatacttatttgcgcggatatgcctacgactttatccaagcgtttgcgccgcacctgacacgcgagaaggtggataggattctgtacacgcccatcagcgaggatttttcgatttag

SEQ ID NO: 60749 - DNA, 1089 bp, Neisseria meningitidis
ttgataaccggcacgcccggttcagggaaaacattaaaaatggtttccatgatggcgaatgatgaaatgtttaagcctgatgaaaacggcatacgccgtaaagtatttacgaacataaaaggcttgaaaataccgcacacctacatagaaacggacgcaaaaaagctgccgaaatcgacagatgagcagctatcggcgcatgatatgtacgaatggataaagaagcccgaaaatatcgggtctattgtcattgtagatgaagctcaagacgtatggccggcacgctcggcaggttcaaaaatccctgaaaatgtccaatggctgaatacgcacagacatcagggcattgatatatttgttttgactcaaggtcctaagcttctagatcaaaatcttagaacgcttgtacggaaacattaccacatcgcttcaaacaagatgggtatgcgtacgcttttagaatggaaaatatgcgcggacgatcccgtaaaaatggcatcaagcgcattctccagtatctatacactggataaaaaagtttatgacttgtacgaatcagcggaagttcataccgtaaataaggtcaagcggtcaaagtggttttacactctgccagtaatagtattgctgattcccgtgtttgtcggcctgtcctataaaatgttgagcagttacggaaaaaaacaggaagaacccgcagcacaagaatcggcggcaacagaacagcaggcagtacttccggataaaacagaaggcgagccggtaaataacggcaaccttaccgcagatatgtttgttccgacattgtccgaaaaacccgaaagcaagccgatttataacggtgtaaggcaggtaagaacctttgaatatatagcaggctgtatagaaggcggaagaaccggatgcgcctgctattcgcatcaagggacggcattgaaagaagtgacggagttgatgtgcaaggactatgtaaaaaacggcttgccgtttaacccatacaaagaagaaagccaagggcaggaagttcagcaaagcgcgcagcaacattcggacagggcgcaagttgccacattgggcggaaaaccgtag

SEQ ID NO: 60750 - DNA, 516 bp, Neisseria meningitidis
atgaaacgcgccaaacaatatccttttttatccttacagcgacaacgttttcatctgaactttgaaaacgcttcttccaccgccaaccttccgagcgaacgcgatttctaccgctgggcgtggtctgccttgaaaaatgaataccgccgcgccgacatcagcctgattcttctggacgaagaagaagcccgcgcttacaaccgcgactaccgcggcaaagattacgccaccaatgtattgagtttcgcgctcaacgaaggcgaaatcctgccctgccaagtttcggaaaaactgtacggcgatttgattatctgcccgcaagtggttttgaaagaagccgccgaacagggcaaaacgcccgaacggcattttgcccacctgaccatacacggcgttttgcacctgatgggctacgaccacatcgaagacgatgaagccgaaataatggaagccgaagaaatccgcctgatgctggcggcaggcttccccaacccctaccaagaggacgaatattaa

SEQ ID NO: 60751 - DNA, 192 bp, Neisseria meningitidis; identical to SEQ ID NO: 42043

SEQ ID NO: 60752 - DNA, 873 bp, Neisseria meningitidis; identical to SEQ ID NO: 54212

SEQ ID NO: 60753 - DNA, 492 bp, Neisseria meningitidis; identical to SEQ ID NO: 54727

SEQ ID NO: 60754 - DNA, 1362 bp, Neisseria meningitidis
atgctgaaaaaagttttaatcgccaaccgaggcgaaatcgcattacgcgtactccgtgcctgccgcgaaatgggcattgccaccgtcgccgtgcattccgaggccgacaaagacagcctgcacgtcaaactcgccgacgaatccgtgtgcatcggccctgccgcttccgcgcaaagctaccttaacgtccccgccattatcgccgccgccgaagtaagctgcgcggacgctgtccatccgggctacggtttccttgccgaaaacgccgatttcgccgaacaggtcgagcagtccggctttacctttatcggcccgaaacccgacaccatccgcctgatgggcgacaaagtctccgccaaacacgcgatgatagcggcaggcgtaccctgcgtccccggttctgacggcgcattgcccgacgacggcgaagaaatcctcaaaatcgccgataaagtcggttatcccgtcattatcaaagcctctggcggcggcggcggtcgcggtatgcgcgtggtcgagaaaaaagaagacctcctccaatctgtcgaaatgaccaaggcagaagcaggcgcggcattcggcaacccaatggtttacatggaacgctatctgcaacgtccgcgccacgtcgaaatccaagtgattgccgacgaacacggcaacgccgtatatcttgccgagcgcgactgttcgctgcaacgccgccaccaaaaagtcatcgaggaagcaccggctccgttcatcactgaagaagaacgcgccaaaatcggcaacgcctgtgccgacgcctgcaaacgcatcggctaccggggcgcgggtacgtttgagtttttatacgaagacggcgaatttttctttatcgagatgaacacgcgcattcaggtcgagcatccggttaccgaactcatcaccggcgtggacatcgtacaagagcaactccgcatcgcatccggcctgcctttgcaatacaaacaaaaggatattcaagtcgaaggccacgccttcgagtgccgcatcaatgccgaagacccgtacaacttcatcccaagcccgggcccgattgaaagctgccacctgcctggcggcttcggcatccgcgtagacagccacatctaccaaggctaccgcatcccgccttactacgacagcctgatcggcaaaatctgcgtacacggcaaaacccgcgaacaggcaatggcaaaaatgcgcgtcgccctcgccgagctggcaattaccggcatcaaaaccaatacgccgcttcaccgcgacctgttcgccgatgcgggtttccaaaaaggcggcgtcagcatccactatttggaacactggctggaagatcgcaaagccaaacaggacaagtaa

SEQ ID NO: 60755 - DNA, 2847 bp, Neisseria meningitidis
atgtgcaaccatcatccccgacattcgcacgacaacgacaccatccgcatacgcggcgcacgcacgcataatttgaaaaacatcgatttggacattccgcgccacaagctcgtggtcataacaggattgtcaggcagcggcaaatcatcgctggcatttgacacgctgtatgccgaagggcagcggcgttatgtcgagagcctttccgcctatgcccgtcaatttttacagatgatggacaaacccgatgtcgatttgatcgaaggcctctcgcccgcgatttccatcgagcaaaaatccaccagccacaatccgcgttccaccgtcggcacggtaactgaaatccacgattacctgcgccttttgtacgcccgcgtcggcacgccgtattgccccgaacacaatctgccgctatccagccagaccgtgtcgcagatggttgatgccgtgttgaagctgccggaagacacgcgcgtgatgattctggcgccggcggtacgcgagcgtaaaggtgagtttgtcgatttctttgccgacttgcaggcgcagggctttgcacgggtgcgagtggacggcgaggtctatcagcttgacgaagtgccgaagctggaaaaaaacatcaagcacaatatcgatgtcgtcatcgaccgcgtgaaagtaaaagctgacatcaagcaacggctggcagaaagttttgaaaccgctctgcgccacggcaacgaacgcgcactggcgatagagatggacagcggcgaagagcattggttttccgcgcgtttcgcctgccccgtatgttcgtacagcctgcccgaattggagccgcgcctcttttcgttcaacaacccgatgggctcctgcccgacttgcgacggcttgggtaacaccaatttcttcgactccgaaaaagtggtcgcgcatcccgaattgtcgctggcttcgggcgcgattgacggctgggacaagcgcaaccagttctatttccaaatgattcagtcgctggcgcggcattacggtttcgacgtgcaggctgcttgggaaaccctacctgcaaaaatcaaaaaagtcgtgttgcacggctcgggcaaagaagtcattgatttcacttacctgtccgaacgcggcaccaccttcaaccgcagccacgccttcgaaggcatcatccccaatctcgaacgccgctaccgcgaaaccgacagcgaaaccgtgcgcgaaaaactgcgcgaataccaaaaccaccgcgcttgcccgagctgcggcggcgcacgtttgcgcaaagaagcccgctacgtttacgtcggcggcgagccgttgcacgaagtttccgcctggccgctgaccaaaacccaccgattctttgaaacgctggatttggacggcaacaaaaaacaaatcgccgaaaaaatcctcaaagaaatcaccgaacgtctcggctttttgattaatgtcgggctggattacctgaatctctcccgttccgccgaaaccctttccggcggcgaagcccagcgcatccgcctcgccagccaaatcggcagcggcctgaccggcgtgatgtacgttttggacgaaccctccatcggcctgcaccagcgcgacaacgaccgcctgcttgccaccctcaaacgcctgcgcgatttgggcaacagcgtcatcgtggtcgaacacgacgaagacgccatccgcgaagccgatttcgtcgtcgatatgggcccgggcgcaggcgaacacggcggcaacgtattgattgccgacacgcccgaaaacgtcgccaaatgcgaaaactccgttaccggacaatacctcagcggcaaaaaatccattgccgtgccgtctgaacgcacgccagtcaatcccgaccgaatgctcgtcctcaaaggcgcgcgcggcaacaacctcaaaaacgttacccttgagctgccgctcggtttgattacctgcatcaccggcgtatccggcagcggcaaatccaccctgattaacgacaccctcgccaaaatcaccgcccgcgaactcaaccgcgcccaagaagaacccgccccatacgacgacatccgcggcctcgaacacctcgacaaagtcatcaacgtcgaccaatcccccatcggccgcaccccgcgctccaaccccgccacctacaccggcctgttcacccccatccgcgaactcttcgccggtgtacccctctcgcgcgaacgcggctacaacgtcggcagattctccttcaacgtcaaaggcggccgctgcgaagcctgccaaggcgacggcgtcatcaaagtcgaaatgcacttcctgcccgacgtgtacgtcccctgcgaagtctgccacggcaaacgctacaaccgcgaaacgctcgaaatccaatacaaaggcaaaaacatcagccaagtcctcgacatgaccgtcgaagaagcccgtgaatttttcgacgccgtccccaccgtatcgcgcaaactgcaaaccttgatggacgtaggcttaggctacatccgtctcggccaatccgccaccaccctctccggcggcgaagcccagcgcgtcaaactcgccttggaactctccaaacgcgacaccggcagaacgctctacatcctcgacgaacccaccaccggcctacacttcgccgacatcgccctgctgctggaagtcatagaccgtctgaaaggcaaaggcaactcgatagtgattatcgagcataatctggatgtgattaaaaccgccgattggattgtggacttagggccagaaggcggcgacggcggagggaggattattgcttcaggtagcccggaggaagtggcgaaggttaaggggagttatactgggaagtatttgaagaatatactttaa

SEQ ID NO: 60756 - DNA, 603 bp, Neisseria meningitidis; identical to SEQ ID NO: 54300

SEQ ID NO: 60757 - DNA, 351 bp, Neisseria meningitidis; identical to SEQ ID NO: 54616

SEQ ID NO: 60758 - DNA, 2376 bp, Neisseria meningitidis
atgaataaaaatattaaatctttaaatttacgggaaaaagacccgtttttaagtcgtgaaaaacagcgttatgaacatcctttgcccagtcgggaatggataatcgagctgcttgaacgtaaaggcgtaccatccaagattgaagctttggtacgcgaattgtcgattaaggaagaagagtacgaatttttcgaacgtcgtctgaaggcgatggcgcgggacggtcaggttttaatcaaccgtcggggcgcggtttgcgcggcggacaaattggatttggtcaaatgccgtgtcgaggcgcacaaagacggcttcggtttcgccgtgccgctcacgcccgccaaagacggtgattttgttttgtacgaacgccagatgcgcggcattatgcacggcgatattgtcactgttcgtcctgccggcatggaccgtaggggccgccgcgaagggacggttctggatattgtcgaacgcgcgcaaagcaaagttgtcggccgtttctatatggataggggcgtggcgattttggagccggaagacaagcgtctgaaccaaagcatcgtattggaaccggacggcgtggcgcgtttcaaacctgaatccggtcaggtcatcgtcggcgaaattgaggtttatcctgagcaaaaccggccggcagtggcaaaaatcatcgaagttttgggcgattatgccgacagcggcatggagattgaaattgccgtgcgcaagcatcatttgccgcaccaattcagtgaagcgtgtgccaaagccgcgaaaaaaattcccgaccatgtacgcaaaagcgatttgaaaggccgcgtcgatttgcgcgatttgcctttggtaacgatagacggcgaaacggcgcgcgattttgacgatgccgtgtttgccgaaaaaatcggacgcaattaccgtctggtcgtggcgattgccgatgtcagccattatgtccgccccgatgacgctatcgacacggacgctcaggaacgcagcaccagtgtttacttcccgcgccgcgtgattcccatgttgccggaaaacctgtccaacggcatctgctcgctcaatcctaatgtcgagcgtttgtgtatggtgtgcgatatggtcatcacttacgcgggcaatattaaagaataccgcttctaccccgccgtgatgcgctctcatgcccgcctgacctacaaccaagtttggaaatggctttcagacggcatcgggcatccgttcaaagcacaaatcgacacgctttacaaactcttcaaaatccttcagaaaaagcgtttcgaacgcggggcggtggagtttgacagcatcgaaacccaaatgcttttcgacgacaacggtaaaattgaaaaaatcgtccccgttgtccgcaacgatgcccacaagctgattgaagaatgtatgttggcggcaaacgtttgcgcagcggattttctgttgaaaaacaagcataccgcattgttccgcaaccatttggggcccacgcccgaaaaactcgccgccttgcgcgagcagctcggtctgttggggcttcaacttggcggcggcgacaacccgtcgccgaaagactatgccgcgcttgccggacagttcaaaggcaggccggatgccgaattgctgcaagtcatgatgttgcgctccatgcaacaggcggtttacgaaccgcattgcgacggacactttggtcttgcctacgaagcatacgcccacttcacctcgcccatccgccgctatcccgacctgaccgtacaccgcgccatcaaagccgtgttgaatcagcaaacctacacgccaaaaaaaagctggcaggctttgggcgtgcatacctcgttctgtgagcgccgtgccgacgacgccagccgcgacgtggaaaactggctgaaaacctattatatgcgcgataaggtcggcgaagtattcgaaggtaaaatctccggcatgaccagttttggtatctttgtaacactggacggcatccacattgacggcttggtgcatatcagcgatttgggcgaagactatttcaacttccgccccgaaatcatggcaatcgaaggcgaacgcagcggcatccgtttcaacatgggggacagggttgccgtccgggtcgcccgtgccgatttggatgatggaaaaatcgattttgtcctgattgccgaggggagcggcagggggcggaaagttaaatcatccgcgtctgccaaaccggcagggacggcggggaaagggaaaccgaaaaccgccgccgagaaaaaaacagcccgaggcggcaaagtaaggggaaggggcgcgtctgccgccgcagaatcggggaaaaaggcaaagaaaccggttccgattaaggtaaaaaaacggaaaggcaaatcataa

SEQ ID NO: 60759 - DNA, 1839 bp, Neisseria meningitidis
atgtgcggtatcgtcggcgccatccgcgcccatcacaacgtcgtcgattttctgaccgacggcctcaaacgcctcgaataccggggttatgactcatcaggtattgccgtcaacaccgacggcaaaatcaaacgcgtgcgccgcgtcggacgcgtgcagcttatggaggacgctgcccgtgaaaaaggaatagcgggcagcatcggcatcggacatacgcgttgggcgacacacggcggcgttaccgagccgaatgcccatccgcatatttccggtgggatgatagccgtcgtccacaacggcatcatcgaaaactttgaaagcgaacgcaaacgcttggaaggtttgggataccggtttgaatcgcaaacggataccgaagtcatcgcacacagcatcaatcacgaatacgcgcaaaacggcggcaggctgtttgaagcggtacaggaagcggtcaaacgtttccacggcgcatacgccatcgcggttattgcccaagacaagcctgatgaattagttgtggcgcgtatgggctgcccgcttttggtcgctttgggcgacgatgaaacctttatcgcttcggacgtatccgccgtcatcgcctttacgcgccgcgtggcgtacctcgaagacggcgacatcgcgctgctggcttcagacggcatcaaacggctgaccgataaaagcggcctgcctgccgaacgcaaagtcaaggtatccgaactctcgctcgcctctttggaactgggaccgtacagccactttatgcaaaaggaaatccatgagcagccgcgcgcgattgcagacacggcggaggttttcctcgacggcggcttcatccccgaaaacttcggcaaaaacgccaaaagcgtgtttgaaagcatccgcagcgtcaaaatccttgcctgcggcacgtcctattacgccgcgctgaccgccaaatattggttggaatccatcgccaaaatcccggccgatgtcgaaatcgccagcgaataccgataccgcagcgtgattgccgatccggaccaactggtcattaccatttcccaatccggcgaaacgctggacacgatggaggcgttgaaatacgcaaaatccttgggacaccgccacagcctctccatctgcaacgtgatggaatccgccctgccgcgcgaaagcagcctcgtgctttatacccgtgccggtgcggaaatcggcgtcgcctcaaccaaagcatttaccacgcagctggttgcgctgttcggtttggcggtaacgctggcgaaagtgcgcggtttggtttccgaagaagacgaagcacgttacaccgaagaactccgccagcttcccggcagcgtgcagcacgctttaaacctcgaaccgcaaattgccgcctgggcgcaacagtttgccaagaaaaccagcgcgctgtttttggggcgcggcatccattacccgattgccctcgaaggcgcgttaaaactgaaggaaatcacctacatccacgccgaagcctatcctgccggcgaactgaagcacgggccgcttgccttggtggacgaaaacatgcccgtcgtcgtcatcgcacccaacgacagcctgttggacaaagtcaaagccaatatgcaggaagtcggcgcgcgcggcggcgaacttttcgtctttgccgacctcgacagtaattttaatgccaccaaaggtgtgcacgttatccgcgcaccgcgccacgtcggcaaactgtcccccgtcgtgcatactatccccgtgcagctcctcgcctaccacaccgccctcgcacgcggtaccgatgtggacaagccgcgcaacctggcgaaatccgtaaccgtcgaataa

SEQ ID NO: 60760 - DNA, 657 bp, Neisseria meningitidis
atgactattaaaattattctgatagacgaccataccctcttccgcagcggcattaaagcccttttgtcgcgccaacacggttttgaagtcatcggcgaagccgcagacggcctctcgggcatcaaaatgattagtcggctgcaacccgatgtcgtcctgctcgatttgaatatgcccggcatgaacggacgcgaagcactctcccaaatcatcagcatcaatccgcagcaggcagtgattatgctgaccgtttccgaagacagcgacgacttgaccgaatgtattcgcatcggcgcgcgcggttacctgctgaaaaacatcaacgctgactttctgctcgaaagcatacgcaaagccgccgaaggcgataatgtattctcgcccgagatgaccgccaaactcgttaaaagcctgatttccccccaacctgcccaagggacacaggcactctcctcacttacccctcgcgaactggaaatcttgggctatctcgccgcaggacacagcaacaaaatcatcgcccgccacctcgatcttgccgaatccaccgtcaaagtccacgttcaaaacctgctccgcaaactcaacctcagcagccgggtgcaggccgccgtttacgccatccggcacaacgtcccccaacctgtgccggaataa

SEQ ID NO: 60761 - DNA, 822 bp, Neisseria meningitidis; identical to SEQ ID NO: 58515

SEQ ID NO: 60762 - DNA, 2229 bp, Neisseria meningitidis
atgtgttctgctgttttatttatatatttctttctactgaatatattccttttccagccagccgttatccacatccaatctaactatattttatttatgtctatcgtatccgcaccgctccccgccctttccgccctcatcatcctcgcccattaccacggcattgccgccaatcctgccgatatacagcatgaattttgtacttccgcacagagcgatttaaatgaaacgcaatggcttttagctgccaaatctttgggattgaaggcaaaggtagtccgccagcctgtcaaacgtttggctatggcgactttacccgcattggtatggtgtgatgacggcaaccattttattttggctaaaacagacggtgggggtgagcatgcccaatatctaatacaggatttaactacgaataagtctgcggtattgtcttttgccgaattttctaacagatattcgggcaaactgatattggttgcttcccgcgcttcggtattgggcagtttggcaaagtttgactttacctggtttattccggcggtaatcaaataccgccggttgttttttgaagtattggtggtgtcggtggtgttgcagctgtttgcgctgattacgcctctgtttttccaagtggtgatggacaaggtgctggtacatcggggattctctactttggatgtggtgtcggtggctttgttggtggtgtcgctgtttgagattgtgttgggcggtttgcggacgtatctgtttgcacatacgacttcacgtattgatgtggaattgggcgcgcgtttgttccggcatctgctttccctgcctttatcctatttcgagcacagacgagtgggtgatacggtggctcgggtgcgggaattggagcagattcgcaatttcctgaccggtcaggcgctgacttcggtgttggatttggcgttttcgtttatctttctggcggtgatgtggtattacagctccactctgacttgggtggtattggcttcgttgcctgcctatgcgttttggtcggcatttatcagtccgatactgcggacgcgtctgaacgataagttcgcgcgcaatgcagacaaccagtcgtttttagtagaaagcatcactgcggtgggtacggtaaaggcgatggcggtggagccgcagatgacgcagcgttgggacaatcagttggcggcttatgtggcttcgggatttcgggtaacgaagttggcggtggtcggccagcagggggtgcagctgattcagaagctggtgacggtggcgacgttgtggattggcgcacggctggtaattgagggcaagctgacggtggggcagctgattgcgtttaatatgctctcgggacaggtggcggcgcctgttatccgtttggcgcagttgtggcaggatttccagcaggtggggatttcggtggcgcgtttgggggatattctgaatgcgccgaccgagaatgcgtcttcgcatttggctttgcccgatatccggggggagattacgttcgaacatgtcgatttccgctataaggcggacggcaggctgattttgcaggatttgaacctgcggattcgggcgggggaagtgctggggattgtgggacgttcggggtcgggcaaatccacactcaccaaattggtgcagcgtctgtatgtaccggagcagggacgggtgttggtggacggcaacgatttggctttggccgctcctgcctggctgcggcggcaggtcggcgtggtcttgcaggagaatgtgctgctcaaccgcagcatacgcgacaatatcgcgctgacggatacgggtatgccgctggaacgcattatcgaagcagccaaactggcgggcgcacacgagtttattatggagctgccggaaggctacggcaccgtggtgggcgaacaaggggccggcttgtcgggcggacagcggcagcgtattgcgattgcccgcgcgttaatcaccaatccgcgcattctgatttttgatgaagccaccagcgcgctggattatgaaagtgaacgagcgattatgcagaacatgcaggccatttgcgccaaccggacggtgctgattatcgcccaccgtctgtccaccgttaaaacggcacaccggatcattgccatggataaaggcaggattgtggaagcgggaacacagcaggaattgctggcgaagccgaacggatattaccgctatctgtatgatttacagaacgggtag

SEQ ID NO: 60763 - DNA, 1185 bp, Neisseria meningitidis; identical to SEQ ID NO: 37431

SEQ ID NO: 60764 - DNA, 942 bp, Neisseria meningitidis
atgaaaaccctgctcctcctcatccccctcgtcctaaccgcctgcggcacactgaccggcatacccgcccacggcggcggcaaacgctttgccgtcgaacaggaactcgtcgccgcatcgtcccgcgccgccgtcaaagaaatggacttgtccgccctgaaaggacgcaaagccgccctttacgtctccgttatgggcgaccaaggttcgggcaacataagcggcggacgctactctatcgacgcactgatacgcggcggctaccacaacaaccccgaaagtgccacccaatacagctaccccgcctacgacactaccgccaccaccaaatccgacgctctctccagcgtaaccacttccacatcgcttttgaacgcccccgccgccgccctgacgaaaaacagcggacgcaaaggcgaacgctccgccggactgtccgtcaacggcacgggcgactaccgcaacgaaaccctgctcgccaacccccgcgacgtttccttcctgaccaacctcatccaaaccgtcttctacctgcgcggcatcgaagtcgtaccgcccgaatacgccgacaccgacgtattcgtaaccgtcgacgtattcggcaccgtccgcagccgcaccgaactgcacctctacaacgccgaaacccttaaagcccaaaccaagctcgaatatttcgccgttgaccgcgacagccggaaactgctgattgcccctaaaaccgccgcctacgaatcccaataccaagaacaatacgccctctggatgggaccttacagcgtcggcaaaaccgtcaaagcctcagaccgcctgatggtcgatttctccgacatcaccccctacggtgacacaaccgcccaaaaccgtcccgacttcaaacaaaacaacggtaaaaaccccgatgtcggcaacgaagtcatccgccgccgcaaaggaggataa

SEQ ID NO: 60765 - DNA, 132 bp, Neisseria meningitidis; identical to SEQ ID NO: 38518

SEQ ID NO: 60766 - DNA, 1185 bp, Neisseria meningitidis
atgggcaaacatattcttttaggtgtaacgggcagtattgcggcgtataagtcttgcgagttggtgcgactgctgaaaaaacaggggcattcggttacggtggttatgagccgctcggcaactgaatttgtttctccgctgacttttcaggctttaagcggcaatcctgtcctgaccgacacgcacggcggcaacggttcaaacggtatggaacatatcaacctgacccggaatgcggatgtttttctgattgcgccggcaagtatgaataccgtggcaaaaatctgtaacggcgtggcagataacctactgaccagtctggcagccgcacggaaatgtccgcttgccatcgctcccgcgatgaatgtggaaatgtggctcaaccctgccaaccaacggaatatcgcacaactggtttcagacggcattactgtctatatgccgggcttgggcgaacaggcttgcggagaaaatggcatgggaaggatgccggaacctgccgaattgctggatttgcttccggacttgtggacaccgaaaattttaaggggcaagaaaatcttgattaccgcaggtgcgacatttgaagccattgaccctgtcaggggcatcacaaatacctccagcggaaaaatgggggtagctttggcgcgggcgtgccgtgccgccggtgcggaagtcagcctgattcacggacagcttcaaaccgcgctgcctttcggcatatccgatacggttcaagccgtcagcgctgaagatatgcatcgcgcagtgcatcgtttaatcgacaaacaagatgcttttatttctgttgccgccgtctcagactataaggttaaaaacaggagtacgcaaaaattcaaaaaagataaaaatgccaaaccgttatccatcgaattggatgagaaccccgatattttggcttctattgcctcattgccgaacccgccgttctgcatcggttttgccgctgaaacggagaatgtaatggcatatgcgcgagaaaaacgtattaagaaaaaaataccagtgatcgttgccaatgatgtttcaatcgcgatgggcaaaccgaccaaccggattaccattatcggggacgacgaggaactgtcttttcccgaaacaagtaaagatgaagcggcaatgcagattgttgaaaggcttgccgtatatttgaacaaataa

SEQ ID NO: 60767 - DNA, 864 bp, Neisseria meningitidis; identical to SEQ ID NO: 49566

SEQ ID NO: 60768 - DNA, 1884 bp, Neisseria meningitidis
ttggccatttccgaaaacggtcaaaccaaagtgatcgaaaacgcagaaggcgcacgcaccacgccgtccgttatcgcttatttggacggcggcgaaatcctcgtcggtgcgcctgccaaacgccaagccgtaaccaacgctaaaaacaccatttacgccgccaaacgcctgatcggccacaaatttgaagacaaagaagtccaacgcgacatcgaatctatgcctttcgaaatcatcaaagccaacaacggcgacgcatgggtaaaagcacaaggcaaagagctgtctcctcctcaaatttccgcagaagtcctgcgtaaaatgaaagaagccgccgaagcttacttgggcgaaaaagtaaccgaagccgtgattaccgtccctgcctacttcaacgacagccaacgtcaagccaccaaagacgcaggccgtatcgccggtttggacgtgaaacgcatcatcaacgagccgaccgcagccgctttggcattcggtatggacaaaggcgacaacaaagaccgcaaagtagccgtatatgacttgggcggcggtactttcgatatttccatcatcgaaatcgccaacctcgacggcgacaaacaattcgaagtattggcaaccaacggcgataccttcttgggcggtgaagacttcgaccaacgcctcatcgaccacatcatcgccgagttcaaaaaagaacaaggcattgatttgaaacaagacgtgatggctctacaacgcctgaaagaagctgccgaaaaagccaaaatcgaattgtccagcggccagcaaaccgaaattaacctgccgtacatcaccatggacgcaaccggcccgaaacacttggcgatgaaaattacccgcgccaaattcgaaagcctggttgaagacctgattacccgctctatcgaaccttgcaaaattgcattgaaagatgccggcttgagcaccggcgacatcgacgacgtaatcttggtcggcgggcagtcccgtatgccgaaagtacaagaagccgtgagagacttcttcggcaaagaaccgcgcaaagacgtgaaccctgacgaagccgttgccgtaggcgcagcgatccaaggcgaagtattgagcggcggccgcagcgacgtattgctactggacgtaactcctctgtctttgggtatcgaaaccatgggcggcgtgatgaccaaactgattcagaagaacaccaccatcccgaccaaagcatcgcaagtgttctctaccgccgaagacaaccaaagcgcagtaaccatccacgtactgcaaggcgaacgcgaacgcgcttctgccaacaaatctttgggtcagttcaacttgggcgacatcgcacctgcaccgcgcggtatgccgcaaatcgaagtaaccttcgacatcgacgccaacggcatcctgcacgtttccgccaaagacaaaggcaccggtaaagcagccaacatcaccatccaaggttcttcaggtttgagcgaagaagaaatcgaacgcatggtgaaagatgccgaagccaatgccgaggaagataaaaaactgactgaattggtcgcttcccgcaaccaagccgaagccctgattcactctgtgaaaaaatctttggccgactacggcgacaaactcgacgcagccgagaaagaaaaaatcgaagccgcgctgaaagaagccgaagaagcagttaaaggcgacgacaaagccgctatcgatgccaaaaccgaagcactgggcacagccagccaaaaactgggggaaatggtttacgctcaagcacaagctgaagcccaagcaggcgaaagcgaacaagccaatgcttctgcaaagaaagacgatgatgtcgtagatgccgactttgaagaagtaaaagacgacaaaaaataa

SEQ ID NO: 60769 - DNA, 1311 bp, Neisseria meningitidis
atgccgtctgaaagcaaacccgtgtcgcgcatcgtaaccgacagccgcgacatccgcgcgggcgatgtgtttttcgcattggcgggcgggcggtttgatgcgcatgattttgttgaagacgtattggctgctggtgcggcggcggttgtggtttcgcgcgaagattgcgttgcaatggatggcgcgttgaaagtcgatgacacgcttgccgcattgcaaacgttggcaaaggtgtggcgtgaaaatgtgaatccgtttgtgttcggcattaccggttcggtcggcaagacgacggtgaaggagatgctggctgcggtattgcgccgccgtttcggcgataatgccgttttggcgacggcaggcaacttcaacaaccacatcggattgccgttgactttgttgaaattaaacgaaaaacaccgctatgccgtgattgaaatgggtatgaaccattttggcgaactggcggttttgacacaaatcgccaaacccgatgccgcattggtcaacaacgccatgcgcgcccatgtcggctgcggtttcgacggagtgggcgatattgccaaagcgaaaagcgagatttatcaaggcttatgttcagacggcatggcactgattcctcaagaagatgccaatatggctgtcttcaaaacggcaacgcttaatttgaatacgcgcactttcggcatcgatagcggcgatgtccacgcggaaaatatcgtgctgaaaccgttgtcgtgcgaatttgatttggtgtgcggcgacgaacgcgccgccgtggtgctgcctgttcccggccgccacaatgtccacaacgccgccgctgccgccgcgctgtctttggctgcaggtttgagtttgaacgatgtggcggaaggtttgaaaggcttcagcaatatcaaaggccgtctgaacgtcaaatccggaatcaagggcgcaaccctgattgacgatacttataatgcgaaccctgacagcatgaaagccgcgattgacgtgttggcgcgtatgcctgcgccgcgtattttcgtgatgggcgatatgggcgaactgggtgaggacgaagccgccgccatgcacgccgaagtcggcgcgtatgctcgcgaccaaggcatcgaagcggcttattttgtcggcgacaacagcgtcgaagcggcggaaaaatttggcgcggacggtttgtggttcgccgccaaagacccgttgattcaagtgttgcgccacgatttgcccgaacgcgccaccgtgttggtgaaaggttcgcgctttatgcagatggaagaagtggtcgaggcattggaggataagtga

SEQ ID NO: 60770 - DNA, 1389 bp, Neisseria meningitidis; identical to SEQ ID NO: 55840

SEQ ID NO: 60771 - DNA, 696 bp, Neisseria meningitidis; identical to SEQ ID NO: 38171

SEQ ID NO: 60772 - DNA, 294 bp, Neisseria meningitidis; identical to SEQ ID NO: 37088

SEQ ID NO: 60773 - DNA, 912 bp, Neisseria meningitidis
atggacaccctgttcagcctcaaagttttccgccaagtcgtccaaagcggcggctttacccgcgccgccgacgcgctcggcatctccaccgcaatggcaagcaaacacgtcagccacttggaaaacaccgtccaagccaaactcctgcaccgcaacagccgcaatctcagcctgaccgaagcgggggaagaatactaccgacaatgcagttacgcgctcgacacgctcgacgatgccgcgcaaaaagccgcaggggggacggaaaaaccgcaggggctgctgcgcgtaacgatgccgctgtggtttgccggcagccagatatgcaactggctggcggaataccgcgaacgttatcccgaagtaacattagaactgattttggacaaccggcacgtcgatttgattgccgaaggcgtggatttggcgttgcgcgtttcccaaaccctgtccccgtcgctgattgcgcgcccgctggcggaaatcgaatttgccctgctcgcctcgcccgacttcctgatacgcaacggcgtaccgaaaacgccggaagaagtaacgaggctgcccgccgtcctgccgacctacaccaatcagcagaaactcgacatcacccacaaatcggacggcaaaaaataccggcttgagctgacccccgtcatccgtaccgacaacacgctgatgatgcgcgaaatgattaaggcgggcgcgtgcatcggttatcagccgctttgggcggtggaacacgatttgcgctgcggcacgctggtgaggctgctgcccggatacgccgtcccgaccgaccggctgaatgccgtttatgcagacagggcattcttaagcgcgaaagtccgcagcttcatcgattttctgaacgaaaaaatcgccagcaggaaaggctgccgaaatgccgtctga

SEQ ID NO: 60774 - DNA, 1122 bp, Neisseria meningitidis; identical to SEQ ID NO: 54241

SEQ ID NO: 60775 - DNA, 303 bp, Neisseria meningitidis; identical to SEQ ID NO: 39628

SEQ ID NO: 60776 - DNA, 609 bp, Neisseria meningitidis; identical to SEQ ID NO: 39049

SEQ ID NO: 60777 - DNA, 942 bp, Neisseria meningitidis
atggcaatccaatggtttcccggtcatatgaacaaggcgaaaaaagccatcgccgagcgtgcaaaaagcgttgatatggtgattgaaatgctggacgcgcgtatgcccgcctccagcgaaaaccccctgcttgcccagctttccaaaggcaaacccaaacttaaaatcctaaacaaacaagatcttgccgaccccgaacgcacaaaggtctggcttgaccactacaacagccgccccgacacgcgcgccattgccctcgattcctccgaaaccggcgcacacggcaaaatcacccaagcctgccgcgcgatgattccccaccggcaaggcatagacaaacccttgcgcgtcttgatttgcggcattcccaacgtcggcaaatccaccctcatcaacggcatgataggcaaaaaatccgccaaaaccggcaacgaacccggcatcaccaaagccgaacaacgccttttccttgccgacgacttctggctgtacgacacccccggaatgctgtggccgaaaatcattgtcgaagaaagcggctacaacctcgccgccggcggttcagtcggacgcaacgcattggacgaagaagaagtcgccctcgaacttttagactacctccgccgccactacctccctatgttgcaagaacgctaccaagccgacaaagaccccagcagccactgggacgaaaacgtttggctcgaatggatagccaaaaaacgcggcgcagtcctcagcggcggacggatcaactaccaaaaagccgccgaaaacatccttaccgacttccgtgaaggcaaaatcggcagaatcaccctcgaaacgccgaaccaatgggaaacttggctcaaaaaagcccgtcagaaagaagccgaactcaaagccatacgcgaagccagaaaagcagagcgtaaagggcagaagcctgcggacgagtag

SEQ ID NO: 60778 - DNA, 147 bp, Neisseria meningitidis; identical to SEQ ID NO: 45526

SEQ ID NO: 60779 - DNA, 1635 bp, Neisseria meningitidis
atgataaaaccgaacctgaggccgaagctcggctcttccgcgctgattgccttcctttccctgtattcctcgctggtattgaattacgccttttttgccaaagttgtcgagcttcatccttttaacggcaccggggcggatatcttcctctatacgatgccggtggtgctgttttttttaagtaatttcgtttttcacgtcattgccctgcctttcgtgcataaggtattgattccgttgatattggttatcagtgcggcggtgtcttaccaagaaatatttttcaatatctatttcaacaagtcgatgttgaataatgtcttgcaaactacggctgccgaaagcgcgcgcctgattacgccgggctatgtgctgtggattgtatgtttgggcgtattgcccgcgctggcgtatatcgccgtcaaggttaaataccgcgtttggtataaggagcttttgacgcgccttgtgcttgccgccgtttcctttttgtgcgcgttgggcatcgcaatgttgcaatatcaggattacgcctcgtttttccgcaacaataaatcagtaacccatctgattgtgccatctaatttcatcggcgcgggcgtgtcgaaatacaaagattggaagcgttccaatattccttatacgcaattggatatggcggtcgtgcaaaaccggccggccggcagcctgcgccgtttcgtggtgctggtcgtgggcgagaccacgcgtgccgccaactggggtttgaacggttacagccgccaaactacgccgctgcttgccgcgcgcggcgatgaaattgtcaatttcccgcaggtcagaagctgcggcacatcgaccgcgcactccctgccgtgtatgttctcaaccttcgaccgcacggattatgacgaaatcaaagccgaacaccaagacaacctgctggacatcgtgcagcgcgccggtgtggaagttacttggttggaaaacgattccggctgcaagggcgtgtgcggcaaagtgccgaataccgacgttacctcgctcaacctgcccgaatactgccgcaacggcgagtgcctcgacaatatcctgctgaccaagttcgacgaagtcctcaacaaaaacgataaagacgcggttttaatcctgcataccatcggcagccacgggccgacgtattacgaacgctataccgaagccgaacgcaaattcacgccgacctgcgacaccaacgaaatcaacaaatgcacccgcgccacgctggtcaacacttacgacaatacggttttgtatgtggaccagtttatcgacaaggttatccgcaaacttgaaaaccgcgacgatttggaaagcgtggtgcattatgtttccgaccacggcgaaagtttgggcgaaaacgggatgtacctgcacgccgcgccttacgccatcgcgccttccgggcagacgcatatcccgatggttatgtggttttccaaagccttccgccaacacgggggcatagatttccaatgcctcaaacaaaaagcggcggaaaacgaatattcgcacgaccactatttcagcacggtattggggctgatggacatttccaatagccaaacctatcggaaggaaatggatatattggcagcctgccgccgtccgcgctga

SEQ ID NO: 60780 - DNA, 567 bp, Neisseria meningitidis
atgttattgaaaaacatccttccattcgcccattgccttttgcggcaggcacttcccgaaggcggcaatgcgctggacggcaccgccggcaacggacacgacacccttttcctcgcacaaaccgcaggcatccgggggaaagtgtgggcattcgacatccagccgcaagccctgaacaacacccgatgccgtctgcaggaagcaggttacagcaatgtacggttcatcttggacggacatgaaaacctgaagcaatatattccaaagccgctggatgcagccattttcaatttcggctggctgcccggcggggacaaaagccttaccacccgcacggaaaccagcattgccgccctttctgccaccttatccctactgaaagaaaacggtatgcttattgccgtcctctatccgggacacgaaaacggcaaacaggaggcagaagccgtcggacaatgggcaaaaaacctgcctcaagaacagtttgccgttttacgttacggctttaccaaccggaaaaacagcccaccctatctgttggcatttgaaaaactgcgtcaaaaataa

SEQ ID NO: 60781 - DNA, 1284 bp, Neisseria meningitidis
atgaaccgtaacgaaattttattcgaccgcgccaaagccatcatccccggcggcgtgaattcccccgtccgcgcattcggcagcgtcggcggcgtgccgcgcttcatcaaaaaagccgaaggcgcgtatgtttgggacgaaaacggcacgcgttataccgactatgtcggctcttgggggcctgcgattgtcggacacgcgcaccccgaagtcgtcgaagccgtgcgcgaagccgcgttgggcggtttgtcgttcggcgcgcccaccgagggcgaaatcgccattgccgaacaaatcgccaaaatcatgccgtccgtcgaacggctgcgcctcgtcagctccggtaccgaagcgacgatgaccgccatccgtttggcacgcggttttaccggtcgcgacaaaatcatcaagtttgaaggctgctaccacgggcattccgacagcctgctggtgaaagccggcagcggcctgctgacgttcggtaatccctcttccgccggtgtgcctgccgactttaccaaacacactttagtccttgagtacaacaacatcgcccaattggaagaagcctttgctcaaagcggcaatgacattgcctgtgtgattttggagccttttgtcggcaatatgaaccttgtccgcccgaccgaagccttcgtcaaagccctgcgcgaattgaccgaaaaacacggcgcggtgttgatttacgacgaagtgatgaccggtttccgcgtcgcgctcggcggcgcacaatcgctgcacggcatcatgcccgacctgaccacgatgggcaaagtcatcggcggcggtatgccgcttgccgcgttcggcgggcgcaaagacattatggaatgtatttccccactgggcggcgtgtatcaggcaggtacattatcaggcaacccgattgccgtcgccgccggtttgaaaacgctggaaatcatccgccgcgaagggttttatgaaaacctgacggcgcgtaccgaacagttggttcaaggttttcagacggcagcggatgcggcgggcatcgagtttgccgccgacagcgtgggcggtatgttcggtctgtatttcgccgcacacgcgccgcgaaactatgccgatatggcgcgttccaatattgacgctttcaaacgcttcttccacggtatgctcgaccgcggcattgccttcggcccgtccgcttatgaagcaggtttcgtttctgccgcgcatacgcccgagctgattgacgaaacggttgcggttgcggttgaagtgttcaaggcgatggctgcatga

SEQ ID NO: 60782 - DNA, 2121 bp, Neisseria meningitidis; identical to SEQ ID NO: 55985

SEQ ID NO: 60783 - DNA, 420 bp, Neisseria meningitidis; identical to SEQ ID NO: 42190

SEQ ID NO: 60784 - DNA, 606 bp, Neisseria meningitidis; identical to SEQ ID NO: 41601

SEQ ID NO: 60785 - DNA, 861 bp, Neisseria meningitidis
atgaaaccctattccgccaatcccaacctgaccgaaccgcgccggctgcgcgtgttgctgattgccgccgcgctgggctttctgctgctgatgctggtcgtgccgctcgtcgccgtgttttacgaagccttaaaaggcggttgggatttgtacctgaaatccttaaacgatcccgaagcgtggtctgccatcaaattgacgctgattaccgcgctgattgtcgtccccgtcaatgccgtcttgggcgtggcgatggcgtggctgctgacccgttttgattttcgcggcaagcagttgctgactaccctgctcgatttgccgttttccgtatcgcccgtggtggccggtttaatgttcgtcttattgttcggcgcgcacacggcattgggcggccggctcgaagcgcaaggcatacagattatcttcgccatccccggtattgttttggcgacgctgttcgttaccttcccctttgtcgcacgcgaaatcatcccgctgatgcaggcacagggcgacagcgaagaacaggcggcattgatactcggcgcaagcggctggcagatgttttggcgcgttaccctgcccaacatcaaatgggcgttactctacggcatcatcctcaccaacgcccgcgcgatgggcgagttcggcgcggtcagcgtggtatcgggacacatacgcggcgaaaccaacaccgtcccgcttttggtcgaaatcttctacaacgaatacaacttcaccggcgcattcgccctctccggcgtattggcacttttggcactggcgacgctggcggtgcagaacatcatcaccaaattacaagacaaaaaactcgccgccgccgaaaggaacgcagtatga

SEQ ID NO: 60786 - DNA, 381 bp, Neisseria meningitidis; identical to SEQ ID NO: 55192

SEQ ID NO: 60787 - DNA, 2580 bp, Neisseria meningitidis
atgcgatacgacaaattaaccgccaaattccaacaggcccttgcagaagctcagagtttggcgttggctgcggacggcagctatctggaagcgggctttgtgctgaaagccctgcttgacgaccaaaacagcggtgctgccgcgctcttggctcatgcgggcgtgaacgtgccgcaggtgaaacagcgtttgcagcagcatttgaacagcctgccgaaagtatccggacagggcggcgacattatgcccagccgcgaattgcaggcggtgttgaacctgatggacaaagcagcaaccaaacgcggcgatgcctatatcgccagcgaacttttcctgctcgccttggtgcagcagaacgatgcaaccggcaaaattttgaaagaagccggcgcgaccgaacaaaacattaatgccgcaatcgatgcggtacgaggaggacaaaacgtgaacgatgccaatgccgaagaccaacgcgatgcgctgaaaaaatatacgctcgatttgacccaacgcgcccgcgacggtaagctcgaccccgttatcggtcgtgacgacgaaatccgccgtgcaattcaggtattgcaacgccgcaccaaaaacaaccccgtgctgattggcgaaccgggcgtgggtaaaactgccattgtcgaaggcttggcgcaacgcatcgtcaacggcgaagtacccgaatccctgcgcaacaaacgccttttggttctggacttggcggcattgattgccggcgcgaaataccgtggcgaatttgaagaacgcttgaaaggcgtgttgaacgatttggcgaaagacgacggcaacactctgattttcattgatgaaatccatactttggtcggcgcgggcaaaaccgacggcgcgatggacgcgggcaatatgctgaaaccggccttggcgcggggcgaactgcactgtatcggcgcgaccaccttggacgaataccgccaatacatcgaaaaagacgcggcactcgaacgccgcttccaaaaagtattggtcggcgagcccagcgtggaagacaccatcgccatcttgcgcggtttgcaggagcgttatgaaatccaccacggtatcgatattaccgaccctgctatcgttgccgcagcggagttgagcgaccgctacatcaccgaccgcttcctgcccgacaaagcgattgatttgattgatgaagccgccagccgtgtcaagatggaaaaagaaaccaagccggaagcaatggacaaaatcgaccgccgtctgattcagcttcggatggaaaaggcacacgttgaaaaagaaaaagacgatgccagcaaaaaacgtttggaactgatagacgaggaaatcaacggtctgcaaaaagaatacgccgatttagacgaaatctggaaagccgaaaaagcaatttcagacggtgctgctaatattaagaaacaaattgacgaagtcaaaattaaaatcgaacaggcaaaacggcaaggcgatttggcactggcttcaaaattgatgtatgaagatttggagcatttggaaaaacagcgtgcagccgccgaacgggcagatacggacagcacaaaaccggcaaacaaactcttgcgtaataatgtcggcgcggaggaaatcgcagaagttgtttcccgtatgaccggtattcccgtgtccaaaatgatggaaggcgaacgcgacaaactgctgaagatggaagaagtattgcaccgccgcgtggtcggtcaagatgaagccgtgcgtgccgtgtccgacgctatccgccgcagccgttccggtcttgccgatccgaacaaaccttacggcagcttcctgttcttaggcccgaccggcgtgggtaagaccgaattgtgtaaggcattggcaggcttcctgtttgacagtgaagatcatctgattcgtatcgatatgtccgaatatatggaaaaacacgccgttgcccgcttaatcggcgcgcctccgggctatgtcggctacgaagaaggcggctacctgactgagcaagtccgccgcaaaccgtacagcgtgattcttttggacgaagtggaaaaagcccatcccgacgtgttcaatatcctgctgcaagttttggatgacggtcgtttgaccgacggacaaggcaggacggtagattttaaaaacaccgtgattgtgatgacttccaacattggcagccagcacatccaacaaatgggcacgcaggactacgaagccgtgaaagaagttgtgatggaggatgtgaaagagcatttccgtcctgaaatgatcaaccgcatcgacgaagtggtcgtgttccacggactggatcaggataatatccgcaacattgcgaaaatccagctcaaaggcttggaaaaacgtttggaaaaacaaaacctccgcctgactgtttccgatgccgctctggacatcatcgccaaagccggtttcgacccgatttacggcgcacgtccgctcaaacgcgccatccagtcggaaatcgaaaacccgctggcaaaagccctgcttgccggaaactatgcgcccgaaagcgaaatcagggtagaagccgacggcgacagactgaaatttgcctga

SEQ ID NO: 60788 - DNA, 501 bp, Neisseria meningitidis; identical to SEQ ID NO: 39468

SEQ ID NO: 60789 - DNA, 762 bp, Neisseria meningitidis; identical to SEQ ID NO: 54658

SEQ ID NO: 60790 - DNA, 519 bp, Neisseria meningitidis; identical to SEQ ID NO: 36779

SEQ ID NO: 60791 - DNA, 1005 bp, Neisseria meningitidis
atgcaacggcaaaccgaactgaaaaattggcttcagaccgtttatcccgaacgggacttcgatctgacttttgcggcggcggatgctgatttccgccgctatttccgtgcaacgttttcagacggcagcagtgtcgtctgcatggatgcaccgcccgacaagatgagtgtcgcaccttatttgaaagtgcagaaactgtttgacatggtcaatgtgccgcaggtattgcacgcggacacggatctggggtttgtggtattgaacgactttggcaatacgacgtttttgaccgcaatgcttcaggaacagggcgaaacggcgcacaaagccctgcttttggaggcaatcggcgagttggtcgaattgcagaaggcgagccgtgaaggggttttgcccgaatatgaccgtgaaacgatgttgcgcgaaatcaacctgttcccggaatggtttgtcgcaaaagaattggggcgcgaattaacattcaaacaacgccaactttggcagcaaaccgtcgatacgctgctgccgcccctgttggcgcagcccaaagtctatgtgcaccgcgactttatcgtccgcaacctgatgctgacgcgcggcaggccgggcgttttagacttccaagacgcgctttacggcccgatttcctacgatttggtgtcgctgttgcgcgatgcctttatcgaatgggaagaagaatttgtcttggacttggttatccgctactgggaaaaggcgcgggctgccggcctgcccgtccccgaagcgtttgacgagttttaccgctggttcgaatggatgggcgtgcagcggcacttgaaggttgcaggcatcttcgcacgcctgtactaccgcgacggcaaagacaaataccgtcccgaaatcccgcgtttcctcaattacctgcgccgcgtatcgcgccgttatgccgaactcgccccgctctacgcgctcttggtcgaactggtcggcgatgaagaactggaaacgggctttacgttttaa

SEQ ID NO: 60792 - DNA, 837 bp, Neisseria meningitidis
atgcaaatcatacataccattcgagaactgcgcgcgtggcgtaaaaatgcgggaaaggtggcatttgtgccgaccatgggcaatctgcatgaagggcatcttgcgcttgtgcgtgaggcgaaaaaacgcgcggacagtgtcgtggtcagcattttcgtcaaccgcctgcaattcggtcagggcgaggatttcgacaaatatccgcgtactttgcaacaggatgcggacaagctggaagccgagggtgttgccgttgttttcgcgcccgatgagaaagaactctatccgaacgtggaacagcgttacaacgtcgaaccgcccaatctgcaaaatgagttgtgcggcaagtttcgtccgggacatttccgcggggtggcgacggtggtgtccaagctgttcaatattgtcgcgccggatgttgcctgtttcggcaaaaaagactatcagcagcttgccgtgattaaaggtttgaccgaggatttgaattttgatgttgaaatagtgcctgtcgatacggggcgcgcggaagacggtttggcactctccagccgcaaccagtatttgagtgcggcggaacgcgacgaagcaccgcgcctgtactgcgaattaaaggctgttgccgaatccttggcgcagggcagtttggattatgcaggtttggagcggcaggctgccgaccatttgaccgctgcgggctgggtggtcgattatgtcgaaatccgccgcgccgatacgctcgaagtggcgcgggcgggagataagaaactggtggtcttggccgccgcccgtctggggacgacgcgcctgattgacaatttggaaataaaactcccttaa

SEQ ID NO: 60793 - DNA, 492 bp, Neisseria meningitidis
atgagtatcgaaaccaaaaactacattacgcccgccggatggcaggcattgaaagacgagctttatcaactggtcaataaagaacgccccgaaatcgtccaaatcgtcaactgggcggcaggcaacggcgaccgcagcgaaaacggcgactatctttacggcaaacgccgtatgcgcgaaattgaccgccgcatccgtttcctgaccaagcgtttggaagctgccgtcgtcgttgatcccgaattgcgcgaagcgaccgaccaagtgtttttcggcgcgacggtcgggctgttgcgcggcgacgggcgcgagcaaaccgtcaaaatcgtcggcatcgatgaaatcgataccgcgcaaaacaaaatttcttggatttcgccgctggctcgttgcctgattaaagcacgcgaaggcgacgaagtggttttgaacacgccggaagggcgtgaggaaattgaaatcctttctgtcgaatacatcaaaatcgactga

SEQ ID NO: 60794 - DNA, 1749 bp, Neisseria meningitidis; identical to SEQ ID NO: 54378

SEQ ID NO: 60795 - DNA, 1173 bp, Neisseria meningitidis; identical to SEQ ID NO: 55592

SEQ ID NO: 60796 - DNA, 2394 bp, Neisseria meningitidis; identical to SEQ ID NO: 54715

SEQ ID NO: 60797 - DNA, 1080 bp, Neisseria meningitidis
atgaaaacactgaccgtacacaccccgtcccacagctaccccatctttatcggcaacggactgctgccgcaggcaggaagcctgctcaaaccgcatttgggcaaacgcgccgccatcatcgccaacgaaaccgtcgccccgctctacctcggcacgcttcagacggcattggatgcggcaggcgtatcccatttcagcatcatcctgcccgacggcgaggcgcacaaaaactggcagacgctcaacctcatctttgacgggctgatgcaaaaccgcgccgaacgcaaaaccacattaatcgcactgggcggcggcgtgatcggcgacatggtcggctttgccgctgccacctaccagcgcggcgcaccgttcgttcaaataccgaccacactgttgagtcaagtcgactcatcggtgggcggcaaaaccgccatcaaccacccgctcggcaaaaatatgatcggcgcattctaccagccgcaggcggtgcttgccgacttggacacgctgcacaccctgcccgtccgcgaattgtccgccggtatggcggaagtcatcaaatacggcgcgctcggcgacatcggttttttcgaatggctcgaacaaaacatatccggactgatgacgctcgatcgggaaaaactcgcccaagccgtgtaccgctgctgccaaatgaaggcagacatcgtcgcccaagacgaaaccgaacagggcatacgcgcatggctcaacctcggacacaccttcggacacgccattgaaaccgagatgggttacggcacttggctgcatggagaagccatcgccgccggctgcgtgttggcggcgcgtttgtccgaacaactgggcaaaacctccgccgcagataccgcgcggctcgccgccctgctcgaagccgctggactgccgtccgcaccgcccgtgtttgcctttgaaaaatggctcgaacatatgagccacgataaaaaagtcagcggcggcatcatgcgctttatcggtctgaaccggctgggcgaagccaacatcaccgaaattaccgacacggacatcctccgccgcaccctgcaaccgtatctctga

SEQ ID NO: 60798 - DNA, 189 bp, Neisseria meningitidis; identical to SEQ ID NO: 43856

SEQ ID NO: 60799 - DNA, 699 bp, Neisseria meningitidis
gtgcaggcggatttagcttatgccgccgaacgcattacccacgattatccgaaagcaaccggtgcaaacaacacaagcacagtaagcgattatttcagaaacatccgtgcgcattccatccacccccgggtgtcggtcggctacgatttcggcgactggaggatagcggcagattatgccagttacagaaaatggaacaacaataaatattccgtaaacacaaaagaggtgggaagaaacaataacaataacattgacatctggaaagaactgaagacggaaaatcaggaaaacggcagcttccacgccgcttcttctctcggcttatccgccatttacgatttcaaactcaacgataaattcgataaattcaaaccctatatcggtgcgcgcgtcgcctacggacacgttaaacatcaggttcattcggtgagaaaagaaaccacgactgttttcagtaaaccaagtggtagcgttacaaagccaggcgagatcgtagaaactccgaccagcaaacctgcctatcacgaaagccacagtatcagcagcttgggtcttggtgtcatcgccggtgtcggtttcgacatcacgcccaagctgaccttggacaccggataccgctaccacaactggggacgcttggaaaacacccgcttcaaaacccacgaagtctcattgggcatgcgctaccgcttctga

SEQ ID NO: 60800 - DNA, 1032 bp, Neisseria meningitidis; identical to SEQ ID NO: 48687

SEQ ID NO: 60801 - DNA, 693 bp, Neisseria meningitidis; identical to SEQ ID NO: 54707

SEQ ID NO: 60802 - DNA, 852 bp, Neisseria meningitidis
atggcacgacacggttggcaggcaggacggtttgaaatcggtttggacaagccgaaaattatgggcatcgtgaatctcacgcctgattctttttccgacggcggcgcgtattcgcaaaatgccaaaaccgctttggcgcacgccgaacggcttttgaaagagggtgcggacattctcgacattggcggcgaatcgacgcggccgggtgcggattatgtttcgtccgaagaagaatgggcgcgggttgagcctgtattggtagaagtcgcgggatggggcgttcccgtcagtttggacacgcgccgcacggtggttatggaaaaagcgttggcactcggcggcatcgatattattaacgatgtggcggcgttgaccgacgaaggcgcggtcgaattgctggcgcgccagacggacacgggtatttgcctgatgcatatgcagggtttgcctgaaaccatgcagattaatccgaaatatcaggatgttgttggtgaagtggcgcggtatttgaaagcgcgggcggcggaatgcatcgcggcaggcatcgccccgcaacgcatcacactcgaccccggtttcggtttcggcaaaaccttacaacacaatatcgcactgatgcggcatttacccgaattgatggcggaaacgggttttccgctgctcatcggcgtgtcgcgcaaacgtatgataggcgagctgactggcgaggcagacgcggcggcgcgcgtacacggcagcgtggcggcggctgtggcggctgtggcgcgcggcgcgcaaattgtgcgggtgcatgacgtgaaggcgacggcggacgcgttgaaggtgtgggaagcgttgggcatcaatctgtaa

SEQ ID NO: 60803 - DNA, 579 bp, Neisseria meningitidis
atgaatattttattattagacggcggcaaagcgttcggacattctcacggcgggttaaaccgcacgcttcacaaaaaagcgaaagaagttttgaccgcgctcggacacaatgttcaagaaaccgtgattgatgccggctatgatgttgaggcagaaatcgaaaaattcgtttggatggatgctgtgatttggcagatgccgggctggtggatgcacgagccttggacagtgaaaaaatacatagacgaagtattaaccgctggacacggcaaactctaccaaagcgacggcagacacagcgtcaatccgactgagggctacggcacaggcggcttgttgcaaggcaaaaaacatatgctttcactgacttggaatgcgccgattgaggcgtttacccgcgaaggcgatttctttgaaggcaaaggcgttgatgttttgtatatgcacttccacaaagccaacgagtttttgggtatgacccgcctgccgacattcttatgtaacgatgtggttaaaaatccgcaagtggaaaaatacttggcagattatcaggcacacttggaaaaagtgttcggctaa

SEQ ID NO: 60804 - DNA, 1266 bp, Neisseria meningitidis
atgttcagcttcttccgtcgcaagaaaaaacaggaaacgccggctcccgaggaggctcaagttcaggaaactgcagcaaaagcagaatccgaagttactcaaatagttgaaaatattaaagaagaagtcgaatctttaacggaaagcgtcaaagggcaggtcgaatcggctgttgaaaccgtcagcggtgcggttgaacaagtaaaggaagccgttgccgagatgctgtctgaagcagaggaagcggcggaaaaagcagcggaacaagtcgaagcggcaaaagaagccattgccgaaaccgtcggcgaggctgtcgggcaagttcaagaagccgttgcaacaactgaagaacacaagctcggttgggcggcgcgtttgaaacaaggtttgaccaaatcgcgcgacaaaatggcgaaatcgctggcgggcgtgttcggcggcggacaaatcgacgaagatttgtacgaagagctggaaaccgtgctgattaccagcgatatgggcatggaagccaccgaatacctgatgaaagacgtgcgcgaccgcgtcagcctcaaagggctgaaagacggcaacgaattgcgcggcgcgctgaaagaagccttgtacgacctgattaagcctctagagaaaccgctggttttgcccgaaaccaaagagccgtttgtcatcatgcttgctggcatcaacggcgcgggcaaaaccacatccatcggcaaactcgccaaatatttccaagcgcagggcaaatctgtgctgcttgccgccggcgatactttccgcgccgccgcgcgtgagcagcttcaagcttggggcgaacgcaacaacgtaaccgtgatttcgcaaaccacgggcgattccgccgccgtgtgcttcgatgccgtccaagccgccaaagcgcgcggcatcgacattgtgctggccgacaccgccggccgcctgcccacgcagcttcacttgatggaagaaatcaaaaaagtgaaacgcgtgctgcaaaaagccatgcccgacgcgccgcacgaaatcatcgtcgtgcttgatgccaatatcggtcaaaacgccgtcaaccaagtcaaagcctttgacgacgcattagggctgaccggtttaatcgtgaccaaactcgacggcacggcaaaaggcggcatcctcgccgcgcttgcctccgaccgccccgtccccgtccgctacatcggcgtgggcgaaggcatagacgatttgcgcccgtttgacgcgcgcgcgtttgtggacgcactgctggattga

SEQ ID NO: 60805 - DNA, 654 bp, Neisseria meningitidis; identical to SEQ ID NO: 54860

SEQ ID NO: 60806 - DNA, 966 bp, Neisseria meningitidis
atgagctacacgcaactgacccaaggcgaacgataccacatccaatacctgtcccgccactgcaccgtcaccgaaatcgccaaacagcttaaccgccacaaaagcaccatcagccgcgaaatcagacggcaccgcacccaagggcagcaatacagcgccgaaaaagcccagcggcaaagccagactatcaaacagcgtaagcgacaaccctataagctcgattcgcagctgattcagcacatcgacacccttatccgccgcaaactcagtcccgaacaagtatgcgcctacctgtgcaaacaccaccagatcacgctccaccacagcaccatttaccgctaccttcgccaagacaaaagcaacggcagcacgttgtggcaacatctcagaatatgcagcaaaccctaccgcaaacgctacggcagcacatggaccagaggcaaagtacccaaccgtgtcgtcatagaaaaccgacccgctatcgtcgaccagaaatcccgtatcggcgattgggaagccgacaccattgtcggcaaaggacagaaaagcgcattattgaccttggtcgaacgcgttacccgctacaccatcatctgcaaattggatagcctcaaagccgaagacactgcccgggcagctgttagggcattaaaggcacataaagacagggtgcacaccatcaccatggataacggcaaagagttctaccaacacaccaaaataaccaaagcattgaaagcggagacttatttttgtcgcccttaccattcttgggagaaagggctgaatgagaacaccaacggactcatccggcaatacttccccaaacaaaccgatttccgtaacatcagtgatcgggagatacgcagggttcaagatgagttgaaccaccgaccaagaaaaacacttggctacgaaacgccaagtgttttattcttgaatctgttccaaccactaatacactag

SEQ ID NO: 60807 - DNA, 810 bp, Neisseria meningitidis
atgattcaagacacccgcccccttatccgcgtcgttgccggcatcctgctcgattcagacggcaactacctgctcagctcgcgccccgaaggcaaaccctatgccggatattgggaatttgccggcggcaaggtcgaagcgggcgaaaccgacttccaagccctgcaacgcgagtttgaagaagaactcggcatccgcatcctcgccgccacgccttggttgaccaaaatccattcctacgaacacgcccgcgtctgcctgaaattcctatgggtcaaccccgaccaatggacgggcgaaccgcaatcccgcgaagggcaggaatggtcttggcagaaggcgggtgattttaccgttgcccccatgctgcccgccaacggcgcgcttttgcgttcgctgtccgtcccgcgccgtttgtacggcagcctgaaaacgggtttgcacggagaaaacagtatgggcgcgtaccgcgtcctgcctttgggttcggcagagggaagcggtgcgaacgttttgatggaggcggcgcaatggcaggacagacccgaatacgccggcagcgtgtggatgatggtgcagacccgcgaacaatggcggcaggcgcaggaaaagggcgcggatgtggtcgtctggcgagtcggtaatgccgcacaagccgcagcggtagacgaagtgttgaagcacggcgtatccgtgccgctcgtacttgcagcaaacggacagacggttgcacgttatggaaaactatggctcggattgggggcgcacgtggtggtaagggatgaaacaatagggaagaatcatgaataa

SEQ ID NO: 60808 - DNA, 1677 bp, Neisseria meningitidis
atgtcccaacaatacgtctattctatgctgcgcgtgagcaaggttgtgccgccgcagaaaaccatcattaaagatatttccctttctttcttccccggcgcgaaaatcggcctgctcggtttgaacggcgcgggcaagtccaccgttttgcggattatggcgggcgtggataaggaatttgagggcgaagccgtgccgatgggcggcatcaaaatcggctacctgccgcaagagcctgagcttgatcctgagaaaaccgtgcgcgaggaagtggaaagcggtttgggcgaagtggctgccgcacaaaaacgtttggaagaagtgtatgccgagtatgccaatcctgatgcggattttgacgcattggcggaagaacaaggtcgcttggaagcgattatcgcggcaggttcgtccacgggcggcggtgcggaacacgaactggaaatcgccgccgacgcgctgcgcctgccggaatgggatgccaaaatcgataatttgtccggcggtgaaaaacgccgcgttgccttgtgcaaactcttgttgagcaagcccgatatgcttttgctggacgagccgaccaaccacttggatgcggaatcggtcgagtggctggagcaatttctcgtgcgcttccccggcacagtcgttgcggtaacgcacgaccgctacttcctcgacaacgccgccgaatggattttggaactcgaccgcggccatggtattccgtggaaaggcaattactcgtcttggctggagcagaaagaaaaacgcttggaaaacgaggcaaaatccgaagccgcacgcgtgaaggcgatgaagcaggaattggaatgggtgcgccaaaatgccaaaggccgccaagccaagtccaaagcgcgtttggctcgttttgaagaaatgagcaactacgaataccaaaaacgcaatgaaacgcaggaaattttcattcccgtcgccgagcgtttgggtaacgaattgattgaatttgtgaacgtttccaaatcgttcggcgacaaagtgctgattgacgatttgagcttcaaagtgcctgcgggcgcgattgtcggcatcatcggtccgaacggcgcgggtaaatcgacactgtttaaaatgattgcgggcaaagagcagcccgattccggtgaagtgaaaatcgggcaaaccgtgaaaatgagcttgattgaccaaagccgcgaaggtttgcaaaacgacaaaaccgtgttcgacaacatcgccgaaggtcgcgatattttgcaggtcgggcagtttgaaatccccgcccgccaatatttgggacgcttcaatttcaaaggcagcgaccaaagcaaaatcacggggcagctttccggcggcgaacgcggacgtttgcacttggcaaaaaccttgttgggcggtggcaatgtgttgctgctggacgaaccgtccaacgacctcgacgtggaaaccctgcgcgcgttggaagacgcattgctggaatttgccggcagcgtgatggtgatttcgcacgaccgctggttcctcgaccgtattgctacgcatatcttggcttgcgaaggcgactccaaatgggtgttcttcggcggcaactatcaggaatacgaagccgataagaaacgccgactcggcgaagaaggcgcgaaaccgaaacggattaaatataaaccggtaacgcgttaa

SEQ ID NO: 60809 - DNA, 1746 bp, Neisseria meningitidis; identical to SEQ ID NO: 55272

SEQ ID NO: 60810 - DNA, 744 bp, Neisseria meningitidis; identical to SEQ ID NO: 55012

SEQ ID NO: 60811 - DNA, 294 bp, Neisseria meningitidis; identical to SEQ ID NO: 36355

SEQ ID NO: 60812 - DNA, 1677 bp, Neisseria meningitidis
atgctgacctataccccgcccgatgcccgcccgcccgccaaaacccacgaaaagccgtggctgctgctgttgatggcgtttgcctggttgtggccgggtgtattttcacatgatttatggaatcctgccgaacctgccgtctataccgccgtcgaagcactggcaggcagccccacccccttggttgcccatctgttcggtcaaaccgatttcggcataccgcccgtgtatctttgggttgccgccgcgttcaaacatttgctgtcgccgtgggctgccgactcatacgatgccgcacgctttgcaggcgtgtttttcgccgttgtcggactgacttcctgcggctttgccggtttcaactttttgggcagacaccacgggcgcagcgttgttttaatccttatcggctgtatcgggctgattccgaccgtacactttctcaatcccgctgccgccgcctttgccgccgccggactggtgctgcacggctactcgctggcgtgccgccgtgtgattgccgcctcttttctgctcggtacgggttggacgctgatgtcgttggcagcagcttatccggcagcatttgccctgatgctgcccctgccagtgctgatgtttttccgtccgtggcaaagcaggcgtttgatgttgacggcagtcgcctcgcttgcctttgccctgccgctgatgaccgtttacccgctgctcttggcaaaaacgcagcccgcgctgttcgcgcaatggctcgacgatcacgttttcggtacgttcggcggcgtgcggcacgttcagacggcattcagtttgttttactatctgaaaaacctgctttggtttgcactgcccgcgctgccgctggcggtttggacggtttgccgcacgcgcctgttttcgaccgactgggggattttgggcgttgtgtggatgcttgccgttttggtgctgctcgccgccaatccgcagcgttttcaggacaacctcgtctggctgctgccgccgcttgccctgttcggcgcggcgcaactggacagcctgaggcgcggcgcggcggcgtttgtcaactggttcggcattatggcgttcggactgtttgccgtgttcctgtggacgggctttttcgccatgaattacggctggcccgccaagcttgccgaacgcgccgcctatttcagcccgtattatgttcctgatatcgatcccattccgatggcggttgccgtactgttcacacccttgtggctgtgggcgattacccggaaaaacatacgcggcaggcaggcggttaccaactgggcggcaggcgttaccctgacctgggctttgctgatgacgctgttcctgccgtggctggacgcggcgaaaagccacgcgccggtcgtccggagtatggaggcatcgctttccccggaattaaaacgggagctttcagacggcatcgagtgtatcgacataggcggcggcgacctgcacacgcggattgtttggacgcagtacggcacattgccgcaccgcgtcggcgatgtacaatgccgctaccgtatcgtccgcttgccccaaaatgcggatgcgtcgcaaggctggcagacggtctggcagggtgcgcgcccgcgcaacaaagacagtaagttcgcactgatacggaaaatcggggaaaatatattaaaaacaacagattga

SEQ ID NO: 60813 - DNA, 423 bp, Neisseria meningitidis
atgagcgagcagacggcattggccgtgtgtgccgacggtgtggaaacggcattggcggaagcggcatcactgttggaagagggatgcgggtcggttttggttttggcggcggacgatccgctgccggaaggatatgccgtatcggcaacgcgcgcgccgtttgcttatgctttggcgatggttctgaccaaagggacgcgttacagtctgactttatctgcttcggacgatatgccgtctgaagccggtatgctgcccgaggcatattggagcggtttggaatgggtgcgctttctgctgaacggcagtcgggaatgccgccgggtatatcgcaatcgtgaatggctgtggcagcccgcaagctgcaggctgaagatttccgcaatgtccgcaccgtcaacgacgtggtacaggcggtattga

SEQ ID NO: 60814 - DNA, 2031 bp, Neisseria meningitidis
ttgactatattttccgtattacttccaaaaaaaggcatgaaacgacattttatgcctaaaattttacaacaaacaaccttacatcgcttttttcgcgcaaacacgcaccatccgatcagcccgtccgttttgcagcaggctggcgatttgataagatggttatgtttttcagacggcatttcagatttccgtccatgccgtctgaagccgcaaaacccgattggaggaattattatgaataccgtatcgaattacctgtccgcattgcgcgaagccatgaaggcgcaaggcttggatgcactcgtcatcccttccgccgacccccacctgtccgaatacctgcccgaacattggcaggcgcggcgcgaattgtcgggctttaccggctcggtcggcacattcgtcgttaccgccgacgaagcgggcgtatgggtggacagccgctattgggaacaagccgccaagcagcttgcgggcagcggcatcgaactgcaaaaaagcgggcaagtgccgccgtataacgaatggctcgcggcaaacctgcccgaaaacgccgccgtcggcatcctttccgatatggtctcgctcaccggcaaacgcactttagcgcaatcgctcgccgccaaaaacatccgcatcgaacaccccgacggcctgcttgaccaagtgtggacaagccgcccggccattcctgccgaaaccgtgttcgtccacgaccccgcctacgtctccgaaaccgccgccgaaaaactcgcccgcgtgcgcgccgtgatggcggaaaaaggcgcggattaccacttggtttcctcgctcgacgacatcgcctggctgaccaacctgcgtggcagcgacgtacctttcaaccctgttttcgtgtccttcctgctgattggcaaagacaacgccgtcctgtttaccgaccgatgccgtctgaacgccgaagccgccgccgcgctgcaaaccgcaggcatcacggtcgaaccttatgcccaagttgccgacaaactcgcgcaaatcggcggcgcgctgcttatcgaaccgaacaaaaccgccgtcagcacgcttgtgcgcctgcccgaaagcgtgcgccttatcgagggaatcaacccatccacgctgttcaaatcctgcaaatccgaagccgacatcgcccgcatccgcgaagcgatggaacacgacggcgcggcgttgtgcggtttcttcgccgagtttgaagacatcatcggcaacggcggcagcctgaccgaaatcgacgtggacaccatgctttatcgccaccgcagcgtgcgcccaggcttcatttcattgagtttcgacaccatcgcaggcttcaacgccaacggcgcactgccgcattacagcgcaacgcccgaaagccacagcaccatcagcggcaacgggcttttgctcatcgactccggcgcgcaatacaaaggcggcacgaccgacatcacccgcgtcgtccctgtcggcacgccgagtgccgaacaaaaaagcgacaacaccctcgttctcaaagcccatatcgcgcttgccgaagccgtattccccgaaaacatcccctcgccgctgattgatgcgatttgccgcaaacccctgtggcaggcgcaatgcgactacggccacggcaccggacacggcgtaggctatttcctcaacgtccacgaaggcccgcagcgcatcgccttcgccgcccccgccacgcccgaaaccgccatgaaaaaaggcatggttacctccatcgaacccggactctaccgcccgggaaaatggggcatccgcattgaaaaccttgccgccaaccaagccgtcgccgcccctcaagaaaccgaattcggcagcttcctctgttttgaaaccctgaccctctgccccatcgatacacgcctgatggacaccgccctcatgaccgacggcgaaatcgactgggtcaaccgctaccacgccgaagtccgccgccgcctcgagccgctgaccgaaggcgcggcaaaagcgtggctgatcaaacgcaccgaaccgctggcgcgttaa

SEQ ID NO: 60815 - DNA, 207 bp, Neisseria meningitidis; identical to SEQ ID NO: 55670

SEQ ID NO: 60816 - DNA, 1308 bp, Neisseria meningitidis; identical to SEQ ID NO: 55742

SEQ ID NO: 60817 - DNA, 792 bp, Neisseria meningitidis
atggcaagacatccctaccgccgcctgcgtcctgcaaaatccagctttcccgaagtcggcatttccgaagaaggcaatatccgttcgcttcacttgggcagcgacaccatccaaagctcaatgaacctcgaccacccgtccgagctggtactctcttacagccgtgccatgatgggatggctgctgtttaccgacgctcttccgcagcatatcacccaaatcggcttgggcggcggttcgtttgcacgctggatagacacctacctgcccgacacgcgccaaaccgccgtggacatcaacccgcaggtcatcgccattgcccgcagcctgttcgagttgcctttcgagggcgagaaatttgaaattatcgaagcagacggtgcagaatatatcaaagtcttccgccacaacaccgatgtgattttggtggacgggttcgacggcgaacaaatcatcgatgcgctggttgaagaaccgtttttccgagactgccgaaacgcactctcttcagacggcatattcgtaaccaactggtggagcggcgacaaacgctaccaacgcttcatcgaacggttgttgagcgtttttgaagggcgcgtcttggaacttcctgccgaaagccacggcaatgtcgcggtaatggccttccaaagcagccccaaagagcaaaacatagacaaactcaaaaaacgtgccgacaaactgagcaacgcttacggattggacttccaccgcatgctcgccgacctgaaagcatccaaccccaacaacggcaagcatttccacctttaa

SEQ ID NO: 60818 - DNA, 477 bp, Neisseria meningitidis
atgaaaacaaatttcaaacagaaaattatcgaacaggcacgcagcgaaggcttgcaggtaaccgctttgcgcgagcaggtattagatattgtcttgcagcaaagcggcgtgattaaagcctacaacgtcttgtcgcagatgcagcagcaaagcgagggcgtgcttgcgccgccgaccgcctaccgcgcccttgatttttgggcggagcagggcgttttgcacaaagtggcggcggtcaacggctatattttgtgcagccacgcgcagcacgagtgcgacgaccattgccacgaccacgaagaagccgaagcgcaccacagcgcgtttattttggtctgcaccgaatgcggcacggcggacgagcaaaccctcagccacgagtgggcggcactgcgcgcaggcgttgccgaaagcggctttgcgctgaaagaagaacacgttgttttaactgggatttgtaaaaaatgtcagaagtga

SEQ ID NO: 60819 - DNA, 654 bp, Neisseria meningitidis; identical to SEQ ID NO: 60389

SEQ ID NO: 60820 - DNA, 1131 bp, Neisseria meningitidis
atgaaaatcgtttttatcacaacagtcgcatccagcatttacggtttccgcgcccccgtcattaaaaaattaatcggcaaaaaccatcaggtgtatgcctttgtatcggagttttccgacaatgaattggatactatcagggaaatgggggtaacacccgttacctaccgttcaaaccgcagcgggctgaacccgttttccgatataaaatccaccttcctcatctttaaagaactcaaaaaaatatcgccggatttggttttcccttatttcgcaaaacccgtgattttcggcacttttgccgcaaaactggcaggcgtgcccagaatcgtcgggatgctggaaggtttgggattcgcatttaccccgcagccggaaggcataccgttaaaaacaaaaatcataaaggggattttgattgccttgtaccgcattgccctgccgatgttggaaagcctgattgtattaaaccccgacgacaaagacgaactgacggacaaatacggcatcaaaataaaaaacatccatattttgggcggaatcggtctggatttgcggcaatatccttattccgaggcggatattcccgatgaaaaagaacccgtaaaatttctctttatcggcagattgttgaaagaaaaagggattgatgagtttattcgggcggcggaacaggttaaggacaaataccccgatacggtttttaccgctttgggcgcaatcgacaaatcacgcgggggggggggcgatttggaacgccttgccgcccgcgatattatccgtttccccggttttgtgaacaatgtttccgaagtgataaaagaacatcatatattcgtattgccgtcttattatagggaaggcgttccccgaagcactcaggaggcaatggccgtcggcagggcagtgattacgacggatgtccccggatgcagggaaacggtcgccgacaaggtcaacggcttcctgatcgaaccttggaatccccgcatcttggccgaaaaaatgatttattttatcgaaaacagggaagccgttcgcctgatggggaatgcaagttatgcgattgccaaagataaattcgatgccgaaaaagtcgatttaaaattactcgatattttgaaggcgtaa

SEQ ID NO: 60821 - DNA, 819 bp, Neisseria meningitidis; identical to SEQ ID NO: 37573

SEQ ID NO: 60822 - DNA, 1389 bp, Neisseria meningitidis
atgaacactcgcaccgaacacgacaccatgggcaatgtcgaagtcccgtccgaagcctattggggcgcgcagacccagcgcagccgcaacaatttcaaaatcggcggcgaaaccctgccgcagccgctgatttatgctttggcgttggtgaaaaaagccgctgccgcgaccaatgtttccctcggcaggattaagccggaacaggcggatttgattacgcaggcggcggatgatgtgttgaacggcaggcttgacggacagtttcctttagtggtttggcagaccggctccggcacgcagtccaatatgaacatgaacgaagtgctggcaaaccgcgccaacgaaatcgccggtacgggtttggcggcttatcagcccgtccatcccaacgaccatgtgaaccacgcgcaatcgaccaacgacgcattcccgaccgctatccacgttgccgccgcgattgaaatcaaccgccacctcatccccgccgtaaaagccctgcgcgataccttggacaaaaaagcccaagctttcgcccccattgttaaaatcggccgcacccacttgcaagacgcgacgccgctgactttgggacaggaattttccggctacgtttcccagcttgatcacggtttaggccgtctgaacgatgcgcttaaagacttgtatgaacttgctttgggcggtacggcggtcggcacgggtttgaacagccatcccgaatacgccgaaaaagctgctgctaaactcgccgaactgtctggcttgccgtttgtcagcgcgccgaacaaatttgaagccttgggcggacgcgatgccgccgttgccgcttcgggcgcattgaaaacgctggcggcaagcctgaataaaatcgccaacgacatccgctggctggcaagcggcccgcgttgcggtttgggcgaaatcaaaatccccgaaaacgagccgggttcgtccatcatgccgggcaaagtcaacccgacccaatgcgaagcaatgacgatggtgtgctgccaagtgttcggcaacgacgttaccatcggtatggcgggcgcgtcgggcaatttcgagctgaacgtctatatgcccgttatcgcctacaacctcttgcaatccatccgcctcttgggcgacgcgtgcaacagcttcaacgaacactgcgccgtcggcatcgaacccgtaccggaaaaaatcgactatttcctgcaccattccctgatgctcgttaccgcgttaaaccgcaaaatcggttacgaaaacgccgccaaagtcgccaaaaccgcctacaaaaacgacaaatcgctgcgcgaaaccgccgttgagttgggcttgctgacgggcgaagaatttgacgaactggtcgttcctgccgatatggttcatccgcgctaa

SEQ ID NO: 60823 - DNA, 1476 bp, Neisseria meningitidis
atgatcagcaaacaagaataccaagcccaagccgcccaaggctacaaccgcatcccgctcgtgcaagaactccttgccgatttggatacgccgctttccctctatctcaaactcgccaaccgcccctatacctacctgctcgaatccgttgtcggtggcgaacgtttcggccgctattcttttatcggcctgccttgcagccactatctcaaagccagcggcaaacacgtcgatgtttatcaaaacggcgaaattgtcgagcaacacgacggcaaccccctgccctttatcgaagccttccacaaccgcttcaaaacacccgaaatcccaagcctgccgcgctttaccggcggactggtcggctacttcggttacgaaaccatctacaattttgaacacttcgcccaccgcctgaaaaacaccaccaaagccgacccgctcggcacgcccgacatcttgctgatgctgtcgcaagaattggcggtgatcgacaatttgagcggcaaaatccatctcgtcgtttacgccgatccgtcgcagcccgacggctacgaacgcgcccgcgaacgcctcgaagacatccgcacccagttgcgccaaagctgcgccatcccgctctcgctcggcagcaaacacaccgaagccgtcagcgaattcggcgaagagccgttcaaagcctgcgttaacaaaatcaaagactacatcttcgcaggcgactgcatgcaggttgtccccagccagcgcatgagcatggaattcaccgacagcccgctcgccctctaccgcgccctgcgtacgctcaacccttcgccttatctcttttactacgatttcggcgatttccacatcgtcggctcctcgcccgaaatcctcgtccgacgcgaacgcaacgacgttatcgtccgccccatcgccggcacgcgcctgcgcggcaaaacccccgccgaagaccttgccaacgaacaagatttgttaagcgatgccaaagaaatcgccgaacacgtcatgttgattgacttaggacgcaacgacgtcggccgcatcagtaaaaccggcgaagtcaaagttaccgacaaaatggtgattgaaaaatactcccatgtaatgcacatcgtttccaacgtcgaaggccgtctgaaagacggcatgaccaacatggacatcctcgccgctaccttccctgccggcacactctccggcgcacccaaagtccgcgccatggaaatcatcgaagaagtcgaaccgagcaaacgcggcatctacggcggtgccgtcggcgtatggggtttcaacaacgacatggatttggcaatcgccatccgcaccgccgtagtaaaaaacaacacgctatacgtccaaagcggcgcgggcgtggttgccgactccgatccggcctccgaatggcaggaaacacaaaacaaagcccgagccgtcatacacgccgcgcaaatggtacaggaagggttggataaatga

SEQ ID NO: 60824 - DNA, 1647 bp, Neisseria meningitidis
atgaaacaccttcacgacttacccgcatggtcgaaattgtggaaccactttgacgacagcaaaacattgcatatgcgcgaaatgttcgagcaagacccgcagcgtgcggaacgctactggctgcaagtcggcggactgacgctggactactccaaaaaccgcatcaacgacgaaaccatgtcgcttttgttcgagcttgcccgagaagcaggcgtgccggagcggatgcggcagatgttccacggcgaaaaaatcaataccaccgaaaaccgcgccgtcctgcatgtcgcccttcgcaaccgcaccaattcgccgattgtggttgacggtgaagatgtgatgcccaaagtcaaccgcgttttgcaacgtatgggcgaatttgcacacgaagtccgcagcggaagctggctgggctataccaaccaagtcattaccgacgttgtcaacatcggcatcggcggatcggatttgggcccgctgatgatgtgtaccgcgctcaaacctttcggtcatccgcgcctcaatatgcacttcgtctccaacgtggacggctcgcaactgcgcgacgtattgtccaaagtccaccccgaaaccacgctgttcatcatcgcctccaaaacatttaccacgcaggaaacgctgaccaacgcgctgaccgcgcgcgaatggtttttgaatcatgcgggcgacgaagaagccgttgccaaacacttcgccgccgtttccaccaatcaaaaagccgtcgccgaattcggcatcgacaccgccaatatgtttgaattttgggattgggtcggcggtcggtacagcctgtggtccgccatcggattgccgattatgctgtatctcggcgaagaaaacttcattgaaatgctcaacggcgcgcacctgatggaccaacacttcatcaacacaccgctcgagcgcaacctgcccgtcattctcgccctcatcggcatctggtatatcaactactacggcggcggcagccacgtcatcgcgccttacgaccaacatttgcaccgcctgcccaaattcatccagcagctcgatatggaaagcaacggcaaacaggttacgttggacggcaaagcagtcggacacgaaacctcgccgattatctggggcgaaacgggcattaacggccagcacgccttcttccaactgctgcaccaaggcacgcacattacccccatcgacctgattgcctcgcttgaaaaacgcagcaacctgcccggacaccacgaaatcctgcttgccaacgtcttcgcccaagcagaagcctttatgcgcggcaaaacccccgacgaagtccgcgccgaactcaaagcgcagggtatggatgaggcgcgcatcgaagagctggtcccgcacaaaaccttctccggcaaccgcccgaccaacctcattctcatggacaaggtcaacccgcgcaatatgggcagcctgattgccatgtacgaacacaaaaccttcgtacaaggcatcatttggggcatcaacagcttcgaccagtggggcgtggaactcggcaaacaactggctaaaaccattttgggcgaactgaccggcgaaaccgagccgcaaaagcacgacagttcgaccgaacgcctgatcaacctctacctgcagaccaaccgcaaataa

SEQ ID NO: 60825 - DNA, 384 bp, Neisseria meningitidis; identical to SEQ ID NO: 38550

SEQ ID NO: 60826 - DNA, 1137 bp, Neisseria meningitidis
atgaaaaacatatctctttctccgcccgccacgctcggaatcctcggcggcggacaattaggcagaatgtttaccgttgccgccaaaaccatgggctacaaagtaaccgtactcgaccccgatccgaacgctccggcggcggaatttgccgaccgccatttgtgcgcgccgtttaacgaccagaccgcgttggacgagttggcaaaatgcgcggcggttacgaccgaatttgaaaacgtcaatgccgacgcgatgcgttttctggcaaaacataccaacgtttcccccagcggcgactgcgttgccatcgcgcaaaaccgcattcaggaaaaggcatggatacgcaaagcaggtctgcaaaccgcgccgtatcaagcagtttgcaaagccgaagacatcactgaagcaagcgcgcaattcctgcccggtattctgaaaacggccactttgggctacgacggcaaaggtcaaatccgcgtcaaaacggtggacgaactcaaagccgcgtttgccgaacacggcggcgtggattgcgttttggaaaaaatggtggatttgcgcggcgaaatttccgttatcgtatgccgtctgaacaatgacaacgtgcaaactttcgatcctgccgaaaacattcacgaaaacggtatcctcgcctactccatcgtcccagcccgactgagtgccgacattcagcaacaggcgcgacaaatggcgcagcgtttggccgatgaattgaactacgtcggcgtattggcggtagaaatgtttgttgtcggcgacacgcatgaattggtcgtcaacgaaatcgcgccgcgtccgcacaattccggccaccataccgtcgacgcctgcgcggcagaccaattccagcaacaggtccgcctgatgtgcaacctgccacctgctgacaccaaattgctgagttcttgctgtatggcgaatattttgggcgacgtttggcaggaagacggcggcgaaccggattggtttcccctgcaaagccggccggacgcgcacctgcacctttacggcaaaaaaaccgcgcacaaagggcggaaaatgggacactttaccgttttaaccaccgattcggacaccgcatttcaagaagcaaaaaaactgcatcagtccctataa

SEQ ID NO: 60827 - DNA, 465 bp, Neisseria meningitidis; identical to SEQ ID NO: 36919

SEQ ID NO: 60828 - DNA, 273 bp, Neisseria meningitidis; identical to SEQ ID NO: 47339

SEQ ID NO: 60829 - DNA, 2790 bp, Neisseria meningitidis; identical to SEQ ID NO: 55637

SEQ ID NO: 60830 - DNA, 876 bp, Neisseria meningitidis; identical to SEQ ID NO: 54814

SEQ ID NO: 60831 - DNA, 924 bp, Neisseria meningitidis
atgcaatacagcacactggcaggacaaaccgacaactccctcgtttccaataatttcgggtttttgcgcctgccgcttaattttatgccgtatgaaagtcatgccgattgggttattaccggcgtgccttatgatatggcggtttcagggcgttccggcgcgcgtttcggtcctgaagccatccggcgcgcctccgtcaacctcgcttgggagcaccgcaggtttccatggacatttgatgtgcgcgaacgcctgaacattattgattgcggcgacttggttttttcttttggcgacagcagggattttgtcgaaaaaatggaagcgcacgccggcaaattactttcttccggcaaacgctgtttgagtttgggcggcgaccatttcattaccctaccgttgttgcgcgcccacgcccgctatttcggcaaactcgcactgattcattttgacgcgcacaccgacacctacgacaacggcagcgaatacgaccacggtacgatgttctataccgcccccaaggaaggcctcatcgacccgtcccgttccgtacaaatcggcatacgtaccgaacacagtaaaaaattgccttttactgtgttgaccgccccccaagtcaatgaagacagtgttgaagagaccgtccgtaaaatcaaagaaaccgtcggcaatatgcccgtttacctgactttcgacatcgactgcctggacccgtcgttcgcccctgggaccggtacgcccgtatgcggcggcttgagcagcgacagggcattaaaaatcctacgtgggctgacggatctcgacatcgtcggtatggatgttgtagaagttgccccctcttacgaccaatccgacattaccgctttggccggtgccacaattgccttggaaatgctttaccttcaaggtgcgaaaaaggactga

SEQ ID NO: 60832 - DNA, 1407 bp, Neisseria meningitidis
atgaaactgttccaacgcattttcgccacattttgcgcagttatcgtctgtgcaatctttgtggcgagtttttctttttggctggtgcagaacacccttgccgaaaaccagttcaaccaacgccgcaccatcgaaaccactttgatgggcagcatcatttccgcattccgggcacgcggggacgcgggcgcgcgcgaaatcctgacggaatggaaagacagccccgtctcatcgggcgtgtacgttatacagggcgacgagaaaaaagatatcctgaaccggtatatcgacagctacaccatcgaacgcgcccggcttttcgccgccggacacccgcattccaacctcgtccatatcgaatacgaccgcttcggcgaagaatacctgttcttcaccaaagactgggacaaactccaagcccgccgcctgcccagccccctgttgatccccggtctgccgctcgccccgatttggcacgaactcatcatattgtccttcatcatcgtcgtcggactgctgatggcgtacatcctcgccggcaatatcgccaaacccatcagaatcttaggcaacggcatggacagggtggcaaacggagaacttgaaacccgtatctcccaacaggtcgacgaccgcgacgacgaattgtcccatcttgccatccaattcgacaaaatggtggaaaaacttgaaaaactcgttgccaaagaacgccacctgctccatcacgtctcccatgaaatgcgttctccccttgcgcgcatgcaggcaattgtcggactgattcaggcgcagccccaaaaacaggagcaatatctcaaacggctggaaggcgaactgacccgcatggatacgctggccggggaactgttaaccctgtcccgtctcgaaacttccaatatggctttggaaaaagaaagcctgaaactcctgcccttcctgggcaacctggtagaagacaatcaaagcattgcccagaaaaacggacaaacggttaccctgtctgccgacggaaaaatccccgaaaatacaaccatccttgccaacgaaagctacctgtaccgcgccttcgacaacgtcatccgcaacgccgtcaactacagtcccgaaggcagcaccatcctgatcaacatcggacaagaccacaaacactggataatcgacgttaccgacaacggccccggcgtggacgaaatgcagctcccgcacatcttcaccgctttctaccgtgcagactccagtgcgaacaaacccggaacaggactggggcttgcattgacccaacatattattgaacagcactgcggaaaaatcatcgccgaaaacatcaaaccgaacggtctgcggatgcgcttcatcctgcccaagaaaaaaaccggttccaaaacagaaaaaagtgcgaactga

SEQ ID NO: 60833 - DNA, 939 bp, Neisseria meningitidis
atgtccatccatactctgaaacgcctgccctcatcgctgctgctcggtctctgcctttccctgccgtcagcccacctttttgccgacaacgacattttagggcaatttttagaacagaacatgcttacctcctccgatccgatagaaatattcgccgaaagcacgatacaccccaccaacacccaagccattacaggcggtctgattctctcctcacagtctgccctggtcgtcaacaacaaaaccggacagatactgtatcagaaaaacgccgacaggattatgcccatcgcctccatttccaaactgatgagcgcgatggtcgttttggatgcaaacttggacatgaacgaaaccgttaccattacgcccgacgaaatcgaccgcatcaaagggaccggcagccgtcttgccataggtacggcacttacacgcaaagaactgctgcacctgagcctgatgagcagcgaaaaccgcgccacccatgcattgggcagaacctaccccggcggcatgggcgcatttgtcgccgccatgaaccgcaaagcccaaagcctcggtatgtacggcagccgcttttacgaaccgaccggactcaacttccaaaacgtttctaccgccaaagacctgagccttatggtcaacgccgccgcccaatatccgcaaatccgcaccaactcgacttccaactacgcctcggtacagaccaaaaacgggcagcagaactacaaaaactccaatgccctggtcagagaaggcatgtggaacatcgaattgcagaaaaccggctacatacgcgaagcaggcaggtctatggttgtcaaagccaacattcaaaatcaacccgttaccatcgtattgctgaactcgcccacatccgccacacgcgtcaacgacgcccgcaaaatcgaatcgtggatgctgcagcaacgctcctga

SEQ ID NO: 60834 - DNA, 192 bp, Neisseria meningitidis; identical to SEQ ID NO: 37158

SEQ ID NO: 60835 - DNA, 1599 bp, Neisseria meningitidis; identical to SEQ ID NO: 55629

SEQ ID NO: 60836 - DNA, 735 bp, Neisseria meningitidis
atgagcgcaaacgtcagccgccttgttgttcaaaacctgcaaaaaagttttaaaaaacgccaagtcgttaaaagcttctccctcgaaatcgaaagcggcgaagtcatcggactgctcgggcccaacggtgcgggtaaaaccaccagcttctacatgatagtcggactcattgccgccgatgcgggcagcgtgatgctggacgggcaggaattgcgtcacctgcccatacacgaacgcgcccgcctcggtgtcggctacctgccgcaggaagcctcgatattccgcaaaatgaccgtcgaacaaaacatccgcgccatcttggaaatcagaaccaaagataaaaatcaaatcgacagggaaatcgaaaaactgctcgccgaccttaatatcggacacttgcgccgcagccccgcgccgtcgctgtccggcggcgaacgccgacgcgtcgaaatcgcccgcgtactcgccatgaaaccgcattttattttgttggacgaaccttttgccggcgtcgatccgattgccgtcatcgacatccagaaaatcatcggtttcctcaaatcgcgcggcatcggcgtactgattaccgaccacaacgtccgcgaaaccctcagcatctgcgaccgcgcctacatcatttcagacggtgcggtgctggcatcgggaaaacctgatgatttggtcggaaacgaacaggttcgttctgtttatctgggtaagaacttcaaatattga

SEQ ID NO: 60837 - DNA, 1233 bp, Neisseria meningitidis
atgccttctgcccattatcctgaaatgagcgaaaaactgatggcggttttgatggcgatgctggttacgctgatgccgttttccatcgatgcctacctgcccgcgattcccgaaatggcgcagtcgctgaacgcggatgtccaccgcatcgaacagagcctgagtttgtttatgttcggcacggcgttcggacaggtggtcggcggttcggtgtccgacatcaaagggcgcaaacccgtcgcgctgaccggactggccgtctactgccttgccgttgccgccatcgtatttgcttcgagtgccgaacagctcctcaacctgcgcgtcgtgcaggcattcggtgcgggcatgactgtggtcatcgtcggcgcaatggtgcgcgattattattccggacgcaaagccgcccagatgtttgcccttatcggcatcattttgatggttgtgccgctggtcgcacccatggtcggcgcattgttgcagggcttgggtggctggcaggcgatttttgtttttctggcggcgtattcgctggtgctgctcggtttggtacagtatttcctgcccaagcctgccgtcggcggcaaaatcggacgggatgtgttcgggctggtggctgggcggttcaaacgcgtattgaaaacccgtgccgcgatgggttatctgttttttcaggcattcagcttcggttcgatgttcgcctttctgaccgaatcttccttcgtgtaccagcagctctaccgtgttacgcctcatcaatacgcttgggcgtttgcactcaacatcatcacgatgatgtttttcaaccgcgttaccgcgtggcggctcaaaaccggcgtgcatccgcaaagcatcctgctgtgggggattgtcgtccagtttgccgccaacctgtcccaactcgccgccgtgctgtttttcgggttgcccccgttttggctgctggtcgcgtgcgtgatgttttccgtcggtacgcagggcttggtcggtgcgaacacgcaggcatgctttatgtcttatttcaaagaagagggcggcagcgcaaacgccgtattgggtgtattccaatctttaatcggcgcgggggtgggtatggcggcgaccttcttgcacgacggttcggcaaccgtgatggcggcaacgatgaccgcgtccacctcttgcggcattgcgcttctgtggctctgctcacatcgtgcgtggaaagaaaacgaacagagcgaatacctttaa

SEQ ID NO: 60838 - DNA, 780 bp, Neisseria meningitidis
atgaaaaccatcacagaaaccctaaatctcgccccgaaaggcaaaaacttcctgaccgccgattggcccgcgcccgccaatgtgaaaaccctgattaccacgcgcaacggcggcgtgagccaaggtgcgtatcagagtttgaacctcggtacgcacgtcggcgacaatcccgaagccgtgcgccgcaaccgcgaaatcgtgcaacagcaggtcggattgcccgttgcctacctcaatcaaatccacagcaccgtcgtcgtcaacgctgcagaatcgttaggcggtacacccaatgcggacgcttccgtggacgacacgggtaaagccgtctgtgctgtgatgaccgcagactgtctgcctgttttgttttgcgacagggcaggtacggcggttgccgccgcacacgcgggctggcgcggtttggcgggcggcgtattgcaaaacaccattgctgcgatgaaggttccgcctgtcgaaatgatggcgtatctcggccctgccatcagtgcggatgcgtttgaagtcggacaggacgtgtttgatgcgttctgcacgcccatgcccgaagccgccgccgcatttgaaggcataggcggcggcaaattccttgccgacctttacgcgctcgcccgcctgattctgaagcgtgaaggcgtgggcggcgtatatggcggcacgcattgtacggttttggaacgggacactttcttttcctaccgccgcgacggagcgacagggcgtatggcgagcctgatttggctggacggcaatgccgtctga

SEQ ID NO: 60839 - DNA, 627 bp, Neisseria meningitidis
atgaaaaacatcgtcatcctgatttccggacgcggcagcaatatgcaggcaatcgtcaatgccgccattcccaacgtccgtattgccgccgtgttgagcaacagcgaaacggctgccggtttgcaatgggcggccggtcagggtattccgaccgacagcctgaatcataaaaactttgaatcacgacttgccttcgataccgccatgatggaaaaaatcgacgcatatcaacccgacttggtggttttggcaggttttatgcggattctgacccctgagttttgcgcccattacgaaggcaggctgatgaacattcacccgtccgtcctgccctcgtttaccggacttcatacgcacgaacgcgctttggaggcgggctgccgcgttgccggctgcaccatccatttcgttactgccgaactggattgcggcccgattgtatcgcaagggattgtgccgatactcgacggcgatacggcagacgatgttgccgcccgggttttggctgtcgaacacaaactctatccgaaagccgttgccgattttgccgccggccgcctgattatcgagggaaaccgcgtcagaaattcggaaaacgccgatgccgcccgtttcctgacggcgtaa

SEQ ID NO: 60840 - DNA, 1152 bp, Neisseria meningitidis
atgcagacatggcagcttccggaacatatcgccgacgtactgcccacgaacgcgcggcagcttgaaagcgcgagggagcagttgttggcactgttccgcgtacacggttatgaactggtacagcctccgctgatggagtacgcacattccctgctgacgcatatcgatgcggggctttccctgaaaaccattttggtaacggacaggctcagcggcaggcagttgggcatacgcgccgacatcacgccgcaggtggcgcgtatcgatgcccatcttttatccgccaaccaagggattaaccggttgtgttatgccggtccggtgttgcacgcgcagtccgacggtctgctgaatatgcgcgaacccttgcaggcaggggcggaaatgtacggttttgccgacatccgtggcgacatcgagctgatagacctgatgctgaaaagcatgaaaattgccgatatgggcaaagtgctgctttcgctggggcatatcggcatatttcgcgccttgtccgatgcggcgcatttggatgcggggcagtctgcaacgctgcttgccttgatgcaggataaagataccgagacggtcgaagcgcaggtcaaggcttggaagctggacggtatgtgggcaaaagcattctcgctgctgccgcgcctgtacggcgggcgtgaagtgttgtccgacgcgcgcggacggttgccggatttgtcggcggtcggcggcgcgttgggcgaattgcaggcggtgtgcgacgcattccccgattgtgaaatccatatcgacttgtccgagctgcgcgtcgacaattaccacacgggcttgctgtatgccgcctatgccgccgatttccacgacgcggtcgcgcgcggcgggcgttatgacggattgggcggatatttcggcagggcgcgcccggcaacgggattcagtttcgacttgcgcagctttatcgggcgtttgcccaccagcgaacggcagcccgccgtgttggtcgatgcggaagatgccgaagcggcgcgcgaagcagtcgaagccttgcgtgaacaagggcagtgtgtcgtgattgactacggtatcggacacaatgtttcggaagagcttgcaggccgtctgaaaaagacggacggcgtttggcaggtcgtgaaacgctaa

SEQ ID NO: 60841 - DNA, 417 bp, Neisseria meningitidis; identical to SEQ ID NO: 55659

SEQ ID NO: 60842 - DNA, 813 bp, Neisseria meningitidis
atggacaaaatcagagttgccgccgtgcagatggtgtcgggcgtgtcgccggaaaccaacgtcgctgccatgaaacgcctggtcgcacgggcggcggagcagggtgtggattgggtgctgctgcccgaatattgggtgctgatgggcgcaaacgataccgacaaactcgcgcttgccgagcctttgggcggcggacgctttcagacggcattgagcgaaacggcgaaagaatgcggcgtggtgctgtttggcggaaccgtgccgctgcaaagccccgaggcgggcaaggtcatgaatactttattggtgtacgggcgcgacggcaaacggacggggctgtaccacaaaatgcacctcttcggcttttccggtttgggcgaacgctatgccgaagccgataccatccgcgcgggcggggaagtgccgcacttgtcggcagagggcgtgccggtggcagcaggtatttgttacgatgtccgctttcccgaatttttccgccgccagctgccgtttgacgtattgatgctgcccgctgcgtttacgcacacgacgggcaaggcgcattgggagctgctgctgcgcgcgcgtgccgtcgaaaaccaatgttacgtcgtggcggcggcacagggcggtttgcacgaaaacggacggcgcacgttcggacacagcatgattgtcgatccgtggggcgacgtgttggacgtattgcccgaaggcgaaggcgttgttacggcagacatcgatgccaaccgcctgaacagcgtccgcaaccgcctgcccgccttgaaacactgggttttggatgccgtctga

SEQ ID NO: 60843 - DNA, 1416 bp, Neisseria meningitidis; identical to SEQ ID NO: 55862

SEQ ID NO: 60844 - DNA, 957 bp, Neisseria meningitidis; identical to SEQ ID NO: 39269

SEQ ID NO: 60845 - DNA, 930 bp, Neisseria meningitidis
atggattccatcatcgaactgcgccacctcaagaccctgctggcacttgaagaaaccggcagcgtctcccttgccgccaaacgggttttccttacccaatctgcactttcccaccaaatccgtatgcttgaaaaccactacggcgcaccgttgttcgaacgaaaatccacgcccttgcgctttaccccggttggagaaaggctgttacgcctcgctcacgacctgttgcctcaagttaccgatgcagaacgtgatttggcacgcattatagaaggagaggcaggagaattgcggattgccgtcgaatgccatacctgtttcgactggctgatgcccgccatgggcgaattccgcccgatgtggccccaagtcgaattggatatcgtatcgggattccaagcggatcccgtcggactgctgctgcaacaccgtgccgaccttgccattgtttccgaagcggaaaaacaaaacgatatttctttccaaccgctgtttgcctacgaaatggtcggcatttgcgcaccagaccatccgcttgccgccaaaaacgtttggacggcggaagactttatcggggaaaccctgattacttatcccgttcccgacgagatgctggatttgcccaaaaaaatcctgattccgaaaaacatcaacccgccgcgccgacacagcgaactgaccatcgccattatccaactggttgccagcagacgtggcattgccgcccttccctattggacagtcatgccctaccttgaaaaaggctatgtcgtccaccgccaaattactgccgacggattgcaaagcaaactgtatgccgccatccgtaccgaagatacggacaagagctatctgaacaatttttgccaaatcatacgcgaacgcggttttgcagatttgcccggactgagcgaattggaaccggtctga

SEQ ID NO: 60846 - DNA, 447 bp, Neisseria meningitidis
ttgttaactaagttgaaaattttgctatttttgttcttatttgtttttgtattggctattaatttgcttttcttcttttttagttcggatatcgagagtttcgggaactatcagtttgaatatgtttacgataaaggttggcctgctaattatattttagtcatgaaagatggaaatgaagggaattttgataaaataatatccggattggttttagaatattataaggaggatgataacatttatttttcttatattgacgggcaaggatttgcttcagactcttgctattacaaaccggaaattttatatggaaaaattattttaaataaaaatcatatcattaatattaatagcatggaaaaaaataattttctttcagaagataaaataatgaagggaacaagaaattggctagcagaccctaaaaataaatgtaatatatag

SEQ ID NO: 60847 - DNA, 1116 bp, Neisseria meningitidis
atgaagattgtaattgcaccggattcgtttaaggaaagcttgacagctcaacaggtagctgaagcaataaaaagaggcttccaacaatcgatagcagatgtggaatgtctcctctgtcctgtcggtgatgggggagaaggcactgtagatgctatccgacattctcttgacctagaagaaaaatgtcttcaagtgacaggaccttttggacaaaaagaagtcatgcgctattttcaaaaagaacaactagccctattcgaagttgctgatttggttggtcttggaaaaatcccgctagagaaacgaaatccattacaaatccaaactcgtggtattggagaattgattcgccacctcattagtcaagaaattaaagaaatctatattggcgttggcggtacggccagtaatgatggaggtattgggattgctgctggtttaggttatcaattttatgatgaggatggaaataccttacccgtttgcggtcaatccttactaaacctagcttctgtttcaacagaaaatcgctatgaaattcctgaagatgttcacattcgtattttagcagatgttgtgagtcccttatgtggacaccaaggtgcgacctatacgtttggcaagcaaaaagggttggattctactatgtttgaggccgtagatcaggcaatacaagatttttatgaaaaagtctcccctgcaacattaaaacttaaaggagcaggagctggtggaggcatcgctggtggtttgtgcgcctttgctcaggcaagtatcgtatctggaattgacacctgcctggacttgattgactttgataagaaagtgtcagatgttgacttggttatcattggtgaaggaagactagatcgtcaaagtttagcagggaaagcgcctattggtgtagcaaaaagaacccctgtcggagttcctgttgtcgctatttgtggcagtctcgttgaagatttgccttccctgccatttgaaaatatccaagctgccttttctattttggagaaaagtgaacctttagaagatagtttgaaaaatgccagtctctatttggagcatacggcttctaatattggacacttattaaatatgcctaagatttag

SEQ ID NO: 60848 - DNA, 1434 bp, Neisseria meningitidis
atgaacgaatattaccaattaatcaagcatcccgatatttccctttccccgatttcagacggcatcggggtcggcaatccggcaacgggcgaaattttggcgtatgtccgcaatacgggttcggacaaactgaaaaacctgattcaaaaggcggcggcagcgcaaaaattatgggcggcgaaaactgctttggaacgcgccgacatattgtggcgttggtattttttagttaaagaaaacaaagaagcactggcgcgcctgatgacgatggagcagggcaaaagcctgaccgagtcgcgcggcgaaattgattatgcggcttcgtttgtgcgctggtttgccgaagaggcgcggcggattgacggcgatgtgttaacgagtgtaaaagcgtcgcaaaaactggttgtgttgaaacagcctgtcggcgttaccgccgcgattacgccgtggaacttcccatctgcaatgattgcgcgcaaggctgcgcctgctttggcggtgggttgcgcgatgatcatcaaacccgcatcgctcacgcctttgagtgcgtatgccttggcttcgttggcttacgaagcgggcataccgcaggatttgttgcccgtcgtcagcggccgcgcatcggaaatcggccgtgaatttgccacgaacccgattatccgcaaaatcagcttcaccggttcgaccgaagtcggcgcgaaaatttttgccgacagcgcggcggacattaaaaaactcagtttggaactgggcggcaacgcgccgtttatcgtgtttgacgatgccgatttggacaaagccgtcgaaggtgcgctcgccagcaagttccgcaacagcggtcagacctgcgtctgcaccaaccgcgtttacgcccaatccggcatttacgacgaattttgtcgcaaattgagtgaaaaagtagccgagctcaaattgggcaacggcttggaggatggcgtcaaccaagggccgctgattgaggaaaaagcggtggagaaagtcgagcagcacatcgccgacgcgcttgctaaaggtgcaagctgcctgaccggcggcaaacgcagcgcgttgggcggaacgttttttgagccgaccgtcttaagcggcgtaacggcgcaaatggcggtggctcgcgaagaaaccttcgggcctttgtgtccggtattccgttttgaaaccgaagccgaagtcattgaggctgcgaacaatacggaatacggtttggctgcttacctttttaccgctgacaccgcacgccagtggcgcgtcggcgaagcattggaatacggtatggtcggcatcaatacgggcttaatcagtaatgaagcggcaccgttcggcggcgtgaaacgcagcggtttgggacgtgaaggcagcaaatacggtgcggacgaatatctggaattgaaatatctgtgtatggatgtcgggtga

SEQ ID NO: 60849 - DNA, 426 bp, Neisseria meningitidis; identical to SEQ ID NO: 54863

SEQ ID NO: 60850 - DNA, 156 bp, Neisseria meningitidis; identical to SEQ ID NO: 43525

SEQ ID NO: 60851 - DNA, 1887 bp, Neisseria meningitidis; identical to SEQ ID NO: 55957

SEQ ID NO: 60852 - DNA, 591 bp, Neisseria meningitidis
atgcttttgtttatcgacaattacgacagttttacttacaacatcgtccagtatttcgctgaattggggcaggaagtcgccgtgcgccgcaacgatgatattacgttggaagaaatcgaggcattgaatccgcaatatctcgttatcggacccggtccgtgttcgcccaaagaagcggggatttccgtggcggcgatgcgccattttgccggccggctgccgattatgggcgtgtgcctcgggcatcagacgataggcgaggcgttcggcggcaggatagtccgcgccaaaacgctgatgcacggtaaggtgtcgcccgtgtcccattcgggcaagggtatgtttaaaggtttgcccaatccggttacctgtacgcgttatcacagcctcgttatcgatcgggataatttgcccgattgtttggaaatcacggcttggactgacgacggcgagattatgggcgtgcgccataaggaatatgccgtcgagggcgtgcagttccaccccgaagccctcttgaccgaacacggacatgatatgttgaacaattttttaatcgaatttcaaaacttcaaaccgcaaaaaatctga

SEQ ID NO: 60853 - DNA, 714 bp, Neisseria meningitidis; identical to SEQ ID NO: 55529

SEQ ID NO: 60854 - DNA, 954 bp, Neisseria meningitidis; identical to SEQ ID NO: 54685

SEQ ID NO: 60855 - DNA, 1107 bp, Neisseria meningitidis
atgtctctttatccgatttacaatttttccgccggccctgccgtattgcccgaagccgtgttggaaacggcgcggcaggaaatgttggactacaacggtacgggttttcctgtgatggcgatgagccaccgttcggaaatgtttttgagcatcctgcatcatgcggaacaggatttgaggcagcttttgaaagtgcctgacaactataagatattgtttctgcagggcggagcaacaacccaatttaatatggcagccatgaatctggcacacggtttccgcactgccgacgcggtggtaacgggcaactggagccgtatcgcttatgaacagatgagccgtttgaccgatacggaaatccgtttggcggcgcatggcggcgagcagttcgactatctcgacctgccgcctgtggaaacgtgggatgttgcacccgattcggcgtttgtccattttgccgtcaatgaaacggtcaacgggctgcaataccgtgaagtgccgcgcctttcagaaggcatgccgccgctggtgtgcgatatgtccagcgagattttgtcgcgcgagtttgatgttgccgactacggactgatttacgcaggcgcacagaaaaacatcgggccggcaggggttacggtggtgattgtgcgtgaggatttgctcgagcgttgtccgaacgatattcccgatgtgttcaactaccgttcgcatttgaaccgcgaaggtatgtacaacacgccgtcaacttacgcgatttatatgtcggggctggtgttccgctggctgcaggcgcagggcggtgtgaaaaaaattgaagcggtcaatcggctgaaggcgcaaaccttgtatgagacgatagacggcagcggcggtttctatatcaaccgtatccgtccgaatgcgcgttctaaaatgaatgtcgtgttccaaacgggggatgaggagcttgaccgccgttttgtgctggaagccgaattgcagggcttgtgcctgttgaagggctataagtctgtcggtgggatgcgcgccagcatctacaatgcgatgccgctcgaaggcgtgcgggctttggcagattttatgcgcgatttccaacggcgttacggttga

SEQ ID NO: 60856 - DNA, 1623 bp, Neisseria meningitidis
atgaaaacaaaagaattcctcaaatcccttgccgaactggccgccagtttgcgccaagtcatcgaagcggaagtggacggcttcgatgcgtcgcccaaggctgtttctgcacgccgtgccaaggtgtttgacccgataggcggttacgaatatttcgtcaacacctacttcccccattatatccgctcgcctgagaaatccgaactgcatgcgtttttattcagccgtctgccggagattatccgctcccccaaaggggaaaatgaggcggtgggcgcaccgcgtggcgagggtaaatcgacgcaggttacccagttgtttacgctgtggtgtattgtgaccggccaaaaacattatgccgttattgtgatggacagcatagaccaggcatacccgatgctcgaagccatcaaggcggaattggaatttaatccgcgcctgaaaaccgactttcctgaagtctgcgggcaaggccgtgtatggcaggccggtacgattgtgacggccaatgacgttaaggtgcaagtggccggtagcggtaaaaagctgcgcggtttgcgtcacggcccttaccgtcctgacttaactgttttggacgatattgagaatgacgaacaagtccgcaaccccgaacagcgcgacaagctcaatgcgtggctgactaaaacggtattgcctttgggcggggtcggtcagaaatacgatgtgatttatatcggcacgattttgcattacgacagcgtacttaaccgcactttgaataacccgttttggcggggtgttaagtttaaggcgatgaaacgctggcccgaccgcatggatttgtgggacaggtgggaggaacttttccgaaacgacggcgagacggtggccgaggcgttttatcaggcaaacaaagacgagatggagcgcggcgcagtcacttcttgggcggcgcgtggcgtactcgcgctgatgaaaatccgtgcgcgtgacggccatgcgacgtttgattcggaatatcagaatgatccggtcagtggcgaagatgcgccgtttgccaagtcgatgaagttttggaacgacctgccgtccgatttggtgtatttcggtgcgctcgacccgtcgctgggtaaagcgggggcgagccgtgacccgtcggcaatcgtcatcggcggctatcagcggtcaatgggcaggctttatgtcgtggaggcgcaaatcaaaaaacgtctgcccgacctgattatcgaagacgttatctgcctgcaccgtcaatatcgttgcaaactgtggtttgttgagacggtgcagtttcaggagtttttaaaagacgagctggtcaagcgcagcgcggcgcgtggaatacctgtcccggcgcgggcggtcaagccggtatcggacaaactcttgcggattgagactttgcagcctcacatggcaaacggtttgattctgttgaatgagagccaacagacgctgatacagcagttccgccattttccaaaggctgatcatgatgatggtcctgatgccgtgcatatgctctggtcgggggcggtggccaattgtgtgccgatagaatggcaaagccctaccgataacgattttggtaacgagataaaaagtaaatggagccgataa

SEQ ID NO: 60857 - DNA, 375 bp, Neisseria meningitidis; identical to SEQ ID NO: 46249

SEQ ID NO: 60858 - DNA, 687 bp, Neisseria meningitidis; identical to SEQ ID NO: 39157

SEQ ID NO: 60859 - DNA, 183 bp, Neisseria meningitidis; identical to SEQ ID NO: 38466

SEQ ID NO: 60860 - DNA, 1542 bp, Neisseria meningitidis
atgaccgaaatgcaacaacgcgcccaactgcaccgccaaatttggaaaattgccgacgaagtacgcggcgcggtggatggctgggactttaaacaatacgttctcggcacacttttctaccgctttatcagcgaaaacttcaccgactatatgcaggcaggcgacagcagtattgattacgccgctatgccggacagcatcatcacgcccgaaatcaaagacgatgccgtcaaagttaaaggctatttcatctaccccagccagcttttttgcaatattgccgccgaagcccatcaaaacgaagagctcaacaccaagctgaaagaaatctttaccgcgattgaaagctccgcctccggctatccgtccgaacaagacattaaaggcctgtttgacgacttcgataccaccagcagccggctcggcagcacagttgccgacaagaacaaacgccttgccgccgtcctcaaaggcgtggcggaacttgatttcggcagttttgaagaccaccacatcgaccttttcggcgatgcctacgaatacctgatttccaactacgccgccaacgcaggcaaatccggcggcgaatttttcaccccgcaaagcgtatccaagctgattgcgcggctggcggtgcacgggcaggagaaagtaaacaaaatctacgacccagcttgcggctcgggcagcctgctcttgcaggcgaaaaaacagtttgacgagcacatcatcgaagaaggcttcttcgggcaggaaatcaaccacaccacctacaacctcgcccgcatgaatatgtttctgcacaacgtcaattacaacaaattccacatcgaattgggcgacacactgactaatcccaagctcaaagacagcaaaccctttgatgccatcgtttccaatccgccttattccatcaactggataggcagcgacgaccccaccttaatcaacgacgaccgctttgcccccgcaggcgtacttgccccgaaatccaaagccgattttgccttcatcctgcacgcactgaactacctttccggcagaggccgcgccgccatcgtctcattccccggcattttctatcgcggcggcgcagagcaaaaaatccgccaatatctggtggagggcaactacgtggaaaccgtgattgcccttgcgcccaatctcttttacggcaccggcatcgccgtcaatatcctggttttgtccaaacacaaagacaataccgacatccaatttatcgacgcaagcggcttctttaaaaaagaaaccaacaacaacgtcttaaccgaagaacacattgccgacatcgtcaaactcttcgccgacaaagccgatgtgccgcatatcgcccaaaacgctgcccagcaaaccgtcaaagacaacggctacaacctcgccgtcagcagctatgttgaacccgaagacacacgcgaaattatcgacatcaaacagcttaacgccgaaatcggcgaaaccgtcgccaaaatcgaacggctgcggcgcgaaattgacgaagtgattgcagagattgaggcctag

SEQ ID NO: 60861 - DNA, 807 bp, Neisseria meningitidis; identical to SEQ ID NO: 50298

SEQ ID NO: 60862 - DNA, 279 bp, Neisseria meningitidis; identical to SEQ ID NO: 36778

SEQ ID NO: 60863 - DNA, 513 bp, Neisseria meningitidis; identical to SEQ ID NO: 37445

SEQ ID NO: 60864 - DNA, 2142 bp, Neisseria meningitidis
atgaacaatccattggtgaatcaggctgctatggtgctgcctgtgtttttgttgagtgcttgtttgggcggaggcggcagtttcgatcttgattctgtcgataccgaagccccgcgtcccgcgccaaagtatcaagatgtttcttccgaaacaccgaaagcccaaaaagaccaaggcggatacggttttgcgatgcgctttaagcggctgaatcggcatcctaaggcaatgcctcaagaaaatgaggttaaattaaagaatgatgattgggaggtaacaggattgccgacagaacccaagaaactgccattaaaacaagaatccgtcattttacaagtacaagcaagcaatggcgataacaatatttacacttccccttatcttacgcaatcaagccataattctcacaacggcagcgtcaatggcggtgcaaaccaaccaaaaaacgaagcaacaggttacaaaaatttcgaatatgtttattccggttggttttataaacatgcagtgaatgaaacagatttcagtaaaaacaaatttaagtcaggcgacgacggttatatcttttatcacggcaaaaaaccttcccgacaacttcccgcttctggaaaagttacctataaaggtgtgtggcattttgtaaccgatacgaaaaagggacaaaaatttcacgatattcttgaagcctcaaaagggcaaggcgacaggtatagcggattttcgggcgatgaaggcgaaacaatttccaatagaactgattccgagcttaagacggatcaagagggttatggttttacctcaaatttagaagtggatttcgacaataagaaattgacgggcaaactgatacgcaatgataaagttacaaacgctactactggcgacaaacataccacgcaatattacagccttgaggctcaagtaacaggcaaccgcttcagcggaaaagcggaagcaactgacaaacctgaacaagacggaaccaaacaacatccctttgtttccgactcgtcttctttgagcggcggctttttcggcccgcagggtgaggaattgggtttccgctttttgagcaacgatcaaaaagttgccgttgtcggcagcgcgaaaaccaaagacaaagccgaaagtggcaagactgtggcggcttcaggcggcacaggtgcggcagcatcgggcggtgcggcagatatgccgtctgaaaacggtaagctgaccacggttttggatgcggttgaattgacactaaacgacaagaaaatcaaaaatctcgacaacttcagcaatgccgcccaactagttgtcgacggcattatgattccgctcctgcccaaggattccgaaagcgggaaaactcaggcagataaaggtaaaaacggagaaacagcctttatctataaaacgacctacacgccgaaaaacgatgacaaagataccaaagcccaaacaggtgcgggcggcacgcaaactgcttcgggtacggcgggcgttaccggcgggcaggcaggaacgaaaacctatgaagtcgaagtctgctgttccaacctcaattatctgaaatacgggttgctgacgcgtaaaaccgccggcaacacggtgggaagcggcaacggcagccaagccgccgcccaaacggacgcgcagagtatgttcttacaaggcgagcgcaccgatgaaaaagagattccaagtgagcaaaacgtcgtttatcgggggtcttggtacgggtatattgccaacgacacaagctggagcggcaatgcttcagataaagagggcggcaacagggcggaatttactgtgaattttgccgataaaaaactcgacggaacgctgacggctagggagcgtacgtctcccacgtttaccattaccgccacgattcaggacaacggtttttccggtacggcgaaaactgctgacttaggttttgatctcgatcaaagcaataccaccggcacacctaaggcatatatcacagatgccaaggtgcagggcggtttttacgggcccaaagccgaagagttgggcggatggtttgcctatccgggcgataaacaaacgaaaaatgcaacaaatgcatccggcaatagcagtgcaactgtcgtattcggtgcgaaacgccaacagcctgtgcgataa

SEQ ID NO: 60865 - DNA, 360 bp, Neisseria meningitidis; identical to SEQ ID NO: 54332

SEQ ID NO: 60866 - DNA, 528 bp, Neisseria meningitidis; identical to SEQ ID NO: 54496

SEQ ID NO: 60867 - DNA, 966 bp, Neisseria meningitidis
atgagctacacgcaactgacccaaggcgaacgataccacatccaatacctgtcccgccactgcaccgtcaccgaaatcgccaaacagcttaaccgccacaaaagcaccatcagccgcgaaatcagacggcaccgcacccaagggcagcaatacagcgccgaaaaagcccagcggcaaagccggactatcaaacagcgtaagcgacaaccctataagctcgattcgcagctgattcagcacatcgacccccttatccgccgcaaactcagtcccgaacaagtatgcgcctacctgcgcaaacaccaccggatcacgctccaccacagcaccatttaccgctaccttcgccaagacaaaagcaacggcagcacgttgtggcaacatctcagaatatgcagcaaaccctaccgcaaacgctacggcagcacatggaccagaggcaaagtacccaaccgtgtcgtcatagaaaaccgacccgctatcgtcgaccagaaatcccgtatcggcgattgggaagccgacaccattgtcggcaaaggacagaaaagcgcattattgaccttggtcgaacgcgttacccgctacaccatcatctgcaaattggatagcctcaaagccgaagacactgcccgggcagctgttagggcattaaaggcacataaagacagggtgcacaccattaccatggataacggcaaagagttctaccaacacaccaaaataaccaaagcattgaaagcggagacttatttttgtcgcccttaccattcttgggagaaagggctgaatgagaacaccaacggactcatccggcaatacttccccaaacaaaccgatttccgtaacatcagtgatcgggagatacgcagggttcaagatgagttgaaccaccgaccaagaaaaacacttggctacgaaacgccaagtgttttattcttgaatctgttccaaccactaatacactag

SEQ ID NO: 60868 - DNA, 1407 bp, Neisseria meningitidis; identical to SEQ ID NO: 37873

SEQ ID NO: 60869 - DNA, 642 bp, Neisseria meningitidis; identical to SEQ ID NO: 46589

SEQ ID NO: 60870 - DNA, 279 bp, Neisseria meningitidis; identical to SEQ ID NO: 36597

SEQ ID NO: 60871 - DNA, 2298 bp, Neisseria meningitidis
atgcaaccgcacgctccacataccgattccaatacgctgatgctcggccgatacgccgaacgcgcctatctcgaatacgccatgagcgtggtcaaaggccgcgcgctgcctgaagtttcagacggccaaaagcccgttcagcggcgcattttgtttgcgatgcgcgatatgggtttgacggcgggagcgaagccggtgaaatcggcgcgcgtggtcggcgagattttgggtaaataccacccgcacggcgacagttccgcctatgaggcgatggtgcggatggcgcaggattttaccttgcgctatcccttaatcgacggcatcggcaacttcggttcgcgtgacggcgacggggcggcggcgatgcgttacaccgaagcgcggctgacaccgattgcggaattgctgttgtccgaaatcaatcaggggacggtggatttcgtgccgaactacgacggcgcgtttgacgaaccgctgcacctgcccgcccgcctgcctatggtcttgctcaacggtgcgtcaggcattgcggtgggtatggcgaccgaaatcccatcacacaatttgaatgaagtcacacaggcggcgattgcactgttgaagaagccgacgctggaaaccgccgacctgatgcaatacatccctgctcccgattttgccggaggcggtcaaatcatcacgccggcggacgaattgcgccgtatttacgaaaccggcaagggcagcgtgcgcgtgcgtgcgcgttacgaaatcgagaagctggcgcgcggacaatggcgcgtcatcgtaaccgagctgccgccgaacgccaattccgccaaaatccttgctgaaatcgaagaacagaccaacccgaaaccgaaagcaggcaaaaagcagctcaaccaagaccagctcaatactaaaaagctgatgctggatttaatcgaccgcgtgcgcgacgagtcggacggcgaacatcccgtgcgccttgtatttgaaccaaaatccagccgcatcgataccgataccttcatcaacacgctgatggcgcaaacttcgctggaaggcaatgtgtccatgaacttggtgatgatggggctggacaaccgccccgcgcagaaaaacctgaaaacgattttgcaggaatggttggatttccgcaccgttaccgtaacacgccgtctgaaattccgtttgaaccaagtggaaaaacggctgcacatcctcgaaggccgtctgaaagtctttctgcacatcgacgaagtgattaaagtcatccgcgaatcagatgacccgaaagccgatttgatggcggcgttcgggctgaccgaaatccaagccgaagacattttggaaatccgcctgcgccagttggcacgtttggaaggtttcaaactcgaaaaagaattgaacgaattgcgcgaagaacaaggccgtctgaacatccttttgggcgatgaaaacgaaaagcgcaagctgattatcaaagagatgcaggcggatatgaaacaatacggcgatgcacgccgcacgctggtggaagaggccggacgcgccgtgctgacacaaaccaccgccgacgaacccatcacactgattctgtcggaaaaaggctggatacgcagccgtgccggacacaatctcgatttgagccaaaccgcgttcaaagaaggcgaccgcctcaaacaaacccttgaaggcagaacggttttacccgtcgtcatcctcgattcattgggcagaacctatacactcgatgccgccgaaattcccggcggacgcggcgacggcgtgccggtttcatccttgatcgagttgcaaaacagcgcgaaacccgttgcgatgttgacaggattgccggaacaacattatttattatcaagcagcggcggctacggcttcatcgccaagttggctgatatggtcggacgcgtaaaagcgggcaaagtggtgatgaccacagacagtggcgaaaccgtcctgccgccgattgccgtctatgcctcctcgttcatcaaccccgactgcaaaatcattgccgccaccagtcaaaaccgcgccctcgccttccccatcggcgaattgaaaattatggcgaaaggcaaagggctgcaaatcatcggattaaacgccggcgaatcgctgacgcataccgccgtttcttccgagccggaaatcctgattgaaagcgaaggcaggcgcggcgcggcgcacaaagaccgcatccccgtctccctgcttgaggcaaaacgcggcaaaaaaggcaaactattacccatatcgggcagcctgaaacagctttcttcccccaaataa

SEQ ID NO: 60872 - DNA, 405 bp, Neisseria meningitidis
ttggctgaaggtcaaaaatcagccgtcaccgagtattacctgaatcacggcatatggcccggcaacaacagttctgccggcgtggcaacctccgcctccgacatcaaaggcaaatatgttcaaagcgttgaagtcgcaaaaggcgtcattaccgccacaatgctttcaaccggcgtaaacaaagaaatccaaggcaaaaaactctccctgtgggccaagcgtcaaaacggttcggtaaaatggttctgcggacagccggttacgcgcgacgccaccaacgccgacgacgttaccgccgacggcaacgacaaaatcgacaccaagcacctgccgtcaacctgccgcgatgattcatctgtcgtttgcatagaaacaccacctacggctttctataaaaatacctaa

SEQ ID NO: 60873 - DNA, 2178 bp, Neisseria meningitidis
atgtgtaaaccgaattatggcggcattgtcttgttgcccttacttttggcatcttgcatcggcggcaatttcggcgtgcagcctgttgtcgaatcaacgccgaccgcgtaccccgtcactttcaagtctaaggacgttcccacttcgccccctgccaaaccttctatagaaaccacgccggtcaatcaacctgccgtcggtgcggcaatgcggctgccaaggcggaatatcgcagcttttgataaaaatggtaatgaaattcccgatagtaagcaggcagaggagtatctgccgctcaaagaggaggatatcctgtttttagacggtacgccgaaagaacaggctgataaacttaaaaaggaaatcaacggacggtatcctaatgtaacaatctacacgtccgatttaaaagatgctgtgtataaatatgaacatgtccgggccggatatgtttatactagatttggaacagatgaaatcgaacagaactcaggtggtaagcaggttacccaccgcttaggttatgatggttttgtatattattctggagaacgtccttcccaatctttaccgagcgcgggaacggtgaaatattccggaaactggcaatatatgaccgatgtcaaacgtcatcgagcaggtaaggcggttggcattgacaatttgggttatatcacattttatggtaacgatgttggtgcaacttcttatgcggctaaggatgtcgacgaaagggaaaaacatcctgctaaatatacggttgatttcgataagaaaactttgacaggtcaattaattaaaaatcagtatgtgcaaaagaaaaccgatgaaaagaaaccactgaccatttacaacattactgcaaaattggacggcaaccgctttaccggcagtgccaaggtcaatcctgatttagcgaaaaaccctgccggtaatgagcgtttgtttttccatgccgatgccgatcagcggcttgagggcggttttttcggcgataacggagaagagcttgccggacggtttatcagcaacgacaacagcgtattcggcgtattcgcaggcaaaaaaacagagacagcaaacgcagcagatacaaaacctgccctgccgtctggaaaacacaccaaaatcttggattctctaaaaatttccgttgacgaggcgactgatggccatgcccgtaagtttgccatttcctctatgcccgattttggtcatcccgacaaacttcttgtcgaagggcgtgaaattcctttggtaaacaaagaacaaatcatcaagcttgccgacggcaggaaaatgaccgtcagtgcttgttgcgattttctgacctatgtgaaactcggacggataaaaaccgaccgccccgccgccaaaccaaaggcacaggacgaagattccgaagatgaaattggtgaaagcgaagaaaacgaagacgaaatcagcgatgaagaaggcacggaagatgaagtcgtagaagatgaaggcagcgaagaagacgaagtttccgaaggtgataacggtgaaaacgaagaagaaatcgccgaagaagaaaccgaagaagaagttgatgaagccgaagaggagaaagttgaagaacccgaagaagaattgccggcagaagaaggcaacggcggttcaggcagcatcctgcccactccggaagcccctaaaggcagggacatcgaccttttcctgaaaggtatccgcacggcggaagccgacattccaaaaactggaaaagcacactataccggcacttgggaagcgcgtatcggcgtaccagataagaaagacgatcagcctggcactacgttcattcaaaaggatagctatgcgaatcaaggggcaaaagcagaatttgacgttgatttcggcgcgaagtcgctttcaggtaagttgacagaaaaaaatgatacacaccccgctgtttatattgaaaacggtgtgattgatggcaacggtttccacgcgacagcacgcactcgggataacggtattgacctttctgggcagggttcgaccagcccgcagagcttcaaagccaacaatcttcttgtaacaggcggcttttatggaccgcaggcggcggaattgggcggtaatattatcgacagcgaccggaaattcggcgcggtattcggtgcgaagaaagataataaagaggtggaaaaatga

SEQ ID NO: 60874 - DNA, 429 bp, Neisseria meningitidis
atggacatcctctcgcgccaagaagtcagccgcatcggtctgaaacgcaaacttgcaccgcacgccgaaagcgaagaagagttggaaaacgtgttaaacgaatttgccgaacgcaactggcagtcggatttgcgctatgccgaagcctatatccgcagcaaaagccgcaaacacggttcattgaggctgaaacaggctttggcgcaacagggcatagatgaagaaaccagccgcaacctgcttcccgaccgctcaagcgaaaaacagaccgccatagacgtgttgcgtaaaaaattcaaacaccccgccgccgaccttaaagaaaaacaaaaacaggcgcgtttcctcgcctatcgcggattcgatgccgataccgttcagacggcattgaaacacgcttgggacgaaaattgggaagacggctgctga

SEQ ID NO: 60875 - DNA, 381 bp, Neisseria meningitidis
atgaatatcaggtttttcgcgctgaccgtaccggttttgtctttggcggcctgtgccgtgccggaggcgtatgatgacggcggacgagggcatatgccgcctgttcaaaaccaagccggcacggacgattttcgggcgttttcctgcgagaacggtttgtctgtgcgggtccgccatttggacagcggcaaagtcgcgttgcggctagacggcaggcgtgccgtcctctcttccgacgttgccgcatccggagaacgctataccgccgaacacggtttgttcggaaacgcaaccgagtggcaccagaaaggcggcgaagcctttttcggctttaccgatgcctacggcaattcggtcgaaacttcctgccgcgcccgttaa

SEQ ID NO: 60876 - DNA, 360 bp, Neisseria meningitidis; identical to SEQ ID NO: 45472

SEQ ID NO: 60877 - DNA, 1848 bp, Neisseria meningitidis
atgcacgacacccgtaccatgatgatcaaaccgaccgccctgctcctgccggctttatttttctttccgcacgcatacgcgcctgccgccgacctttccgaaaacaaggcggcgggtttcgcattgttcaaaaacaaaagccctgacaccgaatcagttaaattaaaacccaaattccccgtccgcatcgacacgcaggacagtgaaatcaaagatatggtcgaagaacacctgccgcttatcacgcagcagcaggaagaggttttggataaggaacagacaggcttcctcgccgaagaagcaccggacaacgttaaaacgatgctccgcagcaaaggctatttcagcagcaaagtcagtctgacggaaaaagacggagcttatacggtgcacatcacaccgggcccgcgcaccaaaatcgccaacgtcggcgtcgccatcctcggcgacatcctttcagacggcaacctcgccgaatactaccgcaacgcgctggaaaactggcagcagccggtaggcagcgatttcgatcaggacagttgggaaaacagcaaaacttccgtcctcggcgcggtaacgcgcaaaggctacccgcttgccaagctcggcaacacccgggcggccgtcaaccccgataccgccaccgtcgatttgaacgtcgtcgtggacagcggccgccccatcgccttcggcgactttgaaatcaccggcacacagcgttaccccgaacaaatcgtctccggcctggcgcgcttccaaccgggcacgccctacgacctcgacctgctgctcgacttccaacaggcactcgaacaaaacgggcattattccggcgcgtccgtacaagccgacttcgaccgtctccaaggcgaccgcgtccccgtcaaagtcagcgtaaccgaggtcaaacgccacaagctcgaaaccggcatccgcctcgattcggaatacggtttgggcggcaaaatcgcctacgactattacaacctcttcaacaaaggctatatcggctcggtcgtctgggatatggacaaatacgaaaccacgcttgccgccggcatcagccagccgcgcaactatcggggcaactactggacaagcaacgtttcctacaaccgttcgaccacccaaaacctcgaaaaacgcgccttctccggcggcatctggtatgtgcgcgaccgcgcgggcatcgatgccaggctgggggcagagtttctcgcagaaggccggaaaattcccggctcggatatcgatttgggcaacagccacgccacgatgctgaccgcctcttggaaacgccagctgctcaacaacgtgctgcatcccgaaaacggccattacctcgacggcaaaatcggtacgactttgggcacattcctgtcctccaccgcgctgatccgcacctctgcccgcgcaggttatttcttcacgcccgaaaacaagaaactcggcacgttcatcatacgcggacaagcgggttacacccttgcccgcgacaatgccgatgtcccctcggggctgatgttccgcagcggtggcgcgtcttccgtgcgcggttacgaactcgacagcatcggacttgccggcccgaacggatcggtcctgcccgaacgcgccctcttggtgggcagcctggaataccaactgccgtttacgcgcaccctttccggcgcggtattccacgatatgggcgatgccgccgccaatttcaaacgtatgaagctgaaacacggttcgggactgggcgtgcgctggttcagcccgcttgcgccgttttccttcgacatcgcctacgggcacagcgataagaaaatccgctggcacatcagcttgggaacacgcttctaa

SEQ ID NO: 60878 - DNA, 513 bp, Neisseria meningitidis; identical to SEQ ID NO: 40766

SEQ ID NO: 60879 - DNA, 1236 bp, Neisseria meningitidis; identical to SEQ ID NO: 39525

SEQ ID NO: 60880 - DNA, 624 bp, Neisseria meningitidis
atgatgaaaccgcacaacctgttccaattcctcgccgtttgctccctgaccgtcgccgtcgcttccgcacaggcgggcgcggtggacgcgctcaagcaattcaacaacgatgccgacggtatcagcggcagcttcacccaaaccgtccaaagcaaaaagaaaacccaaaccgcgcacggcacgttcaaaatcctgcgcccggacctcttcaaatgggaatacacttcgccctacaaacagactattgtcggcgacggtcaaaccgtttggctctacgatgttgatttggcacaagtgaccaagtcgtcccaagaccaggccataggcggcagccccgccgccatcctgtcgaacaaaaccgccctcgaaagcagctacacgctgaaagaggacggttcgtccaacggcatcgattatgtgctggcaacgcccaaacgcaacaacgccggctaccaatacatccgcatcggcttcaaaggcggcaacctcgccgccatgcagttgaaagacagcttcggcaaccaaacctccatcagtttcggcggtttgaacaccaatccccaactctcgcgcggcgtgttcaagtttaccccgcccaaaggcgtggacgtgttgagcaactga

SEQ ID NO: 60881 - DNA, 735 bp, Neisseria meningitidis; identical to SEQ ID NO: 47771

SEQ ID NO: 60882 - DNA, 2631 bp, Neisseria meningitidis
atgcaagaacaatatcaacccgccgccatcgagcctgcggcgcagaaaaaatgggacgacgcccgtattttcaacgtctccgaagacgcttccaaacccaaatattattgcctctccatgttcccctatcccagcggcaagctgcatatggggcatgtgcgcaactacaccatcggcgatgtattgagccgcttcaaacttttaaacggcttcaacgtcatgcagcctatgggttgggacgcgttcggcatgccggcggaaaacgcggcgatgaaaaacaacgtcgcccctgccgcttggacgtacgataacatcgaatacatgaaaacccagctcaaaagcctgggttttgcgattgactgggcgcgcgaaaccgcaacctgcaaacccgaatactaccgctgggaacaatggctgtttaccaagctgtttgaaaaaggcatcgtctatcgcaaaaacggcacggtaaactgggatccggtcgaccaaaccgtccttgccaacgagcaagtcatcgacggacgcggctggcgttccggcgcattgatcgaaaaacgcgaaatcccgatgtattacttcaaaatcacggattacgccgaagagctgctcaacgacttggacaagctggaacactggccggaacaagtcaaaaccatgcagcgcaactggatcggtaaatctcgcggcatgaccgtgcgcttcgccgtttcagacgacagcaaacaaggtttggaaggcgattacgcgaaattcctgcaagtttacaccacccgccccgacacgctgatgggcgcgacttatgtcgccgttgccgccgagcatccgctggcaaccgccgcagccgccgacaaacctgaattgcaagagtttatcgccgaatgcaaagccggctcggtcgccgaagccgatatggcgacgatggagaaaaaaggcgtgccgaccggccgctacgtcgtcaacccgctcaacggcgacaagctggaagtgtggattgccaactatgtattgtggggctacggcgacggcgcggtgatggcggttccggcgcacgacgaacgcgattttgagttcgccaccaaatacaatctgccgaaaaaacaagtcattgccgtcggcgacaacgcatttgacgaaaaccaatggcaagaatggtacggcgacaaagaaaacggcgtattggtcaacagcggcgacttggacggcttggattttcagacggcattcgacgccgtcgccgccaagctgcaaagccaaggcgcgggcgaaccgaaaacccaataccgcctgcgcgactggggcatttcgcgccaacgctactggggctgcccgattcccatcgtccattgcgaacaatgcggcgacgtacccgtccctgccgaccaattgccggtcgttttgcctgaaaacgtcgtacccgacggcatgggttcgccgctggcaaaaatgcccgagttttacgaaactgcctgcccatgctgcggcggcgcggcgaaacgcgaaaccgacaccatggacaccttcatggaatcgagctggtatttcttccgctacatgtcgccaaaattttcagacggcatggtcgatcctgccgccgcgaaatactggggcgcggtcgaccaatacatcggcggcatcgaacacgcgattttgcacctcttgtacgcgcgtttcttcaccaaactgatgcgcgacgaaggtctagtcaatgttgacgaaccgtttgaacgcctgctgacgcaaggcatggtcgtttgcgaaacctactaccgcgaaaacgacaaaggcggcaaagattggatcaaccccgccgatgtcgagctgacgttcgacgacaaaggccgccccatttccgccgtcctcaaagccgacgggctgcccgtcgtcatcagcggcacggaaaaaatgtccaagtccaaaaacaacggcgtcgatccgcaagaactgattaacgcctacggcgcggacaccgcccgcctgtttatgatgttcgccgcaccgcccgaacagtccctcgaatggagcgacagcggcgtcgaaggcgcacaccgcttcctgcgccgcctgtggcgtaccgtttacgaatacttgaagcaaggcgaagcggtcaaagcgttcgcaggcagccaagacggtttgtctaaagaactcaaagacctgcgccacaaactgcacgcgaccactgccaaagtcagcgacgactacggccgccgccagcagttcaacaccgccatcgccgccgtgatggaattgctcaaccaatacgacaaaaccgacaccggcggcgaacaaggacgcgccgtcgcccaagaagtattggaaaccgccgtacgcctgttgtggcccatcgtgccgcacatctgcgaaaccctgtggagcgaattgaacggcgcgaaactgtgggaagcaggctggccgacagtcgacgaagccgccttggtcaaatccgaaatcgaagtgatggttcaagtcaacggcaaactgcgcggcaaaatcaccgtcgccgccgacgcctccaaagccgacctcgaagccgccgcccttgccactgaaggcgcggtgaaattcatggaaggcaagcccgcgaagaaaatcatcgtcgtaccgggcagactggtgaacatcgtcgtctaa

SEQ ID NO: 60883 - DNA, 810 bp, Neisseria meningitidis; identical to SEQ ID NO: 54299

SEQ ID NO: 60884 - DNA, 414 bp, Neisseria meningitidis
atgcaagttgaggtggtcagtagcgagcaaaacatctattcgggcgaagccagctttgtagtggttccgaccgttcaaggtgagcttggtatttacccgcgacacgagccgattatgagtttggtgcggccgggggctttgcgtttgaccgttccgggcgaggataaagaggttttggttgctgtttccggcggtgttttggaagtacagcctgataaagtaactatcttggcggatgttgccgtccgcagtgcggagatggatcaggcacgtgcggaagaggcgaaaaaagccgcagaagcgggcatttcccaagctaaagacgataaggctttggcggaggcgcataaagcattggctgctgcgattgcacagctcaaaactttggactatatccgttcgcacaagaaataa

SEQ ID NO: 60885 - DNA, 264 bp, Neisseria meningitidis
atgtcattaatcgaatttttattcggcagaaagcagaaaacggcaaccgttgcccgcgaccgccttcaaatcatcattgcccaagagcgcgcccaagaaggtcaggctccggattacctgccgactttacgtaaagagttgatggaagtcctgtccaaatatgtgaacgtttcattagacaatatccgtatttcccaggaaaaacaggatggtatggatgtgcttgagttgaacattactttgccggaacagaaaaaggtatag

SEQ ID NO: 60886 - DNA, 1407 bp, Neisseria meningitidis
atggaaaaaaacaccctatccgcccgcgcaccatccccttggctgccgcttctgctggcaattgccatttttatgcagatgttggatgcgaccattttaaataccgcactgcctgaaattgccgccgacatgaatgagtcgcctctggatatgcaactggcagtcgttgcctatacgctgacggttgccctgctgattcctttgagcggttatttggcggacaggttcggaacgaaaaaagtctttttcggttcgattgccgtttttatgctcggatcggcattgtgcgccgcatcgggttcgctgtttgaattgacgctttcccgtgtcgttcagggcatcggcggttcgatgctggttccgataccgcgtctgaccatcttgcgtgtgtacgacaagtccaagctgctcaacgccatcaattatgcggttatgcccgcattaatcggaccggttttagggcctttggcgggcggttatctggtcgaatacgcttcgtggcactggattttcctgctcaacctgcccatcggtcttttgggtttcatattgggacgcaacatcatgcccgatattaaaggcagcaatatctctttagacttcaaaggttatctgattttttctgccgccgcgtgcctcttgttactttcggcagaaagcctgtcgcacgcgctgcctccgtattttgcactgttgccgctgtgcggcggactgctgtttgcacgccgttatttccgacatatgaaaaccgcgtccaaaccgatttattccgccgacctgtttctgatacgcactttccgtctgggactggcgggcaatctgttcagccgtctcggcatcagctcgattccttttctgatgcccctgatgtttcaagtcgctttcggcttcggcgcaagcctgtcgggttggctggtcgcccccgtcgccctgtcttcgctgctggtcaaaccgctgattgcaccgctcatgaaacgtttcggctaccgcacggtactgctttggaacaccaagctgcttgccgccttcatcatgctgctcgccctgcctgacggaaactcgtcgctgtggatttggattttcctctcgctggcgatcggcgcgtgcaactccctgcagttttctgccatgaatacactgaccctcgccggtttgcgcccgcaacagaccggcagcggcaacagcctgatggcggtcaaccaacagcttgccatcagcatgggcattgttgtcggcgcattaatccttaaaaactggacatttctgataccggcttcttcaggtctgcattccgccttccgtatgaccctgctcagcatcggcggcatcacccttgcctcgtcgttggttttcaagcgtctgcacgtttcagacggcgcaaacctgacacggaacacaccgtcctaa

SEQ ID NO: 60887 - DNA, 648 bp, Neisseria meningitidis; identical to SEQ ID NO: 44369

SEQ ID NO: 60888 - DNA, 492 bp, Neisseria meningitidis; identical to SEQ ID NO: 36862

SEQ ID NO: 60889 - DNA, 777 bp, Neisseria meningitidis; identical to SEQ ID NO: 38952

SEQ ID NO: 60890 - DNA, 870 bp, Neisseria meningitidis
atgaaaccgataaaaaaagccgtcttccccgtcgcagggatgggaacccgcttcctgcccgccaccaaggcaagcccgaaagaaatgctgcccatcgtcgacaagccgctgatccaatacgccgtagaagaagccgtggaagccggctgcacggaaatggtgtttgttaccggacgcaacaaacgcagcatcgaagaccatttcgacaaggcatacgaactcgaaaccgagttggaaatgcgccataaagacaaacttctggaacacgtccgcaacatcctgccaccgaacattacctgcctctacatccgtcaggcggaagcactgggcttgggacacgccgtcttgtgcgcccgcgccgccatcggagacgaacccttcgccgtgattttggctgacgatttaatcgatgccccaaaaggcgcgctcaaacaaatggtcgaagtgtacgaacgcagcggcaacagcattttgggcgtagaaaccgtcgaaccgtcgcaaaccggctcatacggcatcgtcgaaaccgaacagctcaaacagttccaacgcattaccggcattgtcgaaaaacccaagcccgaagacgcgccctccaaccttgccgtcgtcggacgctacatccttaccccgcgcattttcgacctcttaaccaatcttccgcgcggcgcgggcaacgaaatccagcttacagacggcatcgccaagctgctcgatcacgaatttgtcctggcgcacccctttgaaggcacgcgctacgactgcggcagcaaactgggctacctcgaagccaccgtcgcctacggcctgaaacaccccgaaaccggcgaacccttccgccgccttttggaaaaataccgtaccgaataa

SEQ ID NO: 60891 - DNA, 951 bp, Neisseria meningitidis; identical to SEQ ID NO: 54411

SEQ ID NO: 60892 - DNA, 855 bp, Neisseria meningitidis; identical to SEQ ID NO: 55306

SEQ ID NO: 60893 - DNA, 7530 bp, Neisseria meningitidis
atgaataaaactctctatcgtgtaattttcaaccgcaaacgtggggctgtggtagccgttgctgaaactaccaagcgcgaaggtaaaagctgtgccgatagtgattcaggcagcgctcatgtgaaatctgttccttttggtactactcatgcacctgtttgtcgttcaaatatcttttctttttctttattgggcttttctttatgtttggctgtaggtacggccaatattgcttttgctgatggcattattgctgataaagctgctcctaaaacccaacaagccacgattctgcaaacaggtaacggcataccgcaagtcaatattcaaacccctacttcggcaggggtttctgttaatcaatatacacagtttgatgtgggtaatcgcggggcgattttaaacaacagccgcagcaacacccaaacacagctaggcggttggattcaaggcaatctttggttggcaaggggcgaagcacgtgtggttgtaaaccaaatcaacagcagccattcttcacaaatgaatggctatattgaagtgggcggacgacgtgcagaagtcgttattgccaatccggcagggattgcagtcaatggtggtggttttatcaatgcttcccgtgctactttgacgacaggccaaccgcaatatcaagcaggcgcattaacaggctttcaggttcgttcgggtcatattgcgatcacgggacaaggtttggatgcacgtgataccgatttcacgcagatattgagccatgcggttaagattgatgggcctgtgtggggtaaagatgtgcgtgtgtcggcagggaaaaatgatgtctcagctgatggctctatccagtcttcacactcccctgctacgaatataaattccgacaactcactgtatgccatcgatacaggggcattgggcggtatgtatgccggtaagatcaccctgatcagcactgatcgtgatgcatccgtgcgcaatcaggggcaatggtttgcctcagccggcaatgtggcgattgatgcaaatggccgtttagtcaatagtggcacgatggctgccgccaatgcgaaagatacggataatacagcggaacacaaagtcaatatccgcagtcagggcgttgaaaacagcggtacggcggtatcgcaacaaggcactcaaattcacagtcagtcgattcaaaacactggcacattattgtcctcaggcgaaatattgattcacaattcgggcagcctgaaaaatgaaacatcaggcaccattgaagccgctcgtttggctattgataccgacacacttaataatcaaggcaaactctctcaaacaggttcacaaaaactccatattgatgcacaaggcaaaatggataaccgtggccgcatgggtttacaagataccgcaccaaccgcgtcaaatggttcaagcaatcaaaccggcaatagttacaatgcatctttccattcatccactaccacaccaacaacggcaacaggtacgggtactgcaaccgtttctatatcaaacataactgcgcctacctttgctgatgggacaattcgcactcatggtgcactggataattcaggcagtattattgccaatggtcaaacagatgttagtgcgcaacaaggtttaaataatgcaggacaaatagacattcatcagttaaatgcaaaaggttcggcgtttgacaatcacaatggaacaattatcagtgatgcggtccacattcaagccggcagcctgaataatcaaaatggcaacatcacaacacgccaacagttagagattgaaaccgatcaactggataacgctcatggcaagttattatcagcagaaatagcggatttagccgtttcaggcagcctgaacaatcaaaatggcgaaatagcgaccaatcaacaactgattattcacgatggtcagcaatctaccgctgtcattgataatacgaatggcacgatacaatcaggccgtgatgttgctattcaggcaaaatcgttatccaacaacggcacacttgccgctgataataaactggatattgcgttacaagatgatttttatgtagaacgcaatatcgtggcgggcaatgaattgtcgctcagtacacgaggcagcctgaaaaattcacatactttgcaagcaggaaaacgcattcggattaaagcaaataaccttgataatgcagcacaaggcaacattcaatccggcggtgcaacagacattggcacgcagcacaatttaaccaatagaggcttgattgacggacaacaaaccaaaatccaagccgggcaaatgaataatatcggtacaggtcggatttatggcgacaatatcgctattgcggctacccgcttagacaatcaagatgaaaacggtacaggtgccgccattgcggcacgtgaaaacctgaatttaggcatcggacaattaaacaaccgtgaaaacagtctgatttacagcggtaacgatatggcggttggcggcgcattagataccaatggccaagccacaggcaaagcccaaaggatacacaatgccggcgcaaccattgaagccgccggcaaaatgcgtttaggcgtagaaaagctgcacaataccaatgagcatttgaaaacgcagttggtagaaacagggcgcgagcatattgttgattacgaagcatttggacgacacgaattattgcgggaaggcacacaacatgaattaggctggtctgtctataacgatgaatcagaccacttacgcacccctgatggagcggcgcatgaaaattggcataaatacgattatgaaaaagtcacccaaaaaacccaagttacccaaactgcgccagccaaaatcatttcaggtaatgatttaaccattgatggtaaagaagtatttaataccgatagccaaatcatcgccggcggcaatttgcttgtgcaaacagaaaaagacggtttgcataacgagcaaacctttggcgaaaagaaagtattcagtgaaaatggcaaattacacagctattggcgtgagaaacataaaggacgagactcaacgggacatagcgaacaaaattacactttgccggaggaaatcacacgcaacatttcactgggttcatttgcctatgaatcgcatcgcaaagcattaagccatcatgcgcccagccaaggcactgagttgccgcaaagcaacggtatttcgctaccctatacgtccaattcttttaccccattacccagcagcagcttatatattatcaatcctgtcaataaaggctatcttgttgaaaccgatccacgctttgccaactaccgtcaatggttgggtagtgactatatgctggacagcctcaaactagacccaaacaatttacataaacgtttgggtgatggttattacgagcaacgtttaatcaatgaacagatcgcagagctgacagggcatcgtcgtttagacggttatcaaaacgacgaagaacaatttaaagccttaatggataatggcgcgactgcggcacgctccatgaatctcagcgttggcattgcattaagtgccgagcaagtagcgcaactgactagcgatattgtttggttggtacaaaaagaagttaaacttcctgatggcggcacacaaaccgtattggtgccacaggtttatgtacgcgttaagaatggcgacatagacggtaaaggtgcattgttgtcaggcagcaatacacaaatcaatgtttcaggcagcctgaaaaactcaggcacgattgcagggcgcaatgcgcttattatcaataccgatacgctagacaatatcggtgggcgtattcatgcgcaaaaatcagcggttacggccacacaagacatcaataatattggcggcattctttctgtcgaacagacattattgctcaacgcaggcaacaacatcaacagccaaagcaccgccgccagcagtcaaaatacacaaggcagcagcacctacctagaccgaatggcaggtatttatatcacaggcaaagaaaaaggtgttttagcagcgcaggcaggcaaagacatcaacatcattgccggtcaaatcagcaatcaatcagagcaagggcaaacccggctgcaagcagggcgcgacattaacctagatacggtacaaaccggcaaacatcaagcaacccattttgatgccgataaccatgttattcgcggttcaacgaacgaagtcggcagcagcattcaaacaaaaggcgatgttaccctattgtcagggaataacctcaatgccaaagctgccgaagtcagcagcgcaaacggtacactcgctgtgtctgccaaaaatgacatcaacatcagcgcaggcatcaacacgacccatgttgatgatgcgtccaaacacacaggcagaagcggtggtggcaataaattgattattaccgacaaagcccagagccacaacgaaaccgctcaaagcagcacctttgacggcaggcaagttgtattgcaggcaggaaacgatgccaacatccttggcagcaatgttatttccgataatggcacccggattcaagcaggcaatcatgttcgcattggtacaacccaaactcaaagccaaagcgaaacctatcatcaaacccagaaatcaggattgatgagtgcaggtatcggcttcactattggcagcaagacaaacacacaagaaaaccaatcccaaagcaacgaacatacaggcagtaccgtaggcagcttgaaaggcgataccaccattgttgcaggcaaacactacgaacaaatcggcagtaccgtttccagcccagaaggcaacaatatcatccatgcccaaagcatagacattcaagcggcacacaacaaattaaacagtaataccacccaaacctatgaacaaaaaggcttaacggtggcattcagttcgcccgttaccgatttggcacaacaagcgattgccgtcgcacaaagcagcaaacaagtcggacaaagcaaaaatggtcgtgtcaatgccatggcagctgccaatgcaggctggcaagcctatcaaacaggtaagagtgcacaaaacttagccaatggtacaaccaatgccaaacaagtcagcatctccataacctacggcgaacagcaaaaccgacaaaccacccaagttcaagcaagccaagcccaagcgagtcaaattcaagcaggcggtaaaaccacattaatcgccacaggcgcagcagaacaatccaatatcaacatcgcaggctcagatattgccggcaaagcaggcacaatcctgattgccgataacgacatcacactccaatcagccgagcaaagcaataccgaacgcagccaaaacaaatcgacaggttggaacgcaggtgctgccgtatcattcggacaaggaggctggtcattaggcgttaccgcaggcggcaatgtcggcaaaggctacggcaatggcgatagcgtaacccaccgccatagccatattggcgacaaaggcagccaaacccttatccaaagcggtggcgacactaccatcaaaggcgcgcaagtacgcggcaaaggcgtacaagtcaatgccaaaaacctaagtattcaaagcgtacaagatagagaaacttatcaaagcaaacaacaaaacgccagtgcacaagtgaccgtaggttatggcttcagtgccagtggcgattacagtcaaagcaaaatccgagccgaccatgcttcagtaaccgagcaaagcggtatttatgccggagaagacggctatcaaatcaaggtcggaaaccatacagacctcaaaggcggcatcatcaccagcagccaaagcgcagaagacaagggtaaaaaccgctttcagacggccacccttactaccagcgacattcaaaattacagccaataccaaggaaaaagttttggattgggtgccagcgttgccgtaagcggcaaaacactgggacagggcgcacaaaataaacctcaaaacaaacacctgacaagcgtagccgataaaaacggcgcaagttcatcagtgggttatggcagcgacagcgacagtcaaagcagcatcacgaaaagcggcatcaacacccgcaacatacacatcaccgacgaagcgggacaaatcaggctgacaggcaaaacagcggcacaaaccaaagccgatattgatacaaacgtaaccacagacaccgccgaacgacattcgggcagcttgaagaacaccttcaacaaagaagcggtgcaaagtgaactggatttacaaagggaagtaacccaagagtttgataaaactagacaaggagtgaaacaagaactttatgcagtagtagatagcaaacgagagcaagccacaaaagagagactcaaaaatggtggatatgacaatgataaatctagagcattaaataaggaagctaatgaattagatgaaaaaattcgttggcttgatgcgggattaggactcgtttggggagcagggagttctgatatggcttggagtatgtttgccacaacccaagccgatagagcggtaaggtctgcaactgcacctaaagaaatgtggttccataagaagataatagatgaaaaaacaggtaaagtatcctttgataccagacaaatttggtcattgaatgatttaagcaaggaagaactggcaagcattcaagacacaaatggcaaagttattactgtgtctaatcctggtattttcaataatcgagaagattcattaagcaatgcagcaaaacaaaatcgtaatagtacaaacggtagtggtgttattgcagttatgaatcctccaacagggaaatataaatctgattctaataacaaaataaaagattctttatggctcagttcaagtcttgtttctgaactgatgtatgtcggttacgaccaattaaataataaagtgttccaaggctatttacccaaaaccaattcagaaaaactgaatcaagatatttatcgagaggttcaaaaaatggataatggctggtctgttgataccagtaaccacagtcgtgggggaattacagcaagcgtttccctaaaagattgggtaaacaataaagagcaaaatggcattgccccaatcagaaaagcacgtttctatggtacagccacaaatgtgaagaatgattacgccgatgttttacagaaaaacggctatacctatacgggtgcagacggtaaaacttataacagcggagcctactcaatcgtgcatgataaagattttgtggggaacaaatggatacctttcttgctaggaaccaataacaccacacaaggtgcatgtaaggggttgtgctattcgcatagcagttattttgcggaagtgcctgagcagtatcaaagagatgaaaatgggaatattaaaatggaaaatgggaaacctgttgaaacagaaaactgggaagattacacaaaaaaatggggaatccctaaaacaggtgctgatggtaaatatataaatcatgctattccaaaattagtcaatcccaataatccgaatggagaaaaatatgaaacaaatcctttttaa

SEQ ID NO: 60894 - DNA, 1542 bp, Neisseria meningitidis
atgaaaatcggtatcccacgcgagtcattatccggcgaaacccgtgtcgcctgcacgcccgccaccgttgccctgttgggcaaactgggctttgaaaccgttgtcgaaagcggtgcaggtttggcggcaagtttggacgatgccgcttaccaaacagcaggcgcaaccgttgccgacaaagcggcggtttgggcctgccctttgatttataaggtcaacgcgccgtccgaacaggaactgccgcttttgaacgaaggtcaaaccatcgtcagcttcctgtggccgcgccaaaacgaggctttggtcgaagccttgcgcgccaagaaagtgaacgcgctggcgatggatatggtgccccgcatttcgcgcgcgcaggctttggacgctttgtcttcaatggcaaacatcagcggctaccgcgccgtgattgaagccgccaacgccttcggccgtttcttcaccggtcaaattaccgccgccggcaaagtgccgcccgcgcaggttttggtgattggtgcaggtgtggcgggtttggcggcgatcggtacggcaaactcgctcggcgcagtggtacgcgcgttcgatacccgcttggaagtggcggaacaaatcgaatcgatgggcggcaagttcctgaaactcgacttcccgcaagaatcgggcggcagcggcgacggctacgccaaagtgatgagcgacgaatttatcgccgccgagatgaagctctttgccgagcaggcaaaagaagtggacatcatcatcactaccgccgccattccgggcaaacccgcgcccaagctgattaccaaagaaatggtggaaagcatgaaatccggctccgtcatcgtcgatttggcggcggcgacgggcggcaactgcgaactcacccgcccgggcgaattgtccgtaaccggcaacggcgtgaaaatcatcggctacaccgacatggcaaaccgccttgccggacagtcttcccagctttacgccaccaacttggtcaacctgaccaagctgttaagcccgaacaaagacggcgaaatcacgttggacttcgaagacgtgattatccgcaacatgaccgttacccgcgacggcgaaatcaccttcccgcctccgccgattcaagtttccgcccagccgcagcaaacgtcgtctgaaaaagccgcgcctgccgccaagccggagccgaaacccgttcccctgtggaagaaactcgcgcccgccgtcatcgccgccgtgttggtgctgtgggtcggcgcggtcgcgcccgcagcatttttgaaccacttcatcgtgttcgtcctcgcctgcgtcatcggctactacgtcgtctggaacgtcagccactcgctgcataccccgctgatgtccgtgaccaacgccatctccggcatcatcgtcgtcggcgcgctgctgcaaatcagccaaggcaacggcttcgttaccctgcttgccttcatcgccatcctgattgccagcatcaacatcttcggcggctttgcggtaacacggcgtatgctgaatatgtttaagaaagggtaa

SEQ ID NO: 60895 - DNA, 447 bp, Neisseria meningitidis
atgagactgaccaccaaagggcgttttgccgttaccgctatgctggatttggcgatgaacgcgcaaaccggcgccgtcaaactcagtgccatcagcgaacgccaaaacatatccctctcctatctcgagcaattgttcggcaaactccgccgcgccggactggttgaaagcctgcgcgggcccggcggcggctacatcctcgccgcaccggcggcacgcatcaacatcgcccaaatcatcgccgccgccgaagaccggctggacgcgacccaatgcggcagcaaagccaactgccaccacggtgcgccctgcctgacgcacgacctttgggagaatttaaacaaaaccatcaacgactacctcggcagcgttaccctgcaaagcatcatcgaacagaaaaacaacagcgacggcagccgcgtcgtccaatttacacacatccattaa

SEQ ID NO: 60896 - DNA, 273 bp, Neisseria meningitidis
atgcccattgaggacatccctttttatatttttgacttggcggatttcgatgtaggaattggcgatattggcaatattgtaggttttgctccgagttccagcctgccgaaatcgaaaaaaaatgccttgaccggcattgccttcttaagggggatagatgtctatgaccctcccgtttcaaaagaaaaagcattaaaagccttagagaaatatcctgaaatttatcagaaatttcagcatttctttccgtttgtagagctgcctccgctttaa

SEQ ID NO: 60897 - DNA, 1143 bp, Neisseria meningitidis
atgaaggtttttaaacaacagcttgaacaactcggcgcgcaaaaccaatatcgttcgattccggatttgattcatcaagggcggtatattacgcgggaaaaccgcaaaatgctgaatatgtcgtctaatgattatttgggtttggcatcagatgaaaacttgcgccggtcttttttgcagcaatacggcggtaattttccctcttttaccagttcttcatcgcgtttattaacgggcaactttcctatttataccgatttggaagagcttgtcgcacaacgtttccaacgggaaagcgcgttattgttcaacagcggctatcacgccaatctcggtattttgcctgctttgacgacgacgaaaagtttgattttggcagataaatttgttcacgccagtatgattgacggcatccgtttgagccggtgtgcgtttttccgttatcgtcataatgattatgaacatttgaaaaatctgcttgaaaaaaacgtcggaaaatttgaccgcacttttatcgttaccgaatctgttttcagtatggacggcgatgtggcggatttgaaacagcttgtccaattaaaaaaacagtttcccaatacttatctttatgtggatgaagcccacgcaatcggtgtttatgggcaaaacggattggggattgccgaacgggataatctgattgccgagattgatttattggtcggcactttcggtaaagccttagcctcggtgggggcgtatgccgtctgcaaccaagtattgaaagaatgtttgattaatcaaatgcgcccattgattttttcaaccgcattgccgccgtttaatgtggcttggacttattttatttttgaacgattgccgcaattctcaaaagaaagaagccatcttgagcagttaagtgcatttttacggcgggaagtggcgcatcggacgcaaataatgccgagccaaacctgcatcgtcccctatattttaggcgggaatgaagccgcccttgccaaagcggaatacctgcaaaggcagggttattattgcctgcccatcagaccgccgacagtacccaaaaacacatccagaatccgcctgtctttaacggcagatatgacaacggatgaagtgcggcagtttgcggcgtgcctgtaa

SEQ ID NO: 60898 - DNA, 1071 bp, Neisseria meningitidis
atgtatcggaggaaagggtggggcatcaagccgtggatgggtgccggtgcggcgtttgccgccttggtttggctgattttcgcgctcggcgatactttgactccgtttgcggttgcggcggtgctggcgtatgtgttggaccctttggtcgaatggttgcagaaaaagggtttgaaccgtgcatccgcttcgatgtctgtgatggtgttttccttgattttgttgttggcattattgttgattattgtccctatgctggtcgggcagttcaataatttggcatcgcgcctaccccaattgatcagttttatgcagaacacgctgctgccgtggttgaaaaatacaatcggcggatatatggaaatcgatcaggcatctattattgcgtggcttcaggcgcatacgggcgagttgagcaacgcgcttaaggcgtggtttcccgttttgatgaggcagggcggcaatattgtcagcagtatcggcaacctactgctgctgcccttgctgctttattatttcctgctggattggcagcggtggtcgtgcggcatcgccaaactggttccgaggcgttttgccggtgcttatacgcgcattacgggtaatttgaacgaggtattgggcgaatttttgcgcgggcagcttctggtgatgctgattatgggtttggtttacggcttggggttggtgctggtcgggctggattcggggtttgcaatcggtatggttgccggtattttggtttttgttccctatttgggcgcgtttacaggactgctgctggcaaccgtcgccgccttgctccagttcggttcgtggaacggcatcctatcggtttgggcggtttttgccgtaggacagtttctcgaaagttttttcattacgccgaaaatcgtgggagaccgtatcgggctgtcgccgttttgggttatcttttccctgatggcgttcggacagctgatgggtttcgtcggaatgttggcaggattgcctttggccgccgtaaccttggtcttgcttcgcgagggcgtgcagaaatattttgccggcagtttttaccggggcaggtag

SEQ ID NO: 60899 - DNA, 369 bp, Neisseria meningitidis; identical to SEQ ID NO: 55712

SEQ ID NO: 60900 - DNA, 891 bp, Neisseria meningitidis
atgagcgtattgattaataaagacaccaaagtattggttcaaggtttcaccggtaaaaacggtactttccactccgaacaagctctggcttacggcactaaagttgtcggcggcgttaccccgggcaaaggcggtcaaacccacctgaacctgcctgtattcaacaccatgaaagaagccgttaaagaaaccggcgcggatgcatctgtaatttacgttcccgctccgtttgtgttggattctatcgttgaagccgttgattccggcgtaggcttggtggttgtgattaccgaaggcgtgccgactctggacatgctcaaagccaaacgttacttggaaaccaacggcaacggtacccgcttggtcggccctaactgcccgggcgtgattaccccaggcgagtgcaaaatcggtattatgccgggccacatccacactccgggccgcatcggtattatttcccgttccggtacattgacttacgaagccgtggcacaaaccaccaaactgggcttgggtcaatcaacctgtatcggtatcggcggcgacccgattcccggtatgaaccaaatcgacgcactgaaacttttccaagaagacccagataccgacgccatcatcatgatcggtgaaatcggcggtactgcggaagaagaagcagccgaatacatccaatccaacgtaagcaaacctgttgtcggctacatcgccggtgttaccgctcctaaaggcaaacgcatgggccacgccggtgcgattatttccggcggcaaaggtactgccgaggaaaaattcgccgcgtttgaaaaagccggtatcgcttacacccgcagccctgccgagttgggcactaccatgctggaagtgttgaaaacaaaaggtttggcataa

SEQ ID NO: 60901 - DNA, 378 bp, Neisseria meningitidis
atgtctgtcaaaccgcgtcctgtttatctggatttgccgaacatccgtctgccgatacccgggatagtttccatccttcaccgcatcagcggggtcgggctgtttattatgctgcctttcctgctgtatttcctgtccggcaccctgagtcaagagtctgcatttgaaacttaccgtgccattgtttcccatcctttggtcaagctggttttaatcggcgtattgtgggcttatctgcaccattcccttgccggtatccgctttttatttttggatgcgcacaaaggccttgagctgaatactgcgcgcaataccgctaaagccgtatttgcttctgcattggttttgactgtcgttttgggagcgttgttatggtag

SEQ ID NO: 60902 - DNA, 1248 bp, Neisseria meningitidis
atgttgaaacaaacgacacttttggcggcttgcgcctcctttgccgcactgttgggcggttgtgctacccagcagcctgcccccgtcattgcaggcaattcaggtatgcaggacgcgccgtcttcggcagtttacaacaacccctatggagcaacgccgtacagcccggctcctgccagcgatgcgccttatgtgccgccggtgcaaagcgcgccggtttatacgcctcctgcttatgttccgccgtctgcacctgccgtttcgggtacatacattccttcttacgcacccgtcgacatcaacgcggcgacgcatactattgtgcgcggcgacacggtgtacaacatttccaaacgctaccatatctctcaagacgatttccgtgcgtggaacggcatgaccgacaatacgttgagcatcggtcagattgttaaagtcaaaccggcaggatatgccgcaccgaaagccgcagccgtaaaaagcaggcccgccgtaccggctgccgcgcaaccgcccgtacagtccgcacccgtcgacatcaacgcggcgacgcatactattgtgcgcggcgacacggtgtacaacatttccaaacgctaccatatctctcaagacgatttccgtgcgtggaacggcatgaccgacaatatgttgagcatcggtcagattgttaaagtcaaaccggcaggatatgccgcaccgaaaaccgcagccgtagaaagcaggcccgccgtaccggctgccgtgcaaacccctgtgaaacccgccgcgcaaccgcctgtgcagtccgcgccgcaacctgccgcgcccgctgcggaaaataaagcggttcccgcgcccgccccgcaatctcctgccgcttcgccttccggcacgcgttcggtcggcggcattgtttggcagcgtccgacgcaaggtaaagtggttgccgatttcggcggcaacaacaagggtgtcgatattgccggtaatgcgggacagcccgttttggcggcggctgacggcaaagtggtttatgcaggttccggtttgaggggatacggcaatctggtcatcatccagcataattcttccttcctgaccgcatacgggcacaaccaaaaattgctggtcggcgaaggccagcaggtcaaacgcgggcagcaggtcgctttgatgggcaataccgacgcttccagaacgcagcttcatttcgaggtgcggcaaaacggcaaaccggttaacccgaacagctatatcgcgttctga

SEQ ID NO: 60903 - DNA, 1914 bp, Neisseria meningitidis
atgttgaacattaccttgccggacggctcagtccgacaatacgaatcccccgttaccgtggctcaaattgctgcgtctatcggtgccggtttggcgaaggcggcggtggcaggcagggtaaacggcaaattggtcgatgcgtgcgacccgattgttgaagattctgctgttcaaatcattactccgaaagatcaggaaggcatcgaaatcatccgccattcctgcgcccatcttgtcgggcatgccgtcaagcaactctatcctaatgcaaaaatggttatcggccccgtcattgaagagggcttttattacgacattgccacggaaaaaccgtttacaccggaagatgttgccgccattgaagcgcgtatgaaagaattgattgcccaagactatgatgtggtcaaaatcatgactccgcgtgcggaggcgattaaaatttttcaagagcgcggcgaagaatacaaactgcgcctgattgacgatatgcccgaagtggaagcgatggggatgtatcatcatcaggaatatgtcgatatgtgccgcggcccgcacgttccgaatacccgtttcctgaaaaacttcaaactgaccaagttggcgggcgcatactggcgcggcgacagcaataatgaaatgctgcaacgcatatacggtacggcttgggcgacaaaagacgaattaaaagcctatattcaacgtatcgaagaagccgaaaagcgcgaccaccgcaaacttggcaagcaattggatctgttccatctgcaagacgaagcgccgggcatggtgttttggcatcctaaaggctgggctttgtggcaagtgattgaacagcatatgcgtaaagagctgaacgccgccggttataaagaggtcaaaacgcctcaaattatggataaaaccttttgggaaaaatccggccattgggacaactacaaagacaatatgttcgtgaccagttcagaaaaacgcgaatacgcggtgaaaccgatgaactgtccgggtcatgtgcaaatttttaataacggtttgcgctcatatcgcgatttgccgatgcgtttggccgagttcggttcttgccaccgcaatgaaccaagcggtgcattgcatggtctgatgcgggtccgtggatttgtgcaggatgatgcgcatattttctgtaccgaagaccaaatcgtcagcgaggcccgtgcgttcaatgaattgttggttcgcatctacaaacagttcggtttccatgatgtatccgtcaagctttctcttcgccctgaaaaacgcgcaggttcagatgacgtgtgggataaggcagagcagggtttgcgcgaggcattgactgcctgcggcgtggaatggggcgaattgccgggcgagggtgcgttttacgggcctaaaatcgaatatcatgtcagagatgccttgggtcgttcttggcaatgcggtacattacaactggatttcgtattgccggagcgtttgaatgccgaatatgtaactgaaaacaacgaccgtgcgcgtcctgttatgttgcatcgcgccattttgggttctttggagcggtttatcggcattctgattgagaaccatgcaggctcattcccgttatggttggcgccggttcaaatggtgattatgaatatcaccgaaaatcaagcggattactgccgtgaagtggctgccaaattgcaggcggcaggattccgcgccgagttggatttgcgtaacgaaaaaatcggttacaaaatccgcgacaacagccaataccgtttcccttatcaaatcgttgtcggcgataaggagaagcaggaaaacaaagtggcggtacgccgcaaagcagaagatttgggttctttggatttggatgatttcattgcgcaattgcagcaagaaatcactgatgccctcgtcaatcattaa

SEQ ID NO: 60904 - DNA, 498 bp, Neisseria meningitidis; identical to SEQ ID NO: 56033

SEQ ID NO: 60905 - DNA, 729 bp, Neisseria meningitidis; identical to SEQ ID NO: 55508

SEQ ID NO: 60906 - DNA, 639 bp, Neisseria meningitidis
atgaaaaaaatcaatgttgcccccgaaaatccccaataccgcatcgtcgaaatctttgaaagcctgcaaggcgaaggctggaacacgggcatgcccgccgttttcgtccgcttgggcaaatgcaacctcgcctgcggctggtgtgataccgattatttgacattcggcatgatgagcctgtccgacatcttaggccgtctgaaagcctatgccgcccgcaacatcatcatcaccggcggcgaaccgaccatccagccgcatctcgatatgctgctggacatgctcaaggcggaaggttatttcctctgtatcgaaaccaacggactcaatcccgcgccgccgcaaatcgactatgtcgccaccagccccaaagcctgctacgccgccaaatatgaaaatagctgtatcgaaacagccgacgaagtgcggattgttgccgatggtgatgtccttgcgttctgcgaaaacatggaacgtaaaatccgcgcgcatcattactacctttcgccctgcgaacaagacggtgcgatgaacatctacgacaccatccgccaaatcggtattttaaacagtcgccccgacgcgccggtgcattggcagttgagcgtgcagacgcacaaatgggcgggaatagagtag

SEQ ID NO: 60907 - DNA, 252 bp, Neisseria meningitidis; identical to SEQ ID NO: 39189

SEQ ID NO: 60908 - DNA, 2190 bp, Neisseria meningitidis
atgatctaccaccgcatcgccgtaaacgtgccgctttcagacggccttttgacttattcccattccgatccgcttcctccgggaacgcgggtgcttgtgcctttccgcaataaaaccgtggtcgggatggtgtgggaaacggatattgcgccggatatggatacggcgcggattttgagcgttcggacggccttttcggacgagccgctgctgcccgaaagctggcgtgatttgctctcgtttacgtcgcgttattaccactatccgaccgggcaggcagtatttgccgcattgccgcaaggtttgaaggaaacgcgcgcggtggaaatgccgcagccgcccttgttttacgcgttgaacgaagcgggcagggcgcaaacgccgccgccggcgcggttcaacaaaaaagcggctttgtgggacgcgctgctgtcgggcgaaatgacgatggcagcgttgaagcaggtaaacgcgcaggcggcgaagttaatcgaagattgggcggagcagggttggattgaaacgacggaagcggcgaagcccgttttaaggtcgtgtaatgggcaggcttcgcactctgaatttgtattaaatgctgaccagcagaaggcttccgatgccattcagacggcattgggacgcttccagccgtttctgctgtacggcatcaccggcagcggcaagaccgaagtgtatttcgatgcgatggcgaaagtgttggctcaggggcggcaggtgttgtttctgttgcccgaaatcaacctcacgccgcagcttttgaagcgggtgggaaatcgttttgccgacgtgccgaccgccgtgttgcacagtcagatggcggcaggcaggcgcacgcaggattatttgcgcgcgatgtcggggcaggcgaaattggtcatcggcacgcggctggcggtgtttacgccgatggatgatgtcgggctgattgtagtcgatgaggaacacgacggctcgttcaaacaagacaacgaattacgctaccacgcccgcgatttggcggtgtggcgggcgaagcagagcggctgccccgtcgtgctgggtagcgccacgcccagcttggagagctggcacaaggtgcaaagcggcgcgtaccgcctgctgcaactgaccgagcgcgcccataccgctgcgcaactgccgcaagtggacatcctcaacgtaggccgtctgaaactagacaatggcttctcgccgcaagccttgcagcttttgaaacagaattttgaagcgggcggtatgtcgctggtgtacctcaaccgtcgcggcttcgcgcccgcgctgttttgcggcgactgcggccataccttcggctgcccgaactgctccgccaaaatggtgctgcaccaacgcgtccgccaactgcgctgccaccactgcgaccaccgcgaacccataccgttcaaatgccccgactgcggaaatcaagacctgaccgccgtcggacacggcacgcagcgcgtcgaagaaaccctgcgcgccttcctgcccaaggcagccgtcgtccgcgtggacagggacagcaccgcgcacaaaaacgactgggcggatttgtaccgccgcatcgccgacaacgaaatcgacattctggtcggcacgcagatgctcgccaaaggccatgactttgcgcggctcaacctcgttatcgtattgaacgccgacggcagcctttacagcgcggatttccgcgcgccggaaagactgttcgccgagctgatgcaggtgtccggcagggcggggcgcgccgacaaacccggcaaggtgttgatacagacccaactgcccgaacatcccgtcttcgccgccgtcaaagcgcaggattatgccgtgtttgccgaaaacgaattgaacgaacggcaaatgttcgccatgccgcccttcggttttcagaccgccgtccgcgcggacgcgccgcgtgttgccgatgcgctggaatttctcaatgccgccaaagaaaccctcgccccgctgttgcccgcaagcgtttcccagtttggcgccgcccccatgctgatggtgcgcctcgccgaacgcgaacgcgcgcaaatcttcctcgaatccccgtcccgacaggatttgcaccgtgccgtgagtttgtgggtgcaggtgttgcagcaaaaccgcgacggcaaaattagatggtcggtggatgtcgatccgcaggaggcttga

SEQ ID NO: 60909 - DNA, 855 bp, Neisseria meningitidis
atgaaaatcgtcctgattagcgggttgtccggttcgggcaaatccgtcgcactgcgccaaatggaagattcgggttatttctgcgtggacaatttgcctttggaaatgttgcccgcgctggtgtcgtatcatatcgagcgtgcggacgaaaccgaattggcggtcagcgtcgatgtgcgttccggcattgacatcggacaggcgcgggaacagattgcctatctgcgcggactggggcacagggttgaagttttgtttgtcgaggcggaagaaagcgtgttggtccgccggttttccgagaccaggcgaggacatcctctgagcaatcaggatatgaccctgttggaaagcttaaagaaagaacgggaatggctgtttccgcttaaggaaatcgcctactgtatcgacacttccaagatgaatgcccaacagctccgccatgcagtccggcagtggctgaaggtcgaacgtaccgggctgctggtaattttggagtccttcgggttcaaatacggtgtgccgaacaacgcggattttatgttcgatatgcgcagtctgcccaacccgtattacgatcccgagttgaggccttacaccggtatggacaagcccgtttgggattatttggacggacagccgcttgtgcaggaaatggttgacgacatcgaaaggtttgttacgcattggttaccgcgtttggaggatgaaagcaggagctacgttaccgtcgccatcggttgcacgggaggacagcaccgttcggtctatattgtcgaaaaactcgcccgaaggttgaaagggcgttatgaattgctgatacggcacagacaggcgcaaaacctgccgagccgttaa

SEQ ID NO: 60910 - DNA, 171 bp, Neisseria meningitidis; identical to SEQ ID NO: 54459

SEQ ID NO: 60911 - DNA, 1116 bp, Neisseria meningitidis
atgatttatcaaagaaacctcatcaaagaactctcttttaccgccgtcggcattttcgtcgtcctcttggcggtattggtctccacgcaggcaatcaacctgctcggccgtgccgccgacgggcgtgtcgccatcgatgccgtgttggcattggtcggcttctgggtcatcggtatgacgccgcttttgctggtgttgaccgcatttatcagtacgttgaccgtgttgacccgctactggcgcgacagcgaaatgtcggtctggctatcctgcggattggcattgaaacaatggatacgcccggtgatgcagtttgccgtgccgtttgccgttttggttgccgtcatgcagctttgggtgataccgtgggcagagctacgcagccgcgaatacgctgaaatcctgaagcagaagcaggaattgtctttggtggaggcaggcgggttcaacagtttgggcaagcgcaacggcagggtttattttgtcgaaaccttcgataccgaatccggcatcatgaaaaacctgttcctgcgcgaacaggacaaaaacggcggcgacaacatcatcttcgccaaagaaggtaacttctcgctgaacgacaacaaacgcacgctcgaattgcgccacggctaccgttacagcggcacgcccggacgcgccgactacaatcaggtttccttccaaaaactcaacctgattatcagcaccacgccaaaactcatcgaccccgtttcccaccgccgtaccattccgaccgcccaactgattggcagcagcaacccgcaacatcaggcggaattgatgtggcgcatctcgctgaccgtcagcgtcctcctactctgcctgcttgccgtgccgctttcctatttcaacccgcgcagcggacatacctacaatatcttgattgccatcggtttgtttttaatttaccaaaacgggctgaccctgctttttgaagccgtggaagacggcaaaatccatttttggctcggactgctgcctatgcacatcatcatgttcgtcatcgcaatcgtacttctgcgcgtccgcagcatgcccagccagcccttctggcaggcggttggcaaaagtctgacattgaaaggcggaaaatga

SEQ ID NO: 60912 - DNA, 378 bp, Neisseria meningitidis; identical to SEQ ID NO: 56102

SEQ ID NO: 60913 - DNA, 2652 bp, Neisseria meningitidis
atggaactgaaatttgaagaactgccctatcagcttgatgcggtaaatgccgttgcgaatctttttgcagggcagccgaaccatgcccggacattcgatttgaccagtcaggggacggggcggtttgtcggcaacggcttggatttggattgggaaacgctaggcctgaatctgaacacggtgcaaaagcaaaatggacagcctgaaacggaaatcggcgcgcacgggctgaatttttctctagaaatggaaacgggtacgggcaaaacctatgtctatctgcgcacgatttacgaattaaaccgcagttacggctggaagaaatttgttattgtcgtaccgagcgtaccgatacgcgaaggcgtgttgaaaagcctggaaattacgaaggcgcattttgacggagtgttcggcaggcccgtgatgcgttatgcggaatattcaagcagccggctatcggacttgcgcacttttgcggtaaacgaccacatcgagattttggtgatcaatatccagtcgtttgaaaaagatggaaacgttatcaataaggtaaacgaaagcggggaaacgccgattaagtttattcaggaaacgtgtcctatcgttattatcgacgagccgcagaatatggaaacggaaggccgtctgaacgctttggaatcgctcaatccgctctttaccctgcgctattcggcaacgcataaacaaccgtaccacaaggtttacagcctgaatcccgtgcaggcatacaatttaaagctggtaaagcaaatcgaagttttgccggtattggcggaaaacgatgtgaacggcgcatttgtggagctgctggaagtaaagcaggcggccaaaggccgtccgaaagccgatttgaacattcattatcaggataaaaaggaaaccaagaagaaaaaggtatccgtcaaatgggaagacgatttgtttgaaaaatcgggcggtaacgaagcctaccgccacggtttcattatcgacggcatggatttcgataagcaggaattggcgttctcaagcggtaaaaccattacgcgcggcggagacggcgatgcggtgcgcgatgaaattatgaaaaaccaaatccgcgaaacggtaagggagcatttggcgaaggagaaacggctgaatccgctggggattaaggtgttgtctctgttcttcatcgaccgtgtggagaattaccgtacagaagacggaacggcaggcaagtttgccctttggtttgaagaaatctatcgggaacttgcaggcaataccgatacggcaggcgtacacgacggctatttctcgcaagacaggaaaggccgtctgaaaaacaccgacggcacgacgcaggcggacaacgatacctaccgcctcattatgcgcgacaaggaaaccctgctttcctttgacagcccgctgcgctttatcttttcccattccgcactgaaagaaggctgggacaaccccaacgttttccaaatctgcacgctcaacgaaacccgttcgccgctgaaaaagcggcaggaaatcgggcgcgggctgcgtatcgccgtcaatcaggaaggacggcgcgtgcgcgatgaaaacgtgaacatactgaccgttgtgccgaacgaaagctacgaattgtttgccgccaatctgcaaaaggaatacgaagacgaatgcggtattaaatttgccgccgaaaacatcaaaaacggcaataagaagaaaaaacagttattccgcaaagatttcccgctcgaccccgaatttcaggcaatttgggacaagttgaaatacaaaacgcgctatcgcgtgcgcttcgatacggaagaattgatcaaacaggcttcggaagcggtggcaaacctgccggaaatccaaaaaccgaaaatccgcatccgcaaggcgcaattaaaacaatcacaaacctacggtatcgaaacagttgaaattgccggccgcagccgcgaaatggacgttcaatgggagattccggacatactcggcgagattcaaagaaaaacggggctgacgcggcgcacggtgtacgaaatcatcatacagtcaggccgtctgaaagatgtagccggtaatccgcaacgcttcatcgaccttaccgccgaagcggtaaaccgcagcctgcacgcgttgatggcggcaggaatcgagtatgagagaaccggcgaagtgtacgaccaaaagctgttggaagatatggcgcgcgaaggtatcgagttttacgaaaacggttttacattcacagtaagcaatccgcaaaaaaccatttgcgaaaactacatccctttggattccggcacggaaaaagcctttgcccaaaattgcgaggattatgatgcgaaaaatgaaggaggcgtggcgttttacttcaaactgcccggctggttcaaaatcccgaccccgctgggcaattacaatcccgattgggcggtggtaaaacaggttcgggataaagtgtatttcgttgcggaaaccaaaaacaccggcaaaggcattcagaccggcgtggatatggacaagctgcgccaaaatgagaggctgaaaatcaaatgcggcaagcggcattttgaagcgctgggcggtttggcataccgtgttgtggaaaaagtgggggatttaaagtcggaaaaagaggagcaggcttaa

SEQ ID NO: 60914 - DNA, 741 bp, Neisseria meningitidis; identical to SEQ ID NO: 54417

SEQ ID NO: 60915 - DNA, 1395 bp, Neisseria meningitidis; identical to SEQ ID NO: 55365

SEQ ID NO: 60916 - DNA, 789 bp, Neisseria meningitidis
atgaatcctaaaatcgtgtttttcgatattgacgatacgctgtaccgcaaatatacggataccttgcgtccttccgtgaaaacggcggtggcggctttgcgcggcaaaggcatattgacggcgttggcaacggggcggtctttggcgacgattcccgaaaaggtcagggacatgatggcggaaacgggcatggatgccgtggtaacgataaacggacagtttgcgctgctgcacggaaaaactgtgcgcgaagtaccgatggatgccggtttgatgggcagggtttgcgcgcatttggatggcttgggcatggattatgcgtttgtcggcggagaggggatcgccgtgtccgcgctgtcggaatgcgtgtgccgcgccttgcagcatatcgccagcgatttttttgccgataaggattatttttcaagcaaaccggtgtatcagatgctggtgtttgcggaggaaaacgaaatgccgccctggtcggatattgtggaacgggaaggcttgaaaacggtgcgctggcacgaggaagcggtcgatctgctgcctgcgggaatgtcgaaaacagacggcatcagaagcgtggttgaagcattgggtttggaaatggcggacgtgatggcgttcggcgacggtttgaacgatgtggaaatgctgtctgaagtcgggttcggtgtggcaatgggtaacggggaacaggcagtgaaagaggcggcgaaatatgtttgccccggcgttgatgaagacggcgtgttgaggggcttgcaagatttgggcgtgatttga

SEQ ID NO: 60917 - DNA, 645 bp, Neisseria meningitidis
gtgcttgcctccgccatcgacttcatcctccatatcgaccaacacctgctcgcgctgtcggcgcaatacggtgtgtggatttatgcgattctgtttttgattgttttttgcgaaaccggcctgattgttacgcccttactgcccggcgattcgctgctgtttgccgccggcgggattgccgcgctgggcggtatggatattcatttgatggttgcattattaagccttgccgccatactcggcgacgcgctcaattttactgtcggtaagtatttcggcggcaggctgttcgccaatcccgattctaaaatcttccgacgcgaatatctcgataaaacccgccgtttttacgaaaaacacggcggcaaaacgattatcatcgcgcgcttcgtgcccatcgtccgcaccttcgccccctttgtcgccggcatgggcaaaatgcattatgcaaaatttatccgctataacatcatcggcggcttcttgtgggttatcctgttttcttatgcaggctatttctttgccaacttccccatcgtaaaaaacaatctgggcttggtgatgggcggcatcattattatttccatcctgccgggtgcagttgaaattgcccgcgccaaacttgcggtaaaatccaaacggtaa

SEQ ID NO: 60918 - DNA, 969 bp, Neisseria meningitidis
atgaacgagaaaaccatcatccttgccaatccgcgcggcttctgcgccggcgtggatcgggcaatcagtattgtcgaacgtgctttggaagaattcggcgcgccgatttatgtgcgccacgaagtcgttcacaacaaattcgtcgtggacaacctgcgtgaaaaaggtgcggtgtttattgaagacttggcggaagtgccgccgggcgcgacactggtttattcggcacacggcgtatcgaaggcggtgcggcaagaagcggcggagcgcggtttccgcgtgtttgatgcgacttgcccgctggtgacgaaagtgcataaggaagtcgcccgactggatgcccaagactgtgaaatcatcatgatcgggcataaggggcacgtcgaggttgaaggaacgatggggcagcttgcgccgggcaaaatgcttttggtcgaaacggtcggagatgtggcaaaactcgaagtcagaaaccccgacaaactcgcctatgtcagccaaaccacgctctcggtcgatgaaaccaaagacatcatcgccgcgctgaacgcgcgtttccccaatatccgcaatccgcacaaggaagatatctgctatgcgacgaccaaccggcaaaccgccgtcaaagagttggcagaacagtgcgacatcgtgattgtggtcggttcgcccaattcgtccaacagcaaccgcctgcgcgaagtggcggcaggcatcggaaccgatgcgtatatggtggacaatgcaggctacctgcaacgcgcgtggtttgagggcaagaacaaagtcggcgtaacggcaggcgcgtccgcgcccgaagtgttggtgcaggaagtattggcaaccatacgcgggtgggggcatgaaaccgtacgcgaaggggagggcgcggaagaaagcatcgtgttcgtcctgcccaaagagttgcgccgcgagggcgaaaccaaacccgatttgtgcaaacgttga

SEQ ID NO: 60919 - DNA, 1002 bp, Neisseria meningitidis
atgctcgccgaagaagttttcggtttcggtctctacaaagagtccaaaggctcgggcggtcgtttttatgagcgctgttggttgatgggttcggaagacgtcctatacggtcgcgtccattttggcggacaaaacaataccattcttttcgaactgaccggcaccggttgcggcgtcgcaaaagaaggctgggaatcacgacttttcgcattcctgactaatgcaatccacccaaaaatcacacgcgttgacatcgcaaaagactttttcaacggcgaatacagcccgaaccaagcccgtgaagaccgaaataaaggtatgtttacctgtcatcacgtcaaaccaaaaggcgaatgtttggggtcagattgggaagaagacgatgaagccaaaatgaccaaaggcaagacctatggtatcggctcccgtgaatcgtccaaatatgtccgcgtctatgaaaaaggcaagcagttgggcgataaaacaagcacatggacgcgatttgaaattgaattcaaagcaaaagatatcgttatccctttcgaagttttgcagaatccgggcgaatatttcggcggcgcatatccgatttgcgaacgattcgtccaaaaggcaacgcgcatacacgcggttaaggaagataaggtcatttcagccgaccgctaccttgaatgggtaaaaaaacagttcggacgtgcggcaaacggtctgaaattcatttttcccgaattggacaaagccaaactgtttgaactgattgagccgagtcatcacaagctgcccaagtctttggctcccgaagcctacgactgcgcctttttgaaagctcaagccattcatgaacagcccgcattcaaaccgtacaaagacccttactatatgtacgaatattacgagaatcttgaaaaacagcttgaacagcaaaaacacgtcaacaatgaagaaagctataacaacttcatttacgacaaattcgcaagactaccgatttcatgggcttaa

SEQ ID NO: 60920 - DNA, 459 bp, Neisseria meningitidis; identical to SEQ ID NO: 54671

SEQ ID NO: 60921 - DNA, 1470 bp, Neisseria meningitidis; identical to SEQ ID NO: 51727

SEQ ID NO: 60922 - DNA, 327 bp, Neisseria meningitidis; identical to SEQ ID NO: 42598

SEQ ID NO: 60923 - DNA, 198 bp, Neisseria meningitidis; identical to SEQ ID NO: 55598

SEQ ID NO: 60924 - DNA, 1248 bp, Neisseria meningitidis; identical to SEQ ID NO: 55818

SEQ ID NO: 60925 - DNA, 567 bp, Neisseria meningitidis
atgtccgccttcctccccatcatcaaccgcctgattctgcaaagcccggacagccgctcggaacttgccgcctttgcaggcaaaacactgaccctgaacattgccgggctgaaactggcgggacgcatcacggaagacggtttgctctcggcgggaaacggctttgcagacaccgaaattaccttccgcaacagcgcggtacagaaaatcctccaaggcggcgaacccggggcgggcgacatcgggctcgaaggcgacctcatcctcggcatcgcggtactgtccctgctcggcagcctgcgttcccgcgcatcggacgaattggcacggattttcggcacgcaggcagacatcggcagccgtgccgccgacatcggacacggcatcaaacaaatcggcaggaacatcgccgaacaaatcggcggattttcccgcgaatccgagtccgcaaacatcggcaacgaagcccttgccgactgcctcgacgaaataagcagactgcgcgacggcgtggaacgcctcaacgaacgcctcgaccggctcgaacgcgacatttggatagactaa

SEQ ID NO: 60926 - DNA, 840 bp, Neisseria meningitidis; identical to SEQ ID NO: 55776

SEQ ID NO: 60927 - DNA, 465 bp, Neisseria meningitidis; identical to SEQ ID NO: 46412

SEQ ID NO: 60928 - DNA, 297 bp, Neisseria meningitidis; identical to SEQ ID NO: 38749

SEQ ID NO: 60929 - DNA, 2751 bp, Neisseria meningitidis
atgctgacaaacattgccaagaaaatcttcggcagccgcaacgaccgcttgctgaaacaataccgtaaatccgttgccagaatcaacgcgctcgaagaacagatgcaagccctaagcgatgctgatctgcaagccaaaactgccgaattcaaacaacgcctcgccgacggtcagactttggacggcattttgcccgaagccttcgccgtctgccgcgaagcgtcccgccgcaccctcggtatgcgccacttcgacgtgcagcttatcggcggtatggtgctgcacgacggcaaaatcgccgaaatgcgtaccggcgaaggcaaaaccctggtcgccaccctcgccgtctatctcaacgcgctggccggcaaaggcgtacacgtcgttaccgtcaacgactacctcgcctcacgcgatgcgggcattatggagccgctctacaatttcctcggccttaccgtgggcgtgattatttcagatatgcagccgttcgaccgtcaaaacgcctatgccgccgatatcacctacggcaccaataatgaattcggcttcgactacctgcgcgacaatatggttaccgaccaatacgacaaagtgcagcgcgaattgaattttgccgttgtcgatgaagtggattccatcttgattgacgaagcgcgcactccgctgattatctccggtcaggcggatgacaacatccagttgtaccaaatcatgaacaccgttccgccccacctcgtccgtcaagagacagaagaaggcgaaggcgactattgggtcgacgaaaaggcacatcaggtcatcctgagcgaagcaggtcacgaacacgccgagcaaatcctgacccaaatgggattgctggcagaaaacgactccctctattccgccgccaatatcgccctgatgcaccaccttatggcggcattgcgcgcgcattccctcttccacaaagaccaacattacgtcatccaagacggcgaaatcgtcatcgtggacgaattcaccggccggctgatgtccggccgccgctggtcggagggtctgcatcaagccgtcgaagccaaagaaggcgtggaaatcaaacgcgaaaaccaaacccttgcctccatcaccttccaaaactatttccgcctgtacaccaagctctccggcatgaccggcacagccgataccgaagctttcgagttccaaagcatctacaacctcgaaaccgtcatcatcccgaccaaccgccctgtacagcgcaaagacttcaacgaccagattttccgttccgccgaagaaaaattcgaagccgtcgtcaaagacatcgaagaatgccacaaacgcgggcagcccgtcctcgtcggcaccaccagcatcgaaaactccgaactggtctcccaccttctgcaaaaagccggactgccgcacaacgtcctcaacgccaaagaacacgaacgcgaagccctgattgtcgcccaagccggcaaagtcggcgcgattaccgttgccaccaatatggcgggacgcggtacggacatcgttttaggcggcaacctgaagcaccaaaccgatgccatccgtgccgacgaaaccttgagcgacgaagagaaacaggcacaaatcgccgcactcgaaaacggctggcaggcagaacacgataaagtaatggaagcaggcggcctgcacatcatcggtacggaacgccacgaaagccgccgtatcgacaaccaattgcgcggacgttccggccgtcagggcgaccccggatccagccgtttctacctttcgtttgaagacccgctgctgcgcttattcgcactcgaccgcgccgccgccatcctcaaccgtctcgcccccgaacgcggcgtcgccatcgaacacaacctgctgacgcgccaaatcgaaggggcgcaacgcaaagtcgaaggcagaaacttcgatatgcgcaaacaggttttggaatacgacgacgttgccaacgaacagcgcaaagtcatttacagccagcgcaacgaaattctgaccagcaaagacatcagcgacctgatgcaggaaatccgttctgatgtcgtcagcgacctcgtggatacctatatgccgcccgacagcatggaagaacaatgggacatcccgactttggagaaccgtctggctgccgaattcagactgcacgaagacatccaatcctggctgaaggcggacaatgcgattgacggtcaagacatcaaagaacgcctgatcgaacgcatcgaaaacgaatatgccgccaaaaccgaactggtcggcaagcaggcaatggccgatttcgagcgcaacgtgatgttgcaggtcatcgacaaccaatggcgcgaacacctcgccgctatggactacctgcgacaaggcatacacctgcgcagctatgcccaaaaaaatccgaagcaggaatataaacgtgaagcctttaccatgttccaagacctgtggaacggcatcaaattccatattgcctccctgcttacctcggttcaaatcgaacaaaaccctgtcgcggtggttgaagagcaacccatcggcaacatccagtccatccattccgaatcgcccgatatggaagaacttttgggtcagtcgcaaaccgatttggttaccgaggcctttaatcccgatggaacggatttcagccccgaagccttggaagcgcggggacaaatcgtccaccgcaacgacccctgcccctgcggcagcggtttgaaatacaaacaatgccacggcaaactggcttga

SEQ ID NO: 60930 - DNA, 177 bp, Neisseria meningitidis; identical to SEQ ID NO: 55652

SEQ ID NO: 60931 - DNA, 669 bp, Neisseria meningitidis
atgaaccacgacatcactttcctcaccctgttcctactcggtttcttcggcggaacgcactgcatcggtatgtgcggcggattaagcagcgcgtttgcgctccaactccccccgcatatcaaccgattttggctgatcctgctgcttaacacaggacgggtaagcagctatacggcaatcggcctgatactcggattaatcggacaggtcggcgtttcactcgaccaaacccgcgtcctgcagaatattttatacacggccgccaacctcctgctgctctttttgggcttatacttgagcggtatttcttccttggcggcaaaaatcgagaaaatcggcaaaccgatatggcggaacctgaacccgatactcaaccggctgttacccataaaatccatacccgcctgccttgcggtcggaatattatggggctggctgccgtgcggactggtttacagcgcgtcgctttacgcgctgggaagcggtagtgcggcaacgggcgggttatatatgcttgcctttgcactgggtacgctgcccaatcttttggcaatcggcattttttccctgcaactgaaaaaaatcatgcaaaaccgatatatccgcctgtgtacgggattatccgtatcattatgggcattatggaaacttgccgtcctgtggctgtaa

SEQ ID NO: 60932 - DNA, 876 bp, Neisseria meningitidis
atgagcaatgaagttgaagtgatggatgcggtttcagtgcaaaactaccaagtcgcgcacagcgtgatggtgatggagcaatggggtaacggcgaggtttacaacgaagccacttggatcgaacgcggccgcttggcggtacggcagacgatggaaggcatgtttgaattggggcgcgcacttattgtactgaaagagcatacagaacacgggcgatttatggaaattgtaaaaggtcaatttggtatcggccataacgaaaccgcccgattgatgtctgctacccaacgtttcgccacgccgcaaatgcagaaagccgcgccgaagctgatggatttgggcaagtcaaagctgctggaactcttggtcgaagaagacgttacgttggtgggacttgccgaaggagaagaagtcaacggcatgacctttgacgatgtggaccgaatgacggtgcgcgagctgcgcgtcgccctgcgcgaaagccgtgaaaacctcgccgccaaagacgaagtgatgaaaaccaaaacagccaaaattgatgagctgaccgagaagctggctaagaagcaaaccgttgtcagagagccgaaggcggaagacgtgggcagtgagttggcgatgcagttaacaagccttgaggtcggtatccgcagtcaagtgagccgtttgaaagatttgttcgaccaacttaatgcgcacagtgaggcacacgagatcagccatcaggcaaagatggtcggcacgctcaatcaaattattttggactgcgagcaactgcgcgaaagctatgccctgccgactgaagcaccgacagacaatgtgccggaatggttgggcggtgaaacgggagaaggcgatgaatccggcaatgattga

SEQ ID NO: 60933 - DNA, 996 bp, Neisseria meningitidis
atgttgagaaaattgttgaaatggtctgccgtttttttgaccgtatcggcagccgttttcgccgcgctgcttttcgtccctaaagacaacggcagggcatacaggattaaaattgccaaaaaccagggtatttcgtcggtcggcaggaaacttgccgaagaccgcatcgtgttcagcaggcatgttttgacggcggcggcctacgttttgggtgtgcacaacaggctgtatacggggacgtacagactgccttcggaagtgtctgcttgggatatcttgcagaaaatgcgcggcggcaggccggattccgttaccgtgcagattatcgaaggttcgcgtttttcgcatatgaggaaagtcatcgacgcaacgcccgacatcgaacacgacaccaaaggctggagcaatgaaaaactgatggcggaagttgcccctgatgccttcagcggcaatcctgaagggcagtttttccccgacagctacgaaatcgatgcgggcggcagcgatttacggatttaccaaatcgcctacaaggcgatgcaacgccgactgaatgaggcatgggaaagcaggcaggacgggctgccttataaaaacccttatgaaatgctgattatggcgagcctgatcgaaaaggaaacagggcatgaagccgaccgcgaccatgtcgcttccgtcttcgtcaaccgcctgaaaatcggtatgcgcctgcaaaccgacccgtccgtgatttacggcatgggtgcggcatacaagggcaaaatccgtaaagccgacctgcgccgcgacacgccgtacaacacctacacgcgcggcggtctgccgccaaccccgatcgcgctgcccggcaaggcggcactcgatgccgccgcccatccgtccggtgaaaaatacctgtatttcgtgtccaaaatggacggtacgggcttgagccagttcagccatgatttgaccgaacacaacgccgccgttcgcaaatatattttgaaaaaataa

SEQ ID NO: 60934 - DNA, 567 bp, Neisseria meningitidis; identical to SEQ ID NO: 59699

SEQ ID NO: 60935 - DNA, 2145 bp, Neisseria meningitidis; identical to SEQ ID NO: 54934

SEQ ID NO: 60936 - DNA, 1059 bp, Neisseria meningitidis
atgattacaccgcaacaggctatcgaacgattaatcagcaataacgagttgttttacgatgaaatgaccgacttgatgcgtcagattatgagaggacaggttctgccggagcagatagcggccattttgacaggattgcgtatcaaggttgaaaccgtttccgaaattaccgcagctgcagccgtcatgcgcgagtttgcgacaaaagtgccgctggagaatgcagaggggctggtcgatatcgtcggtacgggcggggatggtgccaaaaccttcaatatttcgacgacctcgatgtttgttgccgcagcggcaggcgcgaaggttgccaaacacggcgggcgttccgtttcatcttccagcggcgcggcggacgtgatggagcagatgggcgcaaacctcaacctgactcccgaacaggttgcccaaagtatcaggcagaccggcatcgggtttatgttcgcgcccaatcaccacagtgccatgcgccatgtcgcccctgtacgccgttcgctcggtttccgaagtattttcaacatattgggtccgttaacgaatcctgcgggcgcgccgaaccagcttttgggcgtgttccacaccgatttgtgcggcattttgtcgcgggttttgcaacaacttggttccaaacacgttttggtcgtttgcggggagggcggtttggatgaaattacactgacgggcaaaacgcgcgttgccgaactcaaagacggaaaaatcagcgaatacgacatccgcccagaagatttcggcatcgaaacccgccgcaatttggatgaaatcaaagttgccaatactcaggaatctttgttgaaaatgaatgaggtgctggaaggaagagaaggggcggcacgcgatatcgtattgctcaacaccgccgccgccctgtatgccggaaatgtcgctgcttcgctttcagacggcatatctgccgcacgggaagccatcgattcaggcagggccaaatcgaaaaaagaggagtttgtcggttttcaaccacaacaaagatgccattttcttggaaagatggagcttgggtga

SEQ ID NO: 60937 - DNA, 1314 bp, Neisseria meningitidis
atgatgagcgtaactgttgaaactttagaaaatctggaacgcaaagtagtgttgtccctgccttggtccgaaatcaacgcagaaaccgataaaaaactgaaacaaactcaacgccgtgcaaaaatcgacggtttccgtccgggtaaagcacctttaaaaatgattgcccaaatgtacggtgcgagcgcacaaaacgacgtgatcaacgagctggtgcaacgccgcttctacgatgttgccgttgcccaagagttgaaagtggcaggcttcccccgttttgaaggcgttgaagaacaagacgataaagagtctttcaaagttgccgccatttttgaagtgttccccgaagtcgttatcggcgatttgtctgcacaagaagttgaaaaagtaaccgcttccgtcggtgatgccgaagtggaccaaaccgtagaaatcctgcgcaaacaacgtacccgcttcaaccatgtcgaacgcgaagctcaaaacggcgaccgcgtcatcattgactttgaaggcaaaatcgacggcgaaccttttgcaggcggcgcatccaaaaactacgccttcgtattgggcgcaagtcaaatgctgcctgaatttgaagccggcgtagtcggcatgaaggctggcgaaagtaaagacgttaccgtcaatttccctgaagactaccacggtaaagacgttgccggtaaaactgccatgttcaccattacgctgaacaacgtttccgaagcgactctgcctgaagtcgatgcagattttgcaaaagccttgggtattgcggatggcgacgttgccaaaatgcgcgaagaagtgaagaaaaacgtaagccgcgaagtggaacgccgcgtaaacgaacaaaccaaagaatccgtaatgaacgcgctgctcaaagccgtagagctgaaagcacctgttgctttggtaaatgaagaagccgcacgcttggcaaacgaaatgaaacaaaattttgttaaccaaggtatggctgatgctgccaacttggatctgcctttggatatgtttaaagaacaagccgaacgccgcgtgtctttgggtctgattttggccaaactggttgatgaaaacaaactggaaccgactgaggagcaaatcaaagccgttgtcgccaacttcgcagaaagctacgaagatcctcaagaagtaatcgactggtactacgcagagccttcccgcctgcaagccccgacttctttggcgatagaaagcaacgtcgttgatttcgttttgggtaaagccaaagtaaacgaaaaagctttgtcttttgacgaagtgatgggcgcgcaagcctga

SEQ ID NO: 60938 - DNA, 339 bp, Neisseria meningitidis; identical to SEQ ID NO: 39659

SEQ ID NO: 60939 - DNA, 1014 bp, Neisseria meningitidis
atgcaagtctattacgataaagatgccgatctgtccctaatcaaaggcaaaaccgttgccatcatcggttacggttcgcaaggtcatgcccatgccgccaacctgaaagattcgggtgtaaacgtggtgattggtctgcgccaaggttcttcttggaaaaaagccgaagcagccggtcatgtcgtcaaaaccgttgctgaagcgaccaaagaagccgatgtcgttatgctgctgctgcctgacgaaaccatgcctgccgtctatcacgccgaagttacagccaatttgaaagaaggcgcaacgctggcatttgcacacggcttcaacgtgcactacaaccaaatcgttccgcgtaccgacttggacgtgattatggttgcccccaaaggtccgggtcataccgtacgcagtgaatacaaacgcggcggcggcgtgccttctctgattgccgtttaccaagacaattccggcaaggccaaagacatcgccctgtcttatgcggctgccaacggcggcaccaaaggcggtgtgattgaaaccactttccgcgaagaaaccgaaaccgatctgttcggcgaacaagccgtattgtgcggtggcgtggtcgagttgatcaaagcaggttttgaaaccctgaccgaagccggttacgcgcctgaaatggcttacttcgaatgtctgcacgaaatgaaactgatcgttgacctgattttcgaaggcggtattgccaatatgaactactccatttccaacaatgcggagtacggcgaatacgttaccggccctgaagtggtcaatgcttccagcaaagaagccatgcgcaatgccctgaaacgcatccaaaccggcgaatacgcaaaaatgtttatccaagagggtaatgtcaactatgcgtctatgactgcccgccgccgtctgaatgccgaccaccaagttgaaaaagtcggcgcacaactgcgtgccatgatgccttggattactgccaacaaattggttgaccaagacaaaaactga

SEQ ID NO: 60940 - DNA, 282 bp, Neisseria meningitidis; identical to SEQ ID NO: 38303

SEQ ID NO: 60941 - DNA, 996 bp, Neisseria meningitidis
ttgcagcctttagtcagcgtattgatttgcgcctacaacgtagaaaaatatttcgcccaatcattagccgccgtcgtgaatcaaacttggtgcaacttggatattttgattgtcgatgacggctcgacagacggtacgcttgccattgccaaggattttcaaaagcgggacagccgtatcaaaatccttgcacaagctcaaaattccggcctgattccctctttaaacatcgggctggacgaattggcaaagtcggggggggaatatattgcacgcaccgatgccgacgatattgccgcccccgactggattgagaaaatcgtgggcgagatggaaaaagaccgcagcatcatcgcgatgggcgcgtggctggaagtgttgtcggaagaaaaggacggcaaccggctggcgcggcatcacaggtacggcaaaatttggaaaaagccgacccggcacgaagatattgccgactttttccctttcggcaaccccatacacaacaacacgatgattatgcggcgcagtgtcattgacggcggtttgcgttacaacaccgagcgggattgggcggaagattaccaattttggtacgatgtcagtaaattgggcaggctggcttattatcccgaagccttggtcaaataccgccttcacgccaatcaggtttcatccaaatacagcgtccgccaacacgaaatcgcgcagggcatccaaaaaaccgccagaaacgattttttgcagtctatgggttttaaaacccggttcgacagccttgaataccgccaaataaaagcagtagcgtatgaattgctggagaaacatttgccggaagaagattttgaacgcgcccgccggtttttgtaccaatgcttcaaacggacggacacgctgcccgccggcgcgtggctggattttgcggcagacggcaggatgcggcggctgtttaccttgaggcaatacttcggcattttgcgccgattgctgaaaaaccgttga

SEQ ID NO: 60942 - DNA, 456 bp, Neisseria meningitidis; identical to SEQ ID NO: 40384

SEQ ID NO: 60943 - DNA, 1788 bp, Neisseria meningitidis; identical to SEQ ID NO: 54387

SEQ ID NO: 60944 - DNA, 1836 bp, Neisseria meningitidis; identical to SEQ ID NO: 44240

SEQ ID NO: 60945 - DNA, 1371 bp, Neisseria meningitidis
atgttagacaatttaaccggccgcttcagcaatgtcttcaaaaacatccgggggcaggccaaactgaccgaagacaatattaaagaggccttgcgcgaagtccgcctcgccctgcttgaggcggatgtcgccctgcctgtcgtcaaagagttcatcaacaacgtcaaagaaaaggccctcggtcaggaagtagcgggcagcctgacgccggatcaggcatttatcggcgtggtcaacaaagccctgaccgaactgatgggcagggaaaacaaaacgctggatttgtcggttgcgccgcccgccgtcgtgttgatggcaggtttgcagggcgcaggcaagacgacgaccgtcggcaaactcgcccgcctgttgaaaaacgatcagaagaaaaaggttttggtggtatccgccgacgtttaccgtcctgccgcgattgaacagctgcgtctgttggccgaacaggtcggcgtggattttttcccgtccgataccaaccaaaaaccggttgaaattgcaactgccgccgtcgattacgccaaaaaacatttttacgatgtattgatggtcgataccgccggccgtttggcaatcgatgaagagatgatgaacgaaatcaaagcccttcacgcggcggttaacccggtggaaactttgttcgtcatcgatgcgatgctgggtcaggatgcggtgaacactgctcaggcatttaatgaagccctgccgctgaccggtgtcgtattgaccaagatggacggcgattcgcgcggcggcgcagctttgtccgtgcgccacgtaaccggcaaaccgattaaatttatcggtgtcggcgaaaaaatcaacggcctcgaacctttccaccccgaccgtcttgccagccgtatcctcggcatgggcgacgtattgaccctgattgaagacgttcaaaaaggtattgatgaagaagccgccgccaaaatggcgaaaaagctgcacaaaggcaaaggcttcgacctcaacgactttaaagaacaaatccagcaaatgcgcaatatgggcggtttggaaaacctgatgtcgaaaatgccgggcgaactgggtcaaatctcgaaacaaatccccgaaggaacggctgaaaaagcgatgggcaaagtagaagccatcatcaactcgatgacccctaaagaacgcgccaaccctgccctgctcaaagccagccgcaaacgccgtattgcaatgggtgcgggcacgaccgtacaggaagtgaacaaattgctcaaacagtttgaacaaatgcaacaaatgatgaagatgttcagcggcaacggcttgggcaaactgatgcgtatggcgaaaggaatgaagggaatgaaaggaatgttcccgggtttgtaa

SEQ ID NO: 60946 - DNA, 2664 bp, Neisseria meningitidis; identical to SEQ ID NO: 56005

SEQ ID NO: 60947 - DNA, 1254 bp, Neisseria meningitidis; identical to SEQ ID NO: 54753

SEQ ID NO: 60948 - DNA, 1335 bp, Neisseria meningitidis; identical to SEQ ID NO: 54609

SEQ ID NO: 60949 - DNA, 1059 bp, Neisseria meningitidis
atgtcttcacgcaaaatcatccacatcgacatggacgcgttctacgcatcggtagagctgcgcgaacagccgcatttgaaagggcggccggtggtcgtcgcgtgggagggcgcgcgttcggtgatttgcgccgcatcgtatgaggcacggcagttcgggctgcattccgcgatgtcggtggcaacggcgaaaaggctgtgtccgcaagcggtgtatgtgccgccgcatttcgatttgtaccgtcaggtttccgcgcagattcacgccgtattcaggcgttataccgatttaatcgaacccttgtcgctggacgaagcctatcttgacgttacccgtaatttcaaaaacatcccttacgccagtgaagttgccaaagaaatccgtgccgccatttttgcggaaacaggtttgactgcatccgcaggcatcgcgccgaacaaatttctggcgaaaatcgcgtcggactggcgcaagccgaacgggcagtttgtgttgccgccgcacaaagtcatggcatttttggaaaccctgcctttgggcaaaatccccggcgtgggcaaggtaacgctgaaaaaaatgcagtcgctgggtatgcggacggcgggcgacttgcgccgtttcgagcgcggcgagctcttaaaccatttcggacgctacggctaccgcctctatgatttggcgcgcggtacggacgaacgccccgtcaaagccgaacgcgaacgcctccaaatctccacagaaattaccctgcccgaagacctgccgctcgagcaggctgccggacacctcccccatcttgccgaagacttgtggcggcaaatcacgcgcaaaaacgtcgaagcccaaagtgtaacgctcaagctgaagacctacgatttccgcatcatcacgcgcacgctgacttattcctccgtattgcccgactgcgcctccctgcttcaggcggcgcaaatgttgatggcgcgcgtcccgccgcagacggaagacgcgttccgccttatcggtatcggcgtggggcatcttgtgccgaaaaaccagcagcaggatttgtgggcgtaa

SEQ ID NO: 60950 - DNA, 1419 bp, Neisseria meningitidis
atgtctattaaaaacgccgtaaaattgattgaagaaagcgaagcccgctttgtcgatttgcgctttaccgataccaaaggcaagcagcaccactttaccgtgcctgcgcgcatcgtgttggaagaccccgaagagtggttcgaaaacggtcaggcgtttgacggttcgtctatcggcggctggaaaggcattcaggcttccgatatgcagctgcgtcccgatgcgtctacagccttcgtcgatcctttttatgatgatgttaccgtcgtcattacctgcgacgtcatcgaccctgccgacggtcagggttacgaccgcgacccgcgctccatcgcccgccgcgccgaagcctatttgaaatcttccggcatcggcgacaccgcctatttcggccccgagcctgaattcttcgtttttgacggcgtagaatttgaaaccgacatgcacaaaacccgttacgaaatcacttccgaaagcggcgcatggtcaagcggcttgcatttggacggtcaaaatactggccaccgtccgaccgtcaaaggcggttacgcgcccgttgccccgattgactgcggtcaagatttgcgctccgccatggtgaacattttggaagaactcggcatcaaagtcgaagtccaccacagcgaagtcggtaccggcagccaaatggaaatcggcacgcgcttcgccactttggttaaacgcgccgaccaaacccaagacatgaaatatgtgattcaaaacgttgcccacaacttcggcaaaaccgccaccttcatgcccaaaccgattatgggcgacaacggcagcggtatgcacgttcaccaatccatctggaaagacggtcaaaacctgttcgccggcgacggctatgccggtttgagcgacaccgccctttattacatcggcggcatcatcaaacacgccaaagccctgaacgcgattaccaatccgtccaccaactcctacaaacgccttgtgccgcactttgaagcgccgaccaaactggcttattccgccaaaaaccgttccgcttccatccgcattccgtccgtgaacagcagcaaggcgcgccgcatcgaagcgcgtttccccgatccgaccgccaacccatacttggcgttcgccgctttgttgatggccggtttggacggtattcaaaacaaaattcatccgggcgaccctgccgataaaaacctgtacgatctgccgccggaagaagatgcattggtgccgaccgtctgcgcctctttggaagaagccctcgccgccctcaaagccgaccacgaattcctcctgcgcggcggcgtattcagcaaagactggatcgacagctacatcgcctttaaagaggaagatgtccgccgcatccgcatggcaccgcatccgctggaatttgaaatgtattacagcctgtaa

SEQ ID NO: 60951 - DNA, 198 bp, Neisseria meningitidis; identical to SEQ ID NO: 46017

SEQ ID NO: 60952 - DNA, 381 bp, Neisseria meningitidis; identical to SEQ ID NO: 42684

SEQ ID NO: 60953 - DNA, 735 bp, Neisseria meningitidis; identical to SEQ ID NO: 55778

SEQ ID NO: 60954 - DNA, 942 bp, Neisseria meningitidis; identical to SEQ ID NO: 54927

SEQ ID NO: 60955 - DNA, 882 bp, Neisseria meningitidis
atgccgtctgaaaacaccctcttccccctgcccgacaccctgttgcgccccatggtggaacaagccttgagcgaagatttgggcaggcgcggcgatattacgtccgccgccgttatcgcccccgaaaaaaccgccaaactcttcctcgtcagccgcgaagacggcgttatcgccggcatggacttggcgcgcctcgcctttcagacgatggatccgtccgttcgcttccaagccgaaatccgagacgggcaagtcgtccgcgcaggtcagacgcttgccgccgtcgaaggcaacgcccgcgcgctgctcgccgccgaacgcaccgcgctcaactacctcacgcacttaagcggcatcgccaccgccaccgcgcgtgccgttgccgaagtcgccgaatacggtacagacatcgtgtgcagccgcaaaaccatccccctgctgcgcgtcctgcaaaaatacgccgtcagggcaggcggcggcgtgaaccaccgcatgggcttggacgacgccgtgctcatcaaagacaaccacctcgcctattgcggcagcatcgcccaagccgttcggcaggcaaaacaggcggtcggaccgttgacttgtgtagaaatcgaagtggacacgttggcacaactggacgaagccatcgcagcgggcgcggaacggattttgctggacaacatggacgacgaaaccctgaaagaagcggcaaaccgctgccacacgcaaaccgcccacccccacaccgtctattgcgaagcatcgggcggcatcggcttcgaccgactgaagcgcgtggcgcaaaccggcgtggacggcatcgctctcggctatctgacccacagcagccgttcgttggacataggtttggatttcttggcatga

SEQ ID NO: 60956 - DNA, 1002 bp, Neisseria meningitidis
atgcagtttccttaccgcaatgttccggcttcgcgtatgcgccgtatgcgcagggacgatttttcacgccgcctgatgcgcgaacacacgctgaccgccgatgatttgatttatccggtgttcgtattggaggggtcggcgcgcgaggaggatgtgccttctatgcagggcgtgaagcgtcagagtttggacaggctgctgtttacggcggaagaggcggtaaagctcggtattccgatgttggcactctttcccgtggttacggcaaacaaaactgagcgtgcgcaggaggcgtacaatcccgaaggactcgtgccgtcaactgtccgagccttgcgcgagaggtttcctgaactgggcattatgacggatgtcgcgctcgatccttatacggttcacggtcaggacgggctgacggacgaaaacggttatgtgatgaacgatgaaaccgtagaggttttggtcaagcaggctttgtgccacgctgaagcgggcgcacaggtggttgctccttccgatatgatggacgggcgtatcggtgcgattcgcgaggcgttggaggatgccgggcatatccatacgctgattatggcgtattccgccaaatatgcttctgcattttacggccctttccgtgatgcggtgggcagttcgggcaatttgggcaaggcggacaagaaaacctaccagatggatccggcaaataccgatgaggcgttgcacgaagtggcgttggacattcaggaaggtgcggatatggtaatggtcaagcctggtttgccgtatttggacgttgtccgccgcgtgaaggacgagttcggtgtgccgacttatgcctatcaggtttcgggcgaatatgcgatgctacaggcggcggttgccaacggatggctggatggcgataaagtggttttggaaagcctgctggcattcaaacgtgcgggcgcggatgggattttgacctattatgccattgaggcggccaagatgctgaagcgttga

SEQ ID NO: 60957 - DNA, 246 bp, Neisseria meningitidis; identical to SEQ ID NO: 59399

SEQ ID NO: 60958 - DNA, 1413 bp, Neisseria meningitidis
gtgaaaatcctcattttaggcaacggacaggtaggttctaccgtcgcacaaaaccttgccgccatacccaacaacgacgtaaccgttatcgacatcgacgaaaaagcattgcaggaaacaggcagccgcctcgatgtccaaaccgttttcggcaacggcgcatcccccttcacattagaacgcgccggcgcggaagatgccgacttgctgctcgcgctctcccgcagcgacgaaaccaacatcgtcgcctgcaaagttgccgccgacctgttcaacatccccggccgcatcgcgcgcgtccgttccagcgaatacctcgaatacctcagccccaagctcgaaaacaacgaaaacggcagcctttccatattcggcataaccgaaaccatcagccccgaacagctcgttaccgaacagcttgccggcctgatagactgcccgggcgcattgcaggttttacgttttgcagacgaccgcgtgcggatggtcatcatacaggcgcggcgcggcgggttgcttgtcggacgcagcattgccgacatcgcccaagatttgcccgacggggccgactgccaaatctgcgccgtttaccgcaacaaccgcctcatcgtccccgcgccgcaaaccgtcatcatcgaaggcgacgaaatcctatttgccgccgccgccgaaaacatcggcgcggtcatacccgaattgcgccccaaagaaaccagcacccgccgcatcatgattgccggcggcggcaacatcggctaccgtctcgccaagcagctcgaacacgcatacaacgtcaaaatcatcgaatgccggccgcgccgtgccgaatggatagccgaaaacctcgacaacaccctcgtcctgcaaggttcggcaaccgacgaaaccctgctcgacaacgaatacatcgacgaaatcgacgtattctgcgccctgaccaacgacgacgaaagcaacattatgtccgcccttttggcgaaaaacctcggcgcgaagcgcgttatcggcatcgtcaaccgctcaagctacgtcgatttgctcgaaggcaacaaaatcgacatcgtcgtctccccccacctcatcaccatcggctcgatactcgcccacatccggcgcggcgacatcgttgccgtccaccccatccggcgcggcacggcggaagccatcgaagtcgtcgcacacggcgacaaaaaaacttccgccatcatcggcaggcgcatcagcggcatcaaatggcccgaaggctgccacattgccgccgtcgtccgcgccgaaaccggcgaaaccattatgggacaccataccgaaaccgtcatccaagacggcgaccacatcatctttttcgtctcgcgccggcgcatcctgaacgaactggaaaaactcatccaggtcaaaatgggctttttcggataa

SEQ ID NO: 60959 - DNA, 657 bp, Neisseria meningitidis; identical to SEQ ID NO: 55760

SEQ ID NO: 60960 - DNA, 615 bp, Neisseria meningitidis; identical to SEQ ID NO: 36682

SEQ ID NO: 60961 - DNA, 174 bp, Neisseria meningitidis; identical to SEQ ID NO: 42248

SEQ ID NO: 60962 - DNA, 1302 bp, Neisseria meningitidis
atgccgtctgaacatcaacacacatcatcattacttgatttcgaccgtacccatctgctccatccctatacttccatgaccgatccgcttcccgtttatcctgtcaaacgtgcagaaggggtgtttatcgaattggcggacggcacgcggctggttgacgggatgtcgtcctggtggtgtgcgatacacggttacaatcatcctgttttgaatcaggcggttgagacgcagattaaacaaatgtcgcatgtgatgttcggcggtttgacgcatgagcctgcggtggagctgggtaaattgttggttgggattttgccgcaggggttggaccgtattttttatgcggattcaggttcggtttcggtggaagttgcgttgaaaatggcggtgcaataccggcaggtgcgggggttgacggcgaagcagaatattgcgacggtgcggcgcgggtatcacggcgatacttggaacgcgatgtccgtctgcgatccggaaacggggatgcaccatattttcggcagcgcgttgccgcagcgttattttgtcgataacccgacaagccgtttcgacgatgaatgggacgaggcggatttgcagcctgtccgcgccttgtttgaagtgcatcatgcggatattgccgcctttattttagagccggtcgtgcagggcgcgggcggcatgtatttttatcatccgcagtatcttcgcggattgcgcgatttgtgcgacgagtttgatatcgttttgatttttgatgaaatcgccaccggattcgggcgcacgggcaagatgtttgcctgcgaacacgcggaggtcgtgccggatattatgtgcatcggcaagggtttgagcggcggctatatgacgctggcggcagcaatcacttcgcaaaaagttaccgaaacgatttcgcgcggcgaagcgggcgtgtttatgcacggcccgacgtttatggcaaacccgctggcgtgtgccgttgcctgcgcttcggtcaaactgcttttgtctcaagactggcaggcaaatatccgccgcattgaaagcatcttaaaaggccgtctgaaagccgcgtgggacattcgcggcgtgaaagacgtacgcgttttgggtgccatcggcgtgatcgagctggataaaggcgtggatatggcgcgttttcaagcagattgcgtggcacagggcatttgggtgcgcccgttcggcaggctggtatatctgatgccgccgtatattatttcagacggcgttttgaccaaacttgccgacaaaaccgtgcaaatcttgaaggaacacagcaaatga

SEQ ID NO: 60963 - DNA, 345 bp, Neisseria meningitidis; identical to SEQ ID NO: 40340

SEQ ID NO: 60964 - DNA, 1179 bp, Neisseria meningitidis; identical to SEQ ID NO: 55445

SEQ ID NO: 60965 - DNA, 378 bp, Neisseria meningitidis; identical to SEQ ID NO: 36526

SEQ ID NO: 60966 - DNA, 1185 bp, Neisseria meningitidis
atgagtttacacagcgacatcctcgtcgtcggcgcaggcccggcgggtttaagttttgcagccgaacttgccggcagcggtttgaaagttaccctgatcgaacgcagcccactgactgttctgcaaaatcctccatatgacggacgcgaaatcgccctgacccatttttcccgcgaaatcatgcagcgtttgggtatgtgggacaaaattcccgaaaacgaaatctaccctttgcgcgatgccaaagtgctgaacggacgttccgactaccagctccactttccccaaccgactgaagcgcgcggcgaacctgccgactgtttgggctatctgatttccaaccacaatatccgccgcgccgcctatgaagtcgtatcacaactcgacaatgtcagcattctgaccgatacggttgtcaaagaagtcaaaacatctgacaacgaagcacaagtcattttggaaaacggcaaaatcctgactgcacgcctgcttttggcggcagacagccgcttctcgcaaacccgtcgacaactcggtatctcctccgatatgcacgattacagccgaaccatgttcgtctgccgtatgaaacataccctttccaaccaacataccgcttacgaatgcttccattacggacgcaccatcgcactgctgccgctggaagagcacctgaccaataccgtcattaccgtcgataccgataaaatcaacagcgttcaaaacctttcgcccgaagaattggccgcaagcgtaaaagaacagctcaaggccaggctcggcgatatggaactggtcagcagcatccaccattacccccttgtcggtatgattgccaaacgtttctacggcaaacgcagcgcgctgatcggcgatgcggctgtcggtatgcaccccgttaccgcacacggtttcaacttgggtctgtccagcgcagatattttggcaaaactgatactcgaagccgagcagcgcggtcaggacatcggcgcggcttccttgttggaaaaatacagcagcaaacatatgctgcacgcccatccgctttatcacgggaccaatatgatgctgaagctgtttaccaacgaaaccgcgccggcaaaactgctgcgcggcttggtattgcgtgccggcaacaatttcccgccgctgaaaaagctgattaccaaacaactgaccggttga

SEQ ID NO: 60967 - DNA, 360 bp, Neisseria meningitidis; identical to SEQ ID NO: 54420

SEQ ID NO: 60968 - DNA, 720 bp, Neisseria meningitidis; identical to SEQ ID NO: 54461

SEQ ID NO: 60969 - DNA, 1422 bp, Neisseria meningitidis
atgaaaatcattcagatacagaacaatcacaatgtaaacgatgaccgccccgagtttgaccgcgcgctgattgccagcctgcccgccagcggcccgcgctacacttcctaccctaccgccgaccgtttccatgacggtttccgcgaaggcgaatatatcaaagctttacatttgcgcggtatgggcgcgttaaacaaaccgctttccctttacattcacattccgttctgcaacaccatctgctactactgcggctgcaacaaaatcatcaccaaagacaaaagccgcgccgatgcctacatcgaatatcttgaaaaagaaatggaactgctcgctccacatctgaacggacggcaccagcttgcccaactgcacttcggcggcggcacgccgacctttttgagcgacgaacagatcgaacgtgtcttccgcatgatacgcaaacatttcgagttaatccccaccggcgaatactccatcgaaatcgacccgcgcaaagtcagccgcgacaccgtcctcatgctcggcagactcggcttcaaccgcatgagcatcggcattcaggatttcgaccccaaagtgcaggcggcggtcaaccgcatccaaagttacgaagaaaccaaagaagtcatcgatgcggcgcgcgaagcggggttcaaatccgtcagcgtcgatttgatttacggcctgccgcaccagacttcggaaagcatcaaaaccaccatcgataccgttttgtcgctcgatcccgaccgcctcgccctttatcactacgcccacctgccgcacgtgttcaaaccgcaacgccgcatcgataccgccgccgttcccgacagcgaagagaagctcgatatgctgcaatactgcgtccaaaccctaaccgaacgcggttacgtcttcatcggcatggaccatttcgccaaacctgacgacgaactctccatcgccctcaaagaaggcttcctccagcgcaacttccaaggctattcgacctacgcggattgcgatttggtcgccatcggcgtgtcgtccatcggcaaaatcggcagcacctattcccaaaacgaacgcgacatcgatgcctactatgccgccatcgacgaaggcagactgcccatcatgcgcggttatcagctcaatcaggacgacatcctgcgccgcaacatcattcaggatttgatgtgccgcttcgcgctcgactatcggatttacgaaagtatgttcggcatcccgttcgaccgctacttcaaagacgaactggcggatttggaaaaactcgccggtttgggattggtgcgcctgaacagccacgggctgaccgttaccccgaaaggacgcttcctcatccgcaacatcgccatggtcttcgattaccacctgcgccacaaagaaaccaaggcgaaatattcgcaaacggtgtga

SEQ ID NO: 60970 - DNA, 330 bp, Neisseria meningitidis; identical to SEQ ID NO: 39065

SEQ ID NO: 60971 - DNA, 1377 bp, Neisseria meningitidis
atgcacgacaaaacctggtccggacgtttcaacgaacccgtttccgaactcgtcaaacaatacaccgcctccatcggtttcgaccgacggcttgccgaatgggacatccaaggctcgctggcacacgcgcaaatgttgaaagaaaccggcgtgttggacgaaggcgatttggcggacatccgtcagggcatggcggaaatcctcgaagaaatccgcagcggcaaaatcgaatggtcgtccgatttggaagatgtccacatgaacatcgaacgccgcctgaccgacaaaatcggcgacgcgggcaaacgcctgcacaccggccgcagccgcaacgaccaagtcgccaccgacatccgcctgtggctgcgcgaccagattaccgttattcaaaacctgattcaaaaccttcagacggcattgctggatttggcggaacaaaacgccgaaaccgttatgcctggctttacccacctgcaagtcgcccagcccgtcagcttcggacaccatatgctcgcctacgtcgaaatgctcggccgcgataacgaacggatggcggactgccgccgccgcgtcaaccgtatgccgctcggcgcagccgcccttgccggtacgacctacccgattcggcgcgaaattaccgccgaattactgggtttcgagcaaatctgccaaaactcgctcgatgccgtatccgaccgcgattttgccgtcgagttcaccgccgccgcctcgctgattatggttcacctgagccgcctgtccgaagaattgattttgtggatgagtccgcgtttcggctttatcgacatcgccgaccgtttctgcacaggttcgtccatcatgccgcagaagaaaaatcccgacgtgcccgaactcgtgcgcggcaaatccggacgcgtcatcggacaccttatcggcctgattaccctgatgaaatcccagcccttggcgtacaacaaagacaatcaggaagacaaagaacctttgtttgacaccgccgacacgctcatcgacacgctgcggatttacgccgatatgatgcgcggcgtaaccgtcaaacccgacaatatgcgcgccgccgtgatgcagggttttgccaccgccaccgacttggcggattatctggttaaaaaaggtatgcccttccgcgatgcccacgaagtcgtcgcccaagccgtgcgccacgccgatgaagctggcgtcgatttgagcgaactgccgctcgaagtcttacaaggtttcagcgatttgattgccgacgacgtttacggcgtgctgacacccgaaggcagcttaaacgcgcgcaaccacttgggcggcaccgcgcctgaacaggtacgcctccaagtcaaacgctggcgtgaagtgtcagcttaa

SEQ ID NO: 60972 - DNA, 975 bp, Neisseria meningitidis
atggacacactgacccgattcctccccgaacacctgcaacaaaaccagctgcccgaagcactcggcggcgttttactgtccgttgtttccgcctgcaccgaaatcaacgccaaagtccgcctcggcgcactggccggcgtattgggtatggcgggcacgggcaatattcagggcgaagaccaaaaaaaactggatgttatcgccaacaacatcatgattgacacactcaaagccaaccctgccgttgccggtttggcaagcgaggaagaagactctttcgtaagtgccggtgaaaacggacgctatctcgtcctattcgaccctttagacggatcgtccaatattgatgtcaacatttccgtcggtacaattttctccatccttgaaaaacccgaaggcgcattggcaaccgaatcattccttcaaacgggcagacagcagcttgccgcaggctatatcctctacgggcctcaaacccagctcgtattcacattcggacacggcgtatatatgttcacgctcaatgccgaaaacgaatttgtgctgaccaaagaaaaaccgaaagtacccgaaagtaccaaagaatttgccatcaatatgtccaaccgccgccactggctgccccccgtccaacaatacatcgacgagctcttggcgggcgaaaccggcacgcgcggcaaaaactacaatatgcgctgggtagccagcatggttgccgaaatccaccgcatcctgatgcgcggcggcgtgttcatgtatccgcaagacaaacgcgacccgtccaaacccggcaaactgcgcctgatgtacgaagccaaccctatgagcctgatactcgaacaggcgggcgcatcggcaagcaacgcatatcaagccatgctcgacatacagcccgaaaacctgcaccaacgcgtcgccgtcttcatgggcagcagcgaagaagtcgcctatctcgaccgcctgcacgcaaaatag

SEQ ID NO: 60973 - DNA, 516 bp, Neisseria meningitidis; identical to SEQ ID NO: 54969

SEQ ID NO: 60974 - DNA, 267 bp, Neisseria meningitidis; identical to SEQ ID NO: 55621

SEQ ID NO: 60975 - DNA, 1194 bp, Neisseria meningitidis; identical to SEQ ID NO: 54515

SEQ ID NO: 60976 - DNA, 1434 bp, Neisseria meningitidis
atgtctcaatatgatgtagtagtgattggtgcaggcccgggcggatacgttgccgccatccgtgccgcgcaactgggtttcaaaaccgcttgcgttgacgcaggggttaacaaagcaggcaatgcccctgcattgggcggtacttgcttgaacgtaggctgtattccttccaaagccctgttgcaatccagcgaacatttccacgccgcgcaacacgagtttgccgaacacggtatcactgtcggcgacataaaattcgacgcggccaaaatgattgagcgcaaagatgccatcgtgaccaagctgaccggcggcgtgaaattcctgttccaaaaaaacaaagtaaccagcctgttcggtactgcttcttttgccggtaaaaatggcgatgcttaccaaatcgaagtcgataacaaaggcgagaaaaccgttatcgaagccaaacacgtcatcgtagcaaccggttccgtaccgcgtccgctgccacaagtcgctatcgacaacgtgaacgtattggacaacgaaggcgcattgaacctgaccgaagtgcctgccaaactgggcgtcatcggttccggcgtgattggtttggaaatgggttccgtatggaaccgcgtgggtgcagaagttaccattcttgaagctgcgccgaccttcctggctgccgccgaccaacaaatcgccaaagaagccttcaaatacttcactaaagagcagggcttgaacatcgaactgggcgtgaaaattggcgacatcaaatctgaaggcaaaggcgtttccgttgcttacgaaactgctgccggcgaagctaaaaccgaagtatttgacaaactgatcgttgccattggccgtattccaaacaccaaaggtctgaacgccgaagccgtaggcttggaaaaagacgagcgcggtttcatcaaagtagatggcgaatgccgtaccaacctgcctaacgtatgggcaatcggcgacgtggttcgcggcccgatgttggcacacaaagccagcgatgaaggcgttgccgttgccgagcgcatcgccggtcaaaaaccgcatatcgacttcaacaacgtaccgttcgtgatttacaccgatcctgaaatcgcttgggtaggtaaaaccgaagagcagctcaaagccgaaggcgtggagtacaaaaaaggtacttcaggtttcggtgcaaacggtcgcgcattggcaatgggcaaagccaaaggtacggttaaagtattggcagatgccaaaaccgaccgcatcttgggcgtacacatgattggtccggttgtcagcgaattggttaccgaaggcgtgactgcgctcgaattcttcgccagcagcgaagacatcgcccgcattatccatgcccacccgaccttgtccgaagtggttcacgaagctgcattggcggccgacaaacgcgctttgcacggttga

SEQ ID NO: 60977 - DNA, 1464 bp, Neisseria meningitidis
atgcgtatcgtagaaaaagcctatactttcgacgatgttttgttggttcccgcacattcgaccgtgctgccgcgagacgttaaacttcaaaccaagctcacccgcgaaatcacactcaacctccccctgctttccgctgcgatggacactgttaccgaggcgcgcctcgccatttcgatggcacaggaaggcggcatcggcatcatccataaaaacatgccgcccgaaatgcaggcgcgcgccgtttccaaagtgaaacgccacgaaagcggcgtggtcaaagaccccgtaaccgttgcaccgacgacgctcatccgcgaagtcttggaaatgcgtgcgcagcgcaaacgcaaaatgtccggcctgcccgtcgttgaaaacggcaaagtcgtcggcatcgtaaccaaccgcgacctgcgttttgaaaaccgcgtcgatttgcccgtttccgccattatgaccccgcgcgaacgtttggttaccgtccccgaaggcacaagcatagacgaagcgcgcgaactgatgcacacgcacaaagtcgagcgcgttttggttctgaacgaaaaagacgaactcaaaggtctgattaccgttaaagatattttaaaaaccaccgagtttcccaacgccaacaaagactccgaaggccgtctgcgcgtcggtgcggcagtcggcaccggcggcgataccgaagagcgcgtcaaagccttggtcgaagccggcgtggacgtgattgtcgtcgatactgcccacgggcacagccaaggcgtgattgaccgcgtgaaatgggtgaaagaaacctatccgcacatccaagtcatcggcggcaacatcgccactgccaaagccgcattggatttggtcgccgccggtgcggatgccgtcaaagtcggtatcggcccgggatcgatttgcaccacccgtatcgtggcaggcgtgggcgtgccgcaactgaccgccatccacaacgttgccgaagccctcaaaggcacaggcgttcccctgattgccgacggcggcatccgcttctccggcgacatcgccaaagccctcgccgcaggcgcgtacagcgtcatgctcggcggtatgtttgccggcacggaagaagcgccgggcgaaatcgaactctatcaaggccgctcgtacaaatcctatcgcggtatgggttcattgggcgcgatgagccaaggttctgccgaccgctacttccaagacaaaaccgacagcaccgacaaatacgtccccgaaggcatcgaaggccgcgttccttacaaaggcccgattgtgaacatcatccaccagctgaccggcggtctgcgttccagtatgggttacttgggttgcgccaatattgccgaaatgcacgaaaaagccgaatttgtggaaatcacttccgcaggtatgagcgaatcgcacgttcacgacgttcaaatcactaaagaagcaccgaactaccaccgctga

SEQ ID NO: 60978 - DNA, 672 bp, Neisseria meningitidis; identical to SEQ ID NO: 55867

SEQ ID NO: 60979 - DNA, 1806 bp, Neisseria meningitidis
atgaaaaaactgatttgcctgttcgccgtatttttgatgttgtgcggacgagctttcgcgctggatgcgaacgatctgctgccgccggaaaaggcattcgtgccggagcttgccgttgccgacgacggtgtgaacgtccgtttcaagattgccgacggatactatatgtatcaggcgaaaatcgtcggcaagaccgatccggcggatttgttgggacagccttctttcagcaagggcgaagagaaggaagacgagtttttcggcaggcagacggtttaccatcacgaagcgcaggttgcctttccttatgcaaaggctgtcggcgaaccgtataaattggttttgacctatcagggctgtgccgaagccggcgtgtgctatccgcccgtggataccgagtttgatatttccggcaacggcacttaccatccgcaaaccgacgaaccggcatccgccaaagaccgctttttgcagccttcctctcaaaacggcagcggggcgctgccgcccccgaagggggatgagggcggcgacagccgtttcaagctgtcttgggatacgctcaacgccaatcttttggcgttttttctcgccggtttgggtctgagttttaccgcctgtatgtatcccctgttgccgattgtttccagtattgtggtcggcgacaaaaaggcgggcaaggcgcgggcgtttgtgctgtccgtcgtttatgttcagggtttggctctgacttatacgctggtcggcattgttgccggactgacgggcgcactgctgaccgtatggttgcagcaggcttgggtcgtgttggcggcatcggctttgatggtcgtcttggcactgtctatgttcgggctgttcaacatccagcttcccaacgccgtgcagtcgtattttcagaatcaaagcagcaggctttcaggcggtaaaatcgtttccgtctttattatgggcatattgtccgcgctgattgtcgggccgtgcgtcgccccgccgctggcatttgctttgggctacatcggtcagacgggcgatgcggttttaggcggtttggcactttacactttggcgttgggcaccggcgttccgctgattgccatcggcacgttcggcgggcatatcctgcctaaggcaggcgattggatgaatgccgtcaaatacgctttcggctttatcctgcttgccgtcgccgtttacctcgccacgccgcacttgccctattatctcgtcgtcgcgctgtacacgctgctgatgctggttcctgcctgtatgctgctggtcaacggacgcaggcagaaacgccgtccgaaagctgtggcattcgcattgggcagcatattgctgataggcggcgcgtggttcggctggcagggcgcaaacggcaaaacgaccgcgctgcaccatttcctgaccctcaatccgccggccgaagcaggcaaatcttcggaacacggcaaaatgtttgccgatactgccgcgctgaaggcagcgatggatacggcgttgaaagaacatcccgacaaacccgtcgttttggatttttatgccgactggtgcatttcctgcaaagaaatggcggcttacacgctcaatcagccggaagtgcatcaggcagtcgatatggaacgctttttccaaatcgacgtaaccgccaacacgcccgaacatcaggcgttgttgaaagaatacggtctgttcgggccgccgggcgtgtttgtcgtccgctccgacggcagccgcagcgagccgctgctgggttttgtcaaagcagacaagtttatcgagtggtatgaacaaaaccgctga

SEQ ID NO: 60980 - DNA, 438 bp, Neisseria meningitidis; identical to SEQ ID NO: 50946

SEQ ID NO: 60981 - DNA, 771 bp, Neisseria meningitidis
gtgtccgaaacacaaaacgaacaacccgtccaaccgcttgtcgagcatctcatcgagctgcgccgccgcctgatgtggacggttgtcggcatcttagtctgctttttcggcctaatgccgtttgcccaacaactctatacttttatcgccgacccgctgatggcaaacctgcccaaagacaccagcatgattgccaccgatgtcatcgcaccatttttcgtgccggtcaaagttaccctgatggcggcatttttaatttcgctgccgcatacgctctaccaaatctgggcatttgtcgcgcccgcactctatcaaaacgaaaaacgcctgattaccccgcttgtcctctcaagcgtcagcctgtttttcatcggcatggcatttgcctactttctggtttttcccgtcattttcaaattccttgccagcgttacccctgtcggtgtcaatatggcgacagacatcgacaaatacctatcttttatcttaggcatgtttgttgcgttcggcacaacgtttgaagttcccattgtcgttatcctgttaaccaaaatcagcgtggtaacaaccggacagctcaaacgcgcccgcccctatgtgattgtcggcgcgtttgtcattgccgccatcatcacgccgcccgatgtgatttcacaaaccctgcttgccattccgctgattctcttatacgaagcaggtatttggttcggacgctttttcacgccacgttcagaacaggatggcgacatacagccgcctgcaacaacctga

SEQ ID NO: 60982 - DNA, 5979 bp, Neisseria meningitidis
atgaataaaggtttacatcgcattatctttagtaaaaagcacagcaccatggttgcagtagccgaaactgccaacagccagggcaaaggtaaacaggcaggcagttcggtttctgtttcactgaaaacttcaggcgacctttgcggcaaactcaaaaccacccttaaaactttggtctgctctttggtttccctgagtatggtattgcctgcccatgcccaaattaccaccgacaaatcagcacctaaaaaccagcaggtcgttatccttaaaaccaacactggtgcccccttggtgaatatccaaactccgaatggacgcggattgagccacaaccgctatacgcagtttgatgttgacaacaaaggggcagtgttaaacaacgaccgtaacaataatccgtttgtggtcaaaggcagtgcgcaattgattttgaacgaggtacgcggtacggctagcaaactcaacggcatcgttaccgtaggcggtcaaaaggccgacgtgattattgccaaccccaacggcattaccgttaatggcggcggctttaaaaatgtcggtcggggcatcttaactaccggtgcgccccaaatcggcaaagacggtgcactgacaggatttgatgtgcgtcaaggcacattgaccgtaggagcagcaggttggaatgataaaggcgaagccgactacaccggggtacttgctcgtgcagttgctttgcaggggaaattacagggtaaaaacctggcggtttctaccggtcctcagaaagtagattacgccagcggcgaaatcagtgcaggtacggcagcgggtacgaaaccgactattgcccttgatactgccgcactgggcggtatgtacgccgacagcatcacactgattgccaatgaaaaaggcgtaggcgtcaaaaatgccggcacactcgaagcggccaagcaattgattgtgacttcgtcaggccgcattgaaaacagcggccgcatcgccaccactgccgacggcaccgaagcttcaccgacttatctctccatcgaaaccaccgaaaaaggagcggcaggcacatttatctccaatgatggtcggatcgagagcaaaggcttattggttattgataccggggaggacatcggtttgcgtaacggagcggtcgttcaaaacaacggcaaccgccctgctgctacggtattaaatgccggccgtaatttggttatcgaaagcaaagcaaatgtgaacaatgctaaaggttcgaccaatctgtcgaccggcggccgtaccgtcatcaaggaggccagtattcagactggcactaccgtatacagttccagcaaaggcaacgccgaattaggcaataacacacgcattaccggggcagatgttaccgtattatccaacggcaccatcagcagttccgccgtaatagatgccaaagacaccgcacacatcgaagcaggcaaaccgctttctttggaagcttcaacagttacctccgatatccgcttaaacggaggcagtatcaagggcggcaagcagcttgctttactggcagacgataacattactgccaaaactaccaatctgaatactcccggcaatctgtatgttcatacaggtaaagatctgaatttgaatgttgataaagatttgtctgccgccagcatccatttgaaatcggataacgctgcccatattaccggcaccagtaaaaccctcactgcctcaaaagacatgggtgtggaggcaggctcgctgaatgttaccaataccaatctgcgtaccaactcgggtaatctgcacattcaggcagccaaaggcaatattcagcttcgcaataccaagctgaacgcagccaaggctctcgaaaccaccgcattgcagggcaatatcgtttcagacggccttcatgctgtttctgcagacggtcatgtatccttattggccaacggtaatgccgactttaccggtcacaataccctgacagccaaggccgatgtcaatgcaggatcggttggtaaaggccgtctgaaagcagacaataccaatatcacttcatcttcaggagatattacgttggttgccggcaacggtattcagcttggtgacggaaaacaacgcaattcaatcaacggaaaacacatcagcatcaaaaacaacggtggtaatgccgacttaaaaaaccttaacgtccatgccaaaagcggggcattgaacattcattccgaccgggcattgagcatagaaaataccaagctggagtctacccataatacgcatcttaatgcacaacacgagcgggtaacgctcaaccaagtagatgcctacgcacaccgtcatctaagcattaccggcagccagatttggcaaaacgacaaactgccttctgccaacaagctggtggctaacggtgtattggcactcaatgcgcgctattcccaaattgccgacaacaccacgctgagagcgggtgcaatcaaccttactgccggtaccgccctagtcaagcgcggcaacatcaattggagtaccgtttcgaccaaaactttggaagataatgccgaattaaaaccattggccggacggctgaatattgaagcaggtagcggcacattaaccatcgaacctgccaaccgcatcagtgcgcataccgacctgagcatcaaaacaggcggaaaattgctgttgtctgcaaaaggaggaaatgcaggtgcgcctagtgctcaagtttcctcattggaagcaaaaggcaatatccgtctggttacaggagaaacagatttaagaggttctaaaattacagccggtaaaaacttggttgtcgccaccaccaaaggcaagttgaatatcgaagccgtaaacaactcattcagcaattattttcctacacaaaaagcggctgaactcaaccaaaaatccaaagaattggaacagcagattgcgcagttgaaaaaaagctcgcctaaaagcaagctgattccaaccctgcaagaagaacgcgaccgtctcgctttctatattcaagccatcaacaaggaagttaaaggtaaaaaacccaaaggcaaagaatatctgcaagccaagctttctgcacaaaatattgacttgatttccgcacaaggcatcgaaatcagcggttccgatattaccgcttccaaaaaactgaaccttcacgccgcaggcgtattgccaaaggcagcagattcagaggcggctgctattctgattgacggcataaccgaccaatatgaaattggcaagcccacctacaagagtcactacgacaaagctgctctgaacaagccttcacgtttgaccggacgtacgggggtaagtattcatgcagctgcggcactcgatgatgcacgtattattatcggtgcatccgaaatcaaagctccctcaggcagcatagacatcaaagcccatagtgatattgtactggaggctggacaaaacgatgcctataccttcttaaaaaccaaaggtaaaagcggcaaaatcatcagaaaaaccaagtttaccagcacccgcgaccacctgattatgccagcccccgtcgagctgaccgccaacggtatcacgcttcaggcaggcggcaacatcgaagctaataccacccgcttcaatgcccctgcaggtaaagttaccctggttgcgggtgaagagctgcaactgctggcagaagaaggcatccacaagcacgagttggatgtccaaaaaagccgccgctttatcggcatcaaggtaggtaagagcaattacagtaaaaacgaactgaacgaaaccaaattgcctgtccgcgtcgtcgcccaaactgcagccacccgttcaggctgggataccgtgctcgaaggtaccgaattcaaaaccacgctggccggtgccgacattcaggcaggtgtaggcgaaaaagcccgtgtcgatgcgaaaattatcctcaaaggcattgtgaaccgtatccagtcggaagaaaaattagaaaccaactcaaccgtatggcagaaacaggccggacgcggcagcactatcgaaacgctaaaactgcccagcttcgaaagccctactccgcccaaattgtccgcacccggcggctatatcgtcgacattcccaaaggcaatctgaaaaccgaaatcgaaaagctggccaaacagcccgaatacgcctacctgaaacagcttcagacggccaagaacgtcgattggaaacaggtgcagctggcctacgacaaatgggactataaacaggaaggcttgaccggagccggtgcagcgattgtggtgattattgtaaccgctctaacttatggatacggagcggctgcagcgggtagcgtaactgccgcaggaagtagtacagccgcagctgcaacaacgacagcggcagcaactaccactgtttctactgcagctgccatgcaaaccgcagctttagcctccttgtatagccaagcagctgtagccatcatcaataataaaggcgatgtaggcaaagcattaaaagatctcggcaccagtgatacggtcaagcagattgttacttccgcactgacggcgggtgcattaaaccagatgggagcagatattgcccaattgaacagcaaggtaagaaccgaactgttcagcagtacgggcaatcaaaccattgccaaccttggaggcagattggccaccaacctcagcaatgcaggtatctcagctggtatcaataccgccgttaacggcggcagcttgaaagacaacttaggcaatgccgcattgggagcattggttaatagcttccaaggggaagccgccagcaaaatcaaaacaaccttcagcgacgattatgttgccaaacagttcgcccacgctttggcgggttgtgttagcggactggtacagggaaaatgtaaagatggggcaattggcgcagcagttggggaaatcgtagctgaatccatacttggcggcagaaaccctgctacactcagcgatgcagaaaagcataaagttatcagttactcgaagattattgcgggcagcgtggcggcactcaacggcggcgatgtgaatactgcggcgaatgcggctgaggtagctgtggtgaataatgctttgaattttgacagcacccctaccaatgcgaaaaagcatcaaccgcagaagcccgacaaaaccgcactggaaaaaatcatccaaagtattatgcctgcacatgcggcaggtgcgatgactaatccgcaggataaggatgctgccatttggataagcaatatccgtaatggcatcacaggcccgattgtgattaccagctatggggtttatgctgcaggttggacagctccgctgatcggtacagcgggtaaattagctatcagcacctgtatggctaatccttctggttgtactgtcatggtcactcaggctgccgaagcgggcgcgggaatcgccacgggtgcggtaacggtaggcaacgcttgggaagcgcctgtgggggcgttgtcgaaagcgaaggcggccaagcaagctgctcctaaagaaacaataaacaatttggcaaatttagccaaagcagaacagcagattttattccgtattgcccaacgcgatacgcaactggatgcatggaagacgggatttaacaatagagtaaggaaaggagcaggcttgcttgatgcaagtaatattccgataaccattaacggaaaaaccatcaaacctgtacaagccataagcttaaagggagcacccgtttacagcggcgtaagcgaacaggagatttttgcgctttatcggcagatgactggccagaatccgaattttagagttttgcctgacggaagattagcaaatggcattatcagtactggagaatgggcaggaacaaaaattgcattaagaaatttttcaaaaacagagaattcaactcaagcacgatggacattagatttgcagaatcctccatcatttattaaaggtactaaattggagcttaaattccaataa

SEQ ID NO: 60983 - DNA, 303 bp, Neisseria meningitidis; identical to SEQ ID NO: 54454

SEQ ID NO: 60984 - DNA, 300 bp, Neisseria meningitidis; identical to SEQ ID NO: 55025

SEQ ID NO: 60985 - DNA, 1458 bp, Neisseria meningitidis
atgtcccggcatcccgcccccaccggagaaaaaacattcttcggccaccccttccagctttccaccctcttccatatcgaattgtgggaacgtttttcattttacggaatgcagggcatcctgctgatttacctctactacaccgccgacaaaggcggcttgggcatagacaaaaccctcgccggcggcattgtcggcgcatacagcggcagcgtgtacctgtccaccattttgggggcgtggtttgccgaccgagtatggggtgcggaaaaaaccctcttcctctcgggcatcgtcgtgatgctcggacacatcgtccttgccgccgccccgggcctgtacggtcttttaatcgggctgatattcatcgcattgggcagcggcggtgtgaaatctacggccagttctatggtgggcgcattatacgaacaggacgaaatgcgcccgctgcgcgatgcgggattttccattttctacatcgccatcaacatcggcggcttcctgggcccgctgctgaccggcctgctgcaggaaaacatcggtttccattatggtttcggcgcggcggcggtcggtatggcattcggcttgtggcgttattccttgggacgtaaaaacctgccccaccccaccgtcccccatccgctttcaaaaggacagggcaaaactgcggccgccgtcggcatcaccctcatcgccgcacttgcaaccgccatcaaaaccgggcttgtcaacctcgacaatttctccggcatcctcttatctaccgtcatccttgccgtcattgcctatttcgcccgcctgctgaccaacccccgcgtcagttccgacaacaaacggcacatcatcgcctacatcccgcttttcctgaccatctgtatgttttgggccgtctggtttcagatttacaccgtggcaaccgtctatttcgacgaaaccgtcaaccgcaccatcggttcgtttaccgtgcccgtcgcctggaaagattccatgcaaagcctgtgggtcatcctgttttccggactgatggcggcaatgtggacaaaaatggggcgcaaacagcccaaaaccccgctgaaattcgctatggcggtatttgttaccggcgcgtcgtttttgggattcgtcccctttatttccgccggcacgccgatgcctattgcggttttcgcactgattgtccttgccatcacgataggcgaactgatgatttccccgattgcgctgtccatctccaccaaaatcgcaccgcctttattcaaaacccaaatggtcgcccttaatttccttgccttttcattaggcttcactttgggcggcgtattgtttgagaaaggctatcaggcgggcgacgaaatcggcttctaccggctgctgttctacatcggcgcaaccacaggcttcctgctgctcctgctcgtccccaaattgaacaaaatgctcgaaggcacagactaa

SEQ ID NO: 60986 - DNA, 960 bp, Neisseria meningitidis; identical to SEQ ID NO: 54613

SEQ ID NO: 60987 - DNA, 564 bp, Neisseria meningitidis; identical to SEQ ID NO: 45112

SEQ ID NO: 60988 - DNA, 576 bp, Neisseria meningitidis; identical to SEQ ID NO: 54589

SEQ ID NO: 60989 - DNA, 864 bp, Neisseria meningitidis; identical to SEQ ID NO: 54925

SEQ ID NO: 60990 - DNA, 666 bp, Neisseria meningitidis
atgacagtattaagcaaagagcaggtcctatccgcatttaaaaaccgcaaatcatgccggcattacgatgcggcacgtaaaatcagtgccgaggattttcagtttattttagaactcgggcgtttgtcgcccagttcggtcggttcggagccttggcagtttgttgtggttcaaaaccccgaaatccgacaggcaatcaagccgttttcttggggtatggcggatgctttggataccgccagtcatttggtggtgtttttggcaaagaaaaatgcccgcttcgacagcccgtttatgttggaaagcctcaaacggcgcggcgttaccgaaccggatgccatggcaaaatctttggcgaggtatcgggcgtttcaagccgacgacatcaagattttggacgattcgcgcgccttgtttgactggtgttgccgccagacctatatcgcgttgggcaacatgatgacgggtgcggcgatggcaggtatcgattcctgtccggtggaaggtttcaactatgccgatatggaacgcgtattgtccaggcagttcggtttgttcgatgcggcagaatggggcgtgtccgtcgccgcgacattcggctaccgcgttcaggaaatcgccacgaaggcgcgcaggcccttggaagaaaccgttatttgggcataa

SEQ ID NO: 60991 - DNA, 1194 bp, Neisseria meningitidis; identical to SEQ ID NO: 55300

SEQ ID NO: 60992 - DNA, 525 bp, Neisseria meningitidis
gtgttggacagggaaggctatcgccccaatgtcggtatcatcttaatcaacaaccgcgacgaagtcttttggggcaagcgcgtgcgcgaacattcttggcagtttccgcaaggcggcatcaagccgggcgaaagccccgaaaccgccatgtaccgcgagttgtacgaagaagtcgggcttttgccgcaacacgtcaaaattatcggccgcacgcgcgactggctgcgttatgacgtgccgaacaactgggtacgccgcgaatggcgcggatcctatcgcgggcagaagcagatttggtatctcctgcgcctgaccggccgagattgcgatgtcaacctgcgcgccacccgccaccccgaatttgacggctggcgttggcatcaatattgggcgcccgttgacgaagtgattgatttcaaacgcgacgtttatttgggggcgttgaaagaactctcttcccgcttcctgcgcggtatggaaagttatgaagactttgccgcccgccaatcttccgacaaccgctaa

SEQ ID NO: 60993 - DNA, 309 bp, Neisseria meningitidis; identical to SEQ ID NO: 38004

SEQ ID NO: 60994 - DNA, 2595 bp, Neisseria meningitidis
atgtccaaatccgccgtttccccaatgatgcagcaatacctcggcatcaaagcgcaacataccgacaaactggtgttttaccgtatgggcgatttttacgagatgtttttcgacgatgcggtagaagcggcaaaacttttggatattaccctgaccacgcgcggacaggtggatggcgagccggtcaaaatggcaggcgtgccgtttcacgccgccgaacaatatctggcgcgcctagtcaagttgggcaaaagcgtggcgatttgcgaacaggtcggcgaagtcggcgcgggcaaagggcctgtggagcgcaaagtcgtgcgcatcgtaacgcccggcacgctgaccgattccgcattgctggaagacaaggaaaccaaccgtatcgttgccgtgtcccccgacaaaaaatacatcggtttggcgtgggcatcgctgcaaagcggcgaattcaaaaccaagctgacaactgtggataaattggacgacgaactggcgcgcctgcaggcggcggaaattctgttgccggacagtaaaaacgcaccgcaacttcagacggcatcgggtgttacgcgcctgaacgcgtggcagtttgccgccgacgcgggggaaaaactgctgacggaatatttcggctgccaggatttgcgcggcttcggtttggacggcaaagaacacgccgttgcgattggcgcggcaggtgcactgttgaactatatccgtctgacgcaaaacctgatgccgcaacatttggacggcctgtcgctcgaaaccgacagccaatatatcggtatggatgctgccacgcgccgcaatctcgaaatcacgcaaaccctctccggcaaaaaatcgccgaccctgatgtccacgctcgacctttgcgctacccatatgggcagccgcctcttggctctctggctgcaccaccctttacgcaaccgcgcccacatccgagcgcgccaagaagccgttgccgcgctggaaagccaatacaaacccctccaatgccgtctgaaaaacattgcggacattgaacgcattgctgcccgcatcgccgtcggcaacgcccgcccgcgcgatttggcatctttacgcgacagtctgttcgagttggcacaaatcgacttgtccgcaaacggcagcagcctgttggaaaccctcaaagccgttttcccggaaaacctatccacagccgaacagctccgccaagccattttgcccgaaccttccgtctggctgaaagacggcaatgtcatcaaccacggttttcatcccgaactggacgaattgcgccgcattcaaaaccatggcgacgaatttttgctggatttggaagccaaggaacgcgaacgtaccggtttgtccacactcaaagtcgagttcaaccgcgttcacggcttttacattgaattgtccaaaacccaagccgaacaagcacctgccgactaccaacgccggcaaaccctcaaaaacgccgaacgcttcatcacgccggagttgaaagcctttgaagacaaagtgctgactgctcaagagcaagccctcgccttagaaaaacaactctttgacggcgtattgaaaaaccttcagacggcattgccgcagcttcaaaaagccgccaaagccgccgccgcgctggacgtattgtccacattttcagccttggcaaaagagcggaacttcgtccgccccgagtttgccgactatccggctatccacatcgaaaacggccgccatcccgttgtcgaacagcaggtacgccacttcaccgccaaccacaccaaccttgaccacaaacaccgcctcatgctgctcaccggccccaatatgggcggcaaatccacctacatgcgccaagtcgcgctgattgttttattggcacacaccggctgttttgtgcctgccgatgccgccacaatcgggcccatcgatcaaatcttcacccgcatcggcgcatcggacgacctcgcctccaaccgctccactttcatggtcgaaatgagcgaaaccgcctacatcctgcatcacgccaccgaacaaagccttgttttaatggacgaagtcggacgtggcacttccactttcgacggcctcgccctcgcgcacgccgttgccgaacacctgctgcaaaaaaacaaatccttcagcctgtttgccacccactatttcgagctgacctacctgcccgaagcccacgccgccgccgtcaatatgcacctttccgcgctcgaacagggacaggacatcgttttcctgcaccaaatccaaccgggtcccgccggtaaaagctacggcattgccgtcgccaaactcgccggcctgcctgtacgcgcattgaaatccgcccaaaagcatttgaacgaactggaaaaccaagccgccgcgaaccgtccccaactggatattttcagtaccatgccgtctgaaaaaggagatgaaccgaatgtgggcaactttgtggataaagcagaggaaaaacattttgaaggtatattggcagcagccttggaaaaactcgatcccgacagcctgaccccgcgcaaagcattgtcagaactgtaccgtctgaaagatttgtgcaaatccgtatcttaa

SEQ ID NO: 60995 - DNA, 957 bp, Neisseria meningitidis
atgaaagtcctctttatcgccgacccgatggcaagtttcaaaacctacaaagacaccacctacgccatgatgcgcgagatggcaaaacgcggttggcggctgtttcataccttgagcggggaattgtcggttaaaaacggtctggtggttgctgatgcgtctgcttttgagtttctcggcgcacaagacgaccacgacaaaaactggtttgccgccgccgacaaagttcagacggcattgaaagcatttgatgccgtgattatgcgtaccgatccgccgttcgatatgcaatacctctacgccacccaattactgacgctggcggagcagcagggcgcgaaggtctttaacagcggacaggcgatgcgtgatttcaatgaaaaactggcgattttgaacttcagccgctttaccgcgcccacgctggtaacgacccgttccgccgatgtccgcgcatttttgaaagaacacggcgacatcatcattaaaccgctcgacggcatgggcggtatgggcatcttccgcctgaccgaaaaagaccccaacatcggcagcatcctcgaaaccctgatgcagcttgattcccgcaccattatggcgcaacgctacattcccgaaatcgtacacggtgacaaacgcatcctgattatcggcggcgaagtcgtcccctatgctttggcgcgtatcccgcaaaacggcgaaacacgcggcaaccttgcggcaggcgggcgcggcgtggcgcaggaattgggcggacgcgaccgcgaaattgccgaaacgctcgcccccgaactcaaacggcgcggcatcctgctggccggtttggacgttatcggcagcaacctgaccgaagtcaacgtaaccagcccgaccggattccaagaaattatgaaacaaaaaggtttcgacgtggcggcaatgtttgccgatgccgttgccgcgtggtcggtacgttaa

SEQ ID NO: 60996 - DNA, 1794 bp, Neisseria meningitidis; identical to SEQ ID NO: 45016

SEQ ID NO: 60997 - DNA, 621 bp, Neisseria meningitidis; identical to SEQ ID NO: 37903

SEQ ID NO: 60998 - DNA, 480 bp, Neisseria meningitidis; identical to SEQ ID NO: 58623

SEQ ID NO: 60999 - DNA, 603 bp, Neisseria meningitidis; identical to SEQ ID NO: 55351

SEQ ID NO: 61000 - DNA, 477 bp, Neisseria meningitidis; identical to SEQ ID NO: 54610

SEQ ID NO: 61001 - DNA, 747 bp, Neisseria meningitidis
atgaacgttttgatttccaacgacgacggctacctctccgaaggtattgccgttttggcgcgcgttacggcggaatttgccaacgtcagggtggttgcgcccgaacgcgacaggagcggggtcagcaattcgctgacgctggaacgccctttgcagttgaaacaggcgcaaaacgggttctactatgtcaacggcacgccgaccgactgcatccacatcgggcagtctgtattttcggattttcaggccgattttgtcttttcgggcatcaaccggggcgcgaatatgggggacgacacgctttattcggggacggttgcggcggcaaccgaagcctaccttatgggcatacccgctgtggcgttttccttaaacgacgcttccggacgctattgggcaaccgcagaaaaggcactgtggacattgttggcgcattttttcaaaacccccccgcagttccctattttgtggaacatcaatatccccgccgtcgcgccggaagatgtgcggggcattaaaatcgcccgtttgggcaggaggcatcacggtcagaacgtcatccccgcgcgcaatccgcgcggcgaacagatttattggataggcccggtaggcagggtttccgacaaagaagagggaacggatttcggtgaatgcggcgcaggtttcattaccgtaacgccgctgcaaatcgacctgaccgcctatccggacatggcggaaacagcggtgttctggcatgcggactga

SEQ ID NO: 61002 - DNA, 2028 bp, Neisseria meningitidis
ttgtccctgtctgaatttatagaacgccgaacgtcatttaatccgatggttattttgacgactttgttttttgtgtgtgttttggtggtattggttttaaccgtgccggatcaggtgcagatgtggctcgatcgggcaaaagaagtcatttttaccgagttcggctggttttatgttttaacgttttccatttttctgggtttcctgctgatactctcggtcagcagtttgggaaacatcaggctcggacgggatgaagatgtgccggaattcggcttcctgtcgtggctggcgatgctgtttgcggccgggatgggcgtgggtctgatgtttttcggcgtggcagagccgttgatgcattatttttcggacattacggccggcacgccggaacacaggcagcagcaggcattgctgcacacggtgttccattggggcgttcacgcttggtcggtgtacggtacgattgcattggctttggcttatttcggtttccgctacaagctgccgcttgccctgcgttcttgtttttatcccctgttgaaagaaaaaatttccggaaggttcggcgatgccattgatattatggcgttgcttgctacttttttcggcatcatcaccacattggggttcggggcttcgcaactgggcgccggattgcaggaaatgggctggattgccgaaaacagcttcagcgtgcaggttttgattatcgccgccgtcatgtccctcgccgtcgtttcggcaatatccggcgtggggaagggcgtgaaggtgttgagcgagttgaacctgagccttgcgtttttgctgctgttttttgttttggcggcgggtcccactgtttacctgttgtcggcattcggcgacaacatagggaactacctcggaaatctggtgcgcctcagttttaaaacttatgcgtacgaacgggaacacaagccgtggtttgaatcttggacggtgctttattgggcgtggtggtgttcttgggcgccgtttgtgggtttgtttatcgcgcgcatttcaaaggggcgcaccatccgcgagtttgtcttcggggttttgctcatccccggcctgttcggcgttttgtggtttaccgtcttcggcaatacggcgatttggctgaatgacggggttgcggggggaatgctcgaaaagatgacctcctctccggaaacgctgctttttaaattctttaattacctccccctgcccgaattgacgagcatcgtcagcctgctggtcatttctctgttttttgtaacttctgccgattccgggatttatgtcctgaacaatattacctctcgggacaaaggcttgagcgcgccacggtggcaggcggttatgtggggcgtgctgatgtctgccgttgccgttttgctgatgcgctcgggcggactcggcaacctgcagtctatgaccctgattgtttccctgccgtttgccctgctgatgctgataatgtgtttcagcctgtggaaaggcttgagtgcggataagaaatattttgagacccgggttaaccctaccagtgtattttggacgggcggcaagtggaaagaacggctggtgcagataatgagccagacgcaggagcaggatattttaaaattcctcaaacataccgcatcgcccgctatgcacgagttgcaacgggagctttcggaagaatacggcttgagcgtccgggtcgataagatgtttcatcaggacgagcccgcaatcgagttcgtcattcggaaagagacgatgcgcgattttatgtacgggattaagtctgtcgggcaggatgtatccgaccagttgattaacgacggcaagctgccgcatatccggcatcagacaacttacaaaccctacgcttattttttcgacgggcgcgtcgggtacgatgtgcagtatatgaacaaggacgagctgattgccgacattttgaaaaactacgaacgttatttgatgttgttggatgatgtcggtcaggaactgatggcgcacgagcaggtggaattggcagagtaa

SEQ ID NO: 61003 - DNA, 561 bp, Neisseria meningitidis
atgagctatcaagacatcttgcggggtctgttgccccccgtgtcgtatgcccgcaatgccccgcgtgtgcgggcgcaggcagaaatagacggcgcagcgctggatgcggtggcggaatcggctcaaagcgttgccgatgccgtcgacccgagcagcgccggccaaatgctggccgattgggagcgcgtattaggtttggacggtacgggcaaaaaccgccagcgccgtgtgttggccgtcatggccaagctaaacgaaacaggcggcttgagtattccttattttgtgcgtttggccgaggcggcgggctatcaaatccaaatcgacgaaccgcagccgttccgcgccggtgtaaaccgcgccggcgaccgtcttgcgccgcaggaaatcatgtgggtgtggcacgttaacgtgcgcggcggcaacaaccgcattacccgattccgcgccggtatctcggcggcgggcgacaggctgaccgattacagcgatgccgtgatcgagagcctgttcaaccgcctcaagcccgcccacaccgctatccgatttacctaccgataa

SEQ ID NO: 61004 - DNA, 714 bp, Neisseria meningitidis; identical to SEQ ID NO: 54498

SEQ ID NO: 61005 - DNA, 756 bp, Neisseria meningitidis; identical to SEQ ID NO: 54580

SEQ ID NO: 61006 - DNA, 450 bp, Neisseria meningitidis
atgaaaatcggaacaacttggcagacggcatccgctatgctggttttgcgtctgtttgccgcatatgaatttttggaatcgggtttgcaaaaatggaacggggagaattggttttccgaaatcaacgatcagtttccattcccgttcaacttgctgccggacgcgttaaactggaatctcgccatgtatgcggagcttttactgcccgtactgttgcttttgggtttggcaacgcgtctgtcggcattagggctgatggtcgttaccgccgtcgcttgggctgcggttcacgccggttcgggttacaatgtctgcgacaacggttataaaatggctttaatttatatcgtggtattaatcccgctgcttttccagggtgcgggcggatggtcgctggatacgctgctgaaaaaacggttttgcccccaatgccgtctgaagcaagattga

SEQ ID NO: 61007 - DNA, 1638 bp, Neisseria meningitidis; identical to SEQ ID NO: 55319

SEQ ID NO: 61008 - DNA, 1446 bp, Neisseria meningitidis; identical to SEQ ID NO: 54468

SEQ ID NO: 61009 - DNA, 1056 bp, Neisseria meningitidis
atgactattttatcggacgttaaagcattaggacaacaaatctggctggacaacctttcccgctcgctcgtgcaaagcggcgaattggcgcaaatgctgaaacaaggcgtgtgcggcgtaacttccaatcccgccatcttccaaaaagccttcgccggcgacgcgctttacgccgatgaaatcgccgccctcaagcagcaaaacctcagccccaaacaacgctacgaaaccatggcggttgccgatgtgcgtgccgcctgcggcgtttgccttgccgaacacgaatccaccggcggcaaaaccggtttcgtcagcctcgaagtttcgcccgaattgtccaaagacgcgcaaggcacggtagaagaagcgcgccgcctctacgccgccatcgggtgcaaaaacgcgatgattaaagtgcctgccaccgacgcaggcatcgatgcgctcgaaatcctcgtttcagacggcatcagcgtaaacctcacgctgctgttctcacgcgcccaaaccctcaaagcctacgccgcctacgcgcgcggcattgccaaacgcttggcagccggacaaagcgttgcccatatccacgtcgtcgccagcttcttcatctcccgtgtggacggcgcgctggacacaacactgcccgaccggctcaaaggcaaaatcgccatcgcccttgccaaagccgcctaccaagactgggcgcaatacttcggcagctcggaatttgccgcgctggaagcccaaggcgcaaaccgcgtgcagcttttatgggcatctaccggcgtgaaaaacccggcctatcccgacacactctacgttgacagcctgatcggcgcgcacaccgtcaacaccgttcccgatgccacgctcaaagcctttatcgaccacggcacagccaaagccacgctgaccgaaggcgtagaagaagcacaagcgcagctcgccgaaaccgccgcgctcggcatcgatgtcgaaaccttggcggcacgtttgcaggaagacggtttgaaacagtttgaagaagcgtttgaaaaactgctcgcaccgttggtttaa

SEQ ID NO: 61010 - DNA, 372 bp, Neisseria meningitidis; identical to SEQ ID NO: 55734

SEQ ID NO: 61011 - DNA, 606 bp, Neisseria meningitidis; identical to SEQ ID NO: 54648

SEQ ID NO: 61012 - DNA, 1338 bp, Neisseria meningitidis; identical to SEQ ID NO: 55083

SEQ ID NO: 61013 - DNA, 1497 bp, Neisseria meningitidis
atgaccacggaaaaccaagccggcagtccggcatccggaatcggcacgtccgaacaaacaaaagccgcgccgaaagcaaaaaaaacattcgatccgcgagccagcgtgattcaaatccatcccgaaggcgaacgcatccatccgaaaaaggcggaaggacggttcgccaaactgcgtatcgccgccgtattggcgacgcagtttgtgttttacgtcattccgtggttcaactggagcggcaggcaggccgtcgttttcaatatccccgaacggcatttcttcattttcggattgtcgttgggggtgggcgatttgatttaccttgccttgctgctgatgatttgcgccttcgggctgttttggtggacgacgattgccgggcgactgtggtgcggctattcctgcccgcaaacggtttacaccgaaattatgctgtggatcgacaacctggtcgaaggcgatagaaacaaacgcctgaagctggaaaaatcgccgtggaatttcactaaaatccgcatcaaagccaccaaatacctgttgattttccttgtctgcgcgtggacgggcatcacgtttgcaggctggtttgtccctatccgccagttcgttcccgatttattcactggagcagcaggcggcggcgcgatgtttgccacagcgttttacggctttatgaccttcttcttcgcacatattatgcgcgaaaaagtatgcctgcatatgtgtccgtatgcacgtttccaaagcgcgatgttcgacaaggacacgctgattgtttcttatgacgcggaacgcggcgaaccgcgcggagcccgcaagaaaacggtcaacaaggaagaggcgggtttgggcgactgcatcaactgtgcgatgtgcgtccaagtctgccctgtcggcatcgacatccgcaacggtctgcaataccaatgcatcggctgcgccgcctgtatcgacgcgtgcgatgagattatggacaaaatgggctatccgcgcggattaatccgttatacgaccgaaagcgcgctggaacacgaatattctgaaaaagacattaaaaaacggctgctcagaccgcgcgtggcaggttacggcgcggtgttggcgttagttatcattgccttcctggccggtttgtccacgcgcaaaatggtcgaggtcgatattttgaaagaccgtggcgtactggtgcgcgaaaacgccaaaggctggctggaaaacgcatacagcctgcgtatcatcaacaaaagtgaaaaagaacagctcattaccgcaagtgtcaaaggctttgacgaaatcgccctgaccgggctgcccgaaggcggtatcaaggttgccccgcgcgaaacggtaacccttcccgtccaagtgtccaccattccggaatacgcggacaaaggcagccaccctatcgaatttaccttccaataccgcgaaagcggcgcgcccgacggcaagccggtcgtcttggaagaagatgcaacctttatcggagaataa

SEQ ID NO: 61014 - DNA, 918 bp, Neisseria meningitidis; identical to SEQ ID NO: 37376

SEQ ID NO: 61015 - DNA, 720 bp, Neisseria meningitidis; identical to SEQ ID NO: 50970

SEQ ID NO: 61016 - DNA, 1404 bp, Neisseria meningitidis
atgaaaaaaattcaagcagatgtcgtcgtaatcggcggcggtactgccggtatgggcgcgtttcgcaatgcccgtttacattcggacaatgtttacctgattgaaaacaatgtgttcggcacgacctgcgcgcgcgtgggctgtatgccttccaaactcttgattgccgccgccgaggcgcgccatcacgcattgcataccgacccgttcggcgtgcatttggataaagacagtatcgtcgtcaatggcgaagaagtgatgcagcgcgttaaatccgagcgcgatcgttttgtcggctttgtcgttgccgatgtggaagaatggcctgctgacaaacgcatcatgggttcggctaaatttatcgacgagcataccgtccaaatcgacgaccatacccaaatcacggcaaaaagtttcgtgattgctaccggctcgcgtcccgttatcctgccgcagtggcagtctttgggcgaccgtttgattatcaatgacgacgttttctcatgggatacgctgcctaagagcgttgccgtgttcggaccgggcgttatcggtttggaactggggcaggcattgcaccgtttgggcgtgaaagtcgagattttcggcttgggcggcatcatcggcggcatttccgaccctgtcgtttcagacgaggcgaaagccgtgttcggtgaagaattgaaactgcatctggatgccaaaaccgaggtcaaactcgatgcggacggcaatgtagaagtctattgggagcaagacggcgaaaaaggcgtatttgttgccgaatatatgctggcagccgtaggccgccgtccgaacgttgacaatatcggtttggaaaacatcaatatcgacaaagatgcgcgcggcgtacccgttgccgatccgctgaccatgcagaccagtattccgcatatctttattgcgggcgacgcatccaatcaactgcccctgctgcacgaagctgccgatcaaggcaagattgccggcgacaacgcgggccgctatccgaatatcggcggcggtttgcgccgcagcaccatcggcgtggtgtttaccaatccgcaaattggctttgtcggtttgaaatacgcgcaggttaccgcgcaataccaacccgacgaatttgtcatcggcgaagtatcgtttaaaaaccaaggccgcagccgcgtgatgctggtaaacaaaggccatatgcgcctgtatgccgaaaaagcaaccggccgcttcattggtgcggaaatcgtaggccctgccgccgaacatttggcgcacctgttggcatgggcgcatcaaatgaagatgaccgttccgcaaatgctggatatgccgttctaccatcctgttatcgaggaaggtctgcgtactgcgttgcgtgatgccgatgcgaaattgaaagcctga

SEQ ID NO: 61017 - DNA, 186 bp, Neisseria meningitidis; identical to SEQ ID NO: 55510

SEQ ID NO: 61018 - DNA, 4371 bp, Neisseria meningitidis
atgaaaacaaccgacaaacggacaaccgaaacacaccgcaaagccccgaaaaccggtcgcatccgcttctcgcctgcttacttagccatatgcctgtcgttcggcattcttccccaagcctgggcgggacacacttatttcggcatcaactaccaatactatcgcgactttgccgaaaataaaggcaagtttgcagtcggggcgaaagatattgaggtttacaacaaaaaaggggagttggtcggcaaatcaatgacaaaagccccgatgattgatttttctgtggtgtcgcgtaacggcgtggcggcattggtgggcgatcaatatattgtgagcgtggcacataacggcggctataacaacgttgattttggtgcggagggaagcaatcccgatcagcaccgcttttcttaccaaattgtgaaacggaataattataaagcagggactaacggccatccttatggcggcgattatcatatgccgcgtttgcataaatttgtcacagatgcagaacctgttgagatgaccagttatatggatgggtggaaatataccgatcaaaataattaccctgaccgtgttcgaatcggagcaggcagacaatattggcggtctgatgaagatgaacccaataaccgcgaaagttcatatcatattgcaagtgcgtattcttggctcgttggtggcaatacctttgcacaaaatggatcaggtggtggcacagtcaacttaggtagtgaaaaaattaaacatagcccatatggttttttaccaacaggaggctcatttggcgacagtggctcaccaatgtttatctatgatgcccaaaagcaaaagtggttaattaatggggtattgcaaacgggcaacccctatataggaaaaagcaatggcttccaactagttcgtaaagattggttctatgatgaaatctttgctggagatacccattcagtattctacgaaccacgtcaaaatgggaaatactcttttaacgacgataataatggcacaggaaaaatcaatgccaaacatgaacacaattctctgcctaatagattaaaaacacgaaccgttcaattgtttaatgtttctttatccgagacagcaagagaacctgtttatcatgctgcaggtggtgtcaacagttatcgacccagactgaataatggagaaaatatttcctttattgacgaaggaaaaggcgaattgatacttaccagcaacatcaatcaaggtgctggaggattatatttccaaggagattttacggtctcgcctgaaaacaacgaaacgtggcaaggtgcgggcgttcatatcagtgaagacagtaccgttacttggaaagtaaacggcgtggcaaacgaccgcctgtccaaaatcggcaaaggcacgctgcacgttcaagccaaaggggaaaaccaaggctcgatcagcgtgggcgacggtacagtcattttggatcagcaggcagacgataaaggcaaaaaacaagcctttagtgaaatcggcttggtcagcggcaggggtacggtgcaactgaatgccgataatcagttcaaccccgacaaactctatttcggctttcgcggcggacgtttggatttaaacaggcattcgctttcgttccaccgtattcaaaataccgatgaaggggcgatgattgtcaatcataatgccacaacaacatccaccgttaccattacagggaatgaaagtattacacaaccgagtggtaagaatatcaatagacttaattacagcaaagaaattgcctacaacggttggtttggcgagaaagatgcgaccaaaacgaatgggcggctcaaccttgtttaccagcccgccgcagaagaccgcaccctgctgctttccggcggaacaaatttaaacggtaacatcacgcaaacaaacggcaaactgtttttcagcggcagaccaacaccgcacgcctacaatcatttaaacaaccattggtcgcaaaaagagggcattccgcacggagaaatcgtgtgggacaacgactggattaaccgcacgtttaaagcggaaaatttccatattcagggcgggcaggcggtgatttcccgcaatgttgccaaagtggaaggcgattggcatttgagcaatcacgcccaagcagttttcggtgtcgcaccgcatcaaagccacacaatctgtacacgttcggactggacgggtctgacaaattgtgtcgaaaacaccattaccgacgataaagtgattgcttcattgaccaataccgacatcagcggcaatgtcgatcttgccaatcacgctcatttaaatctcacagggcttgccacactcaacggcaatctgaccgcaggcggagacacgcactatgaggttacgcacaacgccacccaaaacggcaaccttagcctcgtgggcaatgcccaagcaacatttaatcaagccgcattaaacggcaacacatcggcttcgggcaatgcttcatttaatctaagcgaccacgccgcacaaaacggcgatctgacgctttccggcaacgctaaggcaaacgtaagccattccgcattcaacggcaatgtctctctagccgataaggcagtattccattttgaaaacagccgccttaccggacaaatcagcggcggcaaggatacggcattacacttaaaagacagcgaatggacgctgccgtcaggcacggaattaggcaatttaaaccttgacaacgccaccattacactcaattccgcctatcgccacgatgcggcaggggcgcaaaccggcagtgcgacagatgcgccgcgccgccgttcgcgccgttccctattatccgttacacctccggcttcggcagaatcccatttcaacacgctgacggtaaacggcaaattgaacggtcagggaacattccgctttatgtcggaactcttcggctaccgcagcgacaaattgaagctggcggaaagttccgaaggcacttacaccttggcggtcaacaataccggcaacgaacctgcaagcctcgaacaattgacggtagtggaaggaaaagacaacaaaccgctgtccgaaaaccttaatttcaccctgcaaaacgaacacgtcgatgccggcgcgtggcgttaccaactcatccgcaaagacggcgagttccgcctgcataatccggtcaaagaacaagagctttccgacaaactcggcaaggcagaagccaaaaaacaggcggaaaaagacaacgcgcaaagccttgacgcgctgattgcggccgggcgcgatgccgtcgaaaagacagaaagcgttgccgaaccggcccggcaggcaggcggggaaaatgtcggcattatgcaggcggaggaagagaaaaaacgggtgcaggcggataaagacaccgccttggcgaaacagagcgaagcggaaacccggccggctaccaccgccttccgccgcgcccgccgcgcccgccgggatttgccgcaaccgcaaccccaaccgcagccccaaccgcagcgcgacctgatcagccgttatgccaatagcggtttgagtgaattttccgccacgctcaacagcgttttcgccgtacaggacgaattagaccgcgtatttgccgaagaccgccgcaacgccgtttggacaagcggcatccgggacaccaaacactaccgttcgcaagatttccgcgcctaccgccaacaaaccgacctgcgccaaatcggtatgcagaaaaacctcggcagcgggcgcgtcggcatcctgttttcgcacaaccggaccgaaaacaccttcgacgacggcatcggcaactcggcacggcttgcccacggcgccgttttcgggcaatacggcatcgacaggttctacatcggcatcagcgcgggcgcgggttttagcagcggcagcctttcagacggcatcggaggcaaaatccgccgccgcgtgctgcattacggcattcaggcacgataccgcgccggtttcggcggattcggcatcgaaccgcacatcggcgcaacgcgctatttcgtccaaaaagcggattaccgctacgaaaacgtcaatatcgccacccccggccttgcattcaaccgctaccgcgcgggcattaaggcagattattcattcaaaccggcgcaacacatttccatcacgccttatttgagcctgtcctataccgatgccgcttcgggcaaagtccgaacacgcgtcaataccgccgtattggctcaggatttcggcaaaacccgcagtgcggaatggggcgtaaacgccgaaatcaaaggtttcacgctgtccctccacgctgccgccgccaaaggcccgcaactggaagcgcaacacagcgcgggcatcaaattaggctaccgctggtaa

SEQ ID NO: 61019 - DNA, 567 bp, Neisseria meningitidis; identical to SEQ ID NO: 55982

SEQ ID NO: 61020 - DNA, 624 bp, Neisseria meningitidis; identical to SEQ ID NO: 36421

SEQ ID NO: 61021 - DNA, 1989 bp, Neisseria meningitidis; identical to SEQ ID NO: 54950

SEQ ID NO: 61022 - DNA, 474 bp, Neisseria meningitidis; identical to SEQ ID NO: 60630

SEQ ID NO: 61023 - DNA, 1467 bp, Neisseria meningitidis; identical to SEQ ID NO: 43542

SEQ ID NO: 61024 - DNA, 876 bp, Neisseria meningitidis; identical to SEQ ID NO: 54975

SEQ ID NO: 61025 - DNA, 324 bp, Neisseria meningitidis; identical to SEQ ID NO: 37971

SEQ ID NO: 61026 - DNA, 1386 bp, Neisseria meningitidis; identical to SEQ ID NO: 55524

SEQ ID NO: 61027 - DNA, 210 bp, Neisseria meningitidis; identical to SEQ ID NO: 43366

SEQ ID NO: 61028 - DNA, 2940 bp, Neisseria meningitidis
atgagtggttttaattacgagaaaaaccagccgcaccaaatgcgggcggtttcggcggttttgggcgtgtttgacggggcaacgcccaaatatcgggcggcagacgaaaatcccgaacttttgtttgctgcaaaacaatacgcagacaatatcctgaaagtgcaaagccaaaacggcatagacggccgattccccgaccgttcggacgaccaaaatatccttgatatttccatggaaacgggcacgggcaaaacctatacctacacacaaaccatgttcgagctgcaccgttggctgggcgtgttcaaatttatcgtggtcgtgccgactttgtccattaaggcgggaacgcggcagtttttgcaaagcaaggctttggcagagcattttgaacaggatttcggcggcgattatgaaggcgtgcgcctgaaaacctatgtggtggaaagcgcgaaaaagaataagggcaaaaagtccaatgcgcccataacgattgagcaatttgccaaagcggaaaacaaaaaggaaatccatgtgctgctgattaacgcgggcatggttaattcgtcgtccatgaacgatacgggcgacaaggcattgaaagatttgtttgacaatcccgttgatgcattggccgccgtgcgcccgtttgtgattgtggacgaaccgcataaattcccgacccgggagagcgcgaaaacatggggcaatatcaaacgcttaaaaccgcaatatattttgcgctacggtgcgacatttaacgatgaatattacaacttgctttaccgtttgacggcagtagacgcgtttaacgacgggctggtcaaaggcgtgcgcgtgtttcaggaagaaatgcagggcggcatggatgcggcggtaaaactggtgtcgtcgggcggcaaagaagcgaaatttgaattaaacgaaaaggacaaaaagcagacgttcaaactggcaaaaggcgaagatttggcgaaaatccatcctgctgtttcagatttgaaaatcgacaaaatgaataaaaccgtggtggtgttaagcaacggcttggagttgaaaacgggcgccgtcatcaacccttattcctattcgcaaacggtgcaggatgcgatgatgcagagggcggttgccgaacatttcaagctggaacgcgcacttttggcagaacgcgcgccacagcccaaaatcaagccgctgacgctgttttttattgatgatattgcgggctaccgcagcggcaacgagctttcaggcagcctgaaagataaatttgaaagctggattcacgcggaagcggcacgccgcctgaaaacggaaagcgacccgttttaccgcgattacctgcaaaagacgttggacgatgtatccgcctgccacggcggttatttttccaaagacaatacagacagcgacgatagaatcgagcaggaaatcaatgaaatcctgcacgataaggaaaaactgttgtctttggacaacccgcgccgctttattttttccaaatggacgctgcgcgaaggctgggacaatcccaacgttttccagatttgcaaactgcgttccagcggcagcacgacttccaagctgcaagaagtcggacgcggcctgcgcctgccggtaaacgagctgatggcgcgggtgcgcgatgtgccgtacaaactgaattattttgtcgatagcagcgaaaaagactttgtgaagcagcttgtcggcgaaatcaacgataattcttttcaggaagaaatctcaaaaaagtttaccgaagagctgaaacaaaaaatattgcaaaaataccccgatatcaaacctctgggattgttaaacaaactgttttcagacggcatcattgacgacaatgaaaactttaccgaagacggctatgacaaattaaaagccgcctatcccgaagccttccccaaaggtttggacaaaggcaaagtcagcaacgccaaagacgaaggcaaagacaccatcatcatgcgcgaaggcaaatatgaagaactcaaagccttgtgggagctgattcaccataaagccgttttgcagtacaaaatcaaagatgaagccgaatttgtcgatttatttactgcctatttgcgtgaaaacgccgccaaattcccgcaggcaggcatacgcacggcggtaaacgaagcttatatcaacaacgggcttatgctttcccgccgcatagacagctttgaagatgaagattttatccgtttcaacacaatgacttaccgtgagcttctggaaaaactggcacaaacggcaaaaatccgcatgcagactttgcatcaggcgttttaccgcgtccgcaacgaactgaacattggcgattttttgaatatgcagaccatcgcccaaatcaaaaacggcttcaaccggtttttgcttcatcattccttccataaattcgaactggattaccagcttgtcggcagcaaaatccatccgaccaaatttaccgataaagacggcaaaccgcgcgcggtgaaaaaagcagatttgggaagatttgaagatacggagcaccggcctgccgccggctatctcttcgacgagattttctacgattcggatatagaacatgaaaatgtcgccaacaaccaaattgaaggcgtaaccgtattcactaaaataccgagaaactccatcaaaatccccgttgccggcggcggcacgtattcgcccgattttgcctatatcgtgaaaacccaaagcggcgagattctgaactttgtgattgaagccaaagggactgacggggcggaagatttgcgaaaaagcgaagagcggaaaatcaaacatgccgaaaagctgtttgccgagatttccaaagaaatcaaggtggtgttcaaaacgcagtttgacggcgagaggatagccgaactgatcgggcaaaatatgcccgcaggcgggcattctgaaaacggacactga

SEQ ID NO: 61029 - DNA, 627 bp, Neisseria meningitidis
atgtatacaggcgaacgcttcaatacttacagccatttgagcggtttgattctggcggcggcaggtttggtgctgatgctgctgaaaaccataggacacggggacggctaccgtatcttcagcgtatcggtttacggcatcagccttcttctgctctatttgagttcctcgctgtaccacggaattgcagccggaaaactgaaaagcattttgaaaaaaaccgaccactgcatgatttatgtcctgattgccggaagctacacaccgtttgcactggtttctttaagaaacgggccgggctggacggtattttcactgtcctggctgctggcggctgcaggaatcgcacaagaactcaccatcggacggaaaagcgaaaaacgtctgctgtctattgtgatttatgtcgtcatgggttggatggtcttggcggtaatgaaatccctgacagcctcactcccgtcggcaggactggcttggctggcggcaggcggtatgctgtacagcgtcggcatttactggtttgtaaacgatgaaaaaatccgacacgggcacggaatctggcatctgttcgtattgggcggcagcatcacccaatttgtcagtgtgtacggttatgtaatctga

SEQ ID NO: 61030 - DNA, 474 bp, Neisseria meningitidis
atgaaaaaacaaatcaccgcagccgtaatgatgctgtctatgattgcccccgcaatggcaaacggcttggacaatcagacatttgaaaaccaagtgttccacacgcaggcagatgcgccgatgcagttggcggagctttctcaaaaggagatgaaggagactgagggggcgtttcttcctattgtggcaggtgctttgatgggaggggcaattagtgcttgggctaatcacggcatttctaaaattaaaacagggcaatttgcttcaacaagaagtaccttggctgcaaccgctggtggtatgataggcggcggatatagcagtgcgatgttgcgcggtgcagggattactactagtgtttttgcccgttctgcttggaaagggggaaatgctattcctaatgcagttattcgtgcaaatggtgcagcattaaatcagtcttctagcgccgcaatgggaaaacatagaagataa

SEQ ID NO: 61031 - DNA, 1098 bp, Neisseria meningitidis; identical to SEQ ID NO: 36189

SEQ ID NO: 61032 - DNA, 729 bp, Neisseria meningitidis
atgatcaaattcaaaaacgtacacaaacatttcaaagacctgcacgtcatcaacggcgtgaacttggaaatcaaaaaaggcgaagtggtcgtcgtctgcggaccttcgggcagcggcaaatccacactcatccgcaccgtcaaccagcttgaaagcatcgaaagcggcgagatttgggtggacggtgtcaacgttgccgacccaaaaaccgatttgaacaaaatccgcgaagaagtcggctttgtgtttcaaagtttcaacctctacccgcacctgaccgtgttggaaaacattaccctcgcaccgatgaaggttaaaggtcaaaatgcggaacaggcagagaaaaaagcgatggaacttttggaacgcgtcggactggcacacaaaaaagacgccttcccttcccaactttccggcggccagcagcaacgcgtggcgattgcacgcggtttggcgatggaaccgcgcgtaatgttgtttgacgaaccgacctccgcactcgaccccgaaatggtcggcgaagtgttgaaagtgatgaaagacttggcggaaagcggtatgacgatgatgtgcgtaacccacgaaatgggttttgcccgcgaagttgccgaccgagtgctttttgtcgataaagggcaaatcctcgaagacgaaacgcccgaagcgttttttaccaacccgaaacacgaacgcgccaaacaattcctgcaacaggtcatgacccactga

SEQ ID NO: 61033 - DNA, 582 bp, Neisseria meningitidis; identical to SEQ ID NO: 37778

SEQ ID NO: 61034 - DNA, 876 bp, Neisseria meningitidis
atggcttacctgttaatcagcatcgtgttcagcgtgtcggtttccattttgctgaaaatggcaaggaagaaaaaaatcgacatcgcgcaggcggtcgccgtcaattatgtggtcgcggtcatactgaccctgctggtattgaagccggatatcggcaatatcggcgcatttttgccgacgtggccgctgtttgccgctttgggcgtgctgctgccgtccgtattcgtgataatgggcaaatctgtggaagccgccggtatcgtcaaatccgacgcggcgcagcgtttgtcgctgtttttgccgattgttgccgccttgacgctgtttggcgaaaaactcagcgaaggcagactaatcgggctgtgcctcgcatttgccgcactgttctgcctgctttggaaacacagcggtggcaaaaaatcaggaagcgcgtggcggcaggcggcattgctgctgggcgtgtgggcaggttacggcattatcgatatcctgttcaaacagcttgccaaaagcggaacggcatttgcgggcaacctgctggttgcatttgtgctggcgggtgtgctgatgtttgcctgcctgtttgccaaatcggtcagatggcgtgttgagagtgtggtcggcggcatattcttgggcggtttgaattttatgaatatcgtaacctacatcaccgcgcaccaaatgatgaaggataatccgaccttggtttttgccggtatgaatatcggcgtgattgttttgggtacgctttcgggcgcattgttctttaaggaaaaaatcaacacaatcaatacggcgggaatcgtgttggcactgtgttctatcgcctgcctgttttattggggggaagtcaaggtactgttcggcatataa

SEQ ID NO: 61035 - DNA, 369 bp, Neisseria meningitidis; identical to SEQ ID NO: 54117

SEQ ID NO: 61036 - DNA, 993 bp, Neisseria meningitidis
atgaaaaaatccctgattgccctgactttggcagcccttcctgttgcagcaatggctgacgttaccctgtacggcaccatcaaagccggcgtagaaacttcccgctctgtagagcacaatggaggtcaggtggttagcgttgaaaccggtaccggcatcgttgatttgggttcgaaaatcggcttcaaaggccaagaagacctcggcaacggtctgaaagccatttggcaggttgagcaaaaggcatctatcgccggcactgactccggttggggcaaccgccaatccttcatcggtttgaaaggcggcttcggtaaattgcgcgtcggccgtttgaacagcgtcctgaaagacaccggcgacatcaatccttgggatagcaaaagcgactatttgggtgtaaacaaaattgccgaacccgaagcacgcctcatttccgtacgctacgattctcccgaatttgccggcctcagcggcagcgtacaatacgcgcttaacgacaatgcaggcagacataacagcgaatcttaccacgccggcttcaactacaaaaacggcggcttcttcgtgcaatatggcggtgcctataaaagacatcaggatgtggatgacgtgaagattgaaaaataccagattcaccgtttggtcagcggttacgacaatgatgccctgcacgcttccgtagccgtacagcaacaagatgccaaattggttgaagacaattattcgcacaactctcaaaccgaagttgccgctaccttggcataccgcttcggcaacgtaacgccccgcgtttcttacgcccacggcttcaaaggctcgtttgatgatgcagacttaagcaacgattacgaccaagtggttgtcggtgcggaatacgacttctccaaacgcacttctgccttggtttctgccggttggttgcaagaaggcaaaggcgaaaacaaattcgtatcgactgccggcggtgtcggtctgcgccacaaattctaa

SEQ ID NO: 61037 - DNA, 672 bp, Neisseria meningitidis; identical to SEQ ID NO: 54612

SEQ ID NO: 61038 - DNA, 732 bp, Neisseria meningitidis
ttgcaagatcgtaccggtcaaaaagtaccttccgtagtattccgcacccgcgttggcgacacttggaaagatgtgtctaccgatgatttgttcaaaggcaaaaaagtagtcgtattctccctgcctggtgcatttaccccgacttgttcttcttcacacctgccgcgttacaacgaattgttcggcgcgttcaaagaaaacggcgttgacgcaatctactgcgtatctgtaaacgatactttcgtaatgaacgcttgggcggccgaagaagaatccgacaacatctacatgattcctgacggcaacggcgaattcaccgaaggcatgggcatgttggtcggtaaagaagacttgggcttcggcaaacgttcttggcgttactccatgctggttaacgacggcgtggttgaaaaaatgttcatcgagccggaagaaccaggagatccgttcaaagtatccgatgcagatactatgctgaaattcgttgctcccaattggaaggctcaagagtctgttgccatctttaccaaacccggctgccaattctgtgctaaagccaaacaagccctgcaagacaaaggtttgtcttacgaagaaatcgtattgggcaaagatgcaaccgttacttccgttcgcgccattaccggcaagatgactgccccgcaagtcttcatcggcggtaaatacatcggcggcagcgaagatttggaagcttacttggctaaaaactga

SEQ ID NO: 61039 - DNA, 2424 bp, Neisseria meningitidis
ttggcaacccttcctttgcgggatgtcgtcgtttacccgcatatggttctgccgctgtttgtcggcaggccgaaatccatcgccgcactggaaaacgccattacccgcgaggaaccggttttcctattggcacaaaccgatgcggcgctagaagaaccggttgccgccgacctgtatcagaccggtaccgtcgcacaagtcttacaggtattgaaactgccggacggcacggtaaaagtattggtcgaaggtctgtatcgcggacgtgttctgaccatcgaagacacgggcggtctgttcgtttcccatatagaggcggtcgtggaagaagacacgggcggcaataccgacctcgaagccgtgcgccgcaccctgttggcgcagtttgaacaatacgccaaactcaataaaaaaatccccgccgaaattatcggcagcatcaacggcattgccgaaaacagccggctaaccgatacggtcgcagcgcatttgcagttgaaactggcgcaacgccaacagattttggaaattcccgaaatcggcaaacggatggaattcctgctggcacagctggaatccgaactcgacattatgcaggccgaaaaacgcatacgcggacgcgtcaaacgccaaatggaaaaatcccagcgcgaatattatctgaacgaacagattaaagcgatacacaaagaattgggcgaagaagacgaaaacggcgaactggatgccttggaagcaggcatcaaaaaggcggggatgagcaaagaagcggaagaaaaatgcctgtccgaactgaaaaagctcaaaatgatgccgccgatgtctgccgaatccaccgtcgtacgcaactacatcgacaccctgctcgaactgccgtggaagaaaaaatcccgcgtcagcaaagacatcgccaaagccggattggtgctggataccgaccactacggcctggaaaaagtcaaagaacggattttggaatacctcgccgtccaaaaacgtatggacaaactcaaaggcccgattctgtgcctggtcggccctccaggcgtgggcaaaacctctttgggcgaatccatcgccaaagcaacggggcggaaatatgtccgcatggctttgggcggcgtgcgcgacgaaagcgaaatccggggacaccgccgcacctatatcggctccatgcccggtaagattttgcagaatatggcaaaagccggcgtaaaaaacccattgttcctgctcgacgaaatcgacaaattgggtagcgacttccggggcgatcccgccagcgcgttgctcgaagtgcttgatcccgagcaaaacaacaagttcgccgatcattatgccgaagtggattacgatttgagcgatgtgatgtttattgcgacttcaaacagcctgaatatcccgaccccgctgctcgaccgtatggaaatcatccgtctgtccggctacaccgaagacgaaaaaatcaatatcgcgatgcagtacctcgtgccgaagcaaatgaagcgcaacggcgtgaaagaaggcgaattgctcgtcgaagaaagcgcggtgcgcgatattatccgttactacacccgcgaggcgggcgtgcgttcgctcgaccgcgagattgccaaaatctgccgcaaggtggtgatgcagattaccttggacgaagataagaagaggttgtctgaaaccaagaaaaccagcaaagccaaacctaaagcggttaaagtaaatgagaaaaatctgcacgactatttgggtgtgcgccgcttcgattacggcgttgccgaaagcgaaaaccgtatcggacaagtaaccggtctggcgtggacagaagtcggcggcgaattgctgaccgtcgaagccgcagcattgccgggtaagggcgtgattcagtgcaccggccagttgggcgatgtgatgaaggaatccgtgtctgcagcgtggtcggttgtccgctcccgcgcggaatcagtgggcttggcttctgatttttacgagaaaaaagacatccatgtccatgttcccgaaggtgcaacgccgaaggacggtccgagtgcgggcattgccatgactttggcgatggtgtctgcattttccaaaatcccggtacgcgccgatgtagcgatgacgggcgaaattaccctgcgcggcgaagtcctgccgattggcggtctgaaggaaaaactgttggctgcgcttcgcggcggcatcaaacacgttttaattccaaaagacaacttcaaagacttggaagaaatccctgaaaacgtgaaaaccggcctgaccatccatccggtcaaatggatagacgaggtattggctctgggtttggaaagccagcctgagccttgggcagaaccttctggtgcggaagcggtggcggaatccgcttcaaaaccaaaaccccgcagcagggcaaccaaacattga

SEQ ID NO: 61040 - DNA, 807 bp, Neisseria meningitidis; identical to SEQ ID NO: 54619

SEQ ID NO: 61041 - DNA, 2292 bp, Neisseria meningitidis
atgcttgcacccgaattggaacagattttgcagcagctttaccgcgaggcgcgtaaggctcattatgaatttatcagcctcgagcatctgcttttggtactcatcgaagaagatgcctccgtccacaacgtcctcaagctctgcggcgcggatttgaaagtggtgtccgaacaactcgccgccagcgttgccgaaaacacccccctgattcccgaccaccttttagacacggtcgaaacccagcccacgctcggcttccaacgcgtcatccaacgggcgatggtgcatacccaatccgcaggcaaaggcttggtcgagcctttggacgttttggtcgcgctgatgagcgaaaccgatagccacgccgtctatttcctcaagctgcaatcggttacgcgttttgaagttttgcgctgtattgcccacggctctcccgatgaagatgaagacgatggcaactattcttcagacggcatggacgacgataatgaaaaccgcaccaaaccgggcaaaaaccctttatcggcgtacaccgtcaacctcaacgccgaagtcaaagccggccgtatcgaccctttgattggtcgcaaacacgaaatggaacggctggtgcaaatcctatgccgccgccgcaaaaacaatccgcttttggtcggcgaagcgggcgtgggcaaaaccgcgctggcggaaggtttggcacatcaaatcgtcaacggcggcattccagacgcgctcaaagatgccgaagtgtacgcgctggatatgggctcgctgttggcgggcacgaaataccgcggcgactttgaagcgcgggtcaaatccgtcttgaaacagctcgaaaaaatcccgcacgccattttgtttatcgacgaaatccacaccatcatcggcgcaggcagcaccagcggcggcaccatggacgcgtccaacctgctcaaacccgcgctggcaaaaggttcgctgcgctgcatcggcgcgaccacttacgacgaataccgcaccattttcgacaaagaccacgccttaagccgccgcttccaaaaaatcgacgtggtcgaacccaccgtttccgaaaccgtacaaatcctgcgcggcttgaagccgatgtttgaagccttccaccaagtccgctatacgcaaggcgcactcgaagccgccgccgaactctccgcacgctacatcaacgagcgtttcctgcccgacaaagccatcgacgtgatggacgaagcaggcgcggcgcaacggattctgcccaaatccaaacagaaaaaagtcatcggcaaagcacaaattgaaaccgtcatcgccaaagttgcgcggattcccgaaaaaaccgtgtcgcacgacgacaaacaagtgctgcaattcctcggtcgcgatttgaaaaacatggtttacggtcaagaaaacgccatcgacgcgctggttgccgccgtcaaaatgtcgcgttccggccttgccctgcccgacaaaccgataggcagcttcctcttctccggcccgaccggcgtgggcaaaaccgaagccgccaaacagcttgcctactcgctgggcgtaccgctgcaacgctttgatatgtccgaatacatggaacgccatgccgtatcgcgcctcatcggcgcgccaccgggctacgtcggctttgaacaaggcggccttttgaccgaagccgtcaacaaacagccgcattgcgtattgctcttggacgaaatcgaaaaagcccaccccgacattttcaacgtcctcctgcaagtcatggacgcaggcaaactgaccgacaacaacggcaagagtgccgatttccgcaacgtcatcctgattatgaccaccaacgcaggcgcggaaagcctcagccgccccagcctcggctttaccgccaagcgcgaacgcggcgacgaaatgcaggcaatcaacaagctcttcacgcccgagttccgcaaccgcttggacgcgattatcccgtttgcacccttgtccgaacccatcatcgtcaaagtcgtggacaaattcctgctccagctcgaacaccagctcctcgacaaaaaagtcgaagccgaattcacgtcggcattgcacaaatatctggcggaaaaaggtttcgacccgcaaatgggcgcgcgcccgatgcaccgcctgattcaggaaaaaatccgcaaaccgctcgccgacgaactcctgttcggcaaactatccgacggcggcttcgtgcggatagactgggatgcggcaaaagaagaagccgtgttgaagtttaagaaaagcaaggtcaaaataaaaaccgcctccgcataa

SEQ ID NO: 61042 - DNA, 726 bp, Neisseria meningitidis; identical to SEQ ID NO: 55384

SEQ ID NO: 61043 - DNA, 741 bp, Neisseria meningitidis; identical to SEQ ID NO: 55109

SEQ ID NO: 61044 - DNA, 342 bp, Neisseria meningitidis; identical to SEQ ID NO: 55024

SEQ ID NO: 61045 - DNA, 1188 bp, Neisseria meningitidis; identical to SEQ ID NO: 39794

SEQ ID NO: 61046 - DNA, 183 bp, Neisseria meningitidis; identical to SEQ ID NO: 54662

SEQ ID NO: 61047 - DNA, 195 bp, Neisseria meningitidis
atgaacatcatcttaaacggcggacccgccgaacttcacggcacgaccgttgccgacctcatcgcccaaaccgcgccgcaaaagccttttgccgtagcggtgaataccggatttgtcgccaaaggcgcgtatgcggaaaccgttttaaacgaaaacgacaaaatcgatatcgtgcggccggtggtcggcggctag

SEQ ID NO: 61048 - DNA, 1296 bp, Neisseria meningitidis
ttgtcaggagtcggcaaacttgcccgcttaggcgcgaaattaagcacaagggcagttccttatgtcggaacagcccttttagcccatgacgtatacgaaactttcaaagaagacatacaggcacaaggctaccaatacgaccccgaaaccgacaaatttgtaaaaggctacgaatatagtaattgcctttggtacgaagacaaaagacgtattaatagaacctatggctgctacggcgttgacagttcgattatgcgccttatgtccgatgacagcagattccccgaagtcaaagaattgatggaaagccaaatgtataggctggcacgtccgttttggaattggcataaagaagaactgaataaattaagttctttggattggaataattttgttttaaatcgttgcacatttaattggaatggcggagattgtttggtcaataaaggtgatgatttcagaaatggggctgatttttcccttattcgcaattcaaaatacaaagaagaaatggatgccaaaaagctggaagagattttatcgttgaaagtcgatgccaatcccgacaaatacataaaggcaaccggttatcccggttattccgaaaaagtagaagtcgcacccggaacaaaagtgaatatgggtcccgtcacggacaggaacgggaatcccgttcaggttgtcgcaacattcggcagggattcgcaaggcaacaccacggtggatgttcaagtaatcccgcgtcccgacttgacccccggaagcgcggaagcaccgaacgcacagccgctgcccgaagtatcgcccgccgaaaaccccgcaaacaacccgaaccccaatgagaaccccggcacgagccccaatcccgaacccgaccccgatttgaatcccgatgcaaatcccgatacggacggacagcccggcacaagacccgattcccccgccgttccggaccgcccaaacggcagggacggcgaagacggcggccttttgtgcaaattcttccccgacattctcgcttgcgacaggctgcccgagcccaatccggcagaagatttaaatctgccgtctgaaaccgtcaatgtagagtttcagaaatcaggaatctttcaaaattccgcacagtgtcccgcacctgtcactttcacagtgactgtgcttgattccagcaggcagttcgcgttcagctttgagaacgcatgtaccatagccgaacggctaaggtacatgcttctcgcccttgcttgggcggttgccgcatttttctgtatccgcacagtatcccgtgaagtctag

SEQ ID NO: 61049 - DNA, 966 bp, Neisseria meningitidis
atgagctacacgcaactgacccaaggcgaacgataccacatccaatacctgtcccgccactgcaccgttaccgaaatcgccaaacagctgaaccgccacaaaagcaccatcagccgcgaaatcagacggcaccgcacccaagggcagcaatacagcgccgaaaaagcccagcggcaaagccggactatcaaacagcgtaagcgacaaccctataagctcgattcgcagctgattcagcacatcgacccccttatccgccgcaaactcagtcccgaacaagtatgcgcctacctgtgcaaacaccaccagatcacgctccaccacagcaccatttaccgctaccttcgccaagacaaaagcaacggcagcacgttgtggcaacatctcagaatatgcagcaaaccctaccgcaaacgctacggcagcacatggaccagaggcaaagtacccaaccgtgtcgtcatagaaaaccgacccgctatcgtcgaccagaaatcccgtatcggcgattgggaagccgacaccattgtcggcaaaggacagaaaagcgcattattgaccttggtcgaacgcgttacccgctacaccatcatctgcaaattggatagcctcaaagccgaagacactgcccgggcagctgttagggcattaaaggcacataaagacagggtgcacaccattaccatggataacggcaaagagttctaccaacacaccaaaataaccaaagcattgaaagcggagacttatttttgtcgcccttaccattcttgggagaaagggctgaatgagaacaccaacggactcatccggcaatacttccccaaacaaaccgatttccgtaacatcagtgatcgggagatacgcagggttcaagatgagttgaaccaccgaccaagaaaaacacttggctacgaaacgccaagtgttttattcttgaatctgttccaaccattaatacactag

SEQ ID NO: 61050 - DNA, 621 bp, Neisseria meningitidis; identical to SEQ ID NO: 52500

SEQ ID NO: 61051 - DNA, 648 bp, Neisseria meningitidis
atgaaaacaaaattttacaatcatcaaggcggacatttaatcctgtattttgcaggttggggaacgccgcccgatgctgtaaatcatttgattttgccggaaaatcacgatttattgatttgctatgattatcaagatgtaaatttggattttgatttttccgcctatcggcacatccgtttggtggcgtggtcaatgggcgtttgggcggcagagagggcattgcaaggaataagattaaaatccgcaacggcagtgaatggcacaggtttgccttgcgatgataatttcggtatccctttcgccgtttttaaaggcacattggaaaacctcacggaagatacccgtttaaaatttgaacgcagaatctgtggcgataaagcatcttttgaagattaccaacaatttcccgcccgcccgtttgacgaaattcatcaagaacttacctcactttttaagatgatcgggcaagataggtgtacagatcttatccgctggacaaatgccttggtcggatcgggcgataaaatttttatgcctgccaatcagcaccgatattggacaccgcgttgcaccgttcgggaaattgacggcggacattacctgttttcaagattcacccattggtcggcactatggaatcactga

SEQ ID NO: 61052 - DNA, 378 bp, Neisseria meningitidis; identical to SEQ ID NO: 36713

SEQ ID NO: 61053 - DNA, 717 bp, Neisseria meningitidis
atgaagaccaaattaccgctttttatcatttggctgtctgtgtccgccgcctgttcttcccctgtttcccgcaatattcaggatatgcggcccgaaccgcaggcagaggcaggtagttcggacgctattccctatcccgttcccactctgcaagaccgtttggactatctggaaggcaaaatcgtccggctgtcgaacgaagtggaaaccttaaacggcaaagtcaaagcactggaacacgcaaaaacacacccttccggcaggacatacgtccaaaaactcgatgaccgcaagttgaaagagcattacctcaataccgaaggcggcagcgcatccgcacataccgttgaaaccgcacaaaacctctacaatcaggcgctcaaacactataaaagcggcaggttttctgccgctgccgccctgttgaaaggcgcggacggaggcgacggcggcagcatcgcgcaacgcagtatgtacctgttgctgcaaagcagggcgcgtatggggaactgcgaatccgtcatcgaaatcggagggcgttacgccaaccgtttcaaagacagcccaaccgcgcccgaagccatattcaaaatcggcgaatgccaatacaggttgcagcagaaagacattgcaagggcgacttggcgcagtctgatacaggcttacccgggcagcccggcggcaaaacgcgccgcctcagccatacgcaaacgatag

SEQ ID NO: 61054 - DNA, 1296 bp, Neisseria meningitidis
atggcacaaaaaattcaatctgtaaaaggtatgaacgaccttttacctgtcgaacaaaaagatttcaaactgacggctgcgttttggcaggtgtttgaagatacggtaaaccgttggacgcgcgcttacggctaccagcaaatccgtacgccgattgtcgagcaaaccggtttgtttgtccgctccatcggcgaagaaaccgatgtggtcggcaaggaaatgtacaccttttccgattcaaacgattctttgagtttgagcctgcgtcctgaaggtacggcttcttgtctgcgtgcggtggtcgaacacaaccttctctacaacagcccgcaaaagctgtggtatatggggccgatgttccgccgcgagcgtccgcaaaaaggccgttatcgtcagttccatcaggtcggtatcgaagctttgggttttgaaggtccggatattgatgcggaaatcatcgcgatgtctgccgacttgtgggaaaaattgggtattcgcgaatacctgactttggaaatcaacagcttgggcaaccgtgaggaacgcgcggcacaccgtgcggcattggttgaatatctgacccgttatgaagataaattggatgaagacagcaaacgccgtctgaaaaccaatcctttgcgcgttttagatacgaaaaaccctgatttgcaggaaatctgcaacgccgcgccgcgtttggtggattacttgggcgaggcttcgcaaaaccactatgcacgcttcaaggcgatgttggatggtttgggtattcaatatattgaaaatccgcgcttggttcgcggtttggattattacaatcagacggtttttgagtggacgaccgacaaactcggcgcgcaggcaactgtgtgcggcggcggccgttacgatggtttgattgaggaacttggcggcaaacctgcgccgtccatcggctttgcgatgggcatcgaacggctgctgcttttggtgagcgaatacggctcgctggaagtgaacgctgcgcctgatgtctatgcaatgcaccaaggcgaaagggcggacttgcaggtgatgaaatacgcgcaagccttgcgcgcgcaaggtttcaatgtaatgcagcattccggctatcaaagcctgaaagcgcaaatgaaaaaagccgacaacagcggcgcgcgctttgccctgattgtcgcgcaagacgaactggcgaacggtacggttacgctcaaagacatgaacggcgcacacggtcagcaaactgtcgccgccgaggatttaacccatactttacaacaatggaagaacgcataa

SEQ ID NO: 61055 - DNA, 144 bp, Neisseria meningitidis; identical to SEQ ID NO: 38802

SEQ ID NO: 61056 - DNA, 672 bp, Neisseria meningitidis; identical to SEQ ID NO: 47737

SEQ ID NO: 61057 - DNA, 291 bp, Neisseria meningitidis; identical to SEQ ID NO: 55030

SEQ ID NO: 61058 - DNA, 735 bp, Neisseria meningitidis
atgacgacacgccaaatcatcctcgataccgaaaccaccggtctgtatgccgacggcggcgaccgcttggtcgagtttgccggtttggaaatggtcaaccgccaaatgaccgacaaaaacctgcacctctatgtccaccccgagcgcgatatgcccgaagaggcggcacgcgtccacggcttgacgatacaggttttggaagggaaaaacgcgccgccgtttgcagaggtcggcaggcagattgccgatttcctgcgcggtgcggaactgattatccacaatgccaaattcgacgtgggcttcctcaatatggagttccgccggatggggttgccgaccgttgaggaactcggctgtaccgttaccgataccctggcgatggcgcgcgaaatgttccccgggcagaaagccagcctggatgccttgtgcaaccgtttttccgtcgaccgcagcaagcgcgtcctgcacggcgcattgatcgactgcgaacttttgggcgaagtctatcttgctatgacgcggcggcagttcgacctgatgggtgcggccgcagaggaaaaaatggaaaccaaacccgtggtgcataccgaaaccaaacgcagcggtaaactgaaagtcatcagggcggacgaaaacgagttggcggcgcacgggcaatatttggacggcttgggcgaagcctgtatctggcgcaaggaagccgtgccgtctgaaaacggcgggacggacgcatga

SEQ ID NO: 61059 - DNA, 1587 bp, Neisseria meningitidis
atggcacttttcctcagcatattccccatcgtcctgctgatttggctgatggtgaaaaaaaacagtatgccctcctacgtcgcgctgccgattaccgcagtgctgatttacgccatcaaacttttctacttcggcgatgcgggcatgctgctcaacgccaccgccgcttccggcctcgtcaaaacgctcacgccgattaccgtgattttcggcgcgattatgttcaaccgtatgatggaaaccacgggctgcattgatgtcatccgcaaatggctggcgaccatcagccccaaccccgtagcgcaactgatgattatcggctgggcttttgcctttatgattgaaggcgcatccggcttcggcacgcctgccgcgattgccgcgccgattctgatgagcttgggcttcaacccgttgaaagtggcgattttcactttggtgatgaactccgtccccgtctctttcggcgcggtcggtacgccgacctggttcggtttcgcaccgctgaacctgagtgccgaagacatcctcgccatcggcaggcagaccggcgtaatgcacttcttcgcaggtttcgtcatccccgtcatcggcttgggcttcatcgtaccttggtctgaaatccgcaaaaacttgggcttcgtcgccattgccgtcttctcctgcaccattccttatgtcgcattggcgatggtcaacgaagaattcccgtcgctcgtcgccggcgcgatcggcctgatggtgtccgtattcgccgccaaccaaggctggggcttgagcaaggaccacgccaaagacccgaatgccgaaaaagtgccgttcgcccaagtcgccaaagcactcgcccctttgggtatgctgatcggcatgctggtggttacgcgcatcaaacagctcggtatcaaaggcattttgaccagcaaagaagaatggttcagcttccaactgccgtttgatttgtccaaaatcaccgtcagcgactccctgacgattaccttcggcaatattttcggacaagatgtcagcgcgtcttaccaaacgctgtacgtcccggcttggattccgtttgtgctgaccgtttggatttgcatcctgctgtataaaaccaaattcaaagatgcctggacgatttatgccgtaaccttcaatcaaaccaaaaaaccgctgcttgccctgatgggcgcgctgattatggttcagctgatgctggtcggcggcgacaattcgatggtgaaaatcatcggtaaggaatttgccgcaatggcgggcgaacactgggtttatttctcgccgtatctgggcgcgatcggtgcgttcttctccggctccaacaccgtgtccaacctgactttcggcccgattcagcagcaaatcgccttggataccggcctgtccgttaccctgattctggcgttgcagtccgtcggcggcgcgatgggcaatatggtgtgcctcaacaacatcatcgccgtatgtaccgtattggatgtgaaaaattccgaaggtgcgattatcaagaaaaccgttatcccgatggcgatttacggcgtgattgccgtcgtcgcggcaatgattttcttcctctag

SEQ ID NO: 61060 - DNA, 471 bp, Neisseria meningitidis; identical to SEQ ID NO: 54820

SEQ ID NO: 61061 - DNA, 768 bp, Neisseria meningitidis
atgcaaacccgcattctctccgccgtactgctggctttttcaaccgctgcctttgccgggggcgcattcacgctgcaattcgacaacccgtccgaagacggcggcttcacgcaaaaccagcttttgagcgcgccttacggatttggctgttcgggcggcaatgcttcgcccgcgctgtcgtggaaaaatccgcccgccgggacaaaaagtttcgtcctgaccgtttacgataaagacgcgccgaccggactgggctggatgcaccgggtggtcgccgacattcccgccgatgtccaccgccgcaacgcgacctcgctgcaattaagccgctgcgccaacatcgccgaccggactgggctggatgcactgggtggtcgccgacattcccgccgatgtccgccgccgcaacgcggcctcgctgcaattaagccgctgcgccaacatcgccgacgaccagtccgcagccatatcggcggtaatcagtttgcggatttgccgcatcaggttgacgccttcgtacacggcaaaaccgatgccgtcatgctgcaaccacgccaacacgccgcaaagcgcgacctccgccgcattgtgcggcacttcttcatccgtcagcaccgccgccgcataatcaaacgccgcgcccatccgcccggggtgcggcagcttcaccgcatcgcacactgcctgcgccgtcccgtattgtgcggcgaacctttctacggtttcctgttcgaaagcaatccattgcgcctgatagaggccgtctag

SEQ ID NO: 61062 - DNA, 219 bp, Neisseria meningitidis; identical to SEQ ID NO: 40879

SEQ ID NO: 61063 - DNA, 312 bp, Neisseria meningitidis; identical to SEQ ID NO: 54531

SEQ ID NO: 61064 - DNA, 369 bp, Neisseria meningitidis; identical to SEQ ID NO: 38525

SEQ ID NO: 61065 - DNA, 783 bp, Neisseria meningitidis
ttgcagaaagtcgtgcgccatatcgcgcaaaccgaaattatgccgcgttttttgaatacgccgtctcaccgcaaggaagacggttcgatgttgagcgaggcggacattgccgcgcagacggcttttgccgccgcgttgccgcttttaatcgacagtccgatgttgggcgaggaaatgtcgcggcaggaacagtcggctttgtgggaacaatattcgggggaaaaggggctgtggattgtcgatccgatagacgggacgaacaattttgtcaacgggctgccgcattttgccgtgtcggtggcgtttgtccgcaacgggcgcgccgaattgggtgtgatttacaatccggtcagcggcgaatgtttttatgccgaacgggggcagggtgcgtttcttaatggaacccgcctgcctttgcgtctcgtggataaaaaactcaatgaggcgattgcgggcgtggaaatcaaatatttgcgttcgggcaaactttccagccgtatgagtacgctcgcgccttttggaacgatacggagtatgggcagcagtacgttggattggtgttatctggcgtgcgggcgttatgatgtttatgttcacggtgggcagaagctgtgggactatgctgcgggtgcgttgattttcgaggaggcgggcggcaggctgacgactttggaaggcgacgggttttggagtggtgaacacgtgttcaaacgctcggtcgttgccgcgctcgaaccgaagctgtttgaacgctgggtcgggtggatacgggaaaaccagtaa

SEQ ID NO: 61066 - DNA, 1176 bp, Neisseria meningitidis
atgaaacgccaaaccttagccgcacttatcgcttctgtatttgcactggccgcatgcggcgagcaagctgctaaacctgctgaaactccagctgctaccgcttctgctgaagctcctgccgcttccaactcacaagctgctgcagaaactccttcttcagaactgcctgtaatcgatgctatcgtaactcacgctccggaagttccacctccaactgatcgcgaccatccggctaaagtacgcgttaaaatggaaaccgttgaaaaaaccatgaaaatggacgacggcgtggaataccattactggacatttgacggcgatgttccgggccgcatgatccgcgtacgcgaaggcgatacggttgaagtggaattctccaacaatccttcttctaccgttccccataacgtcgacttccacgcggctaccggtcagggcggcggcgcggctgcaacctttaccgctccgggccgtacttccacattcagcttcaaagcgctgcaagctggtttgtacatctaccactgtgccgttgctcctgtaggtatgcacatcgccaacggtatgtacggtttgatcttggttgaacctaaagaaggtctgcctaaagtggacaaagagttctacatcgtacaaggtgacttctatactaaaggtaaaaaaggtgctcaaggcctgcaacctttcgatatggataaagcgattgctgaacaacctgaatacgttgtattcaacggtcacgtaggctctatcgccggcgataacgctctgaaagctaaagctggtgaaactattcgtatgtacgttggtaacggtggtcctaacttggtatcttctttccacgttatcggcgaaatcttcgacaaagtatatgttgaaggtggtaaactgattaacgaaaacgtacaaagtacaattgttcctgccggcggttccgccattgtcgaattcaaagtcgacattccaggcagctacaccttggtcgaccactctatcttccgcgcattcaacaaaggcgcgttgggtcaattgaaagtagagggtgaggaaaaccctgaaattatgactcaaaaactgagtgataccgcttacgccggcaacggtgcggcttccgcagcttccgctcccgcagcttccgctccggcagcctctgcatccgaaaaaagcgtttactaa

SEQ ID NO: 61067 - DNA, 642 bp, Neisseria meningitidis; identical to SEQ ID NO: 55159

SEQ ID NO: 61068 - DNA, 2208 bp, Neisseria meningitidis; identical to SEQ ID NO: 55562

SEQ ID NO: 61069 - DNA, 501 bp, Neisseria meningitidis; identical to SEQ ID NO: 55120

SEQ ID NO: 61070 - DNA, 423 bp, Neisseria meningitidis; identical to SEQ ID NO: 38356

SEQ ID NO: 61071 - DNA, 225 bp, Neisseria meningitidis
atggaaaaacctttgaatttcaagcctattccctatccgcaaacgcgcgagagcgcggccgggtggtttaagcgcaacggggtgtgcaaggcgcattgggcgaaatatttcaatctagagcgcaccacggtggagcacctcttgcgcggcaagctgaaaggcaattttggcaaaagccacgaagcggcggttttgctggggatgaaggagaaaagcgatgattaa

SEQ ID NO: 61072 - DNA, 1407 bp, Neisseria meningitidis
atgaaaaatcgagtgaccaacatccattttgtcggtatcggcggcgtcggcatgagcggcatcgccgaagtcttgcacaatttgggttttaaagtttccggttcggatcaggcgcgtaatgccgctaccgagcatttgggcagcctgggcattcaagtttatcccggccataccgcagaacacgttaacggtgcggatgtcgtcgttacctctaccgccgtcaaaaaagaaaatcccgaagttgtcgctgcgttggagcagcaaattcccgttattccgcgcgccctgatgttggcggagttgatgcgcttccgtgacggcatcgccattgccggcacgcacggcaaaaccacgaccaccagcctgaccgcctccatcctcggcgcggcaggacttgacccgactttcgttatcggcggcaaactcaacgccgcaggcaccaacgcccgcttgggcaaaggcgaatacatcgttgccgaagccgacgagtcggatgcatcctttctgcacctgacaccgattatgtccgtcgttaccaatatcgacgaagaccatatggatacctacgggcacagcgtcgaaaaactgcatcaggcgtttatcgatttcatccaccgtatgcccttctacggcaaagcctttttgtgtattgacagcgaacacgtccgcgcgattttgcccaaagtgagcaaaccttatgctacttacggtttggacgataccgccgacatctacgccaccgacatcgaaaacgtcggcgcgcaaatgaaattcaccgtccatgttcaaatgaaaggacatgagcaggggtcgtttgaagtcgtgctgaatatgcccggcagacacaacgtgctgaacgcattggcagccatcggcgtggcgctggaagtcggcgcatcggttgaagcgatccaaaaaggcttgctcggctttgaaggtgtcggccgccgcttccaaaaatacggcgacatcaagttgccaaacggcgggaccgcgctcttggtggacgactacggacaccaccccgtcgaaatggcggcgacccttgccgccgcacgcggcgcgtatccggaaaaacgtttggtactcgccttccagccgcaccgctatacccgcacgcgcgatttgtttgaagactttaccaaagtcctcaataccgttgacgcgctggtgctgaccgaagtttatgccgccggtgaagagccgattgccgccgccgattcccgcgctcttgcccgcgccatccgcgtgttgggcaaactcgagccgatttactgcgaaaacgttgccgatctgcccgaaatgctgttgaacgttttgcaggacggcgacatcgtgttgaatatgggtgcgggaagcatcaaccgcgtccccgccgcgctgctggaattgtcgaaacagatttga

SEQ ID NO: 61073 - DNA, 339 bp, Neisseria meningitidis; identical to SEQ ID NO: 36369

SEQ ID NO: 61074 - DNA, 1008 bp, Neisseria meningitidis
atgagcaccttcttccagcaaaccgcccaagccatgattgccaaacacatcgaccgtttcccgctattgaagttggatcaggtgattgattggcaaccgatcgaacagtacctgaatcgtcaaagaacccgttaccttcgagaccaccgaggccgtcccacctattccctgttgtccatgttcaaatccgtcttgctcggacaatggcacagcctctccgatcccgaactcgaacacagcctcatcacccgcatcgatttcaacctgttttgccgttttgccgagttgagcatccccgattacagcaccttatgccgctaccgcaactggctggcgcaagacgacaccctgtccgaattgctcaaactgatcaaccgacaactgaccgaaaaaggcctaaaagtagagaaagcatccgccgccgtcgttgacgccaccattattcagaccgccggcagcaaacagcgtcaggccatagaagtcgatgaagaaggacaaatcagcggccaaaccacaccgagtaaggacagcgatgcccgttggataaagaaaaacggcctctacaaactcggttacaaacaacatacccgtaccgatgcggaaggctatatcgagaaactgcacatcacccccgccaatgcccatgagtgcaaacacctgccgccgttgttggaaggactgcccaaaggtacgaccgtctatgccgacaaaggctatgacagtgcggaaaaccggcaacatctggaagagcgtcagttgttagacggcattatgcgcaaagcctgccgcaaccgtccgctgacggaaacgcaaaccaaacataaccgatatttgtcgaagatccgttatgtggtcgaacaaagcttcggtacgctgcaccgcaaattccgctatgcgcgggcagcctatttcgggctgattaaagtgagtgcgcaaagccacctgaaggcgatgtgtttgaacctgttgaaagccgccaacaggctaagtgcgcccgctgccgcctaa

SEQ ID NO: 61075 - DNA, 567 bp, Neisseria meningitidis; identical to SEQ ID NO: 55861

SEQ ID NO: 61076 - DNA, 951 bp, Neisseria meningitidis; identical to SEQ ID NO: 55626

SEQ ID NO: 61077 - DNA, 1557 bp, Neisseria meningitidis
atgacattagcagagttttggccgctgtgcctccgccgtcttcacgatatgttgcctcaagggcagtttgcgcaatggattgcgccccttaccgtcggtgaggagggtggcgtatgggtggtgtacggcaagaaccagtttgcctgcaatatgcttaagagccagtttgccgggaaaatagaagcggtgagggaagagttggctgctggccgttccgccttcgtattcaaaccaggagaaggcgtgcgttatgagatggcggcggttgaaggtgctgtcgaacctgccgagccgtccttgcacgcggggtcggaggagatgcctgtgcaggaggttctgttggacgagctgccgtctgaagagcctgtcaaacccgctgcgtcgaaaacggcggcggatattctggcggaacgtatgaaaaacctcccgcatgagccgcgccatactgccgaacctgcttcccgtccggaatcggaggtgcttgcgaaagcgcggacggatgcgcagcgcgatgcggaagaggcacgttacgagcagaccaatctgtcgccggactatacgttcgacacattggtcgaaggcaagggcaaccgccttgcggcggctgcggcgcaggcgattgcggaaagcccggggcagagctacaacccgtttttcctgtacggcagcacgggtttgggcaaaacccacctggtacaggcggtcggcaacgagcttttgaaaaaccgtcccgatgccaaagtgcgctatatgcattcggacgactatatccgcagctttatgaaggcggttcgcaacaatacctacgacgtgttcaagcagcaatacaagcaatacgacctgctgattatcgacgacatccagttcatcaaaggcaaagaccgtacgatggaggaattcttctatctgtacaatcatttccataacgagaaaaaacagctcatcctcacttgcgatgttttacccgccaaaatcgaaggtatggacgaccgcctcaaatcccgtttttcatggggactgactttggaactcgagccgcccgaattggaaatgcgtatcgccattttgcagaaaaaggcggaagcggcgggcatcagtattgaagacgaagccgcgctgttcattgccaatctgatccgttccaacgtgcgtgagcttgaaggcgcgttcaaccgcgtcggagcgagcagccgctttatgaaccgtcccgtcatcgacatcgatttggcgcgtactgctttgcaggacattattgccgagaagcacaaagtcatcaccgccgatattattattgatgccgttgcgaaatattaccgcatcaaaatcagcgatgtgctcggtaagaaacggacacgaaacattgcccgtccgcgccaggtggcgatgagcctgaccaaagaactgaccactttgagcctgccgtctatcggcgattcgttcggcggacgcgaccatacgaccgttatgcacggcatcagggcagtggcgaaactgcgcgaagaagatccggaattggctcaggattatgaaaagctgctgattctgattcaaaactga

SEQ ID NO: 61078 - DNA, 150 bp, Neisseria meningitidis; identical to SEQ ID NO: 41322

SEQ ID NO: 61079 - DNA, 366 bp, Neisseria meningitidis; identical to SEQ ID NO: 46768

SEQ ID NO: 61080 - DNA, 801 bp, Neisseria meningitidis; identical to SEQ ID NO: 53459

SEQ ID NO: 61081 - DNA, 279 bp, Neisseria meningitidis; identical to SEQ ID NO: 40180

SEQ ID NO: 61082 - DNA, 264 bp, Neisseria meningitidis
atggcaaacagcgcacaagcacgcaaacgtgcccgccagtccgtcaaacaacgcgcccacaacgctagcctgcgtaccgcattccgcaccgcagtgaaaaaagtattgaaagcagtcgaagcaggcgataaagctgccgcacaagcggtttaccaagagtctgtcaaagtcatcgaccgcatcgccgacaagggcgtgttccacaaaaacaaagcggctcgccacaaaagccgtctgtctgcaaaagtaaaagcactggcttga

SEQ ID NO: 61083 - DNA, 702 bp, Neisseria meningitidis
atgttccgcatcgtcaaatggctgattgccctgcccgtcggcatctttatctttttcaatgcctatgtgtacggcaacatcatcacctaccgcgccgtcgcgccgcatcggactgcctttatgtcgatgcggatgaagcagtttgaacaggaaggtcgcgatgtcgcactggattaccgctgggtaccctacaaccgcatctcggtcaacctgaaaaaagccctgattgcttccgaagatgcccgtttcgccggacacggcggcttcgattggggcggcattcaaaacgccatcaggcgcaaccggaacagcggcaaagtgaaggcgggcggttcgaccatcagccagcagcttgccaaaaacctgtttttaaacgaaagccgcagctatatccgcaaaggcgaagaagcggcgattaccgcgatgatggaagctgttaccgacaaagacaggatttttgaactgtatttaaactcaatcgagtggcactacggtattttcggcgcggaagccgcgtcccggtatttttatcaaatacccgccgccaaactgagcaaacagcaggcggcgaaactgacggcgcgcgtccccgccccgctctactacgccgaccatccgaaaagcaaacggctgcgcaacaaaaccaatatcgtgctcagacgcatgggttcggcagaattgcctgaaagcgacacggactga

SEQ ID NO: 61084 - DNA, 438 bp, Neisseria meningitidis
atgcccgtgaaaaaagttgaaaaaaacatcttggtgctgcacggcgcggacaaaatgttcgagctggtcgacaaggttgaggattacccgcactttctgccgtggtacagcaagaccgaagtcatcgggcgtagcggcaacgaactgaaggcgcggctgtttatggattatatgcacgttcgccaatcgtttgccacgcacaaccgcaacattccgggcagggaaatccgtatggaactgctcgaaggtccgttcaaaaccttacgtggaacgtggaaatttatcgatttgggcgacgatatgtgcaaaatcgaattcaatttggaatacgatttttccaatgccgttttgtccgccttaatttcccccgtcttcaaccacctttccgccacgctggtcgaagcgttcgtcaaagaggcagaccgccgttatgcttga

SEQ ID NO: 61085 - DNA, 288 bp, Neisseria meningitidis; identical to SEQ ID NO: 39206

SEQ ID NO: 61086 - DNA, 507 bp, Neisseria meningitidis
atgacagcccttttttacctgccttttccgtggttcgcggaggaaacgattaatctcaccgccgccgtcatttttgccgttgccgccttaaccgactggtttgacggatttttggcaagactgtggaaacagacttccgatttcggcgccttcctcgatcccgtcgccgacaagctgatggttgccgtatcgctacttttactggtcaaactcgaccggacctatgttttgtttgccatgatcattatcggcagggaaattaccatttccgcattgcgcgaatggatggcgcaaatgggcaaaaggaacagcgttgccgtcgccaccgtcggtaagtttaaaaccgccgcgcaaatgctggcaattttcctgctgctgctgaatattcccgatttttacggatttaatcttgttgttatcggcaatgtattgatgtttatcgcatctttgctgacagtctggtcgatgctgtattatctgaaaatggcgtggaaagaaatcgcctga

SEQ ID NO: 61087 - DNA, 438 bp, Neisseria meningitidis
gtggggatgatggcgttcgaaaaagttgaacatttattgccggataccgtgttggacattgtggatgtcatcggactggcagcgacggaacagctggtcaaggcgattggcggggcgcggtttaaatttggtaagggcaaggtggacaccgagcgtttggcaattttggtcgaagccatcggcgaagtgaaaacacatgagctgttgcaggtatatggtggcgaggaattgtatgtcccacggtgcggcaaggcgttaatacagttgagaaaccataggttttatcaggagtttgtcaaattgcgcgatattgataaggagagcgggcttatggcgatgacgaagctatgccctaaatacggtatctcttcacgaacaggatatacgattatcaatgaaatgagccgacctgcggcacagcaggcagctttattttag

SEQ ID NO: 61088 - DNA, 606 bp, Neisseria meningitidis
atgaagaaaatcggactgttcggcggcactttcgacccgatacacaacgggcatctccacatcgcccgcgcctttgccgacgaaatcggcttggacgcggttgttttcctgccgacaggcggcccgtatcacaaagacgccgcctccgcttccgccgccgaccgccttgccatggtcgaattggcgacggcagaagatgcgcgttttgccgtcagcgactgcgacatcgtccgccggggcgagacttacactttcgacaccgtccaaattttccgccagcagttcccctcggcgcaactctggtggctgatgggcagcgacagcctgatgaagctgcacacatggaaaaaatggcagatgctcgtgcgcgaaaccaatatcgccgtcgccatgcggcagggcgacagcctgcaccaaaccccgcgcgaactgcacgcgtggctgggcaatgcgcttcaggacggcagcgtccgcatcttgtccgccccgatgcataatgtgtcgtcaacggaaatccgccgcaaccttgccggccaaggcgtttcagacggcatcccgcctgccgccgcacgctacatccgcgaacacggtttgtatgaaaaataa

SEQ ID NO: 61089 - DNA, 600 bp, Neisseria meningitidis; identical to SEQ ID NO: 54214

SEQ ID NO: 61090 - DNA, 4179 bp, Neisseria meningitidis
atgaactattcgtttaccgagaaaaaacgtatccgtaagagttttgcaaagcgggaaaatgttttggaagttcctttcttgctagcaacccaaattgattcttatgcgaagtttttgcagctggaaaatgcttttgacaaacgtaccgatgacggtctgcaggcggcatttaattctattttcccgattgtgagccataacggttatgcgcgattggagtttgtgcattacacattgggcgagcctttgttcgatattcccgaatgtcagttgcgcggaatcacttatgcagcccccttgcgcgcgcgtatccgtttggtgattttggataaggaagcatctaaaccgacggtaaaagaagttcgtgaaaacgaagtgtatatgggcgaaattccgttgatgaccccgagcggttcttttgtgattaacggcacagagcgtgtgattgtctcccagttgcaccgttcgcccggcgtattcttcgagcatgacaaaggtaagacgcactcttccggcaagttgttattctccgcccgtatcattccctaccgcggttcatggttggattttgaatttgacccgaaagatttgctgtatttccgtatcgaccgccgccgtaaaatgccggtaacgattttgttgaaggctttgggctacggcaatgagcaaatcttggatattttctacgacaaagaaacgttctatttgtcttcaaacggtgttcaaaccgatttggtcgcaggccgtctgaaaggcgaaactgccaaggtcgatatcttggataaagaaggcaatgtattggttgccaaaggtaagcgcattactgcgaaaaatatccgtgatattaccaatgcaggcctgacccgtttggatgtagaaccggaaagcctgctgggtaaagcattggctgccgatctgattgattcggaaaccggcgaggtattggcttctgccaatgatgaaattacagaagagttgttggccaaatttgatatcaacggcgtaaaagaaattacgaccctttacatcaatgagttggatcagggtgcttatatctccaacaccttgcgtacggatgagactgccggccggcaggcggcgcgtgttgcgatttaccgtatgatgcgtccgggcgaaccgcccaccgaagaggcggtcgagcaattgtttaaccgcttgttcttcagtgaagacagctacgatttgtcccgcgtaggccgtatgaaatttaatacgcgcacatacgaacaaaaactgtccgaagcccaacaaaactcttggtacggccgcctgctgaacgaaacgtttgccggtgctgccgaaaaaggcggttatgtcctgagcgtcgaagatattgtcgcctcgattgcgactttggtcgagttgcgtaacggccatggtgaagttgacgatatcgatcacttgggcaaccgccgagtacgttcggtaggcgagctgactgaaaaccaattccgcagcggtttggcccgtgtggaacgtgctgtaaaagaacgtttgaatcaggcggaatcagaaaacttgatgccgcacgatttgattaatgcaaaacctgtttctgccgctattaaagaattcttcggctccagccaattgagtcagtttatggatcagaccaaccccttgtctgaagtaacccataaacgccgtgtatctgcattgggtccgggcggtttgacccgcgaacgtgcaggatttgaggtgcgggacgtgcatccgacccactacggtcgcgtatgtccgattgaaacgcctgaaggtccgaacatcggtttgatcaactcattgtccgtttatgcgcgcaccaatgattacggtttcttggaaacgccttaccgccgcgttatcgacggcaaagtaaccgaggaaatcgattacttgtctgccatcgaagaaggccgctatgtgattgcacaggcgaatgccgatttggattcagatggcaatctgattggcgatttggttacctgtcgtgaaaaaggcgaaaccattatggcaacgcccgaccgcgtccaatatatggacgtggcaactggtcaagtggtatccgttgcagcatccctgattccattcttggaacatgatgacgcgaaccgcgcattgatgggtgccaacatgcaacgtcaggcagtgccttgcttgcgtcctgaaaaaccgatggtcggtaccggtatcgagcgttccgttgccgttgactctgctactgcaatcgttgcccgccgaggcggcgtggtcgagtatgtcgatgccaaccgcgttgtgatccgtgtccatgacgacgaagcgactgccggtgaagtgggtgtcgatatttacaacttggttaaattcacccgttccaaccagtctaccaatatcaatcagcgtcctgccgtcaaagccggcgatgttttgcaacgcggtgatttggtggccgacggcgcgtccaccgacttgggcgaattggctttgggtcaaaacatgaccatcgccttcatgccgtggaacggttacaactacgaagactcgattctgatttccgaaaaagtggctgaggacgaccgctatacttcgattcacattgaggaattgaatgttgttgcccgcgataccaagctgggtgcggaagacattacccgcgatattccgaacttgtccgagcgtatgcaaaaccgtttggacgaatccggtatcgtttatatcggtgcggaagtagaagccggcgatgtattggttggtaaagtaacgcctaaaggcgaaacccaactgactccggaagaaaaactgctgcgagccatcttcggtgaaaaagcatctgacgtaaaagatacttcattgcgtatgcctaccggcatgagcggtaccgttatcgacgttcaagtcttcactcgtgaaggtattcaacgcgacaaacgtgctcaatccattattgattctgaattgaaacgttaccgtcaagatttaggcgatcaattgcgtattttcgataatgacgcattcgaccgtatcgagcgtatgattgtcggtcagaaagccaacggcggcccgatgaagctggccaaaggcagtgaaatcacgaccgaatatctggcgggtctgccgagcaggcacgattggttcgatatccgtctgaccgatgaagatttggccaagcagttggaactgattaaagtgagcctgcaacaaaaacgcgaagaagcggacgagttatacgaaatcaagaagaaaaaactgacccaaggcgacgaattgcaacccggcgtacaaaaaatggtgaaagtttttatcgccatcaaacgccgtctgcaagccggcgacaaaatggcgggccgccacggtaacaaaggcgtggtatcgcgcattctgccagtggaagacatgccttacatggcggacggccgtccggtagacatcgtactgaacccattgggcgtaccttcccgtatgaacatcggtcagattttggaagttcacttgggttgggcagcaaaaggtatcggcgagcgtatcgaccgtatgctgaaagagcaacgcaaagcaggcgagttgcgcgagttcttgaacagactctacaacggcagcggtaagaaagaagatttggatgccctgactgatgaagaaatcatcgaactggcctccaacctgcgcaaaggtgcatctttcgcctctcctgtattcgacggtgcgaaagagtctgaaatccgcgaaatgctgaacttggcttatccgagcgacgatcctgaggttgaaaaactgggcttcaacgacagtaaaacccaaatcacgctgtatgacggccgttcaggcgaagcatttgatcgcaaggttacagtaggtgtgatgcactatctgaaactgcaccacttggttgacgaaaaaatgcacgcccgttctaccggtccgtacagtctggttacccagcagcctttgggcggtaaagcccagttcggcggccaacgtttcggcgagatggaggtttgggcattggaagcatacggcgcggcatacacgctgcaagagatgctgactgtgaagtctgacgacgtgaacggccgtaccaaaatgtacgaaaacatcgtcaaaggcgaacacaaaatcgatgccggtatgcccgagtccttcaacgtattggtcaaagagattcgctcactgggcttggatatcgatttggaacgttactaa

SEQ ID NO: 61091 - DNA, 495 bp, Neisseria meningitidis
atgaaaaagaacatattggaattttgggtcggactgttcgtcctgattggcgcggcggcggttgcctttctcgctttccgcgtggccggcggtgcggcgttcggcggttcggacaaaacctacgccgtttatgccgatttcggcgacatcggcggtttgaaggtcaatgcccccgtcaaatccgcaggcgtattggtcgggcgcgtcggcgctatcggacttgacccgaaatcctatcaggcgagggtgcgcctcgatttggacggcaagtatcagttcagcagcgacgtttccgcgcaaatcctgacttcgggacttttgggcgagcagtacatcgggctgcagcagggcggcgacacggaaaaccttgctgccggcgacaccatctccgtaaccagttctgcaatggttctggaaaaccttatcggcaaattcatgacgagttttgccgagaaaaatgccgacggcggcaatgcggaaaaagccgccgaataa

SEQ ID NO: 61092 - DNA, 252 bp, Neisseria meningitidis; identical to SEQ ID NO: 41525

SEQ ID NO: 61093 - DNA, 1149 bp, Neisseria meningitidis; identical to SEQ ID NO: 54246

SEQ ID NO: 61094 - DNA, 738 bp, Neisseria meningitidis; identical to SEQ ID NO: 43795

SEQ ID NO: 61095 - DNA, 1911 bp, Neisseria meningitidis
atgactctggaaaccctgatcgccctgccgcgcaacatcaagaaaatctgtttcctcatacacgattttctgatgattttcattgcattctggttcacccaaagcctaaaggccgactactcgaacgaatggttcgaccccgccaactggcagtctttcctattgaccgcgtttttgaccgcctgcctgttcttcagaatggggctttaccgcgccgtcacacgcttcatcagcttccgcatcctctccaccgcgctggcaggcagcctcgcctccgccgtattgtttttcctcaatacgctgatatttgaagaacggctgcggctcgccctgccgattgtctatttcttactgctgtttgtttccgtgaccggctcgcgtatggttttgcgcggactgttgtccgaacaccccaaaaaacagatggcccccgtcattatttacggcgcagggcaggcgggcagacagcttctcgaggccgtcaaacaaatgcgcgaatattccgccgccgcctttgtggacgacgaccccaaactgtggcgcaccgtcatctgcggccttgccgtttaccgccccgacgacatcgccgccctcatcggacgctacggcgtggaaaaaatcctgctcgccattcccagcgcgactcaggaacaacgccgccgaatcatcaacaaactggaagcctatccgtgcgaagtgttgaccattcccggaatgaaagacctgatggacgggaaaatcagcatcggcacgctcaaaaaaatctctgtgtccgacctgctcgggcgcgattccgtcacacccgacgaccgcctgatgagtgccgacatcgaaggtaaaaccgtcatggtaaccggcgcgggcggctccatcggttcggaactctgccgccagattatccgccgccgccccgaaaagctgctgctgttcgagttatccgaattcgccctgtacgccgtcgaaaaagaattgcgcgaaacctgcatccaaaaacgcctcgacaccgaaatcctgccctttctcggttcggtgcaaaaccgcacgctgctcgaacacgtcatgaccgccttttccgttgcgaccgtctatcacgccgccgcctacaaacacgtccccatggtcgagttcaacaccgtcgaaggcatacgcaacaacatcttcggcacactcgaatgcgcgcttgccgccacggcttcgggcgtggaaaccttcgtcctcatctccaccgacaaagccgtccgccccaccaacacgatgggcgccagcaaacgtatggcggaactctgcctacaggcgctcgccgccgaacccggacaaaaaacccgcttcagcatggtgcgtttcggcaatgttttaggctcgtccggctccgtcgtcccgctgtttgaaaaacagattgcagaaggcggcccgcttaccctgacccaccccgacatcacacgttatttcatgaccatacccgaagccgcccaactcgtcatacaggcaggcgcgatgggtactggcggcgacgtattcgtcctcgatatgggcgaatccgtcaaaatcatcgaccttgcccgccaaatgattaccttaagcggcctcaaacccaaaacacccgaacaacccgacggcgacatcgaaatcctcattaccggactgcgtcccggcgaaaaactctacgaagagctgctcatcggcgacaacgtccgcaaaaccggccatccgcgcattatgacggctgacgaggcgatgctgccgtggcacgagctctctgtcctgctcgaccgcatccgtgcggcctgcgaccgttacgaccagcaggcaatccgcaccctgctcatcaacgccccgaccggctttgccccgagcgacggtatctgcgacctgctttgggtacgagaaacacacagaaaaaatgccgtctga

SEQ ID NO: 61096 - DNA, 1329 bp, Neisseria meningitidis
atgaaaaaagtatttatccgcaccttcggctgccagatgaacgaatacgacagcgacaaaatgctcgccgtcctcgccgaagaacacggcggcatcgaacaggttacccaagccgacgaagccgacatcatcttgttcaacacctgctccgtgcgcgaaaaagcgcaagaaaaagtcttctccgatttggggcgcgtgcgtccgctcaaagaaaaaaaccccggcctcatcatcggcgttgccggctgcgtcgcctcgcaagaaggcgaaaacatcatcaaacgcgcgccttatgttgacgtggttttcggcccgcaaacgctgcaccgcctgcccaaaatgattgtggacaaagaaaccagcgggctgtcgcaagtcgatatttccttccccgaaatcgaaaaattcgaccacctgccgcccgcccgcgtcgaaggcggcgcggcatttgtatcgattatggaaggctgttccaaatactgctcattctgcgtcgtcccctacacgcgcggcgaagaattctcccgcccgctcaacgacgtattgacagaaatcgccaaccttgcccagcaaggcgttaaagaaatcaacctcttaggccaaaacgtcaatgcctatcgcggcgaaatggacgacggcgaaatctgcgacttcgccaccctgctgcgcatcgtccacgaaatccccggcatcgaacgtatgcgcttcaccaccagccacccgcgcgagtttaccgactcgattatcgagtgctaccgcgacctgcccaaattggtttcccacctgcacctgccgattcaaagcggttccgaccgcgtattgagcgcgatgaaacgcggctacaccgctttggaatacaaatccatcatccgcaaactgcgtgccatccgtcctgatttatgcctgagcagcgactttatcgtcggcttccccggcgagaccgaacgcgagttcgagcaaaccttgaaactggtgaaagacattgccttcgacttgagcttcgtgtttatttacagtccgcgccccggcacgcctgccgccaacctgcacgacgacacgccgcacgaagaaaaagtgcgccgcctcgaagccttgaacgaagtcatcgaagccgaaaccgcgcgcatcaaccaaacgatgatcggcacggttcaacgctgcctggtcgaaggcatctccaaaaaagaccccgaccaactgcaagcccgcaccgccaacaaccgcgtcgtcaactttaccggcacgcccgatatgatcaaccaaatgatcgatttggaaatcaccgaggcctacaccttctccctgcgcggcaaaaccgtcagcatttga

SEQ ID NO: 61097 - DNA, 1143 bp, Neisseria meningitidis
atgaatactttatatacacttttcgccacctgcccgcgcggcttggagaccgttttatctcaagaactcgaaagcctcggctgtaccgatgtacaagtgtttgacggcggcgtttcctgccggggcggattggaacaggtttacgccgccaacctgcattcgcgtactgccagccgtatcctgctgcgcctgaccaaagggacataccgcaatgagcgcaacatctacaaactcgccaaaaatatcaactggtttaattggtttactttacagcagacgttcaaagtcaaagtcgaggcaaagcgtgccaacgttaagagcatccaatttgtcggactgaccgtcaaagatgccgtctgcgacgctttccgcgacatttacgacgcacgtccgagcgtggacaaagccgcgcccgatgttcgcatccacgcctttttggacgaacgcaatgtcgaaatcttcatcgacacttcgggcgaagccctgttcaaacgcggctaccgtctcgataccggcgaagccccgctgcgcgaaaaccttgccgccggattgctgctctcggcaggctacgacggcacgcagccgtttcaagacccgttttgcggcagcggcacgattgctatcgaagccgcttggattgccgcccgccgcgcgccgggtatgatgcgccgtttcggttttgaaaaactgcaaaatttcgataaaacgctgtggtcggatttgcgccgccgtgccgaagcgcaggttaaaccggcttttgcaccgatttcgggcagcgacagcgaccgccgcatcattcagacggcattggccaacgcacgcagtgccggggtggacgacatcgtttccttcagcgttgccgacgcgcaatccgtccgtccgaacggcgtgggcggcattatggtgtccaatccgccctacggcgtgcgccttgaggaagtccgcgccttgcaggcgctttatccgcagttggggacgtggttgaagaaatattacgcaggctggttggcggcaatgtttaccggagatcgggaaatgcccaaattcatgcgcctgtcgccaaaacgcaaaattccgctttataacggcaacctcgattgccgcctgttcctgattgatatggtggaaggatcgaaccgttga

SEQ ID NO: 61098 - DNA, 225 bp, Neisseria meningitidis; identical to SEQ ID NO: 55961

SEQ ID NO: 61099 - DNA, 3987 bp, Neisseria meningitidis
atgtctgtcgttttgcccttgcgcggcgttaccgccctttccgatttccgtgtcgaaaaactcttgcaaaaagccgccgcactcggactgcccgaagtcaaattaagcagcgaattttggtatttcgccggcagcgagaaagcacttgatgccgcgactgtcgaaaaactgcaagccttgttggcggcgcaaagcgttgaacaaacgccaaaagcgcgcgagggcttgcatttgtttttggtcacgccccgtttgggtacgatttcgccgtgggcttccaaggcgaccaatatcgcggaaaactgcggtttggcaggcatagagcgcatcgagcgcggtatggcggtgtggctggaaggcgcgcttaccgacaggcaaaaacaacaatgggcggctttgctgcacgaccgcatgaccgaatccgtattgcccgattttcagacggcatccaaattattccaccatctcgaatccgaaaccttctccaccgtcgatgttttgggcggcggtaaagaggctttggtcaaagccaataccgaaatgggtttggcactctccgccgacgaaatcgattatctggttgaaaactatcaggctttgcagcgcaatccgtccgatgtggagctgatgatgttcgcgcaggcaaacagcgaacactgccgccacaaaatcttcaacgccgatttcatcctcaacggcgaaaaacaaccgaaatccctgttcggcatgatacgcgacacgcacaacgcgcatcccgaaggtacggtcgtcgcctataaagacaattcgtccgtgatcgaaggcgcgaaaatcgagcgtttctatccgaatgcggcggaaaaccaaggctaccgtttccacgaagaagacacgcatatcatcatgaaagtggaaacgcacaaccacccgaccgccatcgcgccgtttgcgggcgcggcgacgggtgcgggcggcgaaatccgcgacgaaggcgcgacgggcaaaggttcgcgcccgaaagcaggcttgaccggctttaccgtctccaacctcaacatccccgacctcaaacagccttgggaacaagcctacggcaaacccgaccatattgcttcccctttagacatcatgatcgaaggccccatcggtggcgcggcgttcaacaacgaattcggacgccccaacctcttgggctacttccgcacctttgaagaaaaatttgacggtcaggttcgcggctaccacaaaccgattatgattgcgggcggcttgggcagcattcaggcgcagcagacgcataaagacgaaatccccgaaggcgcgttgctgatccaactgggcggcccgggtatgcttatcggcttgggcggcggcgcggcttcttcgatggataccggtacaaacgacgcttctttagacttcaactccgtgcaacgcggcaaccccgaaatcgaacgccgcgcgcaggaagtcatcgaccgctgctggcagctcggcgacaaaaacccgattatctccatccacgacgtgggcgcaggaggtttgtccaacgccttccccgaactcgtcaacgatgccggacgcggcgcggtattcaagttgcgcgaagtgccgttggaagaacacggtttaacgcctttgcaaatctggtgcaacgaatcgcaagagcgttatgtgttgtcgattttggaaaaagatttggatgccttccgcgccatctgcgaacgcgaacgctgcccgtttgccgtagtcggcacggcgaccggcgacggccatttgaaagtacgcgacgatttgttctccaacaaccctgtcgatttgccgttgaacgttttgctcggcaaaccgcccaaaaccacgcgcaccgacaaaacggttacgccgtatgcgaccgaagggaatccctttgggaaaaaaccgtttaatgccggcgatatcgacattaccgaagccgcctaccgcgttctgcgcctgcctgccgtagcggctaaaaacttcctgattaccatcggcgaccgcagcgtcggcggcatgacccaccgcgaccaaatggtcggcaaataccaaacccccgtagccgactgcgccgtgaccatgatgggcttcaacacctatcgcggcgaagcgatgtctatgggcgaaaaaccggccgtcgccctgtttgacgcgcctgcttcgggcagaatgtgtatcggcgaagccatcaccaacatcgcagcggtcaacatcggcgacatcggcaatatcaaactttctgccaactggatggcggcgtgcggcaacgaaggcgaagacgaaaaactctaccgcaccgtcgaagcggtttccaaagcctgtcaggcattggatttgagcatccccgtgggcaaagacagcctgtcgatgaaaaccgtttggcaggatggcgcggacaagaaatccgtcgtctcgccattgagcctgattatctccgcgttcgcgccggtggaagacgtacgcaaaaccgttacgcccgaactgaaaaacgtcgaagacagcgtattgctgtttatcgatttgggcttcggcaaagcgcgtatgggcggctcggcgtttggtcaggtgtacaacaatatgagcggcgacgcgcccgatttggacgatacaagtcgtctgaaagcgttttacaacgtgattcagcagcttgtcgccgaagacaaactcttggcgtatcacgaccgcagcgacggcggtttgtttgccgttttggtagaaatggcgtttgcggggcggtgcggcttggatatagatttaaatttattgcttgcacaaacatttattaccaaccataccgctctgtctcaatcattgcggactgaagaggtaaaagcgttggctgaatggcaagaaaccattgcccgcacattatttaatgaagagttgggtgctgttatccaagttagaaaacaagatgttgccgatattatcaatttattctatcaacaacagctgcatcataatgtctttgaaatcggtacgttaactgatgagaacacgttaatcatccgcgacgggcaaacgcaccttatttctgacaacctaatcaaactgcaacaaacctggcaagaaaccagccatcaaatccaacgcctgcgcgacaaccctgcctgcgccgacagcgagtttgccctgattggcgacaacgaacgcagcgcattgtttgccgacgtgaagttcgacgtgaacgaagacatcgccgcgccgtttatcaacagcggcgcgaaacccaaaatcgccatcctgcgcgaacagggcgtaaacgggcaaatcgaaatggccgccgcgttcactcgcgccggtttcgatgcctacgacgtgcatatgtccgacctgatggcaggccgcttccgccttgccgacttcaaaatgctggcggcgtgcggcggcttcagctacggcgacgtactcggcgcgggcgaaggctgggcgaaatccatcctgttccaccctgccttgcgcgaccaatttgccgccttctttgccgatccggacacgctgacattgggcgtgtgcaacggctgccagatggtcagcaacctcgccgagattatcccgggtgcagaggcatggcctaaattcaaacgcaacctgagcgaacagtttgaagcacgcctgagcatggttcacgttccgaaatcagcgtcgctgattctgaacgaaatgcaaggctccagcctgcctgtcgtggtcagccacggcgaaggccgcgccgacttcgcgcttcacggcggcaatatttccgccgatttgggcatcgcgctgcaatatgtggacggtcaaaaccaggttacccaaacctatccgctcaaccccaacggctcgccgcaaggcatcgccggcattaccaacgccgacggccgcgtgaccatcatgatgccccaccccgaacgcgtgtaccgcgccgcgcaaatgagctggaaaccggaaggctggacggaactgtccggctggtaccgcctctttgccggcgcacgtaaagccttgggctaa

SEQ ID NO: 61100 - DNA, 963 bp, Neisseria meningitidis
atgcaagcacggctgctgatacctattcttttttcagtttttattttatccgcctgcgggacactgacaggtattccatcgcatggcggaggtaaacgctttgcggtcgaacaagaacttgtggccgcttctgccagagctgccgttaaagacatggatttacaggcattacacggacgaaaagttgcattgtacattgcaactatgggcgaccaaggttcaggcagtttgacagggggtcgctactccattgatgcactgattcgtggcgaatacataaacagccctgccgtccgtaccgattacacctatccacgttacgaaaccaccgctgaaacaacatcaggcggtttgacaggtttaaccacttctttatctacacttaatgcccctgcacgctcgcgcacccaatcagacggtagcggaagtaggagcagtctgggcttaaatattggcgggatgggggattatcgaaatgaaaccttgacgactaacccgcgcgacactgcctttctttcccacttggtacagaccgtatttttcctgcgcggcatagacgttgtttctcctgccaatgccgatacagatgtgtttattaacatcgacgtattcggaacgatacgcaacagaaccgaaatgcacctatacaatgccgaaacactgaaagcccaaacaaaactggaatatttcgcagtagacagaaccaataaaaaattgctcatcaaacccaaaaccaatgcgtttgaagctgcctataaagaaaattacgcattgtggatggggccgtataaagtaagcaaaggaattaaaccgacggaaggattaatggtcgatttctccgatatccgaccatacggcaatcatacgggtaactccgccccatccgtagagactgataacagtcatgaggggtatggatacagcgatgaagtagtgcgacaacatagacaagggcaaccttga

SEQ ID NO: 61101 - DNA, 291 bp, Neisseria meningitidis; identical to SEQ ID NO: 42259

SEQ ID NO: 61102 - DNA, 690 bp, Neisseria meningitidis; identical to SEQ ID NO: 54544

SEQ ID NO: 61103 - DNA, 2277 bp, Neisseria meningitidis; identical to SEQ ID NO: 50362

SEQ ID NO: 61104 - DNA, 921 bp, Neisseria meningitidis
atgcctaatccgctttacagacagcacatcatctccatttcggatttgtcgcgcgaacagttggaatgcctgcttcagacggcattgaagctgaaggcgcatccgcgcggcgatttgttggaaggcaaacttatcggttcgtgctttttcgagccgtccacgcgcacgaggctgtcgtttgaaacggcggtgcagcggctgggcggcaaggtcatcggcttttcggacggcgcgaataccagtgccaaaaaaggcgagacgcttgccgataccgcccgcatcatttccggctacaccgacgcaatcatccaacgccaccccaaagacggcgcggcgcgcgtggcggcggagttttcgcgcgtccccgtcatcaacgccggcgacggcacgaaccagcatcccagccagactttgttggatctggtaacgatttatgaaacgcaggggcgtttggacaagctcaaaatcgccatggcgggcgacttgaaatacgggcgcaccgtgcattcgctttgtcaggcgttgaaacgctggggctgcgaatttgcctttgtttcgccgcccagcctcgcgatgcccgactacattaccgaagagttggacgaagccggctgccgataccgtatcctcggcagtttggaagaggcggcggaatgggcggacatcctgtatatgacccgcgtccagcgcgaacgtttcgatgaacaggaatttgccaaaatccaaggcaaattcaacctcgaagcgtctatgctcgcccacgccaaaccgaacctgcgcgtgctgcaccctttgccgcgcgtggacgaaatccatcccgatgtcgatgccacgccgcatgcctattatttcgagcaggcaaccaacggcgtttatgcgcgtatggcgatattgtcgctggtgttgaacgaagaagtgtga

SEQ ID NO: 61105 - DNA, 1728 bp, Neisseria meningitidis
atgcagttatcaggcgcgcaaatcatagtgcagagtctcaaagccgaaggtgtcgagtacgttttcggttatcccggcggtgcggttatcgaaatctacgatgcccttttccaactcaataaattcaagcacattctgacccgtcacgagcaggcggcagtacacgcggcagatgcgtatgcgcgcgtcagcggtaaggtgggcgtggcattggttacatccggcccgggcgttaccaatgcactgaccggtattgctactgcctatacggattcgattccgatggtggtcatcagcgggcaggtaggcaattccctgattggtacggatgcgttccaagaagttgatacggtgggtattacccgtccgtgcgtcaaacacaatttcctggttacggacatcaatgagttggcggaaaccattaaaaaggcgttccaaattgccgcaagcggccgaccggggcccgtggtggttgatgtcccgaaagatgttacgcaggcgatggcgaaattcagctatcctcaggaagacatttttatccgttcgtatcaaccggttgttcaagggcatatcggtcagattaaaaaggccgtgcagatgttggcatctgccaaacgtccggtcgtctattttggcggcggcgtggtgttgggtaatgcttctgaagagctgacccgatttgtccgaatgacgggtgctccgtgcacgggtacgctgatgggcttgggcgcttatccttccggcgaccgccaattcctcggtatgctcggtatgcacggtacttacgaggcaaaccttgccatgcagaatgcggatgtcgttcttgccgtaggtgcgcgttttgacgaccgtgtggtttccgtaccgtccaaatttttcgagaaggcgaagaaggttatccatatcgatgtcgatccttccagcatcgccaaacgcgtgaaggcggacattccgattgtcggcgacgtgaaaaacgttttgtccgagatggttgcgctgtggcaaaaacaagagtccgtgccgtctgaagatgttttgggcaaatggtggaaaaccatagaggaatggcgttcccgcgattgcttgtggtttgacaacggcagcgaaattatcaagccacaatatgtgattcagaagcttgccgagattaccggcaattcggcaatcatcacatcggatgtagggcagcatcaaatgtttgcggctcaatattatcccttcgaacgtccgcgccaatggctcaactccggcggtttgggtacgatgggcgttggtctgccttatgcgattggtgcaaaacttgccgccccggatcaagacgtattctgtattaccggcgacggctcgatccagatgaacatccaagagctgtccacctgtttccaatatcggattccggttaacgtcattacgctgaacaacggttatctcggtatggtacgccagtggcaggaaatatattacggcggccgagagtcggaaacttatttcgattctttgcccgatttcgtcaaacttgccgaggcatacggtcatatcggcatccgcgtggacaagaagtctgatgtggaaggtgcgttgttggaagcattgaaccaaaaagacaggctggtgtttatcgacttcctgaccgaccagaaacagaatgtgatgcccatggtcggtaacggcaaaggtttggacgaaatggtacttccgccgcatatgcgtgcggacgaaaaggcgtaa

SEQ ID NO: 61106 - DNA, 420 bp, Neisseria meningitidis; identical to SEQ ID NO: 54846

SEQ ID NO: 61107 - DNA, 414 bp, Neisseria meningitidis; identical to SEQ ID NO: 45183

SEQ ID NO: 61108 - DNA, 2043 bp, Neisseria meningitidis; identical to SEQ ID NO: 54970

SEQ ID NO: 61109 - DNA, 600 bp, Neisseria meningitidis; identical to SEQ ID NO: 39034

SEQ ID NO: 61110 - DNA, 2586 bp, Neisseria meningitidis
atgttagaagcctatcgtaaagccgccgccgagcgcgccgcccttggtattcccgcccttcctctgactgctcagcaaaccgccgatttggttgagctgctgaaaagcccgcccgcaggcgaaggcgagttcttggtcgaactgcttgcccaccgtgttccgcccggtgtggacgatgccgccaaagtcaaagcctcattcctggctgccgttgccgaaggcagcgcgtccagcccgctgatctcccccgaatatgcgaccgaactcttaggtacgatgctcggcggttacaatatccacgccttaatcgaactcttggacgacgacaaactcgcgcccattgccgccaaaggcttgaaacatacgcttctgatgttcgattccttccacgacgttcaggaaaaagccgaaaaaggcaacaaatacgcgcaagaagttttgcaatcttgggcagatgccgaatggttcgcctcacgcgccaaagttcccgaaaaaatcaccgttaccgttttcaaagttgacggcgaaaccaatacagacgacctctcccccgcgcccgacgcgtggagtcgtcccgatattccgctgcacgcgctggccatgctgaaaaacccgcgcgacggcatcacgcccgacaaaccgggcgaagtcggtccgattaaattgttggaagaactcaaagccaaaggccatccggttgcttacgtcggcgacgtggtcggtactggttcttcacgcaaatccgcgaccaactccgtcatttggcataccggcgaagacattccgttcgtgccgaacaaacgcttcggcggcgtatgtttgggcggcaaaatcgcgccgattttcttcaatacccaagaagattccggcgcgctgccgattgaagtcgatgtatctgctctaaaaatgggcgatgtcgtcgatatcctgccttatgaaggcaaaatcgtgaaaaacggcgagactgttgccgagtttgaattgaaatcacaagtattgctggacgaagtgcaagccggcggccgtatcaacctgattatcggtcgaggtctgaccgccaaagcgcgcgaagccctgaaactgcctgcctctactgcattccgcctgccgcaagcgcctgccgaaagcaaagccggtttcaccttggcgcaaaaaatggtcggccgcgcctgcggtctgcccgaaggacaaggcgtgcgcccgggtacttactgcgaaccgcgtatgacgacggtcggctcgcaagacacgaccggcccgatgacccgcgacgagttgaaagacttggcttgtttgggcttctccgccgatatggtgatgcagtctttctgccacaccgccgcctatccgaaacctgtcgatgtaaaaacccataaagaactgcccgcctttatttccacccgtggcggcgtgtcactgcgtccgggcgacggcgtcatccactcgtggctcaaccgcctgctgctgcccgataccgtcggcaccggcggcgacagccatacccgtttccccatcggtatttccttccccgccggctccggcttggttgcctttgccgccgcaacgggcgtaatgccgctcgatatgcccgagtctgtattggtacgcttcagcggcaagctgcaaccgggcgtaaccctgcgcgatttggtgaacgccatcccgctgtacgcaatcaaacaaggtttgctgaccgttgccaaagccggtaagaaaaacatcttctccggccgcatcctcgaaatcgaaggcctgcctgatttgaaagtggaacaagcctttgaattgaccgacgcatccgccgaacgctccgccgccggctgtaccgtgaagctcaacaaagagccgattatcgagtacatgaaatccaacgtcgtgttgatgaaaaacatgattgccaacggctatcaagacccgcgcactttggaacgccgcatcaaagctatggaaaaatggctggcaaatcccgagttgctcgaagcggataaagatgccgaatacgccgccgtgattgaaatcaacatggacgacatcaaagagccgattatcgcctgcccgaacgacccggacgacgtgtgcttcatgtccgaacgctccggcaccaaaatcgacgaagtattcatcggttcgtgtatgaccaacatcggccacttccgcgccgcctccaaacttttggaaggcaaggcagacacccccgtccgcctgtggattgcgccgccgaccaaaatggacgcgaaacaattgtccgacgaaggacactacggcgtactcggacgtgccggcgcgcgtatggaaatgccgggttgctccttatgtatgggtaatcaggcgcaagtacgcgaaggtgcgaccgttatgtccacctccacccgcaacttcccgaaccgtttgggtaaaaacacctttgtttacctcggttcggcggaattggcagcgatttgctccaaactgggtaaaatcccgaccgttgaagaatatcaagccaatatcggcatcatcaacgaacagggcgataaaatctaccgctatatgaacttcaacgaaatcgacagctacaacgaagtagccgagaccgtgaacgtttaa

SEQ ID NO: 61111 - DNA, 462 bp, Neisseria meningitidis; identical to SEQ ID NO: 55947

SEQ ID NO: 61112 - DNA, 1218 bp, Neisseria meningitidis
atggcgttaatcgtacacaaatacggcggcacatccgtaggctcgcccgaacgcattaaaaacgtggccaaacgtgtcgccaaagcccgcgccgaaggacacgacatcgtcgtcgtcgtatccgccatgagcggtgaaaccaaccgcctggtcgcgttggcgcacgaaatgcaggagcatcccgatccgcgcgaattggacgtggttttgtccaccggcgaacaagtaaccatcggccttttggcgatggcattgaaagacatcggcgtggatgccaaaagctacacaggctggcaggtcgccctcaaaaccgataccgcccacaccaaagcccgcatcgaaagcattgatgacgaaaaaatgcgtgccgaccttaccgccggcaaagtcgtcatcgttgccggcttccaaggcatcagcagtgaaggcgatatttccacgctcggacgcggcggttccgacacttccgccgttgcgcttgccgcagccctcaaagcggacgaatgccaaatctataccgacgtggacggcgtgtacaccaccgatccgcgcgtcgtacccgaagcgcgccgcatggatacggttacatttgaagaaatgatcgaattggcaagcctcggctcgaaagtcttgcaaatccgttcagtagaattcgccggaaagtacaaagtgcgcctgcgcgtactgagcagcctgcaagacggcggcaatggcaccttaattacctttgaagaggacgacaacatggaaagagctgccgtaaccggtatcgcattcgataaaaaccaagcccgcatcaacgtgcgcggcgtacccgacaaacccggcgttgcctatcagattttgggcgcggttgccgatgccaacattgaagtcgatatgattatccaaaatgtcggcagcgaaggcacaaccgatttttcctttaccgtaccgcgcggcgattacaagcagactttggaaatcctgtcggaacgccaagacagtatcggcgcggcttctattgatggcgacgacaccgtatgcaaagtctccgcagtcggtttgggtatgcgttcgcacgtcggtgtagccgccaaaatcttccgcacgctcgccgaagagggtatcaacatccaaatgatttccacctccgaaatcaaagtttccgtattgattgatgaaaaatacatggaactggcaaccagggtattgcataaagcctttaatttgggctga

SEQ ID NO: 61113 - DNA, 816 bp, Neisseria meningitidis; identical to SEQ ID NO: 44574

SEQ ID NO: 61114 - DNA, 1671 bp, Neisseria meningitidis; identical to SEQ ID NO: 38983

SEQ ID NO: 61115 - DNA, 762 bp, Neisseria meningitidis; identical to SEQ ID NO: 51423

SEQ ID NO: 61116 - DNA, 504 bp, Neisseria meningitidis; identical to SEQ ID NO: 44607

SEQ ID NO: 61117 - DNA, 645 bp, Neisseria meningitidis; identical to SEQ ID NO: 55078

SEQ ID NO: 61118 - DNA, 489 bp, Neisseria meningitidis; identical to SEQ ID NO: 55919

SEQ ID NO: 61119 - DNA, 699 bp, Neisseria meningitidis
atgagttttgaaatttaccgttacaacccggacgttgatgccaaaccttatatgcagcgttacgagttggaattggaaccaaccgacgttaaacttttggacgctttagtgcgcctgaaagcacaagatgatacattgtctttccgccgttcctgccgcgaaggcatttgcggatcggacggtatgaacatcaacggcaaaaacggtttggcgtgtctgaccgatctgcgtggcttgaaacagccggttaaaattcgtcctctgccaggtctgcctgttatccgcgacctgattgtggatatgacccagttcttcaaacaataccattccgtcaaaccttatgttgtcaacgataatccgattgatgcggacaaagagcgtctgcaaactcaggaagagcgtaaagagttggacggtttgtacgagtgtattttgtgcgcctgctgttcgactgcctgcccgtcattttggtggaaccctgataaattcgtcggtccgtccggtttgctgaatgcttaccgtttcattgcggacagccgtgataccatcactaatgagcgtttggatgatctgaacgacccataccgtttgttccgctgccacaccattatgaactgtgtggacgtatgccccaaacacttgaatccgacccgagccatcggtaagattaaagagattatgttgaagcgggccgtttaa

SEQ ID NO: 61120 - DNA, 924 bp, Neisseria meningitidis
atgaaaaaacgcaataatcctcttccgttgttgaacggtgtcaaacccagttatttggtgctgccgcatgaaaagcagttttacgggctgccgctgctgcattttctgtgcatccgctttccttttgtgggcgcggacgattggcgcaggcggttgaacagcggttttgtggtcggttcggatggtgcggcgttggacgaacatactttgttcgagccgggtaaggtgatgttttattatcgggaaaccagcagtgaggatgagccgcgtattccgtttgaagaaaagattttgcatattgatgagcatttgattgtggtggacaagccgcattttctgcccgtcatccccagcgggcgttttttaagggaaacgctgctcacacgtctgcgcctgcgtcccgaattgcagcatttgaatgttgaagacattacgccgctgcaccgcttggacaaggatacggcaggcgtgatgctgctgtcgcataatcctgccacgcgcggagcctatcagacgatgtttcaaaacaaaacggtatggaaaacgtatgaggcgcttgcgccgacaaggacggatttgccgtatccgctcgatgtggtttcgcgtttggtgaggggtgagaaattttttacgacgcaagaggcggaaggcgaaccaaacgcacatacgacggtcgaactgattgaaaacaggggggaattcagcctttaccgccttacgccgcatacgggcaagaaacaccagttgcgcgtgcatatgatgggtttgggtatgccgctgttgaatgacgcgctctatcccgtgccgtctgaagcgggcagcgaggattatcggaaacctttgaagctattggcaaaaaagattgcgtttgcagatcctttgtcgggtcgggaaagggtgttttgcagcggattttgcctataa

SEQ ID NO: 61121 - DNA, 825 bp, Neisseria meningitidis; identical to SEQ ID NO: 55517

SEQ ID NO: 61122 - DNA, 630 bp, Neisseria meningitidis
atgaacctttttcaaaacgccaaattcttcacgacggtcaaccaccttaaagacctgcccgacacccctctcgaaattgcctttgtcggcaggagcaatgccggaaaatccagtgccatcaataccctgaccaaccatgtccgtcttgcctacgtttcaaaaacacccggacggacgcagcatatcaacttcttcgagctgcagaacggcaattttatggtcgatttgcccggctacggttatgcccaagtccccgaagcagtacgcgcacattgggtcaatctgctcggcgactatctgcaacagcgcaaacagcttatcgggctggttttgattatggatgcccgccatcctttaaaagaactcgacatccgtatgctggactttttccacacgaccggcagaccggttcacatcctgctgtcaaaagccgacaaattatccaaaaacgaacagataaaaaccctgtcccaagtcaaaaaactgctcaaaccttattccgacaggcaaaacatcagcgtacagctgttttccagcctgaaaaaacaaggtattgacgaggccaaccgaactgtcggaagctggtttgacgcagcagatgccgccgcttcctctccagaggaaaactga

SEQ ID NO: 61123 - DNA, 2439 bp, Neisseria meningitidis; identical to SEQ ID NO: 54323

SEQ ID NO: 61124 - DNA, 918 bp, Neisseria meningitidis
atggaaaaagcagaacatttgaacagcagccggttcgtcaatctggtcaaaagcggcggcggcagctatgtggagggcagctaccgtttcgatactttgtccaacggcatttccatccacggcggcacggtaacggcacggtgcgatttttgcagcagccgcctcgccgaaccttatgtgtcgttcgtgctcttgctggaaggcagtttggacttcggcatcaaccgccgccgcttccaaatcgatgcggatggcggcaagatcgtcctaattgctgtcggggaagaggtcctgttcagccgctatctttaccgaggcggcaaaacggtcaaaatgaccattaaaggtatggaacaatggctgctgcgtccggagtatgcgcgtttcgcacccctgctttaccgcgaaccggtcagaatatggaatttgtccccaaacctgcgcggctcggcggcatcctgcctgaaagctgtcccaaaggggcatttgggcgaaacattgcgccgcgaggcggacgttttgcggctgctgtcggacttgtgggacacggtttcagacggcatcgggccggcggcggggcaaacggcggaagcagacgctatgccgtctgaagacttcaaccgcaccctaaatgccgcgtttgccgacggcgcacaccaagtcaaccggctgacagacgcgctgaacatcagtgaaaggacgctgcaacgccgtatgcgcgaccatttcggtattaccgcaagcgagtggctgcaccacaaacaaatgcagcacgcgctctacctgttgcaaaacgggggcaaaagcataggcgaaaccgcgtatttgtgcggctaccgccacgtttccagctttactcaggcattcaggcaatatttcggcagcacgcctgcggaaaccaaaaaagaaaaccgataa

SEQ ID NO: 61125 - DNA, 1914 bp, Neisseria meningitidis
atgaacccaagccccctactcgacctgattgacagcccgcaagatttgcgccgtctggacaaaaaacagctgccgcgccttgccggcgagctgcgcgcctttctgctggaatctgtcgggcagaccggcggtcatttcgccagcaatctgggcgcggtcgaactgaccatcgccctgcactatgtgtacgacacgcccgaagacaagctggtgtgggatgtcggacaccaaagctatccgcacaaaatcctgacaggcaggaaaaaccaaatgcacacgatgcgccaatacggcggcttggcgggttttccgaaacgttgtgagtcggaatacgacgcgttcggcgtggggcattcgtccacttccatcggcgcggctttgggtatggcggcggcagacaaactcttgggcagcgaccgccgcagcgtcgccatcatcggcgacggcgcgatgacggcggggcaggcgtttgaagccttgaattgcgcaggcgatatggatgtggatttgctggtcgtcctcaacgacaacgaaatgtcgatttcccccaacgtcggcgcgctgccgaaataccttgccagcaacgtcgtgcgcgatatgcacggcctgttgagtaccgtcaaagcgcaaacgggcaaggtattagacaaaatacccggcgcgatggagtttgcccaaaaagtcgaacacaaaatcaaaacccttgccgaagaagccgaacacgccaaacagtcgctgtctttgtttgaaaacttcggcttccgctacaccggccccgtggacggacacaacgtcgaaaatctggtggacgtattgaaagacttgcgcagccgcaaaggccctcagttgctgcacgtcattaccaaaaaaggcaacggctacaaactcgccgaaaacgatcccgtcaaataccacgccgtcgccaacctgcctaaagaaagcgcggcgcaaatgccgtctgaaaaagaacccaagcccgccgccaaaccgacctatacccaagtgttcggcaaatggctgtgcgaccgggcggcggcagattcccgactggttgcgattacccccgccatgcgcgagggcagcggcttggttgagtttgaacaacgattccccgaccgctatttcgatgtcggcatcgccgagcagcacgccgttacctttgccggcggtttggcttgcgaagggatgaagcccgtcgtggcgatttattccacctttttacaacgcgcctacgaccaactggtgcacgacatcgccctgcaaaacctgcccgttttgtttgccgtcgaccgcgcgggcatcgtcggcgcggacggcccgacccacgccggtttgtacgatttgagcttcttgcgctgcattccgaatatgattgtcgccgcgccgagcgatgaaaacgaatgccgcctgctgctttcgacctgctatcaggcagacgcgcccgccgccgtccgctatccgcgcggcacgggtacgggcgcgccggtttcagacggcatggaaaccgttgaaatcggcaagggcattatccgccgcgaaggtgggaaaactgccttcattgcctttggcagcatggtcgcccccgcattggcggttgccgaaaaactgaacgccaccgtcgccgatatgcgcttcgtcaaaccgatagacgaagagttgattgtccgccttgcccgaagccacgaccgcatcgttacccttgaagaaaacgccgaacagggcggcgcaggcggcgcggtgctggaagtattggcgaaacacggcatctgcaaacccgttttgcttttgggcgttgccgataccgtaaccggacacggcgatccgaaaaaacttttagacgatttgggcttgagtgccgaagcggtggaacggcgtgtgcgcgcgtggctgtcggatcgggatgcggcaaattaa

SEQ ID NO: 61126 - DNA, 2379 bp, Neisseria meningitidis
atgaaaccattacaaatgctccctatcgccgcgctggtcggcagtattttcggcaatccggtcttggcagcagatgaagctgcaactgaaaccacacccgttaaggcagagataaaagcagtgcgcgttaaaggtcagcgcaatgcgcctgcggctgtggaacgcgtcaaccttaaccgtatcaaacaagaaatgatacgcgacaataaagacttggtgcgctattccaccgatgtcggcttgagcgacagcggccgccatcaaaaaggctttgctgttcgcggcgtggaaggcaaccgtgtcggcgtgagcatagacggtgtaaacctgcctgattctgaagaaaactcgctgtacgcccgttatggcaacttcaacagctcgcgtttgtctatcgaccccgaactcgtgcgcaacatcgaaatcgtgaagggcgcagactctttcaataccggcagtggtgcattgggcggcggtgtgaattaccaaacgctgcaaggccgtgatttgctgttggacgacaggcaattcggcgtgatgatgaaaaacggttacagcacgcgtaaccgtgaatggacaaatactctcggtttcggtgtgagtaacgaccgcgtggatgctgctttgctgtattcgcaacgtcgcggtcatgaaaccgaaagcgcgggaaaccgaggctatgctgtggaaggggaaggcagtggcgcgaatatccgtggttcggcacgcggtatccctgattcgtccaaacacaaataccacagctttttgggtaagattgcttaccaaattaacgataaccaccgcatcgtcggcgcatcgcttaacggccagcagggacataattacacggttgaagagtcttataacctgaccgcttcttcctggcgcgaagccgatgacgtaaacagacggcgcaatgccaacctcttttacgaatggatgcctgattcaaattggttgtcgtctttgaaggcggacttcgattatcagaaaaccaaagtggcggcggttaacaacaaaggctcgttcccgatggattattccacctggacgcgcaactataatcagaaggatttggacgaaatatacaaccgcagcatggacacccgattcaaacgttttactttgcgtttggacagccatccgttgcaactcgggggggggcgacaccgcctgtcgtttaaaactttcgtcagccgccgtgattttgaaaacctaaaccgcgacgattattacttcagcggccgtgttgttcgaaccaccagcagtatccagcatccggtgaaaaccaccaactacggtttctcactgtctgaccaaattcaatggaacgacgtgttcagtagccgcgcaggtatccgttacgaccacaccaaaatgacgcctcaggaattgaatgccgagtgtcatgcttgtgacaaaacaccacctgcagccaacacttataaaggctggagcggttttgtcggcttggcggcgcaactgaatcaggcttggcatgtcggttacgacattacttccggctaccgcgtccccaatgcgtccgaagtgtatttcacctacaaccacggttcgggtaattggctgcctaatcccaacctgaaagccgagcgcagcaccacccacaccctgtctctgcaaggccgcagcgaaaaaggcatgctggatgccaacctgtatcaaagcaattaccgcaatttcctgtctgaagagcagaagctgaccaccagcggcactcccggctgtactgaggaaaatgcttactacggtatatgcagcgacccctacaaagaaaaactggattggcagatgaaaaatatcgacaaggccagaatccgcggtatcgagctgacaggccgtctgaatgtggacaaagtagcgtcttttgttcctgagggttggaaactgttcggctcgctgggttatgcgaaaagcaaactgtcgggcgacaacagcctgctgtccacacagccgctgaaagtgattgccggtatcgactatgaaagtccgagcgaaaaatggggcgtattctcccgcctgacctatctgggcgcgaaaaaggccaaagatgcgcagtacaccgtttatgaaaacaagggctggggtacgcctttgcagaaaaaggtaaaagattacccgtggctgaacaagtcggcttatgtgtttgatatgtacggcttctacaaaccggctaaaaacctgactttgcgtgcaggcgtatataatgtgttcaaccgcaaatacaccacttgggattccctgcgcggcctgtatagctacagcaccaccaactcggtcgaccgcgatggcaaaggcttagaccgctaccgcgccccaagccgtaattacgccgtatcgctggaatggaagttttaa

SEQ ID NO: 61127 - DNA, 1131 bp, Neisseria meningitidis
atgaccaaacatctgcccctggccgtcctgactgctttgctgcttgcagcgtgcggcggttcggacaaaccgcctgccgaaaaaccggcaccggcggaaaaccaaaacgtattgaaaatttacaactggtcggaatatgtcgatccggaaaccgttgccgattttgaaaagaaaaacggcatcaaggttacttatgatgtgtacgacagcgatgaaacgctggaaagcaaggtgctgacaggcaagtccggttacgacattgtcgcgccgtccaatgcgtttgtgggcaggcagattaaggcaggtgcgtatcagaaaatcgataagtcgctgattcccaattataaacacctcaaccctgaaatgatgaggctgatggacggggtcgatcccggccacgaatacgccgtgccgttttattgggggacaaataccttcgccatcaataccgaacgcgtgaaaaaggctttgggtacggacaagctgccggacaaccagtgggatttggtgttcgaccccgaatacacgtccaaactcaagcaatgcggcatcagctatttggacagcgcggcggaaatctatcctatggtgttgaactatttgggtaaaaacccgaacagcagcaatacggaagacatcagggaggcaaccgccctactcaagaaaaaccgccccaatatcaaacgctttacttcgtccggctttatcgatgatttggcgcgcggcgatacctgcgtaacaatcggtttcggcggcgatttgaacatcgccaaacgccgtgccgaagaagcgggcggcaaggaaaaaatccgcgtgatgatgcccaaagagggcgtggggatttgggtggattctttcgtgattccgaaagatgcgaaaaacgtcgccaacgcgcacaaatacatcaacgacttcctcgatccggaagtgtcggcgaaaaacggcaatttcgttacttatgcgccttcgagcaagccggcgcgtgagctgatggaagacgaatttaaaaacgacaatacgattttcccaaccgaggaggatttgaaaaacagctttatcatggtgcctatccagccggcggcattgaagtttatggtgcgccagtggcaggatgtgaaggcggggaaataa

SEQ ID NO: 61128 - DNA, 1053 bp, Neisseria meningitidis; identical to SEQ ID NO: 52344

SEQ ID NO: 61129 - DNA, 2037 bp, Neisseria meningitidis
atgaacgacatgactttatatttgataattgcccttgttccgttggcaggctcgttgattgcgggtttgttcggcaacaaaatcggtcgtgccggtgcgcatactgttacgatactcggtgtggcggtgtctgccgtgctgtcggcttatgtgctgtggggattcctcaatggcagccgtgccaagtttgatgagaacgtctatacctggctgacgatgggcggtttggatttctccgtcggcttcttggtcgatacgatgacggcgatgatgatggtcgtggtaacgggcgtatcgttgatggtgcatatctacaccatcggctatatgcacgatgaaaaagtcggctaccaacgcttcttcagctatatttctttgtttactttcagcatgttgatgctgattatgagcaacaacttcatccagctcttcttcggctgggaggctgtgggcttggtgtcgtatctcttgatcggtttctatttcaaacgtccaagcgcaacatttgccaacctgaaagcctttttgatcaaccgtgtcggcgacttcggctttttgctcggtatcggcttggtgcttgcctatttcggcggcagcctgcgctatcaagatgtattcgcttatctgcccaacgtgcaaaatgccaccatccagcttttccccggtgtggaatggtcgttgattactgtcacctgtttgctcctgtttgtcggtgcgatgggtaaatcggcacaattcccactgcacgtttggctgcctgattcgatggaaggcccgaccccgatttctgcattgattcacgctgcgacgatggttaccgccggtctgtttatggtatcgcgtatgtcgccgatttatgagatgagcagcactgcgctgtctgtcattatggtgatcggtgcgattaccgccctgtttatgggtttcttgggcgtgattcaaaacgacatcaaacgtgtggttgcgtattccaccttgtcgcaactgggctatatgaccgtggctttgggtgcgtctgcctattccgtggcgatgttccatgtgatgacccacgctttctttaaagccttgttgttcttggcggcaggcagcgcgattatcggtatgcaccacgaccaagacatgcgccacatgggcaacctgaaaaaatacatgccgattacttggctgaccatgctgatcggtaacttgtcgctgatcggtacgccgttcttctccggcttctattctaaagattcgattatcgaagcggcgaaatacagcaccctgccgggcagcggctttgcctattttgccgtccttgccagcgtgttcgttaccgcgttctacgcgttccgccaatactttatggtgttccacggcgaagagaaatggcgcagcttgcctgaacatcatgacgatcatcatggcgatcatcatggcgaagaacatcacagcttgggcaaaaacgacaatccgcacgaaagcccgttggttgttaccctgcctttgattttgcttgccattccgtccgtcatcatcggctacgttgccatcgagcctatgctttacggcgatttcttcaaagatgtgattttcgtcaacgccgacgcgcatccgaccatgcacatcatgaaggaagagttccacggcgcattggcaatggtgtcgcacagcctgcattcgcctgtactctaccttgctatcgcaggcgtgttgagcgcatggcttttgtacgtcaaactgccgcacctgccagcgaaaattgcacagacgttccgtccgatttacgttttgtttgaaaacaaatactacctcgacgccctgtatttcaacgttttcgccaaaggcacacgcgcattgggtactttcttctggaaagtcggcgataccgccattatcgacaacggcatcgtcaacggctctgccaaactggtcggcgcgattgccgcgcaagtgcgtaaagctcaaaccggctttatctatacctacgccgccgctatggtgttcggcgtattggtcttgctcggtatgaccttctggggattgttcagataa

SEQ ID NO: 61130 - DNA, 600 bp, Neisseria meningitidis
atgtctgaaaaaccggaaaaaatcgttttggcaagcggcaatgccggcaagctcgaagaattcggcaacttattcaaaccttacagcatcaccgtattgccgcaatccgcattcggcatacccgaatgccccgaaccctatcccacctttgtcgaaaacgcgctggcaaaagcacgccatgccgccgaatacagcgggctgcccgcgcttgccgacgacagcggcatctgtgccgccgccctaaacggcgcgccgggcatccattccgcacgttacgcgggcgacaatcccaaatccgataccgccaacaacctgaaacttgccgccgaacttgtcggcaaagccgacaaaagctgttgctacgtctgcgtattggtttttgtccgccataaagacgacccgcgtccgattattgccgaaggcgtatggcacggacaatggaacggcgttcccgccggtgaaaacggtttcggttacgacccgtatttttatctgcccggacacggtaaaaccgccgccgaattggattcggaggtcaaaaaccgcgaaagccaccgcgcgcaggcactcgccgatttaatccgcaaactcgccctttaa

SEQ ID NO: 61131 - DNA, 852 bp, Neisseria meningitidis
atgattacccatccccaattcgaccccgtccttatcagtatcggcccgcttgccgtccgctggtatgccctaagctacatcctcggatttattctttttacctttctcggcagaaggcgcatcgcgcaaggcttgtccgtttttaccaaagaatcgctcgacgacttcctgacatggggcattttgggcgtaattttgggcgggcgtttgggttacgtcctgttttacaagttttccgactacctcgcccatccgcttgatattttcaaggtatgggaaggcggaatgtcgttccacggcggctttttgggtgtagttattgccatatggttgttcggccgcaaacacggcatcggcttcctcaaactgatggacacggtcgcaccgctcgttccgctgggtctcgcttcgggacgtatcggcaacttcatcaacggcgaactttggggacgcgttaccgacatcaacgcattttgggcaatgggcttcccgcaggcgcgttacgaagatgccgaagccgccgcgcacaatccgctttgggcagaatggctgcaacaatacggtatgctgccgcgtcatccctcgcagctttatcagtttgcacttgaaggcatctgcctgttcgccgtcgtttggctgttctctaaaaaacagcggccgaccggacaagtcgcctcgctcttcctcggcggctacggcatattccgcttcattgccgaattcgcacgccaacccgacgactatctcgggctgctgaccttggggctgtcgatggggcaatggttgagcgtcccgatgattgttttgggtatcgtcggctttgtccggttcggcatgaaaaaacagcactga

SEQ ID NO: 61132 - DNA, 774 bp, Neisseria meningitidis
atgtatcaccaaatcggaatgtgggatcaaaaatgggtcatcggcaactggaaaatgaacggccggctccagaacaacaattcgctcatgcaccgcttccgcatcctccccaccgccgaacgcgtcctcatcggactcgccgccccgaccgtttacctgctgcaactgcacaacgccatgcaaatcgtcttaaacaaccgcatcctcacctgcgcccaagacgtgagccgcttccccgacaacggcgcgtacaccggcgaagtgtccgccgaaatgctcgccgacaccggcacagacatcgtcctcatcggacactccgaacgcagcctttatttcggcgaaaaaaacgaaatccaacgccgcaaaatggaaaacgtcctcaacgtcggactcatcccgttattgtgcgtcggcgaaagcctcgaagagcgcgaagccggcaaagaacacgaagtcatcgcccatcagctttctatcctccaaggactggacaccaaaaacatcgccgtcgcctacgaacccgtctgggcgatcggcacaggcaaagtcgccaccgtcgaacagattgccgatatgcacgcattcatctacaaagaaatcttgtctttgtgcggaagcgatgttaaaatccgcgtcctttacggcggaagtgtgaaagcggacaacgcggccgacatcttcgcagtaccttatgtggacggcgcactcgtcggcggcgcgtcattgtcgtacgactcctttaccgccatcatcagtgccgcacaaaatgcgtag

SEQ ID NO: 61133 - DNA, 1065 bp, Neisseria meningitidis; identical to SEQ ID NO: 54393

SEQ ID NO: 61134 - DNA, 378 bp, Neisseria meningitidis
gtgaacaaaaccctcatactcgtcctttccgccctgttcagcctgaccgcgtgcagcgtcgaacgcgtttcactgttcccctcgtacaaactcaaaatcatacagggcaacgaactcgaaccccgcgccgttgccgccctgcgccccggcatgaccaaagaccaagtcctgctcctgctcggcagccccatgctgcgcgacgcattccataccgaccgctgggactataccttcaacacctcccgcaacggcatcatcaaagaacgcagcaatctgaccgtctattttgaaaacggcgtactcgtccgcaccgaaggcgacgtcctgcaaaacgctgccgaagccctcaaagaccgccaaaacacagacaaaccataa

SEQ ID NO: 61135 - DNA, 1371 bp, Neisseria meningitidis
atgatcaaccccatcgcctcgctttcccctttagatggccgttatgcccaatccgttgaagcattgcgcccgattttttccgaatacggcctgatgaaagcgcgcgtcaaagtcgaattaaactggctcaaagccctcgccgccgagccgaagattgccgaagtgccgcccttcagtgccgaaacgcttgccgaaatcgacacggtgattgaaaacttttcattggaagacgcggccgccgtcaaagccatcgaagccacgaccaatcatgatgtcaaagccattgaatattggctgaaaaaacgttttgccgaagtgccggaagtcgccgccgtgagtgagttcatccacttcgcctgcaccagcgaagacatcaacaacctgtcccacgctttaatgctgcaagaagcgcgtgaggctgttttgctgccgaagctggccgaaatcatcgaaaaactgaccgctatggcgcacgaccttgccgccgtcccgatgatgagccgcacccacggccagcccgccacgccgaccactttgggcaaagaaaccgccaacgtcgtttaccgcctgcaacgccagtttaaaaacctgcaagtgcaagagttcctcggcaaaatcaacggcgcggtcggcaactacaacgcccatatggttgcttatcccgatgtggattgggaaacccactgccgcaactttgtcgaaatcagcctcggtctgaccttcaacccctacaccatccaaatcgaaccgcacgactatatggcggaattcttccaaaccctcagccgcatcaacacgattctcatcgactttaaccgcgacgtttggggttatatttcattgggttacttcaaacaaaaagtcaaagcgggcgaagtcggttcttccaccatgccgcacaaagtcaaccccatcgactttgaaaactccgaaggaaacctcggtatggcaaacgccgtattgggctttttgtccgaaaaactgccgatttcccgttggcagcgcgacctgaccgacagcaccgtcttacgcaatatgggcgtgggcgtgggctatgccgtgttgggtttcgccgcacacctgcgcggtctgaacaagctcgaacccaaccctgccgcgcttgccgccgatttggatgccacttgggaactgctcgccgagccgattcaaaccgtgatgcgccgttacggtgtcgccaatccttacgaaaaactgaaagacctgacgcgcggcaaaggcggcattacgcccgaagtgctgaaaggctttatcggatcgctggaaatccccgtcgaagccaaagcaaaattgcttgagctgacccccgcactgtatgtgggcaaggctgaagcgttggcgaaacggatttga

SEQ ID NO: 61136 - DNA, 618 bp, Neisseria meningitidis; identical to SEQ ID NO: 54758

SEQ ID NO: 61137 - DNA, 1455 bp, Neisseria meningitidis
atgactacgcaaaccatcaaatttcacatgaagccggaaactttcaagcaaaacgccgcaatttcccttcaagacaagcctttgcgtaaaagcctgcgtaccgcgatggatatgctgatgaccaaacgcaaagccgttttgaccgacgaagaagagctgcaaagcttgcgcgatttgtgcgaacacgtccgtcagcgctcattgtctaaattgcctgccctgctggagcagctggaagaaaacctgactaagttgggcgtaaaagtacactgggcggaaacaccggccgaagcctgcgaaatcatccacgacatcatcacagccaaaaacggcaagctgatggtcaaaggcaaatcgatggtcagcgaggaaatcgagctgaaccattatcttgaagcaaaaggcattaaagcggtagaaagcgacttgggcgagttcatcgtccaaatggcaggcgaaaaaccgacccatattgtgatgcccgcaatccataaaaccaaagaacaggttagcgaactgttccaccaaaacctcggtacgccgctgacagacgatgtagaccaactgaccggcttcgcccgtaaagcactgcgcgatatttacagcactgccgatgtcggtttgagtggcgtaaactttgccgttgctgaaacaggtacgctgtgtctggtggaaaacgagggcaacggtcgcttgagtaccaccgtaccgcccgtgcatatcgctattaccggcattgaaaaagtggtggcgaaattgtccgacatcccacccttgtacagtctgctgccgcgctccgccatcggtcaaaacatcacaacctatttcaatatgattaccggcccgcgccgcagtgaagaattagacggtccgcaagaaatgcacttggttctgctcgacaacggccgcagccaggcttatgccgaagaccaaatgcgccgcaccctgcaatgtatccgttgcggcgcgtgtatgaaccattgcccggtttatacccgcatcggcggcgcggcatacggcacaacctatcccggtccgattggcgagattatttccccgcacctgttaggcttggatgccactcgcgacctgccgaccgcctgcacgatgtgcggcgcgtgcgtggaagtttgtccggtacgcatcccgattaccgaacaaatgcagcgtttgcgcgttgaagcgcaacgttcgccgaccgaaaccgtgccgcaccccatccgggggcaaggcgcatcgcataccttcggcgaacaaatggcgtggcgcacattcaacggtattttcagcggcagcaaaacctaccgcgccttcggttgggcagccaccaagttccgcaacctgaccccgcgcaaacagttgggttggacgcaaaaccgcgtgccgatgaaaccggcgaagaaaaccctgcacgaactgatggcagaaaaaatgcgccaaaaagaacaggcataa

SEQ ID NO: 61138 - DNA, 267 bp, Neisseria meningitidis; identical to SEQ ID NO: 37278

SEQ ID NO: 61139 - DNA, 726 bp, Neisseria meningitidis
atgccccgattctacctgcccgaaaacctttccgtcggacaaaccgtcgccctgcccgacaacatcgtccgccacctcaacgtcctacgcgtccgccccaacgaaaacatcaccctcttcgacggcaaaggcaaggcacacgccgcacagctgaccgttttggaaaaacgccgcgccgaagccgaaatcctgcacgaagacacaaccgacaacgagtccccgctcaacatcacactgatacaatccatctcctccggcgatcgcatggatttcaccctgcaaaaaagcgtcgaactcggcgtaaccgccatacagcccgtcatcagcgaacgctgcatcgtccgcctcgacggagaacgcgccgccaaacgcctcgcacgctggcaggaaatcgtcatctccgcgtgcgaacaaagcggcaggaacaccgttccccccgtactgcccatcatcggctaccgtgaagcactcgacaaaatgccgtctgaaagcaccaagctgattatgagcatcaaccgcgcccgcaaactcggcgacatccgccaaccgtccggcgcaatcgtctttatggtcgggcctgaaggcggctggacagaacaggaagaacaacaggcatttgatgccggctttcaggcggttacactcggcaaacggattttacgcacagaaaccgccccactcgccgccctcgccgccatgcagacgctttggggcgatttcgcataa

SEQ ID NO: 61140 - DNA, 1281 bp, Neisseria meningitidis
atgaaatccctttttattcggctgctcctgttgggttcggcggcaggcgttttctaccatacccaaaaccaatccctgcccgcgggcgaacttgtctatccgtccgcaccgcaaatcagggacggcggcgatgcgctgcactacctcaaccgcatccgagcccaaatcggtttgcacaagctggcacacgcgccggttttggaaaactccgcccgcaggcacgcaagctacctcacgctcaatcccgaagacggacacggcgaacaccatcccgacaatccgcactacaccgcacaaaagctgaccgaacacacacgccttgccgggtatctctacaacggcgtgcatgaaaacatcagcacggaagaagaagccgccgaatcgtccgacagcgacatccgcacgcagcaacgccaagtggacggattaatgagcgcaatctaccaccgcctttccctacttgaccgccatacggatgaggcaggagcggcatttgtgcgcgaaaacggtaaaaccgttctcgtattcaatcagggcaacggcaggtttgagcggcattgcgcccaaggcagaaatcagccggaagcaggacggaaatattaccgcaacgcctgccataacggtgcggtcgtgtacaccgacgaagccatgcccgcacaggagctgctctatacagcctatcccgtcggcagcggcgcactgccttatttccacggcgagcgtccagaccccgtgccggaatatgaaatcacgggcaatcctgccagcattgatttttccgaggcggcaggcaaaattacgatgaaaagtttcaagctgtatcagggtaaaaacgaaatccgccccgtcagggttttaaccgccggcaacgaccccaacggcaggctgaccgcgtaccaattcgcgctttttccgctcaagcctttggaatacggcacgctttatacggcggtattcgactatgtccgcaacggacggcgagcgcaggcgaaatggcagtttagaacccgaaaacccgattacccttattttgaggtaaacggcggcgagacacttgcggttagaaaaggcgaaaaatatttcatccactggcgcggacgctggtgtttggaagcgtgtacccgttatacctaccggcagcgacccggcagccgcctgtccataggaaggcacgaggcgggcggcatcgtcttcagcgttgacggaatggcgggcagccgcatcacgcttgcaccggaaggagaaacggaacgaggcgtaaccctttatttacaggattga

SEQ ID NO: 61141 - DNA, 2121 bp, Neisseria meningitidis; identical to SEQ ID NO: 54763

SEQ ID NO: 61142 - DNA, 486 bp, Neisseria meningitidis
atgtttgtgaacgagaaagatccttatgcggctctgtttgcgggactggtgtttttgacgctgccgtttgcgttggcggtgcatgatgccttggcatttgtgttcggacggacggggctgctggtgtcggtgtcggacggcggattcggctggcgaggaggctgggacggcgtggtgtggtttgtgtatggcgtgtttgcgtttttgaacctggtcgtgtcggcgggcctgacgaaactggcgtacaaaaagatgatgcggcggcattcccgttacgcgctgtttctgtcgggcgtggcggcttgcgcggctgctgcggtcgcgtggattttcgagctgctgcttggcagtggggctttgggcgggctgcgtggggaggcggtgttggaatatgcgtttgccgtgtggctggtggcgatgctgacgctgcccaaacgcctgacgcgcgcgccggtgcagccggtggtgtttcacaggaaaaaatag

SEQ ID NO: 61143 - DNA, 861 bp, Neisseria meningitidis; identical to SEQ ID NO: 54408

SEQ ID NO: 61144 - DNA, 603 bp, Neisseria meningitidis
atgactgaaaaactccctcctgatgcgctgattgaagccgcgcttttgactcaagccgaacctttaaacgaaaagaccatgcgcgaattgtgtgtgccgccgttgtcgcaagacaaactgattgatgtgttggcgcagttgaaaacgcgttggcaggatagggcgttgcaactggtgcatacgcaagagggctggcgttttcagattgttcagacggcattcgagcggctgggcagcctgcaagaacagcgtgcgccgcgctactcccgcgccgtgatggaaacactggcgattatcgcctaccagcagcccgtaacgcgcggcgacatcgagggcatacgcggcgtggcggtgtcgcagaacgtgatgcagaccttgcaggatcgggggtggattgaagtcatcggacatcgggacacattgggaaaacccgcattgtgggcaacaacggcaacgtttctcagcgatttgcgcttggacggtctggaagaacttccgccgctgaccgaactgggcgaactggttttacccgatttaatggaaatgccgcctacggatgaagaagagccggaagccgtaccgtccgataccctgcccaactga

SEQ ID NO: 61145 - DNA, 1860 bp, Neisseria meningitidis
atgccagaataccgctccaaaacctccacccacggccgcaatatggcgggcgcacgtgcattgtggcgcgccaccggcgtgatggaaaccgacttcggcaagcccatcatcgccgttgccaactccttcacccaattcgtgcccggccatgtccacctgcacaatatgggccagctggttgcccgcgaaatcgaaaaagccggcgccatcgccaaagaattcaacaccatcgccatcgacgacggcatcgctatgggacacagcggcatgctgtactccctgcccagccgcgatttgattgccgactccatcgaatatatggtcaatgcccactgcgccgacgcgctggtgtgcatttccaactgcgacaaaatcaccccgggcatgctgattgccgcgatgcgcctgaacatcccgaccatcttcgtttccggcggtccgatggaagcaggtaaagttatcggcgtggcaaacatccagcccgaacgccgtttggacttgattgacgcgatgattgaatcggcggacgacaatgtcagcaaccggcaagttgaagaagtcgaacaaaacgcctgcccgacctgcggctcgtgttcgggtatgtttacggcaaactcgatgaactgcctgaccgaagcactcggtctgtccctacccggcaacggttcgtatttggcgacccacgccggccgcaaagaattgttcctcgaagccggccgtatgattgtcgaaatcaccaaacgctattacgagcaaaacgatgaaaccgtgttaccgcgcagcattgccaccaaaaaagcgtttgaaaacgctatgacgatggatattgcgatgggcggcagcaccaacactattttgcatttactcgccgttgccaacgaagcgggcgtggatttcaaaatggcagacatcgaccgcttaagccgcgttgtgccctgcatctgcaaaaccgcacccaacaaccacgactactatatggaagacgtgcaccgagccggcggcatcttcgccatcctgaaagaattggacaaagcgggcaagctgcacaccgacgtgcacactatccacgcaccgacgctgaaagacgcgattgaaaaatgggacgtaaccaaccctgaaaacacccgcgccatcgaacgcttcaaagccgcgcccggcggcgtacgcaccacccaagcgttctcgcaaaaccgtatgtggaaaacactcgacctcgaccgcgaaaaaggctgtatccgcgacgtggcacacgcctactcgcaagacggcggtttggcggtcttgttcggcaacatcgccgaacgcggctgcgtggtaaaaaccgcaggcgtggacgagagcatcctcaaattcaccggccgcgcgcgcgtgtttgaaagccaggaagccgctgtcgaaggcattttgggcaaccaaatcgtcgccggcgacatcgtcatcatccgctacgaaggcccgaaaggcggcccgggcatgcaggaaatgctgtatccgacttcctacctgaaatctaaaggcctcggcaaagcctgcgctctcttaaccgacggacgcttctccggcggcacatcaggtttgtccatcggacacgcctcgcccgaagcggcggaaggtggcgcgatcggtttggtacacgaaggcgataccgtcgaaatcgacatccccaaccgcagcatccaccttgtcatttccgatgaagagcttgccgcgcgccgtgccgaaatggaagcacgcggcagcaaagcgtggaaaccggaaaaccgcgaccgctacgtctccgccgcattaagggcttacggcgcgatggcgacttccgccgacaaaggcgcggtgcgcgacgtagcgcaaatcgaaagataa

SEQ ID NO: 61146 - DNA, 1410 bp, Neisseria meningitidis; identical to SEQ ID NO: 55247

SEQ ID NO: 61147 - DNA, 501 bp, Neisseria meningitidis
atggcggatttgcagaaaacttttcaaacttcgttccgtgatgcgatggcatcctgtgcggcaggcgttcatgtcatcacgacagacggtgcggcagggcgttacggcattacaatgacggcggtcgcgccggtaacggacgagccgccgaccgtgatgctgtgcatcaaccggagtgcgcgaatcattccgatcctgtcggaaaacggcagcctctgcatcaatatgctggcggacgaacatcaggatgttgccgaacattttgccgggctgaccggcctgtcgcccgaagagcggtttgcctaccatatttggcatcgcggcaaaacgggacaacttgaaatagaaggcgcgttggcgcacctgcacgggcatattgtcggcaaacatgaaatcggcacgcattttgtgttttacgtcaggctcgacgaaatcaaaaactgcgggtgcaaacgccccgcgctgctgtatttcagacggcagtttagatttttagactga

SEQ ID NO: 61148 - DNA, 579 bp, Neisseria meningitidis
atgtcaaacaaaatcaaaatgcttgtcggattgggcaaccccggcaaagaatacgaacaaacccgacacaatgcgggtttttggttcctcgacgaactggcgtggaaatggaaggcttcatttaaagaagaaaaaaaattcttcggcgaagtcgcccgtgccgccctgcccgacggcgacgtttggctgctcaaacctgccacgttcatgaaccgttccggacaggcagttgccgcgcttgcacagttctacaaaatcaaacccgaagaaatcctcgtcgtccacgacgaactcgacattccctgcggacggattaaattcaaactcggcggcggcaacggcggacacaacggcttgaaagacattcaggcaaaactcggcacggcagactattaccgcctgcgcctcggtatcgaccacccgggcgaccgcaacctcgtcgtcggctatgtcctgaacaaacccagtacggaacaccgccgacagattgacgatgccgtcgccaaatccctgcaagccatacccgacatccttgccggcaaatgggaagaagcaacccgcttcctgcacagcaaatga

SEQ ID NO: 61149 - DNA, 147 bp, Neisseria meningitidis; identical to SEQ ID NO: 42194

SEQ ID NO: 61150 - DNA, 237 bp, Neisseria meningitidis; identical to SEQ ID NO: 39540

SEQ ID NO: 61151 - DNA, 843 bp, Neisseria meningitidis; identical to SEQ ID NO: 55758

SEQ ID NO: 61152 - DNA, 510 bp, Neisseria meningitidis; identical to SEQ ID NO: 55571

SEQ ID NO: 61153 - DNA, 588 bp, Neisseria meningitidis; identical to SEQ ID NO: 38394

SEQ ID NO: 61154 - DNA, 633 bp, Neisseria meningitidis; identical to SEQ ID NO: 50523

SEQ ID NO: 61155 - DNA, 1092 bp, Neisseria meningitidis
atgagtttgaaatgcggcatcgtcggtttgcccaacgtcggcaaatccaccctctttaacgcgctgacccaatcgggtatcgaagcggcaaactatcctttctgtaccatcgaacccaacgtcggcatcgtcgaagtgcccgacccgcgtatggctgaattggcaaaaatcgtcaatccgcaaaaaatgcagcctgccatcgtcgaatttgtcgatatcgccggtttggttgcaggcgcgagcaaaggcgaaggtctgggcaaccagttccttgccaacatccgcgagactgacgcgattgttaacgtcgtacgctgctttgacgacgacaacatcgtccacgttgcaggccgcgtcgatccgattgccgacatcgaaaccatcggtacagagttggcgcttgccgacttggcaagtgtggaaaaagccatcgtccgcgaagaaaaacgcgcccgttcaggcgacaaagacgcgcaaaagctggtcgatttgtgcaaaaaactgctgccgcatctagacgaaggcaaacccgtgcgttccttcggtttggacgcggaagaacgcgcgatgctcaaaccgctgttcctgctgaccgccaaaccggcgatgtatgtgggcaacgtcgccgaagacggttttgaaaacaatccgcacctcgaacgcctgaaagaattggcggcaaaagaaaacgcccccgtcgtcgccgtttgcgccgcaatggaaagcgaaatcgccgaattggaagacgacgaaaaagccgagttcctcgccgaaatgggcttggaagaaccgggcctgaaccgcctgatccgcgcgggctacgacctcttaggcctgcaaacctacttcaccgccggcgtgaaagaagtccgcgcttggaccatccacaaaggcgacaccgccccgcaagccgccggcgtgattcacaccgactttgaacgtggcttcatccgcgcccaagttatctcctacgaagacttcatcgctttaggcggcgaagccaaagccaaagaagccggcaaaatgcgtgtggaaggcaaagaatacgtcgtgcaggatggggatgtgatgcactttttgtttaacgtgtaa

SEQ ID NO: 61156 - DNA, 324 bp, Neisseria meningitidis; identical to SEQ ID NO: 56020

SEQ ID NO: 61157 - DNA, 1632 bp, Neisseria meningitidis
atgaattggttaaacttgcgggcaatagtgccttcagacaaacaaaatatgccgaacaaaaagaaaaaagccgcctttgcgcgtgctgcaacggagaacggtgtgccggacgtgtccaacatcaaaaattcatatgatgatttgatgtatgaatccaaagcattttcccaaaccgccatcaacgccttggaggctcgcgcccgcatgatgggtttgcagcccgcgcccgccgccaatgccaaggtcttggagctgggctgttcgatgggcggcaacatcatcacgcaggctctttattacccggatgcggaatttgtcggtatcgacttgtccggcaggcaggttgcgcagggcaacgccatcattgaaaaaatgggcttgaaaaatgtgcgtctggaagaaaaagatattttgaccgtcgatgagtcattcgggaagtttgactatatcatcgtccacggcatttggtcgtgggtgcctgacgcagttaaagacaaaattttttcgatttgccggaacaacttgaccgaacacggcattgcctatatttcatacaatgtttaccccggctggaaacggcaggagcagttgcgcgaaattatgtactttgccggcagggatgtgcttgaagaacccttggaagcacggacgcggaaaggcttggacgcgctcaaggcgctggcggaaattttagaaaacgacaagggcttggacggcggcggcaaacttccggcgattcaaaaaatattgaatcataatttttattacatcgcacacgaatatatggaggcgtttaacgacccgatttacgtcaacggcttcatcgaatgggcaaaccgccaccggctggcgtatatcggggatgccgatttgcacgcgtcttttgtttcttggatggcggagcatacgcgggagcggattctggcattggcagggggcgattatattgccaaagaattttacagcgatattttatccgaccgccaattccgccgttcgcttttatgccgtgaggaagtcggggatactgtcaggcgtgacgagtcggttgccgtcgaagtgatagaaagtttgaatttccgcccggcaagaggggaaacaatcaactttgatgaaaacgataccctgctttcgggcatacgcgatgtgatgaaaaccggagagccgtttaaaacggaagatgttgcggaaaatctcgcccgccgatttcccggtttgacattcgaccgtatgaaaatcaattcccagcttttattgcaaaccattctcgggcgtttttctgtttcatcagacaatgcgggcaaacaattttttgaagaccataaaacctatgtgccggcgcgttttacagattatgccgccgcctttgtggaacacggcgcggaagcgtttgtccggcctgccaaccgttacaacgaaagcaccccctcattcggatatgggcatttgtacattatgcggcaattgtcgcggccgacgagcaaacaggcattgattgaaacggttgccgaaaacttgaacatcgtcagcaccacgcccgacggtttgacattccatccgcctgccgaagtgtatgtggaagaaatattggcagacttggcagacaggcattttctcgtttcggcggattga

SEQ ID NO: 61158 - DNA, 279 bp, Neisseria meningitidis
ttgcttttcccttgtgcaatccttgccgcctgcgcccgaaacataccggcaagccccgccgtttcaaattgcgcgcatcttcaaaaccgcaccatcctgtattttgacgcacacggcaaacccgccgacggcgcagtaaagggcggattttacaaaattatcgaaatacagggtgcaaactgcatccttattcaagactttaacagcacgggcaatgccctcggcggatcctatgtgccggactgccgcaaatcatcccttttcccgaaaaatatttga

SEQ ID NO: 61159 - DNA, 345 bp, Neisseria meningitidis; identical to SEQ ID NO: 54259

SEQ ID NO: 61160 - DNA, 1272 bp, Neisseria meningitidis
atgttccaatggctttatgatgcattgtggctgcttgcgccgatatggatacggcgttatttggacaaacgctccggaagtgcccctgcatatcgggcgcatcgggacgagcgtttcggcaagccgtatccgaatcccgttaccggcgcggtttggatacacgccgtttcggtcggagaaacgcgtgccgcccagcccttgatacgcgagttgcggcagcgttttcccgatgcgccgctgctgatgacgcagatgaccccgacgggacgggaaaccgcgcaagttctgtttcccgatgcgcaatgccgctatcttccgtatgacaaaaaaacgtgggtacggcagtttttgcgcgaacaccgcccgatgttcggcattttgatggaaaccgaaatctggcccaatctgatgaaggaatgccggcgcgcgggtgtgccgctgtttttggcgaatgcgcggctgtcggaaaaatcgctgaacggttatctgaaagtccgccgcctgatccgtcctgccgccgcttcgctgacgggctgtctggcacagacggaggcggatgcggcgcggttggcgaaattgggcgcggcatccgtgcaggtgtgcggcaataccaaatacgacctgatgccgtcggaacagatgaaaacgctggcggggcagtttgaaaaacgcatcggaggccggccggttgccgtgtgcggcagcacgcgcgtttatcggggcgaagacgaggcggaaaaactgctggcggcgtggcaacaatatcgcggcgatgcgctgctggtcgtcgtgccgcgccatcccgagcattttcagacggtatttgaaacggcacaacgcttcgggtttaaggttcagcggcgcagcgacggtttgccggtcgaacctgatacgcaggtgtggataggcgacagtatgggcgagctgtatgcgtattacctgtgcgccgatgtcgcttttgtcggcggcagtctggtcgattcgggctgtcagaacattatcgaaccgctttcctgcggcgttccgacgatattcggcttttcaacctacaatttttccgaagcctgccggcacgccttggcatcgggggcggcggttcgggttgagtcggcggacgcgtggcgggaagccgttgaaaaaaccttatcgtccgaggggggcggaatgcagatgcaggcgcacgtggacggctttatcgcacaacatcgcggagcgggcgcgagaatcgccgaggcggtacgggaagcggtatgcggacatcggggacgatag

SEQ ID NO: 61161 - DNA, 591 bp, Neisseria meningitidis; identical to SEQ ID NO: 37807

SEQ ID NO: 61162 - DNA, 660 bp, Neisseria meningitidis
atggatacttggcacgatgcactgggcaacgaaaaacggcaaccgtattttcaggaaattttaaatgcagtcaggcaggaacgtttgtcggggcaaatcatctatccgccggcggaggatgtgttcaacgcattccgcctgacagcgtttgaccgagtcaaagtcgtcattctcggacaagacccgtatcacggggcagggcaggcgcacggtttggcattttccgtcaggcagggtgtccgcataccgccgtctttactcaatatctacaaagagttggaaaccgacatcaacggtttttccattcccgatcacggctgcctgacggcttgggcggagcagggcgtattgcttctgaacacggttttgacggtgcgtgcaggacaggcgcattcgcacgcccttttaggctgggaacgctttaccgataccgtcatcaggcagcttgcggcgcaccgcaagcaccttgtcttcatgttgtggggtgggtatgcacaacaaaaagggaggctgatagacagtcaaaatcatttgatattgaccgcaccgcatccgtctcctctgtcggcatatcgcggttttttcggctgccgccatttttcacaggcaaacagctatttgagtcaacacggtatcgaaccgataaactggaagctatga

SEQ ID NO: 61163 - DNA, 495 bp, Neisseria meningitidis
atgtcttcatctgtttcaagtaaaacgcgctattgggtattggcacttgccgccatcgtgctggaccagtggtcgaagtgggcggtgctgtcgtcgtttcagtatcgggaacgcgtcaatgtcattccttcctttttcgatctgacgctggtgtacaacccgggtgcggcgttcagcttccttgccgatcagggcggctggcaaaaatacttttttttggtgctggcggtggcggtgagcgcgtatttggtacgcgccatcttgcgcgatgagtttgcagccctcggcaaaacgggtgcggcgatgattatcggcggtgcgttaggcaatgtcatcgatcgcctgatacacggtcatgtcgtcgatttcttattgttttattggcaaaattggttttatcccgcctttaatattgccgacagttttatctgcgtcggcgcggtattggcagtgcttgacaatatcgtccatcgcaaagatggcaaaaaaacgtga

SEQ ID NO: 61164 - DNA, 438 bp, Neisseria meningitidis; identical to SEQ ID NO: 43498

SEQ ID NO: 61165 - DNA, 1011 bp, Neisseria meningitidis
atgaacgacaacacgcaaacccttcctccccgccgcctgtccgtcgccccgatgttggactggacggacaggcactaccgttatatggcgcgccagattacccgcaatacttggctgtacagcgaaatggtcaacgccggcgcgattgtttacggcgacaaagaccgctttttgatgtttaacgaaggcgagcagcccgtcgccctgcaactgggcggcagcgacccgtccgatttggcgaaagccgccaaagccgccgaagaatacggctacaacgaggtcaacctcaactgcggctgccccagtccgcgcgtccagaaaggcgcgttcggcgcgtgtctgatgaacgaagtcgggctggttgccgactgcctcaacgccatgcaggatgcggtcaagattcccgttaccgtcaaacaccgcatcggtgtggacaggcagaccgaataccaaaccgttgccgatttcgtcggcacgctgcgcgacaaaaccgcctgcaaaacctttatcgtccacgcacgtaacgcgtggctggacggtctttcacccaaagaaaaccgcgacgttccgcccttgaaatacgattatgtttaccgcctcaagcaagagtttcccgggctggaaatcatcatcaacggcggcatcacgaccaatgaggaaatcgcgcaacacctgcaacacgttgacggcgtgatggtcgggcgcgaggcgtaccacaacccgatggtgatgcgcgaatgggacaggctgttttacggcgatacccgcagcccgattgaatacgccgatttggtgcagcgtctctacacatacagtcaagcccaaatccaagccggacgcggcacaatcttgcgccacatcgtccgccacagcctcgggctgatgcacggtctgaaaaatgcccgcacttggcggcgtatgctttccgatgcaacgctcttgaaagacaacgacggcggcctgattctcgaagcgtggaaagaagtcgaacgggcaaatatgcgcgaatag

SEQ ID NO: 61166 - DNA, 507 bp, Neisseria meningitidis
atgtttgaacaagaagacgaatgggtcagcaaaacccaaatgaaaaagcagatgaacggtttgcaggatttgggtatggagctgaccaagctctcaagcgacacgttgaaaaaaatcggcttggacgaagatttgtacgaagccgtcgttacctataaaaaaatcacatccaacggcgcgctcaagcggcaggcgcaatttatcggcagactgatgcgcgataccgatcccgcgcccatcgaggcatttcttgccaagctgcgcggcgacgatgcggtgcacaatgcctttttgcaacgcgtggaacaggcgcgcgtacggctgttggcagacgacggcgcgttgacgcagtttatgtcggattttccgcatgcggacgcgggcaagctgaggacgctcgtccgcaacaccaaaaaagagcaggagcaaaacaaaccgccgaaaaacttccgcgcgctgtttcaagaattgaaaaccgtgatggaaaacggggacgcggaaatttag

SEQ ID NO: 61167 - DNA, 738 bp, Neisseria meningitidis
atgggcggacagaaaacgcatttcggattcagtacggtcaacgaagatgagaaagccggaaaagtggcggaagtgttccactccgtcgccaaaaactacgacattatgaacgatgtgatgtcggcagggctgcacagggtgtggaagcatttcaccatcaacacggcgcacctgaaaaaaggcgataaagtgttggacattgccggcggtacgggcgatttgtcgcgcggttgggcgaaacgggtcggcaaggaaggcgaggtttggctgaccgatattaattcctctatgctgaccgtcgggcgcgaccgtcttttgaacgaaggcatgattttgcccgtgtcgcttgccgatgcggaaaaactgcctttccctgacaattatttcaacttggtttccgtggcgttcggtttgcggaatatgacgcataaagatgccgcgctgaaagagatgtaccgtgttttgaaacccggcgggacattgctggtattggagttttccaaaatctacaaacctttggaaggcgcgtatgatttctattcgttcaagctgctgccggtcatgggcaaactgattgccaaagatgcggagagttatcaatatctcgccgaatccatccgtatgcaccccgatcaggaaactttgaaacagatgatgctggatgcgggctttgacagcgtggattatcacaatatgagtgcgggcatcgtcgcgctgcataagggcgtgaaattttaa

SEQ ID NO: 61168 - DNA, 783 bp, Neisseria meningitidis
atgcaggaaacccatttttccatactgctggacgaactggcggcaaaacaggaggcagccatcgccccccacctgcttgccgacggaaccaaggtatggatacgcaaagcaggcaggcacaatgcgcgatggcgttacgcgctgctcggtatggttgcccgatatttgaaactgggggtgttgaagccggttcccagcctcggcggcgagcctgccattgcaaccgaatcaaaacgcctgtacgaattgcgcgcggcggggatagccgttcccgaattgctcgccgtcaggaaaaatgcccttatgttcggaaatttggaaggtatcccgctcgatacgcaaatccgccaagaagccgaagccggaaaggcggacgcttggcttgccggtttggaagccattgcacgcgtgcataaaaaacagcagttcctcagtcaggcgtttgcgcggaatatgatgtcggacgaggaaaacatcagctttttggattttgaagacgacccttccgaagtcctgaccatagcgcaatgccaagcccgcgattggctctgctacatccattcgaccgcgctgatattgaaaaacggcggactgctggaagcggctgcggaaaaatggggcggcgtactgtctgagcagcctgccgaaatacaaaggctgattgccgccaccgtcaaaccgatcctcccgatacgcaggctggaacacccccgctggggacgggacgcgctcaggctggcagcctcgatttccctgatttcccttgccgatataccgccataa

SEQ ID NO: 61169 - DNA, 1167 bp, Neisseria meningitidis
atgaatttacacgagtatcaggctaaagaactgctggctagctacggtttgcccgtacaaggcggtattttggcacacaacggcgaagaagccgctgcagcttacgacaaattgggcggcaaattcgctgttgtcaaagcacaagtacatgccggcggccgcggtaaagcgggcggcgtaaaagtcgttaaaagccgcgaagaagctaaagaagtggctgaaagcctgattggcaccaacttggtaacttaccaaaccgatgccaacggccaacctgtcaacagcgttttggtttgtgaagatatgtatccggttcaaaccgagctgtacttgggcgcagtggttgaccgttctacccgccgcgttacattcatggcttctaccgaaggtggcgtagaaatcgaaaaagttgctgccgaaactccagaaaaaatcttcaaagtaaccgttgatccgctggtcggcctgcaaccttgccaagctcgcgaagttgccttccaactgggcttgaaagacaaacaaatcaacgagttcgtcaaactgatgaccggcgcgtacaaagcgtttgtcgaaaacgacttcgccctgtttgaagtcaacccgctggcagttcgcgaaaacggcgcgctcgcctgcgtggacggcaaaatcggcatcgacagcaacgcgctctaccgcctgccaaaaatcgctgaattgcgcgacaaatctcaagaaaacgaacgtgaactgaaagcttctgaattcgacctgaactatgttgccctggaaggcaacatcggctgtatggttaacggtgccggtttggcgatggccaccatggacatcatcaaactcaaaggcggtcaacctgccaacttcttggacgttggcggcggcgcaaccaaagaccgcgtggttgaagcgttcaaactgattttggaagacaaatccgttaaaggcgtattgatcaacatcttcggcggtatcgtacgttgcgacatgattgcggaagccatcgtggcagccgttaaagaaatcaacgtcgacgttcctgtcgttgttcgtttggaaggcaacaacgccgaactcggcgcgaaaatcctgaacgaatcaggtctgaaactgacttctgcagacggcctgaatgacgcagccgaaaaaattgttgcagccgtaaacgcctaa

SEQ ID NO: 61170 - DNA, 1125 bp, Neisseria meningitidis
atgcagaatacttcctttgataatgaatccgattatagcgacgattcagactttgcgtcagcttccgaaactgaaaaccgtatcggtctgaccgttccgctcgagcttgccggcgggcggttggatgcggtgttggcgaaacttctgcccgactactcgcgcagccgcctgacatcatggattaaagaaggcgcggttattgtaaacgataaaccttcgcaacccaaagacaaaatgataggcggcgagcaaatttgtgtaaccgtccgtccgagtgaggaaaatctggcgtttgttccagagcctatggctttggatattgtttacgaagacgataccgtcatcgtcgtcaacaaaccggccggactggtggtgcatccggcggcgggcaactggacggggacgctgctcaacggcctgttggcgcattgccccgagctgtcccaaattccgcgcgcgggcatcgtacaccgtttggacaaagaaaccagcgggctgatggtggttgccaaaaccctgtcggcgcaaaattccctcgtgaggcagcttcaagaacgcacggtcaaacgcatctaccgcgccgtcgccaacggcatcgtcccctttgacggtaaaatcgaaacccaaatcggacgcgatccgcacaaccgcctgaaaatggcagtcgtcaaattcggcggcaaaccagccgttacccacgtcaaagtgttggaacgctatcttgcccacagctatatcgaatgctcgctcgaaacaggcaggacgcaccaaatccgcgtccatatgcgtgaggccaaccatccgcttgccggcgacccggtttacggcaacccgcgccatccgtgcggcgacacggtgaaagaagccgttaaaagtttgggtgcgcgtcaggcattgcacgcctaccgcttgagttttacccatccggaaagcggcgaaaccgtttcgtttgaggcaccgattccggacgacatatatcatttattgtctgtcctccgtcttgaagccggtttggattcgtctttgagcaatgaagaggaatggcaggacaaattcggcgcggacgacgatgacgattggaacgaagacgactacgatgtcgaagtggtttatgtaagggagtga

SEQ ID NO: 61171 - DNA, 1578 bp, Neisseria meningitidis
atgaataaatttttcaaacgcctgttcgacatcatcgcctccgcatcggggctgattgtcctctcacccgttttcctgattttggcgtacctcatccgcaagaatctaggttcgcccgtcttcttcattcaagaacgccccggaaaggacggaaaaccttttaaaatggtcaaattccgttccatgcgcgacgcgcttgattcagacggcattccgctgcccgacagcgagcggctcacacccttcggcaaaaaactgcgtgccgctagtttggacgaactgcctgaattatggaatgtcttaaaaggcgacatgagcctggtcggcccgcgcccgcttttgacgggctacctgccgctttataacgacttccaaaaccgccgccacgaaatgaaaccgggcattaccggctgggcgcaggtcaacgggcgcaacgcgctttcgtgggacgaaaagttcgcctgcgatgtttggtacaccgacaacttcagcttttggctggatatgaaaatcctgtttttgacagtcaaaaaagtcttgatcaaagaaggcatttcggcggaaggggaagccactatgccttatttcactggaaatcaaactaatgaaaaaaataatatactgattctgtcggcaggtcgccgtgtcgaattggtgcaggacttccaaaccgaagccgcacgtttttcagacggcatcagcgtttttgccactgacctcaacccccgcatgtcttctgcctgccatgtttcggacggttcatttgaagtgccgccgattagtgccgattcatatatcgacagcattttcaatctggcggtacgcgaaaatatcggtttaatcatcccaaccatagacaccgaactgcaaaagctggcagacgagcgcgaacgctttgaagcggcaagtgtccacatcgtcgtttccgattcggacttcatcgcacaatgccgcgacaaacggaaaaccgccaccttgtttgcccgctacggcatacgctcacccgaaatttacgaccgcaagaagttggttttcccttgcttcgccaagccttatgacggcagccgcgccatcggtgcaaaacggattgacacacctgccgacctgacaccggaagtcttggcagacaccaaattaatgttctgtcagtttatcgacatcgaaaataaattttccgagtttaccgtcgatatgtattacgaccgtcaatgccgtctgaaatgcgccatcccgcgaaaacgcttggaagtgcgctccggcgaaatcagcaaaggcgttacctgcaaaaacagcctctaccaaacgctgctggaaaaaatgtcggtattgcagggcgcgcgcggctgtatcacggcgcagttcttctacaacgaagaaaccggcgaattctacggcgtggaaatcaacccccgcttcggcggtggcttcccgctgacgtatgccgcaggcggcaattatccgagccggttgatgcgcgaatacctcggcgacgaagaaatcccgttttcagacgactgggaaaacaacctcattatgttgcgctacgatgccaaggtcttggttcatgaaaacgattaa

SEQ ID NO: 61172 - DNA, 399 bp, Neisseria meningitidis
atgtccaattgctgcaaccgtatccaacctgttctgctttctgttttgcgtatcgtaaccgcctacctatttttgttgcacggtacgtcaaaattcttcgccttccccattgaaatgggcagtggttcgcccggcgggctgatgctgcttgccggtattttggaagtcgtcggcggcattttgctggtgttgggcctgtttgcgcgccctgccgcgtttgttttgtccggccagatggcggttgcctattttatggcgcacgcttccggaaatgctttgtttccgattgccaacggcggcgagtccgcggtgctgttctgcttcgtattcttctatatcgcggcggcgggcggcggcgcgtggtcgctggacaggctgtttttcaagcgtaaagcctga

SEQ ID NO: 61173 - DNA, 2106 bp, Neisseria meningitidis; identical to SEQ ID NO: 54729

SEQ ID NO: 61174 - DNA, 639 bp, Neisseria meningitidis
atgcaaaccgccattatcgattacggtatgggcaacctgcattccgtattgaaatccgtccggacggcggggcagcttgccggaaaaaataccgaaatctttttaagcggcgaccccgaacgcgtgtcccgcgccgacaaagtcatttttcccggtcagggcgcgatgcccgactgtatggcggcattaaaacgagacggtttggacgaggcagtcaaagatgccttaaaaaacaaaccctttttcggaatctgcgtcggcgcgcaacttttattcaaccacagcgaagaaggaaacaccgacggcttgggctggttcggcggcaaagtcagacgctttgagcgcgacctccgcgaccggcagggatgccgtctgaaagtcccgcatatgggctggaacaccgtgcgccaaacccaaaaccacccgctgtttaaagatattccccaaaacacgcgtttttacttcgtccacagctactatttcgaccccgaaaatcccgaaaccatattgggcgaaagcgactacccgtccccgtttgcctgcatcgtcggcaaagacaacgtattcgccacgcaatttcacaccgaaaaaagccacgatgccgggctgacgatgttgaaaaactttttaaactggtaa

SEQ ID NO: 61175 - DNA, 354 bp, Neisseria meningitidis
atgacgggatttaatgatgccgccggcgtggcatccaccgcctccgacatcaaaggcaaatatgttcaaagcgttacagtcgcaaacggcgtcgttaccgcccaaatggcttcaagcggcgtaaacaaagaaatccaaggcagaaaactctccctgtgggccaagcgtcaaaacggttcggtaaaatggttctgcggacagccggttacgcgcaacgccaacaacaccgccaacgacgccgtcaccgccaccgacaagcagatcgacaccaagcacctgccgtcaacctgccgcgacgcagcatctgtcgtttgcatagaaacaccacctacggctttctataaaaatacctaa

SEQ ID NO: 61176 - DNA, 597 bp, Neisseria meningitidis; identical to SEQ ID NO: 43118

SEQ ID NO: 61177 - DNA, 1248 bp, Neisseria meningitidis; identical to SEQ ID NO: 44286

SEQ ID NO: 61178 - DNA, 2364 bp, Neisseria meningitidis; identical to SEQ ID NO: 55339

SEQ ID NO: 61179 - DNA, 384 bp, Neisseria meningitidis; identical to SEQ ID NO: 38324

SEQ ID NO: 61180 - DNA, 483 bp, Neisseria meningitidis; identical to SEQ ID NO: 45182

SEQ ID NO: 61181 - DNA, 384 bp, Neisseria meningitidis; identical to SEQ ID NO: 55227

SEQ ID NO: 61182 - DNA, 246 bp, Neisseria meningitidis; identical to SEQ ID NO: 44126

SEQ ID NO: 61183 - DNA, 1719 bp, Neisseria meningitidis
atgaacctacatcaaaccgtcgaacgcgaagccgccgccgcctttgccgccgcaggcatcgccggcagccccgttgtcttgcagccgaccaaaaatgccgaacacggcgatttccaaatcaacggcgtgatgggtgcggcgaaaaaagccaaacaaaacccgcgcgaactggcgcaaaaggtcgccgacgcattggcgggcaacgccgtcatcgaaagcgcggaagtcgccggacccggctttatcaacctgcgcctgcgtcctgaatttctcgctcaaaacattcatgcggctttgaacgatgcgcgtttcggcatagcgcaaaccgacaaaccgcaaaccgtcgttatcgactattcctcgcccaatctggcaaaagaaatgcacgtcggccatctgcgttccagcatcatcggcgacagcatttcgcgcgtgtcagaatttatgggcaataccgttatccgtcaaaaccacgtcggcgactggggtacgcagtttggcatgttggtcgcttatttggtcgagcagcaaaaagacaatgccgcattcgagctggcggatttggagcagttttaccgcgccgccaaagtgcgctttgacgaagaccccgcctttgccgacaccgcgcgcgaatacgttgtgaagctgcaaggcggcgatgaaaccgttttggcattgtggaaacagtttgtcgatatttcgctctcgcacgcccaagccgtttacgacacgctgggcttgaagctgcgccccgaagacgtggcgggcgaatcgaaatacaacgacgatttgcagcccgtagtcgatgatttggttcaaaaaggtctggcagtcgaagacgacggcgcaaaagtcgtgttcttggacgagtttaaaaacaaagagggcgaacctgccgcatttatcgtgcaaaaacaaggcggcggcttcctttatgcttccaccgacttggcgtgtttgcgctaccgcgtcggcacgcttcatgccgaccgcctgctgtacgtcgtcgaccaccgccaagccctgcacttcgaacaacttttcaccacttcacgcaaagccggctatctgccggaaaacgtcggcgcggcatttgtcggcttcggcacgatgatgggcaaagacggcaaaccgttcaaaacgcgcagcggcgacaccgtaaaactggtcgatctgctgaccgaagccgtcgagcgcgccaccgctttggtgaaagaaaaaaatcccgaattgggtacagacgaagcaggaaaaatcggtaaaaccgtcggcatcggcgcagtcaaatacgccgacttgagcaaaaatcgcaccagcgattatgtgttcgactgggacgccatgctctcgtttgaaggcaacaccgccccctatctgcaatacgcctacacccgcgtgcaaagcgtgttccgcaaagcaggcgaatgggatgcaaatgcgccaaccgttttgaccgaaccgctggaaaaacagcttgccgccgagctgctgaaatttgaagacgtactgcaaagcgtggcggacacggcgtatccgcactacctcgccgcctacctctatcaaattgcgaccctgttcagccgcttctacgaagcctgtccgatactcaaagccgaaggcgcaagccgcaacagccgcctgcaactggcaaaactcaccggcgacacgctgaaacaaggcttggatttgctgggcatcgatgtgttggacgtaatgtaa

SEQ ID NO: 61184 - DNA, 990 bp, Neisseria meningitidis; identical to SEQ ID NO: 55944

SEQ ID NO: 61185 - DNA, 357 bp, Neisseria meningitidis; identical to SEQ ID NO: 55054

SEQ ID NO: 61186 - DNA, 858 bp, Neisseria meningitidis; identical to SEQ ID NO: 54973

SEQ ID NO: 61187 - DNA, 321 bp, Neisseria meningitidis; identical to SEQ ID NO: 38688

SEQ ID NO: 61188 - DNA, 828 bp, Neisseria meningitidis; identical to SEQ ID NO: 48305

SEQ ID NO: 61189 - DNA, 1773 bp, Neisseria meningitidis
atgattccatccgacttcattgacgaacttctggccaaaaccgatattgtcgacatcatcgacgaacaggttccgctgaaaaaaggcggggcgaactatatggcgtgttgcccgttccacaaggaaaaaacgccgtcgttttcggtcagtccgaccaagcagttttaccactgtttcagttgcggggcgcacggttcggcgattggttttgtgatggaacatcaggggctgtcgtttccggaggcagtgcagttccttgccgaccgcgtgggtatgattgtgcctaaagtgcgcgggcagaacgataatcccgaagtccgtgccgaacgtaagaaaaagcagcagacgctggaagaaacgacagcggaggcggctgatttttatgcgcaacagttgaaattcaatccgacggcgaaggcttatttggacaagcgcggcttgagcgcggaagtcatcgcgcattatggtttgggctacgcgcccgacggctggcagcctttggcgcaagtattccaaccgtacccgaataccgcgttggtggatacgggtatggtgattgacaatgaggggcggtattacgaccgattccgtcatcggattatgttccccatccgcaatccgcgcgggcaggtcatcggtttcggcggcagggtgctggacgactccaaacccaaatatctaaactctcccgatacgcctttgtttgataaggggaaaaacctttacggcttgtatgaagggcgtgctgctgtcaaggaagtggggcggattctggtggtcgaaggctatatggacgtggtcgcgctggcacagttcggcgtgggctacggcgtggcggccttgggcacggcaacaacagcggaacacgtcaaaatcctgatgcgtcaggcggacagtatttatttctgtttcgacggcgacagcgcggggcgcaaagcggcttggcgcgcgctggaaaacgcgctgccgcagttgaaggacgacaaatcgctgcattttttgttcctgccggaagaacacgaccccgacagttacatccgtgcctacggcaaagcgcaatttgaagacgcgcttctgaatcaaagcaagcctttgtcggagtatttctgggaacacctttcagacggcattcatctcaatacgcaggaaggcaaggcggaattggtgaaaaccagttcgccgcttttggcgcagattaccgcgccggcattggcttatttgttaaaacaacggcttagcgaactggtcggcatcgaccccgacaacctcgcgcaactgctgggacaggaagcgccgaagcggcacgtcaaacaaaaaaactacaaactgcccccgatttccgtcaaacagcccgttatgccgacattggtgcaacggcaaatccgcagcctcttgataaatccggattgggctgcatatatagacctgcccgattatctggcgttggacggcgatttcgcctgccttgccaacctcgccgaaaccattaaaaaccatccttccgtgccggcaaccgcacaggttttggaacatatgcgcggctcgccttacgaagaaacgataacccgaatcttccattcaacgcaccaatcggaagaaatgaacagcagcagtgaagaagattgcgagaatttccaaatcggcatgaaaaaactgctcaatgagttaaaatacagccaaatcgaaacattaaaacaaaaaagcctgcaatccggcttaaatgaaagcgagaaaaaacttttgctgtcgctgctgaccgcaaaacaaaattga

SEQ ID NO: 61190 - DNA, 186 bp, Neisseria meningitidis; identical to SEQ ID NO: 38793

SEQ ID NO: 61191 - DNA, 816 bp, Neisseria meningitidis
gtggcaaaaattattgtagtaacttcaggtaagggcggtgtcggtaaaacgactaccagtgccagtattgcgacaggtttggcattacgcggatataaaactgcggtaattgattttgatgtgggtttgcgtaacctcgacctcattatgggttgcgagcgtcgtgtcgtttatgacctgatcaatgtcattcagggggaggcgacgctcaaccaggctttgattaaagataaaaattgtgaaaacctgtttattttgccggcttcccagactcgggataaagacgctttgacacgcgagggagtagaaaaagtgatgcaggagctgtccggcaagaaaatgggctttgagtatattatttgcgactctcctgccggtattgagcagggtgcattgatggcgttgtattttgctgatgaagccattgtaacgaccaatcctgaggtttccagtgtgcgtgactccgacaggattttgggaattttgcaaagcaaatcccataaggcagagcaaggcggttcggttaaagaacatctgttgattacgcgttattctcccgaacgtgtggcaaaaggcgaaatgctgtctgtacaggatatttgcgatattctgcatatccctttgctgggtgtgattcctgaatcccaaaacgtcttgcaggcatccaattccggagaaccggtcatccatcaggacagcgtggcggcttccgaggcatataaggacgttattgcccgtcttttgggcgagaaccgtgaaatgcgcttcttggaagctgagaaaaaaagcttcttcaaacgtctgtttggaggataa

SEQ ID NO: 61192 - DNA, 1374 bp, Neisseria meningitidis; identical to SEQ ID NO: 38214

SEQ ID NO: 61193 - DNA, 579 bp, Neisseria meningitidis; identical to SEQ ID NO: 54434

SEQ ID NO: 61194 - DNA, 492 bp, Neisseria meningitidis
atgaaataccgtcgtttttaccgcaatggcggcacttacttttttacggttgtaaccaataaacggcagaagattttgaccgatgatgcggtgcgtttggctttacggcaggcggtaatggcggtgcgcgaacggtatccgtttgaaattttggcatgggtgttgatgcccgatcatctgcataccatatggcggctgccggacaatgattctgcttattcggaacgctggcggcaaatcaagcggcacagccaatatttaatcggcggcaatctcaggctttggcaaaaacgcttttgggaatatactatccgcgatgaggccgattttgcctggcattttgattatctgcatttcaatccggtcaaacatggctatgtaggacaaatttccgattgggggttttctacgtttcaccgttatgtcaaacagggtatttatccgcataattggggtggcggcaatgcggacttttctattggatacgattga

SEQ ID NO: 61195 - DNA, 456 bp, Neisseria meningitidis
atgaaaaaaccgaaaatcctttttgtctgcctcggcaacatctgccgttcgccgatggcggaatacattttgcgccgccgcgccgccgaagcgggcattccccttgaagcggacagcgcggggacatcgggctggcacgacggcgaagatatgcaccgcgagacggcaaagatattgaaaaaacacggtatcgatgcttcaggctttaccagccgcaaaatctgccaaagcgatgcggcggcgtttgactgcatcatcgcgatggacggcaagaatttgtccgaattggaaagaaccttcggcaggcggccggaaaaaatattcaagctgaccgacctgatacccgaaagcggttacgaccatgtccccgatccgtggtatacgggcgattttgaagaaaccttcaggcttgcggatgcgggctgtcgggcattgttggaaaagatttccaaataa

SEQ ID NO: 61196 - DNA, 1272 bp, Neisseria meningitidis; identical to SEQ ID NO: 55073

SEQ ID NO: 61197 - DNA, 1473 bp, Neisseria meningitidis; identical to SEQ ID NO: 54513

SEQ ID NO: 61198 - DNA, 306 bp, Neisseria meningitidis; identical to SEQ ID NO: 54230

SEQ ID NO: 61199 - DNA, 783 bp, Neisseria meningitidis
atgaccgacatcctcaataaaatccttgccaccaaagcacaggaagttgccgctcaaaaagccgccgtcaacgccgaacacatccgcgcacttgccgcagaagccgcgcccgtccgcagcttcatcgattcgatacgcggcaaacaccgcctaaacctgcccgccgtcatagccgaaatcaaaaaggcaagcccgagcaaagggttaatccgtccggacttccgccctgccgagattgcacgcgcctatgaaaacgccggagcggcgtgtttgtccgtactgaccgacgaaccctatttccaaggttcgcccgaatacctcaaacaggcgcgcgaagccgtatcgctgcccgtgctgcgcaaagacttcatcatcgacgaataccaggtttatcaggcgcgcgcatggggggcggatgccgtcctgctgattgccgcagcactggaacaggaacaattggaacgctttgaagcggtggcgcacgaattgggcatgaccgtcctgctcgagctgcacgatgaaaccgaattggaaaaatgccgcaacctgaccacgccgttgtggggcgtaaacaaccgcaacctgaggacttttgaagtctccctcgaccaaaccctgtcgctgctgcccgcgctggaaggcaaaaccgtcgtaaccgaaagcggcattacaggcaaggcggatgtggaatttatgcaatcgcgcggtgtgcacaccttcctgatcggcgaaacgttcatgcgtgccggcgatattgaggcggaagtgggcaaactcttctaa

SEQ ID NO: 61200 - DNA, 621 bp, Neisseria meningitidis; identical to SEQ ID NO: 54243

SEQ ID NO: 61201 - DNA, 198 bp, Neisseria meningitidis; identical to SEQ ID NO: 36305

SEQ ID NO: 61202 - DNA, 1077 bp, Neisseria meningitidis; identical to SEQ ID NO: 54444

SEQ ID NO: 61203 - DNA, 999 bp, Neisseria meningitidis
atgtccgaaaacaaacaaaacgaagtcctgagcggttacgaacaactcaaacggcgcaaccgccgccgcctcgtaacggcaagttgcctggttgccgcctcctgcatcctgctggcagccgccctcagttccggccctgccgaacagactgccggcgaaacaagcggcgtagaaaacaaagcggcaggtgcggcacaaacccctgccttgaaatccgccgccgacaaaccgcaggacttggcaggcgaagacaagccttctgccgccgacagcgaaatcagcgagcctgaaaacgtaggcgcgccgctggtgctgattaacgaccgcctcgaagacagcaacatcaaaggtttggaagcatccgagaaactgcaacaggcagaaaccgccaaaaccgcaccgaagcaggcaaaacaacgcgctgccgaaaaagtgccggcaactgccgacagtacggatacggtagcggttgaaaaaccgaaacgcactgccgaaacaaaaccgcaaaaagcggaacgcactgccaaagccaagcccaaagccaaagaaaccaaaaccgccgaaaaagttgccgacaaaccgaaaactgccgccgaaaaaaccaaaccggatacggcaaaatccgacagtgcggtaaaagaagcgaaaaaagccgacaaggctgaaagcaaaaaaacagccgaaaaagaccgttcggacggcaaaaaacacgaaacggcacaaaaaaccgacaaagcggacaagaccaaaaccgccgagaaggaaaaatccggtaaaaaagccgccattcaggcaggttatgccgaaaaagaacgcgccttaagcctccagcgcaaaatgaaggcggcgggtatcgattcgaccatcaccgaaattatgaccgacaacggcaaagtttaccgcgtcaaatcaagcaactataaaaacgcaagggatgccgaacgcgatttgaacaaactgcgcgtgcacggcatcgccggtcaggtaacgaatgaataa

SEQ ID NO: 61204 - DNA, 1431 bp, Neisseria meningitidis; identical to SEQ ID NO: 55213

SEQ ID NO: 61205 - DNA, 1293 bp, Neisseria meningitidis
atgcagttttcggcattcggcgaaaaattcacgcaacacagcggcatcctccaactgatggacgacctcggcgacgcgctcaaaagcgacaagcccgtcaacatgctcggcggcggcaacccggcgcgcattccggaaatcgatcgggcgtttgccgacatattctccaaactggcggcagaacacgccgtcgaaaacatcggcaactactccaatcctcaaggagatgccgcgctgattgacgcgctaaccgccttcctcaaccgcgaatacggctggaacctgaccgccgacaatatcgcgctgaccaatggttcgcaaaacgcgtttttctatttattcaacctcttcggcggcaaattcaagctttcagacggcacatccgcagaaaaagccattttgttgccgctcgcgcccgaatacatcggctatgccgacgtgcatatcgaagggcagcacttcgtttccgccaaacccaaaatcgaaaacgtcgaacacgaaggcgaagcaggcttcttcaaataccgcgtgaactttgacgcactggaaaacctgcccgagctgaaagaaggcaaaatcggcgcgatttgctgttcgcgcccgaccaacccgaccggcaacgtgctgaccgacggcgaaatggcgcgtttggacgctttggcgcaaaaacacggcattccgctgattatcgacaacgcctacggaatgccgttccccaacatcatttacagcgacgtaacgctgaattggcatgaaaacatcatcctctgcttcagcctttccaaagtcggtctgccgggcgtgcgcaccggcatcatcgtcgccgcgcccgaagtcgtcaaagccgtcagcagcctgaacgcgattgtgaaccttgcccccacgcgcttcggcgcggccatcgccgccccgctgctggaaagcggcgagatgaaacggcttgccgaccaagtcatccggccgttttaccgcaatcaggcgcaaaccgccgtctcgctgctcaagcgcgagctgggcgcgtacccgatgaaaatccacaaacccgaaggcgcgattttcctgtggctctggtttgaaaacctgcccgtttcttcgcaaaccctgtacgaaatactcaaagccgaaggcacgctgattattccgggcgagcatttcttcatcggcatcgacacgcaggattacccgcacgcgggcgagtgcatccgcatgagcatcgcgcaggacgctcaaacgctggaaaaaggcattgccgccatcggcaaaaccgtccgaaaactgtacgacaacgtttaa

SEQ ID NO: 61206 - DNA, 489 bp, Neisseria meningitidis; identical to SEQ ID NO: 44020

SEQ ID NO: 61207 - DNA, 1284 bp, Neisseria meningitidis
atgactgtatcgaaatcaggttttatcgggcaaatcttttcccgaaatatgcttgtctgtatttttacggggtttacctcggggctgccgctgtactttctgattaacctgattccggcatggttgcgcagcgagcaggtggatttgaagagcatcgggctgatggcgctgatcggtctgccgtttacttggaaatttttgtggtctccgctgatggacgcggtcagggttcccattttgggccggcggcgcgggtggatgctgttgacgcaggcagggttgctggcggctttggcggcctatgcctttttaaacccccggaatcatctgccgttgattgccggcttgtcggtgcttgtcgcttttttttccgccagtcaggatattgtattggatgcgttcaggcgcgagattttgtcggacgaggaattgggtttgggcaactcagtccatgtgaacgcctaccggattgccgccctgattcccggttcattgagtttggtgttggcagacaggatgccgtggtcagaagtatttgttatcacttcattatttatgctgcccggccttctgatgacgctgtttctcgcgcgcgaacccgtgttgccgccttccgttcctaaaacgttgaagcagacagtggtagagccgtttaaagaattttttacacgcaagggcatcgcttcggctgtatgcgtgctgctgtttatcttcctttacaaactcggcgacagtatggcaaccgcgttggcaacgccgttttatctggatatgggtttcagcaagaccgacatcggtttgattgccaaaaacgcaggactgtggccggcagtggcggcaggtatcttgggcggcgtgtggatgctgaaaatcggcgtaaacaaagccttgtggatatttggcgcggtgcaggctgtaaccgttttggggtttgtatggctggcagggttcggacatttcgacacggtcggcacaggcgagaggctgatgctggcggcagttatcggcgcagaggcagtcggcgtgggtttggggacggcggcgtttgtatcgtatatggcgcgcgagaccaatcccgcatttaccgcaacgcagcttgcactgtttaccagcctgtccgctgttccccgtacggtcatcaattcctttgccggttatctgattgaatggctcgggtatgtaccgtttttccagctgtgtttcatacttgccctgccgggtatgctgctgctgctgaaagttgcgccttggaacggggagaaaactcaggatgcaggcagatga

SEQ ID NO: 61208 - DNA, 2454 bp, Neisseria meningitidis
ttgaaaaacaacagacaaatcaaactgattgccgcctccgtcgcagttgccgcatcctttcaggcacatgctggactgggcggactgaatatccagtccaaccttgacgaacccttttccggcagcattaccgtaaccggcgaagaagccaaagccctgctaggcggcggcagcgttaccgtttccgaaaaaggcctgaccgccaaagtccacaagttgggcgacaaagccgtcattgccgtttcttccgaacaggcagtccgcgatcccgtcctggtattccgcatcggcgcaggcgcacaggtacgcgaatacaccgccatcctcgatcctgtcggctactcgcccaaaaccaaatctgcactttcagacggcaagacacaccgcaaaaccgctccgacagcagagtcccaagaaaatcaaaacgccaaagccctccgcaaaaccgataaaaaagacagcgcgaacgcagccgtcaaaccggcgtacaacggcaaaacccataccgtccgcaaaggcgaaacggtcaaacagattgccgccgccatccgtccgaaacacctgacgctcgaacaggttgccgatgcgctgctgaaggcaaacccaaatgtttccgcacacggcagactgcgtgcgggcagcgtgcttcacattccgaatctgaacaggatcaaagcggaacaacccaaaccgcaaacggcgaaacccaaagccgaaaccgcatccatgccgtccgaaccgtccaaacaggcaacggtagagaaaccggttgaaaaacctgaagcaaaagttgccgcgcccgaagcaaaagcggaaaaaccggccgttcgacccgaacctgtacccgctgcaaatactgccgcatcggaaaccgctgccgaatccgccccccaagaagccgccgcttctgccatcgacacgccgaccgacgaaaccggtaacgccgtttccgaacctgtcgaacaggtttctgccgaagaagaaaccgaaagcggactgtttgacggtctgttcggcggttcgtacaccttgctgcttgccggcggaggcgcggcattaatcgccctgctgctgcttttgcgccttgcccaatccaaacgcgcgcgccgtaccgaagaatccgtccctgaggaagagcctgaccttgacgacgcggcagacgacggcatagaaatcacctttgccgaagtcgaaactccggcaacgcccgaacccgctccgaaaaacgatgtaaacgacacacttgccttagatggggaatctgaagaagagttatcggcaaaacaaacgttcgatgtcgaaaccgatacgccttccaaccgcatcgacttggatttcgacagcctggcagccgcgcaaaacggcattttatccggcgcacttacgcaggatgaagaaacccaaaaacgcgcggatgccgattggaacgccatcgaatccacagacagcgtgtacgagcccgagaccttcaacccgtacaaccctgtcgaaatcgtcatcgacacgcccgaaccggaatctgtcgcccaaactgccgaaaacaaaccggaaaccgtcgataccgatttctccgacaacctgccctcaaacaaccatatcggcacagaagaaacagcttccgcaaaacctgcctcaccctccggactggcaggcttcctgaaggcttcctcgcccgaaaccatcttggaaaaaacagttgccgaagtccaaacaccggaagagttgcacgatttcctgaaagtgtacgaaaccgatgccgtcgcggaaactgcgcctgaaacgcccgatttcaacgccgccgcagacgatttgtccgcattgcttcaacctgccgaagcaccgtccgttgaggaaaatataacggaaaccgttgccgaaacacccgacttcaacgccaccgcagacgatttgtccgcattacttcaaccttctaaagtacctgccgttgaggaaaatgcagcggaaaccgttgccgatgatttgtccgcactgttgcaacctgctgaagcaccggccgttgaggaaaatgtaacggaaaccgttgccgaaacacccgatttcaacgccaccgcagacgatttgtccgcattacttcaaccttctgaagtacctgccgttgaggaaaatgcagcggaaatcactttggaaacgcctgattccaacacctctgaggcagacgctttgcccgacttcctgaaagacggcgaggaggaaacggtagattggagcatctacctctcggaagaaaatatcccaaataatgcagataccagtttcccttcggaatctgtaggttctgacgcgccttccgaagcgaaatacgaccttgccgaaatgtatctcgaaatcggcgaccgcgatgccgctgccgagacagtgcagaaattgctggaagaagcggaaggcgacgtactcaaacgtgcccaagcattggcgcaggaattgggtatttga

SEQ ID NO: 61209 - DNA, 690 bp, Neisseria meningitidis; identical to SEQ ID NO: 36702

SEQ ID NO: 61210 - DNA, 1272 bp, Neisseria meningitidis
atgaaactgctggttatcggtaatggtggtcgcgaacacgcgctggcttggaaattggcgcagtcgcctaaagtggaaacagtatttgttgcgcctggtaatgccggtacagcgattgaacccaagttgcaaaacatcgacttgactgcgcatcaggatttgattgaattctgtcgtaaagaaaatattgtttttactgtcgtcggccctgaagcgcctttggcggcaggtgttgtggatgatttccgtgccgcaggactaaaaatattcggtccgacacaatatgcggcgcagttggaaagttccaaagatttcgccaaagcatttatggcgaaatacaatattccaaccgcgcaatatcaaacctttgaaaacgccgatgccgcacatgattacgtcaatcagaaaggtgcgcctatcgttatcaaagccgatggtttggcggcaggtaaaggcgtgattgtggcgatgactttggatgaagcgcatgctgcgattgatgatatgctgctggacaacaaaatgggcaatgccggcgcgcgtgttgtgattgaagatttcctgcaaggcgaagaagcgagttttatcgtcatggttgatggcaataatgtactgcctatggcaaccagccaagaccacaagcgtcttttagacggcgacaaaggtctgaatacgggcggtatgggtgcgtacagccctgcgcctgtggtaacgcctgttgtgtacgaacgcgcgatgaatgaaattattttgccgaccgtagcagggatgaaagcggaggggcatgagttcaccggtttcctgtacgcaggtttgatgattgatcaaagcggtgcaccctatacgattgagtttaactgccgtttcggcgatcctgaaacccagccgattatgagtcgtctgaacagcgacttggcggatttggttgaagcggcaatagacggtaaacttgatagtgttgctgccgaatggaatccacaaactgccgtaggtgtagtgttggcggcgcaaaactatcctgaaacgcctaaaaaaggcgatgttatttccggtctggatgctgccaaccaggtaggcaaagttttccatgcaggtacaacggcaaacgagaaaggtgacgtattgaccaacggcggacgcgtattgtgtgttgtgggattgggcgacaatgtggcgcaagcgaaagctaaggcatatggcgcgttggaaaaaatcagcttcgacgggatgcaataccgtaaagacattgccgataaagcgattaaccgttaa

SEQ ID NO: 61211 - DNA, 1047 bp, Neisseria meningitidis
atgtcagacgacaaaagcaaagcccttgccgccgcactggcgcaaatcgaaaaaagtttcggcaaaggcgccatcatgaaaatggacggcagccagcaggaagaaaacctcgaagtcatttccaccggatcgctcggattagacctcgccctcggagtcggcggtctgccgcgcgggcgcatcgtcgaaatcttcggccccgaatcctccggcaaaaccaccctctgcctcgaagccgtcgcccaatgccagaaaaacggcggcgtgtgcgcctttgtcgatgccgaacacgcctttgatcccgtttacgcccgcaaactcggcgtaaaagtcgaagagctttacctgtcccagcccgataccggcgaacaggctttggaaatctgcgacacactcgtccgttcgggcggcatagatatggtagtcgtcgattccgtagccgcactcgtccccaaagccgaaatcgaaggcgatatgggggacagccatgtcggactgcaggcgcgcctgatgagccaggctttgcgcaaactgaccggacacatcaaaaaaaccaacacgctggttgtgttcatcaaccaaatccggatgaagatcggcgtaatgttcggcagccccgaaaccaccaccggcggcaacgcgctgaaattctattcttccgtccgcctcgacatccgccgcaccggatccatcaaaaaaggcgaagaggtattgggcaacgaaacccgcgtcaaagtcatcaaaaacaaagtcgcccccccgttccgtcaggcagagtttgacatcctctacggagaaggcatcagttgggaaggcgaattgatcgacatcggcgtgaaaaacgacatcatcaacaaatccggcgcgtggtacagctacaacggcgcgaaaatcggtcagggcaaagacaacgtccgcgtctggctgaaggaaaatcccgaagtcgccaatgaaatcgacgcaaaaatccgcgccctcaacggcgtagaaatgcacatcaccgaagggacgcaggacgaaaccgacggcgaacgccccgaagaataa

SEQ ID NO: 61212 - DNA, 792 bp, Neisseria meningitidis; identical to SEQ ID NO: 55673

SEQ ID NO: 61213 - DNA, 729 bp, Neisseria meningitidis; identical to SEQ ID NO: 55372

SEQ ID NO: 61214 - DNA, 306 bp, Neisseria meningitidis; identical to SEQ ID NO: 54350

SEQ ID NO: 61215 - DNA, 1512 bp, Neisseria meningitidis; identical to SEQ ID NO: 44625

SEQ ID NO: 61216 - DNA, 171 bp, Neisseria meningitidis; identical to SEQ ID NO: 36504

SEQ ID NO: 61217 - DNA, 2838 bp, Neisseria meningitidis
gtgattgcaagccgtctctctggaaatatatcttcagctattcaggagcataaagatggtaaagttaatatcaaccgttttcaaaatattttagcggatttatattcattgggagggttaggaagtacattaatagagaagaatggaaatatgcagagttgggggattccattagcaattgctggagatataattgcagcaacggctattgccacaggagatactggtacgatatctacagaggaattttataattttgacaactggaaaggttttgggtatgagctatttgaagactggtctcgttgggtatacgactggctgcccgacggctggaatctgtggaaagaattggacagaaaccgttcaggccaataccacatctacgaccccctcgccctagacctagacggcgacggcatagaaacagtcgccgccaaaggcttttcaggcagcctcttcgaccataacggcaacggcatccgcaccgccaccggttgggtttctgccgatgacggtttactcgtccgcgatttgaacggcaacggcatcatcgacaacggtgcggaactcttcggcgacaataccaaactggcagacggttcttttgccaaacacggctatgcagctttggccgaattggattcaaacggcgacaacatcatcaacgcggcagacgccgcattccaaaccctgcgtgtatggcaggatctcaaccaggacggcatttcccaaaccaacgaactccgcacccttgaagaattgggtattcaatctttggatctcgcctataaagatgtaaataaaaatctcggtaacggtaacactttggctcagcaaggcagctacaccaaaacagacggtacaaccgcaaaaatgggggatttacttttagcagccgacaacctgcacagccgcttcaaagacaaagtggaactcactgccgaacaggcaaaagccgccaatcttgcgggcattggtcgtctgcgcgatttgcgcgaagctgccgcattgtccggcgatttggccaatatgctgaaagcttattctgccgccgaaactaaagaagcacagttggcattgttagataatttgattcacaaatgggcggaaaccgattcgaactggggcaaaaaatcgccaatgcgactttcaaccgattggacgcaaacggctaatgaaggtattgcactgacaccatcccaagtagcacaactaaaaaagaacgctttagtttccctttctgataaagctaaagcagctattgacgccgcccgcgaccgcattgccgtgcttgatgcctacacggggcaggattccagcacactctattacatgagcgaggaagacgcgcttaatatcgtcaaagtaaccaacgatacatacgaccatctcgccaaaaacatctaccaaaacctgttattccaaacccgtttgcagccatatttgaatcaaatcagtttcgaaatggaaaatgatacgttcactttggattttagtggtcttgttcaagcatttaaccatgtcaaagaaactaatccgcaaaaagcttttgtggatttggccgagatgcttgcatatggcgaacttcgttcttggtatgaaggccgaagactaatggccgattatgtggaggaggcaaaaaaagcaggtaaatttgaagattaccagaaagtgttgggtcaggagaccgttgcattattagctaaaacatcgggtacgcaagcagatgatatcctgcaaaatgtaggctttggtcataataaaaatgtttctttatatggtaatgacggcaacgacactctaatcggcggtgccggtaatgattacttggagggcggcagcggttcggatacttatgtcttcggcgaaggcttcagtcaggatacggtctataattacgactacgctaccggacgcaaagacatcatccgctttaccgacggtattacagccgatatgctgacttttacccgagagggcaaccatcttcttatcaaggcaaaagacggcagtggacaagtgactgttcagtcctatttccagaacgatggctcaggtgcttaccgtatcgacgagattcatttcgataacggcaaagtactggatgttgccactgtcaaagaactggtacagcaatccaccgacggttcggacagattgtatgcctaccaatccggaagtaccttaaatggcggattgggcgatgactatctgtacggtgccgacggggatgacctgctgaatggtgatgcaggcaacgacagtatctacagtggcaatggcaatgatacgctcgatggaggagaaggtaacgacgccctgtacggctataatggtaacgatgcactgaatggtggcgaaggcaatgatcatttgaacggcgaagacggtaacgacactctaatcggcggtgccggtaatgattacttggagggcggcagcggttcggatacttatatcttcggcaaaggcttcggtcaggatacggtctataattaccatgtggataaaaactctgacactatgcactttaaaggatttaaagcagcagatgttcattttatccgttccggaagtgatttggtgcttagcgcttctgaacaagacaacgtacgtatttccggattcttctatggtgaaaaccatcgtgtagatacatttgtctttgatgatgcagctatcagtaatccagattttgccaagtatattaatgctggcaataatttggtacagtctatgtctgtgttcggttctaatactgctgcgacaggaggaaatgtggatgccaatatacaatccgtacagcagccgttattggtaacgccatctgcataa

SEQ ID NO: 61218 - DNA, 1527 bp, Neisseria meningitidis
atggattatccaccgcttaagggtgcggcattggcgtgggttacgctgtctttggggcttgccgtatttatggaagttttagatacgactatcgccaatgtcgccgttcccgtcatcgccggcaacctcggtgcggcaaccacgcaggggacgtgggtcattacttcttttgctgtggcaaacgccgtttccgtgccgttaacgggctttttggcaaaacgtatcggcgaggtcaaattgtttaccgccgccgctgtcggtttcgtcatcacatcgtggctgtgcggtattgcccccaaccttcagtcgctggttgttttccgcatcttgcagggctttatcgccgggccgctgattcccctgtcgcaaagcctgttaatggcatcctatccgcccgcaaaacggacgctggcactggcattgtgggcaatgaccgtcgttgtcgcccctgttctcgggccgatactcggcggttggatttccggaaactggcattggggttggattttcttcattaatatccctatcggtatcatatcggcatggattacatggaaacatttgaaatatcgggaaacggaaaccgttaaaatgccgaccgactatgtcgggcttacattgatggtagtcggtatcggcgcgttacagatgatgctggacaggggtaaggaactcgactggttcgcctctggagaaatcattaccttgggcgtagtcgcactggtgtgtttgtcgtattttattgtttgggaattgggagaaaaatatccgattgtcgatttatcgctgtttaaagatcggaattttaccgtcggcgtaattgccacatcattgggttttatggtgtatatggggacgctgaccttgctgccgttagtgttgcagaccaacctgggctatacctccacgtgggcggggcttgccgccgcacccgtcggcatcctgcccgtcttcctgtctccgttaatcggcaggttcggcaataaaatcgatatgcgcctgctcgtaaccgccagcttcctgacctttgcctttactttctattggcgcaccgatttttatgccgacatggatatcggcaacgtcatctggccgcagttttggcagggggcaggcgttgccatgttcttcctgccgctgaccaccatcacactgtcgcacatgaagggcgggcagattgccgccgccggcagcctgtcgaatttcctgcgcgtgctgatgggcggtgtcggcgtatccgtcgtcagcaccctgtgggaacggcgcgaagcgttgcaccacacgcgctttgccgaacacatcacgccctattccgcaacattgcacgaaacggcggcgcatttgtcccaacaaggcatttccgacattcaaaccctaggtatcatcaacaataccattacccagcagggcttcatcatcggatcgaatgaaatctttatggcaggcagcttgttattcattatcatgatacccgtcatatggctggcaaaaccgccgttccacagcagtggcggcggtggacattga

SEQ ID NO: 61219 - DNA, 216 bp, Neisseria meningitidis; identical to SEQ ID NO: 42474

SEQ ID NO: 61220 - DNA, 387 bp, Neisseria meningitidis; identical to SEQ ID NO: 54318

SEQ ID NO: 61221 - DNA, 471 bp, Neisseria meningitidis; identical to SEQ ID NO: 42963

SEQ ID NO: 61222 - DNA, 1407 bp, Neisseria meningitidis
atgaacgattacgccgctatgccgtctgaagaccgtgaggtcggcgcattgtcgctgcctccacattcgatggaggcggaacaatccgttttgggcggtttgatgctggaaaatccggcttgggacaggattgccgatgtggtttccggtgaagacttctaccgccacgaacaccgcctgattttccgatccattgctaaattaatcaatgagagccgtcccgccgatgtgattacggttcaggaagatttgcagcggaacgaagaattggaagcggcaggcggattcgaatatctgattacgctggcgcaaaacaccccgtctgccgccaacatccgccgctacgccgaaatcgtgcgcgagcgttccatcatgcgccaactcgccgaagtggggacggaaatcgcccgcagcgcatacaatccgcaaggcagggacgcggggcagcttttggacgaggcggaaaacaaagtattccaaatcgccgaaagcaccgccaaatccaagcagggctttttggagatgcccgatttgctgaaagaagtcgtacagcgcatcgatatgctctactcgcgcgacaatcccgatgaagttaccggcgtgccgacggggttcatcgacctcgacaaaaaaacctcgggccttcagcccggcgacctgattattgttgccggtcgtccgtctatgggtaagaccgccttttctatcaatatcgccgaacacgttgccgtagaaggcaagctgccggttgccgtcttctcaatggagatgggcggggcgcaactggtcatgcgtatgctcggctcggtcggacggctggatcaaagcgttttgaaaaccggcaggctcgaagacgaacactggggtcgcctgaacgaagcagtcgtcaaactctccgacgcgcccgtgtacatcgacgagaccccgggtctgaccgcgctcgaactgcgcgcccgtgcccgccgtctcgcccgtcaatttaacaataagctgggattaatcgtcatcgactacctgcaactgatggcaggatccggccgttccgacaaccgagcttcagagctgggcgaaatttcacgttcgctcaaagcgttggcgaaagaattgcaagtccccatcatcgccctgtcgcaattgagccgtaccgtcgaatcgcgtaccgacaaacgcccgatgatgtccgacctccgcgaatccggtgctatcgagcaagatgccgacctgattatgttcatgtaccgcgacgaatactacaaccaggactcacccatgaaaggccttgccgaatgtatcatcggcaaacaccgcaacggtcccgtcggtaaaatcttcctcacatggacggggcaattcaccaaattcgacaatgctgcctatattcccgaggaggcaaagatagaggattaa

SEQ ID NO: 61223 - DNA, 1260 bp, Neisseria meningitidis; identical to SEQ ID NO: 55931

SEQ ID NO: 61224 - DNA, 867 bp, Neisseria meningitidis
atgaaaggcatcatactggcaggcggcagcggcacgcgcctctaccccatcacgcgcggcgtatccaaacagctcctgcccgtgtacgacaaaccgatgatttattaccccttgtcggttttgatgctggcaggaatccgcgatattttggtgattaccgcgcctgaagacaacgcctcttttaaacgcctgcttggcgacggcagcgatttcggcatttccatcagttatgccgtgcaacccactccggacggcttggcacaggcatttatcatcggcgaagaatttatcggcaacgacaatgtttgcttggttttgggcgacaatattttttacggtcagtcgtttacgcaaacattgaaacaggcggcagcgcaaatgcacggcgcaaccgtgtttgcttatcaggtcaaaaaccccgaacgtttcggcgtggttgaatttaacgaaaacttccgcgccgtttccatcgaagaaaaaccgcaacggcccaaatccgattgggcggtaaccggcttgtatttctacgacaaccgcgccgtcgagttcgccaaacagctcaaaccgtccgcacgcggcgaattggaaatttccgacctcaaccaaatgtatttggaagacggttcattgtccgtccaaatattaggacgcggtttcgcatggttggacaccggcacgcacgaaagcctgcacgaagccgcttcattcgtccaaaccgtgcaaaatatccaaaacctgcacatcgcctgcctggaagaaatcgcttggcgcaacggttggctttccgatgaaaaactggaagaattggcgcgcccgatggcgaaaaaccaatacggccaatatttgctgcgcctgttgaaaaaataa

SEQ ID NO: 61225 - DNA, 546 bp, Neisseria meningitidis; identical to SEQ ID NO: 54605

SEQ ID NO: 61226 - DNA, 516 bp, Neisseria meningitidis; identical to SEQ ID NO: 55543

SEQ ID NO: 61227 - DNA, 957 bp, Neisseria meningitidis
atgattttgacaccgccggacacgccccttttcctccgcaacggcaatgccgacacgattgccgccaaattcctgcaacgccccgcacctgcataccgccgcgagctgcttcccgacagcacgggtaaaaccaaagtcgcctacgacttttcagacggcatttcgcccgatgcgccgctggtcgtgctgtttcacggtttggaaggaagcagccgcagccattacgcggtcgaactgatgcttgcggtacgcgatcggggttggcacggcgtagtcgtccatttccgcagctgcggcggcattgccaacaccgctccggtgttctaccacttgggcgataccgccgaaatcgcctttactttggacacgttcgccgcgcgttaccgtgaaatatacgccgtcggcgtatcgctgggcggcaacgcgctggcaaaatatttgggcgaacagggcaaaaaggcattgccgcaagccgctgccgtcatctccgcccccgtcgatgcagaggcggcaggcagacgcttcgacagcggcatcacgcggctgctctacacgcgctacttcctccgcaccctgatacccaaagcaaaatcgctccaaggttttcagacggcatttgccgcagggtgcaaaacactgggcgagtttgacgaccgcttcaccgcaccgctgcacggctttgccgaccggcacgactactaccgccaaacttcctgcaaaccgctgctcaaacacgttgccaaaccgctgctcctgctcaatgccgtcaacgaccccttcctgccgcccgaagccctgccgataccggacgaagtgtccgaagccgttaccctgttccaacctgcacacggtggtcatgtcggctttgtcggcagcaccggcggcaggctgcacctgcaatggttgccgcagaccgtcctgtcctatttcgacagcttccgcacaaacagtcgttaa

SEQ ID NO: 61228 - DNA, 1227 bp, Neisseria meningitidis
atgaataccgataacctgcacgacatcttggacgaaatggttcaagtgtattctcaaaaaaaacaaagccgatccgaaaccccggccgaaatcggcgcacacttccacccgctgctcgaccgcctgtgcgaaaccgcagaagcacaaaacgcgtccgacatccttatcagcaaaggattcccgccctcgttgaaaatcaacagcgcattaaccccgcagccgcaaaaggcgctgacgggcgaggaaaccgccgccatcgccgcatcgacgatgaacgccgaacaatcggaaatattccggcgcgacggcgaaatcaactattccgtccagtcgcgcagcggcacgcgctaccgcgccaacgcctaccacagccaaggcagcgcaggtttggttttgcggcgcatcaaccacgtcatcccgcaaatgcaggaattgggcctgcccgaaaaactcaaagacctcgccgtcgcgccgcgcgggctgctgattatcgtcggacctaccggttcgggcaaatccaccacgatggcgactatgctcgaacaccgcaacaaaactctgcccggccatatcgttaccatcgaagacccgatagagtttatctacaagccgcgccgctgcatctttacccagcgcgaaatcggcgtcgacaccataaactggcagacggcggtacaaaacgctatgcgccagtcccccgacgtggtctgcatcggcgaagtccgcagcagggaaagtatggaatacgcgatgcagctcgcccaaaccggccacctgtgcatttttacgctccacgccaacaccgcgccgcagtcgctcgaacgcatactcaacttctaccccaaagaacagcacaaccaaatactgatcgacatcgccctcaacctgaccggcatcatctgccaacgcctcgccctcaaacaagacaaaacgggcaggacggcggttgtcgacttgctcatcaacacgcccgccatccaagacttcatcctgaagggcgacctgatgaacatcagtaaaatcatggaaaccgccaaaaccgacggaatgcagacgatggatcaaaaccttttcgaactgtaccgtcacggcatcatcagttacgaagaagccctgcgccagtccgtttccgccaacaacctgcgattgcacatccaactgcacaaagaaggcaaaacgcccgaactcctttacgacagggtcaacggtctcaacctcatttcctga

SEQ ID NO: 61229 - DNA, 2016 bp, Neisseria meningitidis
atgaaatcctaccccgacccctaccgccattttgaagacctcgattccgccgaaacgcaaaacttcgctgctgaagcgaatgccgaaacgcgcgcgcgttttttaaacaacgacaaggcacgcgcattgtctgacggcattttggcgcagttgcaggacacgcggcaaattccgttttgtcaggaacaccgcgcgcggatgtaccatttccatcaggacacggaatatccgaagggcgtgtaccgcgtgtgtacggcggcgacttaccgttccggctatcctgagtggaaaatcctgttttcggtggcggatttcgacgaattgctcggcgacgatgtgtatttgggcggcgtgtcgcacttggtggaacagcccaaccgcgcgttgttaacactgagcaaatcgggcggcgatacggcgtacacgctggaagtggatttggaagcaggggaattggtagaaggcggttttcactttccggcaggtaaaaaccatgtgtcgtggcgcgatgaaaacagcgtatgggtgtgtccggcttgggacgaacgccagttgaccgaatcgggctatccgcgcgaggtgtggctggtggaacgcggcaaaagtttcgaggaaagcctgcctgtgtatcaaatcgataaagatgcaatgatggtgaacgcgtggcgttatctcgatccgcagggttcgccgattgatttgattgaagcgtcggacggtttttacaccaaaacctatttgcaggtgtcgtcggaaagcgaggcgaaaccgttaaacctgcccaacgattgcgacgtggccggctatctggccggacatcttttgctgacgttacgtaaagactggaaccgcgcgaaccaaagctatccgagcggcgcattggtggcggtgaagctgaatcggggcgaactcggggcggcacagcttttgtttgcgcccgatgaaacgcaggcattggaaagcgtggaaacgaccaagcgttttgtggtggcgagcctgctggaaaacgtacaaggccgtctgaaagcgtggcggtttgccgatggcaaatggcaggaagctgagttgccgcgcctgccttcgggcgcgttggaaatgaccgatcagccttggggcggcgacgtggtttaccttgccgccagcgatttcaccacgccgctgacgctgtttgcgctggatttgaacgtgatggaactgaccgtcatgcgccgccagccgcagcagtttgattcagacggcattaacgtgcagcagttttggacgacttcggctgacggcgagcgcattccttatttccacgtcggcaaaaacgccgcgcccgacatgccgacgctggtctatgcctacggcggtttcggcattcccgaattgccgcattatctgggcagcattggcaaatattggctggaagagggcaatgcctttgtattggcgaacatccgcggcggcggcgagttcggcccgcgctggcatcaggcggcgcagggcatcagcaaacataaaagcgttgatgatttattggcagtcgtgcgcgatttgtccgaacgcggcatgagttcgcccagacacatcggtttgcagggcggcagcaacggcggcctgattaccgccgctgccttcgtgtgcgaaccgcaaagcatcggcgcgctggtgtgcgaagtaccgctgaccgacatgatccgttatccgctattgtccgccggttcaagttggacggacgaatacggcaatccgcaaaaatacgaagtctgcaaacgctggctgggcgaattgtcgccgtatcacaatctttcagacggcatcgattatccgcctgcgctcattaccaccagcctcagcgacgaccgcgtccatcctgcccacgcgctcaagttttacgccaaactgcatgaaacctcggcgcaatcttggctctactcgcctgacggcggcggccataccggcaacggcacccaacgcgaatccgccgacgaactcgcctgcgtcttgctgtttttgaaagagtttttgggctaa

SEQ ID NO: 61230 - DNA, 387 bp, Neisseria meningitidis; identical to SEQ ID NO: 54563

SEQ ID NO: 61231 - DNA, 987 bp, Neisseria meningitidis; identical to SEQ ID NO: 55490

SEQ ID NO: 61232 - DNA, 228 bp, Neisseria meningitidis; identical to SEQ ID NO: 44482

SEQ ID NO: 61233 - DNA, 273 bp, Neisseria meningitidis; identical to SEQ ID NO: 60896

SEQ ID NO: 61234 - DNA, 594 bp, Neisseria meningitidis
atggaacactatttgagcctcttcatcaaatccgtcttcattgaaaatatggcactatccttctttttgggtatgtgcacgtttttggcggtatccaaaaaagtatccaccgcattcggtttgggtgtggcggtaattttcgtactcgggctgtccgtccctgtcaaccaactcgtttactcgctgctcaaagacggcgcgattgtcgaaggcgtggatttgacctttttgaaattcatcaccttcatcggcgtgattgccgctttggtgcagattttggaaatgttcttggataaattcgtccccgccctctataacgcattgggcatctacctgccgctgattaccgtgaactgcgcgattttcggcgccgtatcgtttatggcgcaacgcgaatacaacttcggcgaatccgttgtatacggcttcggcgcgggcttgggctggatgttggcgattgtcgctttggcgggcattaccgaaaaaatgaaatattcggacgctcccaaaggcctcaaaggcttgggcattacctttatcgccgccggcctgatggcgatggcgtttatgtcgttctccggcatccagttataa

SEQ ID NO: 61235 - DNA, 1299 bp, Neisseria meningitidis
atggctaaaaatgttgtagtaatcggcgcacagtggggcgacgagggtaaaggtaaaatcgttgactggctggcggaagaagccggcggcgtggtgcgcttccaaggcggccacaatgcgggtcatactttggtcgtcggcggcaaaaaaaccattttgcgcctgattccgagcggcatcctgcatgaaagtctggactgcttcatcggttcgggcgttgtcgtctcccccgaagccctgttgggcgaaatcgacgagttaaacgctgcaggcgtgaaaaacgtcgaaggccgtctgaaaatcgcgccgacctgcccgctgatcctgccttaccacatcgcgctcgaccaagcccgcgaagcatcgcgcggcaaaggcaaaatcggcacgaccggccgcggcatcggccctgcctacgaagacaaagtggcacgccgcgccattcgcgccgccgatttgctgcatcctgaaaaactgcgtgaaaaactggatgccatccttgcctattacaatgtccaactgcaacatctgcacaatgccgagccggttaaagcggaagacgtgatggcggttatcgaaaaagtcgcgctgcgcattgcgccgatgattaccgacgtgtcccgcgtgttgaacgagaaaaacaaaaacggcgaaaaactgctgtttgaaggcgcgcaaggtgcgttgttggacatcgactacggcacttatcccttcgttacctcgtccaactgtctggcgggagccgcttccgcaggcgcgggcgtaggccctcaaatgctggattatgttttgggcatcgtcaaagcctataccacgcgcgtcggttcaggcccgttcccgaccgaattgttcgacgaagtaggcgcaggtttggcggaacgcggacacgaattcggctcggtaaccggccgcgcacgccgctgcggctggtttgatgccgccgccctgaaacgctccatccaaatcaacggcatttccggtatgtgcattaccaaactcgatgtaatggacggcgttgaaaccatcaatatctgcgtcggctacgaattgcccgacggcggcaaaaccgatatcctgccttgcggttcggatgcggtggaaacctgcaaaccgatttacgaaacaatggagggttggaaagaatcgactttcggcatcaaaaattatgaggaactgcccgataatgccaaagcatatttgaaacggattgaagaagtctgcggcgcgccggtcgccatcgtctccaccggccccgaccgagaagaaacgattgtgctgcatcatccgttcgcataa

SEQ ID NO: 61236 - DNA, 1428 bp, Neisseria meningitidis
atgtacatcaacggacgctttgaaaacgacttcaacggcgaatggcgcgacgtattgaacccttccaccgaagaaaccatcgcccgcgaacccaaaggcggaaaagcagacgttgaccgagctgtggcggcggcacgcgcggcgcaaccggcttgggaacgcctgcctgcggtcgaacgcggcgcgtatttgcgcaaaatcgcccaaggcatacgcggacgcgccgacgagctgaccgacaccatcgttgccgaaggcggcaaaaccaaagacttggcgcgcgtagaagtgatgttcaccgccgactatctcgattaccaagccgaatgggcgcgccgttacgaaggcgaaatcatccaaagcgaccgcccgcgtgaaaatattttattgttcaaacgtccgctgggcgtaattgccggcattttgccgtggaacttccctttcttcctgattgcccgcaaaatgggtcccgccttagtaacgggcaacaccatcgttgtcaaacccagcagcgtaaccccgatcaactgccacatcttcgccgaaatcgtcgatgcggtcggattgcccgcaggcgtgttcaacgtggtgaacggtccgggtgcggaaatcggcaatgccttgtctgcccatccgcaagtcgatatggtcagcctgaccggctccgtcgaagcaggccgccaagtgatggaagccgcttccgccaacatcaccaaagtttcgctggaactcggcggcaaagcccccgccatcgttttgaaagacgcggatttggatttggcggtgaaatccatcttggcttcgcgcgtcggcaacactggtcaaatctgcaactgcgccgagcgcgtctatgtccacagcagcctgaaagacgcgtttatcgaaaaaatgaccgccgcgatgaaaggcgtgcgctacggcaaccctgccgaagccgaagccggcgcgctggaaatgggcccgctgattgaagagcgcgccgtcaaagccgttgccgaaaaagtggaacgggcagtcaaacaaggtgcgaaattggtttgcggcggcaaacgcgccgaaggacgcggctatttcttcgagccgaccctgctgaccgacaccgacaacagtatggacattatgaaagaagaaaccttcggccccgtcctgcctgtttccactttcgacacgctcgaccaagtcatcgcactggctaacgattgcgagtttggtctgaccagttctgtttatacgactaatttaaacgaagccttctacgttacccgccgcctgcaattcggcgaaacctacatcaaccgcgaaaactttgaagcgatgcagggtttccacgccggttggaaaaaatccggtatcggcggcgcggacggcaaacacggtttggaagaatatctgcaaacccaagtcgtttatctggaaaccgatatttaa

SEQ ID NO: 61237 - DNA, 669 bp, Neisseria meningitidis; identical to SEQ ID NO: 55451

SEQ ID NO: 61238 - DNA, 429 bp, Neisseria meningitidis; identical to SEQ ID NO: 55737

SEQ ID NO: 61239 - DNA, 291 bp, Neisseria meningitidis; identical to SEQ ID NO: 41644

SEQ ID NO: 61240 - DNA, 813 bp, Neisseria meningitidis
atggaaaatatcggcaggcagcgacccatcggcgtttttgactcgggaatcggcggtttgaccaatgtacgcgcgctgatggagcggctgccgatggagaacatcatttatttcggcgacacggcgcgcgtgccttacgggacgaaatctaaggctaccatcgaaaatttctcgatgcagattgtcgattttttattggaacacgatgttaaggcgatggttatcgcgtgcaatacgattgcggcggtggcggggcagaaaatccgtcaaaagacgggcaatatgcctgtgttggacgtgatttccgccggcgcgaaagccgcgctggcaacgacgcgcaacaataaaatcggcattatcgccaccaataccacagttaacagcaatgcttatgcgcgcgccatccatagggacaaccccgacacgctcgtccgcacgcaggccgcgccgctgctcgtccctttggtggaagagggctggctggaacatgaagttacccgcctgaccgtatgcgaatacctcaaaccattgcttgcagacggcatcgatacgctggtgttgggctgcacgcactttcccttgctcaaacccttaatcggcagggaggcgggcaatgtcgcgctggtcgattccgcgattacgactgccgaagaaaccgcacgcgtccttgctcaggaaggattgctcaataccgacaacaacaatcccgactaccgtttttacgtcagcgatattcctttgaaattcagaaccatcggcgagcgttttctgggtaggacgatggagcagattgaaatggtgtctttgggttaa

SEQ ID NO: 61241 - DNA, 747 bp, Neisseria meningitidis; identical to SEQ ID NO: 54893

SEQ ID NO: 61242 - DNA, 918 bp, Neisseria meningitidis
atggttttggacgggtttgcggcgcattttgacgcttatttggaaaacatcgtgcgcgagggcaagtcggggcacacggtggcggcataccggcgcgatttggaagaactgtttgcgctgttggcacaaatgccgtctgaagatgcaggcggcgtgccgcagggcttgtcgcaacgcgattttacggcggcgttgcggcggctgtcgcagcgcggtttgaatgcgcggacgctggcgcgcaagctgtcgtcttggcggcagtattgcgcctggctggtcaaacgcggtctgctgcataccgacccgaccgccgacatcaaaccgccgaagcagcccgagcgcgtacccaaagccctgccgcaggaatggctgaaccggatgctggatttgcccgtggacggcggcgacccgctggcggtgcgcgatcacgccctgttcgagctgatgtacggcagcggtttgcgcgtgagcgagatacacggcttgaatgcagatgatgtctatttggacgaggcgtgggtacacgttaccggcaaagggcgcaagcagcggcaggtgccgctggtcggcaaaagcgtggaagccctgaaaaactatctgtcgctgcgtcagacggcatcggacggcaaagccctgtttaccggcaggaacggcacgcgcctgagccaacgccaaatccaaaaacgtttggcgcaatgggcggcgcaaaacggcgacggcaggcacgtttcgccgcatatgatgcgccacagctacgccggacacctgttgcaggcttcgcgcgacatccgggcggtgcaggagctgctcggacacagcagcctttcgaccacgcagatttacaccaaactcgatttcgaccacatcgcccgcctgtatgacgaagcccacccgcgcgccaagcggcaggacgaatga

SEQ ID NO: 61243 - DNA, 840 bp, Neisseria meningitidis; identical to SEQ ID NO: 59829

SEQ ID NO: 61244 - DNA, 876 bp, Neisseria meningitidis; identical to SEQ ID NO: 42702

SEQ ID NO: 61245 - DNA, 1569 bp, Neisseria meningitidis
atggcaaaaaaggacaataaaactaaaatccaaaagcccgaggctgcattgcagacggatgcggctcaaattacggcgaccggtcgggttatcgccgagcatccgtccaattttattacgccgcaaaagatgcgcgccctcttcgaggacgcagaaagcggcgacatccgcgcccaacacgagcttttcgcggacattgaggagcgcgacagcgacatcgcggcaaatatggggacgcgcaaacgcgcgctgctgacgctcaactggcgcgtcgccccgccgcgaaatgcgacgcccgaagaagaaaagctgtccgaccaagcctacgaaatgatggacagcctgcctaccctcgaagacctgattatggatttgatggacgcggtagggcacggattttctgcgttggaggtcgagtgggtattttcagacggcctttacctgccccgaaactttatccaccgcccgcaaagctggttcaaatgggacaaagacgacgggctgctgctgcgtacccgcgaaaatccggaaggcgaagcgttgtggccgctgggctgggtcgttcatacccaaaaatcgcgcagcgtccggcaggcgcgcaacgggcttttccgctcgctttcctggctgtatatgttcaaacactacgccgtccacgattttgccgagtttttggagctgtacggcatgcccatccgtatcggcaaatacggcgcgggcgcaaccaaagaggaaaaaaacaccctgcttcgagcggtggcggaaatcggtcacaacgcggcaggcatcatgccagaaggtatggaaatcgagctgcacaacgctgcaagcggtacgacggcaaccagcaatccgtttttgcagatggccgattggtgcgaaaaatcggcggcgcggctgattttggggcaaacgctgaccagcggtgcggacggaaaatccagcaccaacgcgctgggcaatatccacaacgaggtacgccgcgatttgctggtgtcggacgcaaaacaggtggcgcaaaccatcacaagccaaatcatcggaccgttcctgcaaatcaactatccccatgccgacccaaaccgcgtgccgaaatttgaatttgacacgcgcgagccgaaagacatcgcggtctttgccgacgctatcccgaaactggtggatgtcggcgtacaaatccccgaaagctgggtgcgcgacaaactggtcattccagatgtgcaggagggtgaggctgtgttggtgcggcaggtaccggacaatccggtaaacagaactacattggcggctttatccgcccacaccgtaccatctaaggctacgggcaggcatcaggaaatattggacggcgcgttggatgacgcgctggttgagcccgatttcaattctcagctcaacccgatggtgcgtcaggcggttgccgcacttaatgcttgcaacagctacgaggaggcagatgccgcactgaatgcgctttatccgaatttggacaacgcgaaactgcgtacctatatgcagcaggccttgtttatcagcgatattttgggacaagaccatgcccgcgcctga

SEQ ID NO: 61246 - DNA, 1179 bp, Neisseria meningitidis
atggcaaaaatgatgaaatgggcggctgttgcggcggtcgcggcggcagcggtttggggcggatggtcttatctgaagcccgagccgcaggctgcttatattacggaaacggtcaggcgcggcgacatcagccggacggtttctgcaacaggggagatttcgccgtccaacctggtatcggtcggcgcgcaggcatcggggcagattaagaaactttatgtcaaactcgggcaacaggttaaaaagggcgatttgattgcggaaatcaattcgacctcgcagaccaatacgctcaatacggaaaaatccaagttggaaacgtatcaggcgaagctggtgtcggcacagattgcattgggcagtgcggagaagaaatataagcgtcaggcggcgttatggaaggaaaacgcgacttccaaagaggatttggaaagcgcgcaggatgcgtttgccgccgccaaagccaatgttgccgagctgaaggctttaatcagacagagcaaaatttccatcaataccgccgagtcggaattgggctacacgcgcattaccgcaacgatggacggcacggtggtggcgattctcgtggaagaggggcagactgtgaacgcggcgcagtctacgccgacgattgtccaattggcgaatctggatatgatgttgaacaaaatgcagattgccgagggcgatattaccaaggtgaaggcggggcaggatatttcgtttacgattttgtccgaaccggatacgccgattaaggcgaagctcgacagcgtcgaccccgggctgaccacgatgtcgtcgggcggctacaacagcagtacggatacggcttccaatgcggtctactattatgcccgttcgtttgtgccgaatccggacggcaaactcgccacggggatgacgacgcagaatacggttgaaatcgacggcgtgaaaaatgtgctgattattccgtcgctgaccgtgaaaaatcgcggcggcaaggcgtttgtgcgcgtgttgggtgcggacggcaaggcggcggaacgcgaaatccggaccggtatgagagacagtatgaataccgaagtaaaaagcgggttgaaagagggggacaaagtggtcatctccgaaataaccgccgccgagcagcaggaaagcggcgaacgcgccctaggcggcccgccgcgccgataa

SEQ ID NO: 61247 - DNA, 1428 bp, Neisseria meningitidis; identical to SEQ ID NO: 54802

SEQ ID NO: 61248 - DNA, 468 bp, Neisseria meningitidis; identical to SEQ ID NO: 42615

SEQ ID NO: 61249 - DNA, 279 bp, Neisseria meningitidis; identical to SEQ ID NO: 55063

SEQ ID NO: 61250 - DNA, 486 bp, Neisseria meningitidis; identical to SEQ ID NO: 43447

SEQ ID NO: 61251 - DNA, 474 bp, Neisseria meningitidis; identical to SEQ ID NO: 54328

SEQ ID NO: 61252 - DNA, 720 bp, Neisseria meningitidis; identical to SEQ ID NO: 55963

SEQ ID NO: 61253 - DNA, 1296 bp, Neisseria meningitidis
atgagcgtcatccaagacctgcaatcgcgcgaccttatcgcgcaaacgaccgacatcgaagccttagacgctttgttgaacgaacaaaaaatcgccctttactgcggtttcgatccgaccgccgacagcctgcacatcggacacctgctgcccgtattggcattgcgccgcttccaacaggcggggcatacgccgattgctttggtgggcggcgcgaccggtatgatcggcgaccccagcttcaaagccgccgaacgcagcttgaattccgccgaaactgttgccggctgggtggaaagtatccgcaaccaattaacccctttcttgagctttgaaggcggaaatgccgccattatggcgaacaatgccgactggttcggcagcatgaactgccttgacttcctgcgcgacatcggcaagcatttctccgtcaacgccatgctgaacaaagaatccgtcaaacagcgcattgaccgcgacggcgcaggcatttccttcaccgagttcgcctactccctgctgcaaggctacgacttcgccgagttgaacaaacgccacggcgcggttttggaaatcggcggctccgaccaatggggcaacatcaccgccggtatcgacctgacccgccgcctgaatcaaaaacaagtgttcggcctgaccctgcctttggttaccaaatcagacggcaccaaattcggcaaaaccgaaggcggcgcagtatggctgaacgcgaaaaaaacctcgccctatcagttctaccaattctggctgaaagtcgccgatgccgatgtgtataaattcctgaaatactttaccttcctgtccatcgaagaaatcgatgccgtcgaagcgaaagacaaggcaagcggcagcaagcccgaagcgcaacgcatcctcgccgaagaaatgacccgcctgattcacggcgaagaagcccttgccgccgcgcagcgcatttccgaaagcctgtttgccgaagaccaaagcagcctgaccgaaagcgacttcgagcagctcgccctcgacggcctgcctgcatttgaagtttcagacggcatcaatgtcgtcgaagccttggtcaaaaccggtttggcatcctccaataaagaagcgcgcggctttgtgaacagcaaagcggttttgctcaacggcaaacctgccgaagccaacaaccccaaccacgccgccgaacgccccgacgatgcctgcctgctgaccgacgaacacaaacgtttcggcaaatacaccatccttcggcgcggcaaacgcaatcacgcgcttttggtttggaaataa

SEQ ID NO: 61254 - DNA, 1701 bp, Neisseria meningitidis; identical to SEQ ID NO: 55149

SEQ ID NO: 61255 - DNA, 2787 bp, Neisseria meningitidis
atggcgaataataaaactttgtttgaagtaattgaaaaccgcaaagctgtgtatttggaagacggagatgatgaaaaatacaggctgcctaaatttgtttcaaataatttgaaatatccgttttttgaatggcaaaaatcggctttagaaaactttgtgatttttgaccgcacttcaaaattaaaggattttcccgatatcaaaaaccgccctactcatttgctatttaatatggcaacaggtgcaggcaaaacgatgatgatggcggcattgattttgtattattttgaaaaagggtatcggcattttctgttttttgtgaatcaaaacaatatcgtggataaaacggaaaataattttattgacccgacacacgcaaaatttttatttaccgagaagattttgcagggcgatacggtaattcccattcgcaaagtggaaacgttcagcccacattcagacggcattgaaattaaatttaccagcattcaaaagctgtataacgatattcacaccgaacgggaaaaccaaaccacattggcggatttgcacgaattgaatcttgtgatgctgggcgatgaagcacaccatttaaacgcgcaaaccaaaggcaaaaaacaaggcgagttggatttggaagtggaattaaaagccaatgcaggcaatgccgaaattgaacgcaaaggctgggagcatatggttttggaattgttactcaataaaaatggcaatcccagccaaaatgtgctgttggaatttaccgccacgctgcctgaaaatgctgacgtgcaacaaaaatacgcggataaaatcatcacaaaatttggcttaaaagaatttttgcaaaaaggttataccaaagaaatcaatttggtatccagtacgctgggcaagaaagagcgggtgttgcacgctttattatttgcttggtatcgccatcaaatcgctttgaaatatggcattgccaatttcaagcctgtgatgttgtttagaagtaagacgattgatgaatcaaaagcggattatctggcatttttaaattgggcagaaaatgtgcaggcggttgatttttcgtttttaactacattttcaacaagcttgaacgatagcgatagcgataacgccaacgaacaaggcaaaacccgcactgaacaagccctaaaatttatgcaggaaaaaggcgttgagtttgcacatttggcagattgggtaaaacaaaattatcaaaaacacaatgtgattattaccaactccgaaaccaacaaaaccaaaaccgaaaaaaccgacagcgaaacagaaaaattgctgaataatttggaagcggctgataatccgattcgtgccatttttacggtggacagattaaccgaaggttgggacgttctgaatttgtttgatattgtgcgtttgtatgaagggcaaaacggcggcggttcaaataaaaaatcaggcaaaacggctgccgccaccgtatcggaaaagcagttgattggtcgtggcgtgcgttattttccatttgcgtttgaaggtaaacagccgaataaacgcaaatttgacaacgatatgcaacacgaattgcgtatcttggaagaattgttttattacgcgcacgatgagcaatcccgctatatttcagaactgaaaaatgagttgcgaaaagacggttatttgcctgaaaaagacgatgataaggtattggcaacatttaaactcaaatctgaatttgccgctaataaggattttagagaattgttaatttgggcgaataaaaaaatccccaacccaaacgccaaaagcaataatgcagacagcctaaaagccaatccacaaacgctttcattccaagttcacggtaatcaactgttgcaggaaacgcaatttacagccgatgaaaatgatgaaacagcccgacaaatcggcacacaaaataattttactcaaaccataaaaatgagtgaaatggagcggcacattttcaataaagcattacatatcaaagggaaaaatagtcaatctttattccatttcaaccgtttgcaaagcaagctcgacattcaaaatcgcaatgaattgcaaaataacttgttgaaagactggcaaattgaatttttaggattagggcaagacaaacaggttcgcctggacgataaacttgcaggctgcctgaaaatcttggaaatggttgaaaaacatctgaatgaaagtgatatgccgtttatcggtacaaaagaatttacacctaaaaaattatgggaaattttcggcacgccaaaacaaaaatgggtcaaaaaagatgatgtaaaaacgactattgccacgcaaaatgattggtatgtgatgaataattttgccggaacgggtttggaagaagcgttaattcaatttatttcagcgcgtttgggcgatttgaaatctaaatatgacgttcatttaatccgtaatgaagaagtgtttaaattgaataactttgccgatggtgaaggatttatgccggactttattttattgctgaaagataaacaaaaatcttcttccaatggtgtgaacgactttttgcattaccaaattttcattgagcccaaaggtgagcatttagtggaaactgatggatggaaagaagaatttttagaagccatcactgtggaatatgggatggataagatcctgcaaaaagatacaccgcattatcgtttgatcggtttaccgttttttactgatcatcagaaaaatggacaatttacggagtcattccctttaggtgcggcatcgcttgaaaaaatgaagtag

SEQ ID NO: 61256 - DNA, 1788 bp, Neisseria meningitidis
atgaaacttcctttatcctatttgcctaatattcgctttttgtcttggtgctgcttattggcaggtatcatcgctcctgctactttgttggcttcccccaaccctgccgaaatccgtatgcagcaagatattcagcaacgccaacgcgaagagcagttgcgccaaaccatgcagcctgaaagcgatgtgcgtttgcatcaaaaaaacacgggggaaacggttaatcagttgatgggcgatgacagcagccaaccgtgttttgccattaacgaagtggtgttggaaggtgaacaccatgatcggtttcagtttgccctaaaacgtgccttgcgcgaaacgggttttcaggctggcaagtgtctgcatgcgggcaacattaatcaaatcatgtccttagcacaaaatgctttgatcggcaggggatataccacgacccgtatcttggctgcgccacaggatttgaatagtggcaagcttcaattaaccctgataccgagctatctgcgctccatacgaatcgatcggtctaacgatgatcaaacccatgcaggacgtattgcagcattccagaacaaatttcccacccgctcgaacgatctgttgaatctgcgtgatttggaacaaggactggaaaatctcaaacgtctcccgactgcggaagccgatctccaaatcgttcccgtagagggagaaccaaaccaaagtgatgtcgtggtgcaatggcggcaacgtctgctgccctaccgtgtgagtgtggggatggataattcgggtagtgaggcgacaggaaaataccaaggaaatatcactttctctgccgacaatccttttggactgagtgatatgttctatgtaaattatggacgttcaattggcggtacgcccgacgaggaaagttttgacggccatcgcaaagaaggcggatcaaacaattacgccgtacattattcagcccctttcggtaaatggacatgggcattcaatcacaatggctaccgttaccatcaggcggtttccggattatcggaagtctatgactataatggaaaaagttacaatactgatttcggcttcaaccgcctgttgtatcgtgatgccaaacgcaaaacctatcttggtgtaaaactgtggacgagggaaacaaaaagttacattgatgatgccgaactgactgtacaacggcgtaaaactgcgggttggttggcagaactttcccacaaagaatatatcggccgcagtacggcagattttaagttgaaatataaacgcggcaccggcatgaaagatgctctgcgcgcgcctgaagaagcctttggagaaggcacgtcacgtatgaaaatttggacggcatcggctgatgtaaatactccttttcaaatcggtaaacagctatttgcctatgacacatccgttcatgcacaatggaacaaaaccccgctaacatcgcaagacaaactggctatcggcggacaccacaccgtacgtggcttcgacggtgaaatgagtttgtctgccgagcggggatggtattggcgcaacgatttgagctggcaatttaaaccaggccatcagctttatcttggggctgatgtaggacatgtttcaggacaatccgccaaatggttattgggccaaactctagccggcacagcaattgggatacgcgggcagataaagcttggcggcaacctgcattacgatatatttaccggccgcgcattgaaaaagcccgaatttttccaatcaaggaaatgggcaagcggttttcaggtaggctatacgttttaa

SEQ ID NO: 61257 - DNA, 3210 bp, Neisseria meningitidis
atgttttatctgtatcaatccaaccgtcttgaaacgctggcggcactgtttgcccgcattcaaaaagtcaaaccgctgaaatcggttttacagcccgaacagattattgtgcagagtcaggggatgcgccgctacctcaatacctgcctcgcccgcgatttgggcgtggcggcgaatttgtcgttcagcctgcccgccggtctgacgtggaagctgatgaaaaaactgattcccggtattccggaactcagcccgtttgcgcctgaagtgatgcgctggcggctgttggatttgttccgcagcgaggcatttcggaatacggcagaatttgaagatgtgaggaatgtgctgcaagactatctgggcagcggcgaatcggcggattatcagcttgctggccagcttgcagacatatttgaccaatacctcgtgtatcgtccgcagtggatagacgcgtggcagcagggcaggatactcagtttgggcgacgatgaaatctggcagtccaaactgtggcgttatcttgatgacggcaggcagagcgcgccgcaccgtgttgcgttgtgggaaaagctgttggaatctttgagcagtgataagctgcccgagcgttatttcgtgttcggcatttccacgatggcgccgatgtatttgcagcttttgcacaagctgtccgaacattgcgatgtgttcgtgtttgcactcaatccgagtgggatgtattggggcaacgtcatcgaagcggcgcaaatcctcaaaggcggcggcgatcccgatttaactcaggcagggcatccgctgctcgcctcattgggcaagcaggggcgcgactttttcgactttttgaacgaaatggaaatagaaggagaaacgccggtgtttgaagaaggcagccgcgatacgcttttgcacgccctgcaaaccgatatccaaaacttggatatgccgtctgaaaaagcgggaaatattaatacggacgacggatcgatacgcatcgtctccgcacacagccctttgcgcgaattgcagatactcaaagacaaactgttgaaaattctgcatgaacatcccgattggcagccgcatgatatagccgtattaaccccgaacatcgaatcctatacgccttttatcgaagccgtgttcggacaggcgcagcccggtgcgcaggcattgccgtattccgtttcagacgtgaaaatcagccgccgacaaccgtttttttatacattggaatgcctgtccgacttgttggaaagccgatttgaagtcgataaagtgcttgtgcttttagaaaccgcacccgtgttgcgccgtttcggactgactgaggacgatttgccgcttttgcacgacatggttgccgatttgaacgtccgctggggtttggacggagaaatgcgcggcggcacggatcagctgtttacctggaagcaggcggtagaacgcatgatattgggctggatgctgcccgaaggcggcaatccgatgtggcaggatgtcagcgcgtggtatgccgacgtgaaccaaaccgccctgttcggacgttttgccgccctcctcgaaaccctgtcggatattgtacggatatggcagcaacctgcgacggtcggcgaatgggtggcgcgttgccgggatttgcttgaaacattgttccaaaccgaagccgatgaccaaaaggcagtccaaaacctcgaaaacgaatgggtcaaatggcaggcggaaaccgaattggcgcaattttccggacagttgccgccgcacaccgtcatccgccacatccgccgctttctcgacagcgaaagcgaggcaggctttttacgcggcggcatcaccttttgcagtatggtgccgatgcggagcctgccctttaaagtcatctgtctgttgggtttgaacgacggagattttccccgcaataccaaagccgccgtattcgacctgattgccaaacatcccgccaaaggcgaccgcgcccgccgcgatgacgaccgctacctgttcctcgaagccctcatcagcgcgcgtgaaatcctctacctgtcctacatcgggcgcgacatccgcaaagacgaagagcttgccccgtcttccctgttgggcgaactcatcgataccgttgccgctatggcgggcatcggtagtcgccaacttgcacaaaactggatagaacagcatccgctgcaagccttttcacgccgatatttccaagaaggcggacgttcagacggcatattcggcacgcgtaccgactacgccaccgcgctcggacaaacgcccgaaccgccgcaaccctttttcgaccaacccgtagaaaacgccgaacctgttgccgaaatcggacaggacgaatttatccgtttctggcgcaaccccgtcaaagtatggcttcagcagcagcttgcgtggagcgaaccccatatcggcgaagcctgggagcctgccgaacccttcgagccgcaacacgccgatcaaatcgccgaaatctatattgaggcgcgccgcgaaggacaagatttttcccaaaccgccgcccgcatcagggcggaaagcctgctgccgtcgggagagttgggcagactttggcagcaggacttccaaaccgctgccaaacaaatcgacacggcggttttaaacagtcccaaacttcctccgctgccctacgccataccgtcggacgggcaaatcctgaaaggcagcttgggcaatctgtaccgctgcggacaagtgttttacgcctacggcaaacccaacgcgccgcaacgtatcgcttttttgttggaacacctgatattttgcgccgttatgccgtctgaagccgaaatgcggcaaacctttatcgtccaatccggagaaaccgaaatattggcggaaatcgcgcaagacagggcattgcagctattgtcggaatggatggcgtttttcaatatcgggcaaaaccgcccgctgccgttttttgccaaaacctcgcttgccgccgccgaagcgtttgcccaaaaacaagattgggaagccgccctgaaaaaagcccaaaccgcctattacggcagcaaagtcagcaaagggcagaaagactataccgaagtcgccctcgtgttcggcaacgcaagccaaaacccgctcgaacagcccctgtttgaaaacctcgtccgtctgcttgccgacacgtttgccgcagcggaaaaaaaggaagaggccggagcagcctga

SEQ ID NO: 61258 - DNA, 843 bp, Neisseria meningitidis
atgattcaacacgcaggcttgggctaccgccgcgacttggcggaagactttctctcgctttccgaaaacagcccgatatgctttatcgaagccgcaccggaaaactggctgaaaatgggcggctgggcgcgcaaacagtttgaccgtgtggcggaacggctgccgctggcgttgcacggattgtctatgtcgctgggcgggcaagcaccgctggatactgatttgatagacggcatcaaagaaatgatgcgccgttacgattgcacgtttttctccgaccatttgagctactgccacgacggcggtcatctttacgatttgttgccgctgcccttcaccgaggaaatggtgcatcatacggcgcggcgtatccgtgaagtgcaagaccgtttgggctgccgcatcgccgtggaaaacacatcctactatctgcattccccgcttgccgagatgaacgaggtcgagttcctcaacgccgtcgcacgtgaggccgattgcggcattcatctggatgtgaacaatatctacgtcaacaccgtcaatcacggcctgttgtcgccggaggcttttttggaaaatgtggatgcagatcgcgtgtgctatatccatattgccggacatgacgtggaaacgccggaattgttgattgatacacatggcgcggcagttttgccgactgtttgggacttgctcgaacttgcctatgccaagctgccgacgattccgcccaccctgttggaacgcgattttaatttcccgccttttgccgaactcgaagccgaagtcgccaaaatcgccgattatcaaacgcgtgccggaaaggaataccgccgtgcagcctga

SEQ ID NO: 61259 - DNA, 2829 bp, Neisseria meningitidis
atgatggacgaaaaactcaatttctcttacctgttcggttcgaacgcaccctacattgaggaattgtacgaggcttttttggaaaaccccgatgcggttgatgaaaaatggaagcagtatttcaccgatttgagcaaacagccggggacggttgctgtcgatgtcgcacacacaccgattcgcgaatcatttgttactttggcgaaaaagaaaattgcatctgccgttgcgggcggtgcggatgaggcaatgctgaaaaagcaagtcagcgttttacggctgatttctgcctatcgtatccaaggcgtgggtgcagcccaacttgatccgctcaaacgtatccccccgcgcgatattgaagccctcgatccgaaattccacggtctgtcagatgccgatatgacgcttcaattcaatatgggcgagggcgattttgccaatcgcggcaaactgcctttgtcccaaatcatcagcaacctcaaacaaacctactgcggccacatcgcattggaatatatctatattcccaataccgaagagcgccgctgggtacgcaattattttgaaagcgtattgtccacaccgcattacaatgccgatcaaaaacgccgtatcttgaaagagatgactgctgccgaaactttggaacgttatctgcataccaaatatgtcggtcagaaacgtttcggtgtcgaaggcggcgaaagcgcgattgccggtttgaactacctgattcaaaacgccagtaaagacggcgtggaagaagtcatcatcggtatggcgcaccgtggccgtctgaatgttttggtgaacattttgggcaaaaaacccggcgatttgtttgccgaatttgaaggtcgtgccgaaatcaaactgcccagcggcgacgtgaaataccatatgggcttcagctccgatattgctaccccgcacggcccgatgcatgtttctttggcgttcaacccgtctcacttagaaatcgtcaacccggtggtggaaggttctgcgcgcgccaaacaaaaacgtttgggcgaaaacggccgcgacaaagtcttgccggtattgattcacggcgactccgcatttatcggtctgggagtcaaccaagcgacattcaacctgtctaaaacgcgcggttataccaccggcggtacggttcatatcgtcatcaacaaccaaatcggctttaccacttccgatatccgcgatacccgttcaaccgtacactgtaccgatatcgcaaaaatggtttccgctccggttatccatgtgaacggcgatgatcctgagcgtgtttgctttgccatccaagccgctttggattaccgcaaaaaattccataaagacatcgtgattgacgttgtctgctaccgtaaatggggtcacaacgagggcgatgatccgaccttgacccaaccgatgatgtacaaaaaagtatcgcaacaccccggtgcgcgtgctttgtacaccgagcaactgattgccgaaggcgtggtaacccaagccgaggcagacggttacatccaagcctaccgtgatgctttggacaaaggcgaacacgtcgagcaaacaacgttgagcaactttcaacgcacgcaaatcgactggagcaaataccaaggcaaagattggcgcgaacacatcgaaaccggtttgcctgccgcagatattgagcgtctcactgagaagtttaccgccgtaccggaaggctttgccctgcatccgactgcaaaacgtgtgattgaagcgcgtaaagccatggcatccggcaaacaagccatcgactggggtatggcggaaaccctcgcatacgccagcctcgtaaccaaaggccatggcgtgcgtatttccggcgaggactctgggcgcggtacattctcacaccgtcatgcggtattgcacgatcaaaaacgcgaaaaatgggacgacggtacttatgtccctctgcgccatatgggcgaaggtatgggcgagttcctggttatcgactccattttgaacgaagaagccgtgatggcgttcgagtacggctttgcctgctccgcgcctgacaagctgaccatttgggaggctcaattcggtgacttcgccaacggcgcgcaagtgactattgaccaattcctgtcttcaggcgaaaccaaatggggtcgtttgtgcggtctgaccaccatcctgccgcacggctacgacggtcaaggccccgagcactcctctgcacgcgtagaacgttggttgcaactgtgttccgagaacaatatgcaagtcatcatgccgtctgaagcgtcgcaaatgttccacctcttgcaacgccaagttttgggttcataccgcaaaccgctggtgattttcatgtccaaacgcctgttgcgcttcaaaggtgcaatgagcccgctggaaaacttcaccgaaggttcgactttccgtccggttatcggtgataccgccgaacgcgcaagcaacggcagcgtgaaacgtgtggtattgtgtgccggtcaggtttactatgacttggaagcaggccgtaccgagcgtaaactggaagatgatgttgcgattgtccgcgttgagcagctgtatccgttcccatacgaggaggttaaagccgaactggcgaaatatccgaacgcaaaatctgtggtttgggcacaagaagagccgaaaaaccaaggtgcgttctaccaaatccgccaccgcatcgaagacgttatcagcgaagagcaaaaactgtcttatgccggtcgtccaagcagcgcatcgcctgcagtgggctactcaagcaaacatattgcccaattgaaacaattggttgaagacgctttggcgttgtaa

SEQ ID NO: 61260 - DNA, 204 bp, Neisseria meningitidis; identical to SEQ ID NO: 38753

SEQ ID NO: 61261 - DNA, 1332 bp, Neisseria meningitidis
atgctgttcaaccacaccgcttccgaacttctcgacctctgccgccgcacgctcgacttggcaaaagcagcgggcgcgaccgccgccgaagccgatttcagcgaatcattgggacaaagcgtcagcgtgcggctgggcgaaatcgaacaaatcgagttccagcaggacaagtcgctggacattaccgtttacgtcggcaaacgcaaaggccgcgccagcactgccgacttctccgaaaaagccctgcaagacaccgtcaaagccgccatcgacatcgcccgctacaccgccgaagacgattgcgcaggtttggcagacgcttcgcttatggcgcaacacatcggcgaccccgacctttaccacgaatgggatttggatacggaagccgccgtcgagttggcaaaacaatgcgaacaagccgccctgaacgaggatgagcgcatcgaaaactccgaaggggcggcggtgcaaaccggacattaccaatacgtttacggcaacacccacggttttgccgcacaccagcaaggcacacgccacagcatttcatgcagcgtcgttgccgccgacgaaaacggcatgcagcgcgactactggtacgattcctcctgccgccatcaagacatggacagcccgacgcaaatcggtcaaaccgccgccgaacgtaccttacgtcgtctgaacagccgcagcattccgaccggaagctaccccgtcctattcgatgcgaccgtttcgggaggtctgatcggacacctcgtcggcgcactgtccggcggctcgctctaccgccaaagcagcttcctgatcgacagcataggcaaacaggtcctgcccgatttcctcaacctgcgcgaagaaccgcacatcccccgctctttccgcagcagctattttgatgcggaaggcgttgccaccgcgccgcgcttcgtgattcaaaacggcattgtcgaaggctatttcctcagcagttacagcgcgcgcaaactcggtatgcagaccacgggcaacgccggcggcgcgcacaacctgtatttgaaccatacgcacgaaacgcaatccgacctgctgaaagaaatggggacgggattgttggtaaccgaactgatgggacagggcgcgaacaccattaccggtgactactcgcgcggcgcggcgggtttttgggtggaaaacggcgtgattgcctaccccgtccacgagattaccgtagccggacgcttgcaggatatgtaccgcgacattgtcggcgtggcggatgacgctttgcggcgttcgtccaacaaaatcggctcgattctgattgcggggatgacggttgccggaagctga

SEQ ID NO: 61262 - DNA, 996 bp, Neisseria meningitidis
gtgaacctgaaaaaccgccattttctgaaacttttagacttcacgccggaagaaatcaccgcctacctcgaccttgccgccgaattgaaagccgccaaaaaagcagggcgcgagattcagcggatgaaagggaaaaacatcgccctgatttttgaaaaaacctctactcggacgcgctgcgcgtttgaagtcgccgcgcgcgatcaaggcgcgggagtgacttatttagagccgtccgccagccaaatcgggcataaggaaagcatcaaagacaccgcccgcgtgttgggcaggatgtacgatgccatcgaatatcgcggtttcggtcaggaagttgttgaagaattggcgaaatacgcgggcgtacccgtgttcaacgggctgaccaacgagttccatcccacacaaatgcttgccgacgcactgactatgcgcgaacacagcggcaaacctttgaaccaaaccgcgtttgcctacgtcggcgacgcgcgttacaacatgggcaattccctgctgattttaggggcaaaattggggatggacgtgcgtatcggcgcaccgcaaagcctgtggccgtctgaaggcattattgccgccgcacacgccgccgccaaagaaaccggcgcaaaaattaccctgaccgaaaacgcgcatgaagccgtgaagaatgttgattttattcataccgatgtgtgggtcagcatgggcgagccgaaagaagtctggcaggaacgcatcgatttgctgaaagattaccgcgttacgcccgaactgatggcggcatcgggcaatccgcaagtcaaattcatgcactgcctgcccgccttccacaaccgcgaaaccaaagtcggcgaatggatttacgaaaccttcgggctgaacggtgtggaagttacagaagaagtattcgaaagccccgccagcatcgtgttcgatcaggcggaaaaccgtatgcacacgattaaagcggtaatggtcgcggctttgggcgactga

SEQ ID NO: 61263 - DNA, 1215 bp, Neisseria meningitidis; identical to SEQ ID NO: 38760

SEQ ID NO: 61264 - DNA, 246 bp, Neisseria meningitidis
atgattaatcatgagtgtattaaccaaccgtacggacggatactgaaattttcccgcgtacaggccaaagaaatgcttacggcagacgaattgaaagaaaattttgcccaaaacggccagacgctggcgcagtgggcaagagagaacggctttaagccgcgcgatgtgtatctagtgatcggcggacagcgcaaaggcaattacggcaaggggtacgaaattgccaagaagctgggactgaaataa

SEQ ID NO: 61265 - DNA, 840 bp, Neisseria meningitidis; identical to SEQ ID NO: 55224

SEQ ID NO: 61266 - DNA, 1128 bp, Neisseria meningitidis; identical to SEQ ID NO: 54295

SEQ ID NO: 61267 - DNA, 687 bp, Neisseria meningitidis
gtgcaggcggatttagcttatgccgccgaacgcattacccacgattatccgaaaccaaccggtgcaaacaacacaagcacagtaagcgattatttcagaaacatccgtgcgcattccatccacccccgagtgtcagtcggctacgatttcggcgactggaggatagcggcagattatgccagttacagaaaatggaacaacaataaatattccgtcaacacaaaagaggtgagaagaaacaggggcaacagtgaaaacctgaagacggaaaatcaggaaaacggcagcttccacgccgtctcttctctcggcttatcagccatttacgatttcaaactcaacgataaattcgataaattcaaaccctatatcggtgcgcgcgtcgcctacggacacgttaaacatcaggttcattcggtggaaacagaaaccaagattattttcactacaccaacgaaaggcgctaaagttggaggcacgatcctagacaaatcgatgagcaaacctccctatcacgaaagcaacagcatcagcagcttgggtcttggcgttatcgccggtgtcggtttcgacatcacgcccaagctgaccttggacaccggataccgttaccacaactggggacgcttggaaaacacccgcttcaaaacccacgaagtctcattgggcatgcgctaccgcttctga

SEQ ID NO: 61268 - DNA, 1170 bp, Neisseria meningitidis
atgcgaaaaaaacttaccgccctcgtattgtccgcactgccgcttgcggccgttgccgatgtcagcctatacggcgaaatcaaagccggcgtggaaggcaggaactaccagctgcaattgactgaagcacaagccgctaacggtggagcgagcggtcaggtaaaagttactaaggccaaaagccgcatcaggacgaaaatcagtgatttcggctcgtttatcggctttaaggggagcgaggatttgggcgaaggtctgaaagctgtttggcagcttgagcaagacgtatccgttgccggcggcggcgcgacccagtggggcaacagggaatcctttatcggcttggcaggcgaattcggtacgctgcgcgccggtcgcgttgcgaatcagtttgacgatgccagccaagccattgatccttgggacagcaacaatgatgtggcttcgcaattgggtattttcaaacgccacgacgatatgccggtttctgtacgctacgactctccggacttttccggtttcagcggcagcgttcaattcgttccgatccaaaacagcaagtccgcctatacgccggctcatgttgttgtgaataacaaggttgctactcacgttccggctgttgtcggcaagcccggatcggatgtgtattatgccggtctgaattacaaaaatggcggttttgccgggaactatgcctttaaatatgcgagacacgccaatgtcggacgtaatgcttttgagttgttcttgatcggcagcgcgacgagtgatcaagccaaaggtaccgatcccttgaaaaaccatcaggtacaccgcctgacgggcggctatgaggaaggcggcttgaatctcgccttggcggctcagttggatttgtctgaaaatgccgacaaaaccaaaaacagtacgaccgaaattgccgcgactgcttcctaccgcttcggtaatgcagttccacgcatcagctatgcccatggtttcgacttgatcgaacgcggtaaaaaaggcgaaaataccagctacgatcaaatcatcgccggcgttgattatgatttttccaaacgcacttccgccatcgtgtctggcgcttggctgaaacgcaataccggcatcggcaactacactcaaattaatgccgcctccgtcggtttgcgccacaaattctaa

SEQ ID NO: 61269 - DNA, 1020 bp, Neisseria meningitidis; identical to SEQ ID NO: 54248

SEQ ID NO: 61270 - DNA, 1398 bp, Neisseria meningitidis
atgactgtccgtatcgaacacgatttattgggcgaccgcgagattcccgccgaagtgtattggggcatccacaccctgcgcgccattgaaaactttaaaatctccacacaaaaaatttctgacgtgccgcagtttgtccgcagtatggtgatggtgaaaaaggcgacggcacaggcaaacggtgagttgggcgcggtcaagcccgaaatcgccgccgccattgaaaaagcctgcgacgaagttctgctgaacaaccgctgcctcgaccaattcccgtccgacgtgtatcagggcggtgcgggtacttcggtcaatatgaacaccaacgaagtcatcgccaacctcgcattggaagtcttgggatacgaaaaaggccgctacgacatcgtcaatccgatggatcacgtcaatgccagccaatccaccaacgatgcctaccctaccggcttccgccttgccgtgtattacagcatcggcgaattgctcgacaaactggccgtcctgaaaaacgcctttgccgccaaagccgaagagtttaaagacgttttgaaaatgggccgcacccagcttcaagatgccgtgccgatgactgccggccaagaattccaatctttccaagtgttgttggaagaagaaatcctcaacctcgaccgcacccgccaactgctgttggaagtcaatttgggcgcaacggcaatcggcacgggcgtgaacacgcccaaaggctacgccgaactggtggtcaaaaaactctccgaagtcagcggcttgccttgcaaactgaccgaaaacctgattgaggcgacctccgactgcggcgcatatgtgatggtacacggcgcattgaagcgcacgacggtcaaactctccaaaatctgcaacgacttgcgcctgctctcttccggcccgcgtgccggcttgaaagaaatcaacctgcccgaattgcaggccggttcttccataatgcccgccaaagtcaatcccgtgattcccgaagtggtcaaccaagtctgcttcaaagtcatcggcaacgacacgacgattaccttcgccgccgaagccgggcaactgcaattaaacgtgatggagccggtcatcgcccaatgtatgtttgaaaccatttccctcttgggcaatgccgcagtcaacctgtccgacaaatgcgtcaaaggcattacggtcaaccgcgaaatctgcgaacgttacgttttcaactccatcggtttggtgacttatctgaatccgtatatcggacaccacaacggcgatttggtcggcaaaatctgcgcccaaaccggcaaaggcgtgcgcgaggttgtcttggaacgcgggctgttgagcgaagaagaactcaaccgcatcctctctcccgagaacctgatgaacccccatctgtaa

SEQ ID NO: 61271 - DNA, 1170 bp, Neisseria meningitidis
atgagcgaatatctgtttacttccgaatcggtatccgaaggccatccggacaaagttgccgaccaagtatccgatgcgattttggatgccatcttggcgcaagaccccaaagcgcgtgtcgccgcagaaactttggtcaacacaggcttgtgcgtattggcaggcgaaatcaccaccaccgcccaagtggactacatcaaagtcgcacgcgaaaccatcaaacgcatcggctacaactcctccgagctgggctttgatgccaacggctgcgcggtcggcgtgtactacgaccaacaatcccccgacatcgcccaaggcgtaaacgaaggcgaaggtatcgacttgaaccaaggcgcaggcgaccaaggtttgatgttcggttatgcctgcgacgaaaccccgaccctgatgccgtttgccatctattacagccaccgcctgatgcaacgccaaagcgaattgcgtaaagacggccgcctgccgtggctgcgtcccgacgcaaaagcgcagttgaccgtggtttacgacagcgaaaccggtaaggtaaaacgcattgataccgtcgtcctctctacccagcacgatccgtccatcgcttacgaagaactgaaaaacgccgtcatcgagcagattatcaagcccgtcctgccgtctgaactgctgaccgacgaaaccaaatacctgatcaacccgaccggccgcttcgtcatcggcggcccgcaaggcgactgcggtttgaccggccgtaaaatcatcgtcgatacctacggcggcgcggctccgcacggcggcggcgcgttttccggcaaagacccgtccaaggttgaccgttccgccgcctacgcctgccgctatgtggcgaaaaacatcgtcgccgcaggattggcaacccaatgccaaatccaagtttcctacgccatcggcgttgccgaaccgacttcgatttccatcgacactttcggcacaggcaaaatcagcgaggaaaaactgattaccttagttcgcgaacatttcgacctgcgccccaaaggcatcgtccaaatgctcgatctcttgcgcccgatttacagtaaatccgccgcttacggacatttcggccgcgaagaacctgagttcacttgggagcgcaccgacaaagctgctgcattgagggcggcagcggggctgtaa

SEQ ID NO: 61272 - DNA, 144 bp, Neisseria meningitidis; identical to SEQ ID NO: 53494

SEQ ID NO: 61273 - DNA, 2028 bp, Neisseria meningitidis
atggaagtcattcgataccccgattcccccttcaaactccaccaacccttcccgcccgcaggcgaccagcctaccgctattgccgacttgctcgaagggctttcagacggccttgcctaccaaaccctgctcggcgtaaccggttcgggcaaaacctacaccatggcgaacgtcatcgcccaaagcggccgacccgccatcatcatggcgcacaacaaaacccttgccgcccagctttatgccgaaatgcgcgagtttttccctgaaaacgcggtggaatatttcgtctcctactacgactattaccaacccgaagcctatgtgccaagccgcgatttgttcatcgaaaaagacagtgcgatcaacgaacacattgaacaaatgcgcctttctgccaccaaaaacctgatgacgcgcgatgacgtgattatcgttgccactgtgtccgccatttacggtatcggcgacccgactgagtatcaacaaatggtgttgtccgtcaaagaaggcgacaccatcgagcagcgcgacatcatcgccacgctcgtttccatgcagtacgaacgcggcgatttggatttcaaacgcggcagcttccgcgtgcgcggcgacgtgattgacgtgtaccccgccgaaagctccgaaaacgccttgcgtatcagcctgtttgacgacgaaatcgaccgcctcgatatgtttgacccgctttcaggcagcctgcaccaacgcgtcggccgctacaccgtcttcccgtccagccactacgttaccccgcgcgacaccgtattgcgcgcctgcgagtccatcaaagaagaattgcgcgaacgcattgatttctttaccaaagaaaaccgtcccgtcgagcaacaacgcatcgaacagcgcacccgtttcgacctcgaaatgctctacgaaatgggcttctgcaaaggtatcgaaaactactcccgtcacttctccggcaaaaaagaaggcgaaccgccgcccacgctgatggactacctgcccgacaacgccatcatgttcatcgacgaaagccacgttaccgtcacacaaatcggcggcatgtacaaaggcgacgcatcgcgcaagcaaaacctcgtcgattacggcttccgcctaccttccgcccgcgacaaccgcccgctcaaattccacgaatttgaaaaagtcatgccgcaaaccgtcttcgtttccgccacccccgccaaatacgaagaagaacacgccggacaagtggtcgaacaagtcgtccgccccacagggctggtcgaccctcaaatcatcatccgccccgtcgccacccaagttgatgacttaatgagcgaaatcaacgaccgcatccaaaaaggcgaacgcgtactcgttaccacccttaccaaacgcatggcggagcaactcaccgactattacagcgaactcggcatcaaagtgcgctacctgcacagcgacatcgacaccgtagagcgcgttgaaattattagagatttacggctcggattgtttgacgtactcgtcggcatcaatctcttgcgcgaaggcctcgacatcccagaagtctccctcgtcgccatcctcgacgcagacaaagaaggcttcctgcgctcccaccgcagcctgattcaaaccataggccgcgctgcgcgcaacgtgaacggcgtcgcgattctgtacgccgacaaaatcaccgactctatgaaagccgccatcgacgaaaccgaacgccgccgtgaaaaacaaattaaattcaacgaagaacacggcatcgtgccgcaacagattaaaaaacaggtcaaagacatcattgacggcgtgtaccacgaagaagacagcggcaaaggccgtagacaaggcaaaaacaaagttaaagtcggcgaaattcacaacgaagaagacacgattaaagaaatcgccaaactcgaaaaagccatgcaacaggcggctagggatttgcagtttgaagaagcggctgttcttcgtgataggatacggaatattaaagagagtttgttgtttggggcggaataa

SEQ ID NO: 61274 - DNA, 195 bp, Neisseria meningitidis; identical to SEQ ID NO: 38181

SEQ ID NO: 61275 - DNA, 1146 bp, Neisseria meningitidis
atgaccgaaactcaatccctagagcttgccaaagagctgatttcccgaccatccgttacccctgacgacagggattgccaaaaactccttgccgaacgcctgcacaaaatcggttttgcggctgaagaactccatttcggcgacaccaaaaacatctggttgcgacgcggcacgaaagctcccgtcgtctgttttgcagggcataccgacgttgtaccgacaggtcctgtcgaaaaatgggattcgcccccgttcgaaccggccgagcgcgacggaagattatacgggcgcggcgcggcagacatgaaaaccagcatcgcctgcttcgttaccgcctgtgaacgcttcgttgccgaacatcccgaccaccaaggcagcattgcgcttctgattacttccgacgaagagggcgacgcgttggacggcacgaccaaagtcgtcgatgtattgaaagcgcgcgacgagcttatcgactactgcatcgtcggcgaaccgacagccgtggacaaattgggcgatatgattaaaaacggccggcgcggctcgctgtcgggcaacctgaccgtcaaaggcaagcaaggccatattgcctatccgcatttggcaatcaatcccgtgcatacttttgccccggccttgttagagctgacgcaggaagtctgggacgaaggcaacaaatacttcccgccgaccagctttcaaatttccaatatcaacggcggtacaggcgcgaccaatgtcattccgggcgagctgagcgtcaaattcaatttccgcttctccaccgagtccaccgaagcagggctgaaacaacgcgtccacgccattttggacaaacacggtgtgcaatacgatttgcagtggtcgtgttcggggcagcccttcctgacccacgcgggcaaactgaccgacgtggcacgcgccgccattgccgaaatctgcggcgtagagaccgaattgtccaccaccggcggcacttcggacggacgcttcatcaaagccattgcaaaagaactcatcgaattaggcccgtccaatgcgaccatccaccaaatcaacgaaaacgtgcggctaaacgacattccgaagctgtctgcggtgtatgaggggatattggcgcggttgttggctggaaatgccgtctga

SEQ ID NO: 61276 - DNA, 726 bp, Neisseria meningitidis; identical to SEQ ID NO: 55175

SEQ ID NO: 61277 - DNA, 837 bp, Neisseria meningitidis
atgatagacctgcactgccattccaccgtttccgacggtatgctttcccccgccgaagtcgtccgcctcgcgcatcaaaacggctgcacgctgctggcgttgaccgaccacgaccacaccggcggcatcgccgaagcgcgtgccgaagccgacaggctcgatttgcgcctgattaacggcgtggaaatctccgtcacttggcgcggacgcaccatacacgttgtcggtttggatttcgacgaacgggacgaaaacctgcaaaacctgttggcgcaagtgcggcaaggccgtctgaaacgcctcgaagccatcgccgccaagctcgaaaagaaaggcatcggcggcgcatacgacggcgcgctcgcgctggcggcaaacaaagaaatggtcagccgcacccacgtcgccgagttcctcatccgggcgggacatgtcaaaaacaagcagcaggcgttcaccaaatacttgggcgacggcaaatcctgcgccgtccgacacgaatgggcgacgctggaagactgcgtctccgccgtcaacggcgcgggcgggctggcggtcatcgcccatccgatgcgctacgatttgtccgccaccgccaagcgcaatctgtttgaagaatttaaaaacctcggcggcgcaggcatcgaagtccacagcggcaactgttgcaaaaacgaccgcctcaactacgcgcttttggcagaacgcttcggattgttggcaagcgcgggcagcgatttccaccgcttaaacgatttcagcggcggtatcctcggcgcgtgtcccgagctgccggaaaactgcaggccggtgtgggaacatttttcccggcattga

SEQ ID NO: 61278 - DNA, 750 bp, Neisseria meningitidis
atgcttatccaggcagttaccattttccccgaaatgttcgacagcattacccgctacggcgtaacgggacgcgcgaacagacagggaatttggcagtttgaagcagtcaatccccgaaagtttgccgacaacagattgggctacatcgacgaccgcccgttcggcggcggcccgggaatgattatgatggctccgccgcttcatgcagcaatagaacacgcgaaagcacaatcttcccaaaccgcaaaagtcatctacctcagcccccaaggaaaaccgctgacacaccaaaaagcggcagaactggcagaacttccgcatctgattctgctgtgcggacgctatgagggaatagacgaaagactgctgcaaaccagcgtcgatgaagaaatcagcatcggagacttcgttgtttccggcggagagcttcccgccatgatgctgatggatgcggtattgaggctcgtacccggcgtattgggcgatatgcagtctgccgaacaggattcgttctcaagcggcattttggactgcccccactacaccaaacccttagaatttcaaggtatggctgttccggaagtattgcgttccggcaatcatggcttgatagcggaatggcggttggaacaatcgctgcgccgcaccttggagcgcagacccgatcttttggaaaagcgcgttttaatcccaaaggaatcccgcctcttagaaaccatccggcaagagcaacgggaaatccaatcataa

SEQ ID NO: 61279 - DNA, 834 bp, Neisseria meningitidis
atggcaatcgttaaaatgaagccgacctctgcaggccgtcgcggcatggttcgcgtggtaacagaaggtttgcacaaaggtgcaccttatgcgcctttgcttgaaaagaaaaattctactgccggccgtaacaataatggtcatatcaccacccgtcacaaaggcggcggtcataaacaccattaccgtgttgtagactttaaacgtaacaaagacggcattcctgccaaagtagagcgtatcgaatacgatcctaaccgtactgccttcatcgcactgttgtgctatgcagacggcgagcgtcgttacatcatcgctcctcgcggtattcaagtcggtgccgtattggtttccggtgctgaagctgccatcaaagtaggcaacaccctgccgatccgcaacattcccgttggtacgactatccactgtatcgaaatgaaacccggtaaaggtgctcaaatcgcacgttctgccggtgcttctgcggtattgctggctaaagaaggcgcgtacgctcaagtccgcctgcgctctggcgaagtccgtaaaatcaacgtagattgccgtgcaaccatcggtgaagtcggtaacgaagagcaaagcctgaaaaaaatcggtaaagccggtgccaatcgttggcgcggtattcgtccgactgtacgtggtgttgtcatgaaccctgtcgatcacccgcatggtggtggtgaaggccgtacgggcgaggcccgcgaaccggtcagcccatggggtactcctgctaaaggctaccgcactcgtaataacaaacgcacggataacatgattgttcgtcgccgttactcaaataaaggttaa

SEQ ID NO: 61280 - DNA, 891 bp, Neisseria meningitidis
atgtttcccgttttccatctttcaggcgaaagccgccgccggatgcttcaggcggcatcgcgttttccctatgttttcaaagcccgtgcggaagattcgcacaaagggactttcggcacgctcgccgtagtcggcggatcggcagggatgagcggcgcgcccgtattggcggcatcggcggcgatgtatctcggctgcggcaaggtgtgggcgggtttcaatcaggatgcgcttccgtttgccgtcattgccggttttcccgaaattatgttggacacggcagacggtttgaccaagcgtcaaggcataaacgcttggatggtaggttgcggcctgggtacggataaagcggcggtcggaacgcttgccggaattttggcggaacacacggacaagcccgtccttttggatgcggacgcgctgaacatattatcaaccgatgccgaaacccgaaatctggcgcgcgggtgtaaaaacctgattttaacgccacaccccgccgaagccgcgcgcctgcttggaacgacggttgcacaggttcaggcggatcggacggcggcagtgaggaagataggggcaattttcggcgcaaccgtggttttaaaggggcacaaaacattggttgctgcgtccgatacggaaatctatgtcaacgaaagcggcaacgcgggattggcaacggcgggcagtggcgacgtattgggcggcatcatcggcagtctgctcgcacagggcgtgccggtttttgaagccgcctgcgcgggcgcgtggctgcacggcgcggcggcggatgtcataaaagaatcggcaggcattgcggcagggctgttggcaggggaaatcgctccggcggcaaggtggctgcgcaaccggataactaaaagtatgtaa

SEQ ID NO: 61281 - DNA, 921 bp, Neisseria meningitidis
atgagaatcaggctggggcggcacaacgcgcccgactttccgcacggggccgccgtaaccataggcaattttgacggcgtacacctcggacacaaacacatcctccaaaaactccgcctcgaagccgatgcgcgcggcctgcccgtcgtagccgttatcttcgagccgcaacccaaagaattttttgcaagccgcacgggtagagtgccgccgtgccgcatcagccccctgcgtaccaaactggaattgctggaagggacgggctgcatcgatgccgtctgggttttgcgtttcgaccggcatttttccgaaatatccgcgcaagggtttatcgaccgcctgctgcgtcaaactttaaatacgcgctatttgctcgtcggcgacgatttccgtttcggtgcggggcgggaaggctgttttgaactgttggcacaacagcccgatatgcagaccgaacgcacgccttccgtcatcgtcgaagacatccgcaccagcagtaccgccgtccgccaggccctttcagacggcaaccttgcctatgcgaaaaaacttttggggcacgactacgttttggggggcagggtggtgcacggcagaaaactcggacgcaccttaaacgccccgactgccaacatccgcctgcccggccaccgttatgcactcggcggcgtgttcgtcgtcgaagcggacggcgcattcggcacgcggcgcggcgtggcgagcttcggcttcaatcccaccgttgatagcggctgttctcaaaagcttgaagtccacctgttcgactttcaaggcgacctgtacggacaacggctgaacgtccgcttcctgcacaaactgcgcgatgaggaaaagtttgacggtatggaagaactgaaaaggcagatagcagccgatatggaagccgcaaagtgttggtag

SEQ ID NO: 61282 - DNA, 255 bp, Neisseria meningitidis; identical to SEQ ID NO: 39349

SEQ ID NO: 61283 - DNA, 828 bp, Neisseria meningitidis
atgaaactcgatatttatgctttgctggaacgcgccctgctttcgggcgacccagatgaaaaaggacggctgacggatgaggcgtttgccgccgttcagaacatggacggtgctgaaacaaacacgccgccggcggacttcccccgagcgggacggccggacaagcctgttttggtcgcgccgtcgcaactgaccccgcgcaaaatgaacacggcagaaggctatgcggcgatgctgcacgcgattgcgcatatcgaattcaacgccgtcaatctagctttggacgcggcataccgtttccgcacgctgccgtttcagtttgtccgcgactgggtgaaagtggcgaaggaagaggtgtaccatttccgcctgatgcgcgacagattgcgcgctttcggcttcgattacggcagtttcgaggcgcacaaccatttgtgggatatggcgtacaaaaccgcctacgacccgctgttgcgtatggcgttggtaccgcgcgtgttggaagcgcgcgggctggacgttacgccggggatacgcgcgaaggtggcgcagcgcggcgattcggaaacctgcggcgtattggacatcatttaccgcgacgaagtgggccatgtcgccatcggcaaccattggtatcaacacctctgccgcgaacgcggtttggaacctgtcgccctgttccgcagtctgattacccgttacgatatgtttatcttccgcggctatgtgaacatcgaagcgcgcgaaaaagcgggcttcagccgctttgaattggatatgctggaagatttcgagcagggtttgaaacagaacaaaaataccgtctga

SEQ ID NO: 61284 - DNA, 441 bp, Neisseria meningitidis; identical to SEQ ID NO: 47833

SEQ ID NO: 61285 - DNA, 651 bp, Neisseria meningitidis
atgatttcagttgaacacgtttccaaacgctatctgacccgccaaggttggcggacagtcttgcacgatattagcttcaaaatggagaagggcgagaaaatcggtattctcggccgcaacggtgcaggtaaatcgacgctcatccgtttgatcagtggcgttgagccgccgaccacgggtgaaatcaagcggacaatgagtatttcttggcctttggcattctccggtgcgtttcaaggcagtctgaccggtatggacaatttgcgtttcatctgccggatttacaatgtcgatatcgattatgtgaagaactttaccgaagagttttccgagttggggcaatatctttacgagccggtcaagcgttattcttcaggtatgaaggcgcgtttggcatttgctttgtcgttggcggtagagtttgattgctatttgattgacgaagtgattgcagttggtgactcgcgttttgccgataaatgtaagtacgagttgtttgaaaagcgcaaagaccgttccatcatcttggtgtcgcacagccacagcgccatgaagcaatattgcgataatgcgatggtgctggaaaaagggcatatgcaccagtttgaagatatggacaaagcctacgaatattataattcgctaccttaa

SEQ ID NO: 61286 - DNA, 891 bp, Neisseria meningitidis
atgaatcctaaatcccctttatttttacgcctgtccgatcgtttggacgtttatatcagactgatgcgggcggacaagcccattgggacgctgcttttgctgtggccgacctactgggcgttgtggctggcttcagacggtattcccgatttggcggtattggcggcgtttacaatcggcacgtttttaatgcgcagtgccggctgcgtcatcaacgattttgccgaccgcgattttgacggggctgtcgagcgcactaaaaaccgtccgttcgcacagggcagggtcaagaaaaaagaagcgctgctgctgacggcatttttgtgcctgcttgccgcattgtgcctgattccgctgaatcatctgacatggctgatgagcctgcccgcgctgtttcttgcgctgacttacccgtttaccaaacgcttttttccgattccccaactctatctcgggcttgccttttccttcggtatcccgatggcgtttgccgccgttgccggaaacgtgccgcctcaagcgtggatactctttgccgccaatgtgttatggactctggcgtatgacacggtttatgcaatggcggacaaagaagacgatttgaaaatcggcatcaaaacctccgccgtcacgttcgggcgttacgacatcgccgctgttatgctgtgtcatggcggctttaccctgctgatggcagtattgggggcggttatcggtgcggcatgggcatattggacggcaatccccatcgtcctgctgctgcaataccgccaatatgccgccatcaaaagccgcgtccggcaaatctgttttgaaacgtttttggcaaacaacagaattggttgggtgtggtttaccgccatttttgcccatacgtttttcgcgaaataa

SEQ ID NO: 61287 - DNA, 222 bp, Neisseria meningitidis; identical to SEQ ID NO: 50201

SEQ ID NO: 61288 - DNA, 1041 bp, Neisseria meningitidis
atggatatttcagattttgattttaccctgcccgaaaagctgattgcccagcatccgcccgaagtgcgcggcagcagccgccttttggttgcgctgccggatatgcccatgcaagaccgggtattcggcgatttgcccgattatgtcgaggcaggcgacgttttggtgttcaacaacaccaaggtaatgaaggcgcggctgtttgggcagaaagacagcggcggcaggatcgaagccctgatcgagcgtgttttagacagtcataccgcactggcgcacatccgttcgtccaaatcgcccaagcccggtatggggctggtgtttgaaggcggcatccgtgccgtgatggtcgggcgtgagggcgaactgttctgcctgcgttttgaaggcggtcaaaccgtttacgaacttttggaacagaacggacatctgcccctgccgccttatatcgaacgtgccgccgatgcggatgacgacagccgttatcaaaccgtttatgccaaatatcagggtgcggtcgccgcgccgacggcgggtctgcattttacggaagaacttttgcgccgcctgaaagacaaaggcgcagtaaccgcagaagtaaccctgcacgtcggtgcggggacattccaacccgtgcgtgtggaaaaaatcgaagaacacaaaatgcacagcgaatggtttgaagtgccgtctgaaaccgccgccgccgttgaggcggcaaaagcccgggggaacaaagtctgggcggtcggtacgacttccatgcgcgccctcgagtctgccgcgcacgagacgggacacttgaaggacgggcagggcgacaccgatattttcatcacgccgggctaccgttttaatgttgccgacaggctggttaccaatttccatctgccgaaatcgacgctgctgatgcttgtcagcgcgttttcgggtatgggtcatatccgcgccgcgtatcgttatgcggtcgaacgcgaataccgtttcttcagctacggcgatgcgatggttttggggcggaacgaaggggtggtacgttag

SEQ ID NO: 61289 - DNA, 1134 bp, Neisseria meningitidis
atgagcacccccgccctcctcgtcctcgctgacggcagcgtattccacggcacatcaatcggttacgaaggttcgacttccggcgaagtcgtgttcaatacttcgatgactggctatcaggaaatcctgaccgacccgtcctactgcaaacaaatcgttaccctcacctacccacacatcggcaataccggtaccaacgccgaagatgaagaaagccgcagcgtttacgccgccggtttgattatccgcgacctgccgctcttgcacagcaacttccgcgcctccgaaagcctgcacgactatctggtgcgcaaccaaaccgttgccatcgccgacatcgacacccgccgcctgaccacgctgttgcgtgaaaaaggcgcgcaaggcggtgcgattctgaccggcgcggacgctacggtcgaaaaagcgcaagaactcatcgccgcgttcggcagcatggtcggcaaagacttggcaaaagaagtttcctgcacggaaacttacgaatggacggaaggtgaatgggcattgggcaagggtttcgttacccctgacgaacagccttaccacgtcgtcgcctacgatttcggcgtgaaaaccaacatcctgcgtatgctcgcctcgcgcggctgccgcctgaccgtcgtccccgcccaaacgagcgcacaagacgtgttggcactcaatcccgacggcgtgttcctgtccaacggccccggcgaccccgagccttgcacctacgccatcgaagccgtgcaaaaactgatggaaagcggcaaaccgattttcggcatctgcttgggacaccagctcatcagcctcgctatcggcgcgaaaaccctgaaaatgcgcttcagccaccacggtgcgaaccaccctgtgcaagatttggacagcggcaaagtcgtcatcaccagccaaaaccacggttttgccgttgatgccgacaccctgcccgctaacgcacgcattacccacaaatccttgtttgacaacactttgcaaggcatcgagctgaccgacaaacctgtgttctgcttccaaggccaccccgaagccagccccggcccgcaagatgtcggctatttgtttgacaaattcattggcaatatgaaagcggcaaaacgggcataa

SEQ ID NO: 61290 - DNA, 291 bp, Neisseria meningitidis; identical to SEQ ID NO: 55959

SEQ ID NO: 61291 - DNA, 1005 bp, Neisseria meningitidis
atgtcgggcgcggctgccgcgctgcttgccggcatcatcctttatttcaaaagcgacaaaaagcggcaggaaaacggtgaatggagttccggtctggaatacgcctatatcctgacggcggtcggcgtgtttgccgctttgtccctgtttatgagctttaccgccgttttcctgattttcgttgtattgtgcggtacggcttggggggtatacaaataccgcctgaagactcatcccgaaatctcggaaagcagccacttcggcgattatttcggcagtttcttccctaccgttttggtattgttcctcatccggtcgtttattgccgaaccgttccaaatcccgtccagctcgatgcgcccgggcctgattaagggcgatttcattttggtcggcaaattttcctacggcctgcgcgtacccgttttaaacaatatatttattcctacaggcaaaatcgaacggggcgatgtggtcgtttttaattatcctttgcaaccggagatgacctacatcaagcgtattgtcggcattccgggcgatgtggtcgaatatcggaataaagttttgacggtaaacggaaaacctgcttccgatattcctgacggcacataccgttatcccgacgacaccgacccatccgaaatccacaatacggatatgttccacagcggtttggacggcaaatccttcaatattctgaaaaaagaaggacagcctgccgtttccctgcccgtattgggcaaatatacctccgatattatgtctgaaaacggatattccatagagcaaagcggtttggaacactgccaatatgccgacgacggcagcggtttcgtgtgcaaagttcccgaaggacgctatttcgctatgggcgacaaccgcgacaacagtgccgattcgcgctactggggatttgtggatgacaagctggttgtcggcaaggcaatgttcattttgatgaacttcggcgatttcggcagggccggtacggcaatccgttag

SEQ ID NO: 61292 - DNA, 744 bp, Neisseria meningitidis; identical to SEQ ID NO: 55280

SEQ ID NO: 61293 - DNA, 957 bp, Neisseria meningitidis; identical to SEQ ID NO: 55343

SEQ ID NO: 61294 - DNA, 1116 bp, Neisseria meningitidis
atgaaagtaggtttcgtcggctggcgcggtatggtcggttcggttttgatgcagcgtatgaaagaagaaaacgacttcgcccacattcctgaagcgtttttctttaccacttccaacgtcggcggcgcagcccctgatttcggtcaggcagccaaaacattgttggatgccaacgatgttgccgaattggcaaaaatggacatcatcgttacctgtcagggcggcgattacaccaaatccgtgttccaagccctgcgcgacagcggctggaacggctactgggttgacgcggcatcttctctgcgcatgaaagacgacgcgattatcgtcctcgaccctgtcaaccgcaacgttatcgacaacggcctcaaaaacggcgtgaaaaactacatcggcggcaactgcaccgtctccctgatgctgatggctttgggcggcctgttccaaaacgatttggtcgaatgggcaaccagcatgacctaccaagccgcttccggcgcaggtgcgaaaaacatgcgcgaactcatcagcggtatgggcgcggttcacgcccaagtggcggacgaacttgccgatcctgccggctcgattctcgacatcgaccgcaaagtatccgatttcctgcgcagcgaagactatccgaaagccaacttcggcgtaccgctcgccggcagcctgattccgtggattgacgtggatttgggcaacggccagtccaaagaagaatggaaaggcggcgtggaaaccaacaaaatcctcggccgcagcgacaatccaaccgtgattgacggcctgtgcgtccgcgtcggcgcgatgcgctgccacagccaagccatcactctgaagttgaaaaaagacctgcccgtttccgaaatcgaagcgattttggcaggcgcgaacgactgggtgaaagtcatccccaacgaaaaagaagccagcatccgcgagctgacccccgccaaagttaccggcacgctgtccgtccccgtcggacgcatccgcaaactgggtatgggcggcgaatacatcagcgcgttcaccgtcggcgaccagctcttgtggggcgcggccgagccgctgcgccgcgtattgcgtatcgtgttgggcagcctgtaa

SEQ ID NO: 61295 - DNA, 375 bp, Neisseria meningitidis
atgatagtccttcacggcatcccaaattgcgatacggtcaaaaaagccaaaaaccgacttgccggatacggcttggagtttgagtttcgggatttcaaaaaacagatgccttccgaagcggaaatctgctcgtggctggaacaagtgcctttggcaaccctgctcaacaaacgcgggacaagctggcgcaaactcgatgccgaaacacagcaaaaagccctgttctcgacagcggaggccgtcaaactgatgtccgaaatgccgagcctgatcaagcgtcccgtattggagtgcggcggcaaggtttacgccggcttcagcgaagaaacctacgacggcatcttcaaccggcaagccccgtgcagacagggataa

SEQ ID NO: 61296 - DNA, 726 bp, Neisseria meningitidis; identical to SEQ ID NO: 54640

SEQ ID NO: 61297 - DNA, 657 bp, Neisseria meningitidis; identical to SEQ ID NO: 55521

SEQ ID NO: 61298 - DNA, 666 bp, Neisseria meningitidis
gtggacaatatgatgaagttcaaatatgtttttctgttggcgtgtgttgtcgtttctttatcttatcgtttgaatgctgcaccgatgtttaacgataatcctgttgtttacggaaaaatcaaagtgcagagttggaaagcgcggcgggatttcaatattgtaaagcaggatttggatttttcctgtggggcggcttcggtggcgacgcttttgaacaatttttacgggcaaacgctgacggaagaagaagtgttgaaaaagctggataaggagcagatgcgcgcgtcgtttgaggatatgcggcgcattatgccagatttgggttttgaagcgaaaggctatgccctgtctttcgagcagctcgcacagttgaaaatccccgtcatcgtgtatctgaaataccgcaaggatgatcatttctcggtattgcgcgggatagacggcaatacggttttgcttgccgacccgtcgctggggcatgtttcaatgagcagggcgcagtttttggatgcttggcaaacccgtgagggaaatttggcaggtaagattttggcggtcgtgccgaaaaaagccgagacaatttcaaataaattgtttttcacacatcatcccaagcggcagacagagtttgcagtcggacaaatcaggcaagcacgtgcagagtaa

SEQ ID NO: 61299 - DNA, 948 bp, Neisseria meningitidis
atgaccgacatcacaccgtttgccaaccgcttgggcaaaaacatcaaacaccttatgaaatgggtgaaacgcaacggcatcgaagcctggcgcatttacgaccgcgacatcccccaattcccctttgccgccgatgtttacggcgatcgaatccaccttcaggaatacgataccggctggctgatgcggcccgaagaatacgaagcgtggcttgccgaagtcttggaagccgtcgctttcgttaccggttttgcgcccgaacaaatccgcctcaaacgccgcgaacgccaaaaaggtttgcagcagtacgagaaaaccggcaaggcgggcgacgatttcgtcatcaccgaaaacggccgcaagttttgggtcaaccttgataaatatttggatacggggctttttttggatcatcgaaacacgcgcaaaaaagtcggcgaaacggcggcgggcaaacgttttttaaacctgttttcctacaccggcagcttcaccgtctatgccgccaccggcggcgcggcatccagcgaaaccgtcgatttgtccaacacatatcttgattgggcgaaacgcaattttgaattgaacggcatcgatacggaacgacacaaaatcgtccgcgccgacgtgtttcaatatcttcagacggcatatggggaaggcaggcggttcgacctcattgtgatggacccgcccagcttctccaacagcaaaaagatgctcgacattctcgacatccagcgcgaccacaaaaagctgattgacggcgcggtgaagctgctcgcttcagacggcattttgtacttttccaacaacctgagcagcttcgtcttagacgacttggtatcggaacaatacgccgtcaaagacatttccaaacaatccgttcccgaagatttccgcaacaaaaaaatccataggtgctgggaaatccgccacaaatcttaa

SEQ ID NO: 61300 - DNA, 570 bp, Neisseria meningitidis
atggcggcaggcaaacataccaaacacagcaaccaggtacgcattatcggcgggcaatgtcggggcaggaaattgagttttgcatccgccaacggactgcgtccaacccccgatagcgtgcgtgaaaagctgtttaactggctgggacaggatttgacgggtaaaacggttttggatctcttcggaggcagcggcgcactcggtatagaagccgcttcgcgcaacgccaaacgcgtgctgatttcggataacaaccgccaaaccgtgcagaccttgcagaaaaacagtcgcgaactgggtttggggcaggtgcaaatcgtctgttcagacggcatcgcatatttgaagaccgtatccgaacagtttgatgtcgtctttctcgacccgccgtttgcatggcaggactggcaaatcctgttcgatgccttgaagccgtgcctgaacccccgggcattcgtctatctcgaggcgggtaggctgccggatatccccgattggctgacggaatatagagaagggaaatcagggcagagtacattcgaattaagggttttccaagtggctgaataa

SEQ ID NO: 61301 - DNA, 822 bp, Neisseria meningitidis; identical to SEQ ID NO: 55211

SEQ ID NO: 61302 - DNA, 324 bp, Neisseria meningitidis; identical to SEQ ID NO: 41034

SEQ ID NO: 61303 - DNA, 483 bp, Neisseria meningitidis
atgggctacatcaaaggcgtattcggcataaagggctggctgaaaattgccgccaacaccgaatattccgacagccttttggactaccccgagtggcatttggtcaaggacggcaaaaccatcagcgttacccttgaagccggaaaagtcgtcaacggcgaactccaagtcaaattcgaaggcataaacgaccgcgacttggcattctcattgcgcggttacaccatcgaaataccccgtgaagcattcgccccgacagaagaagacgaatactactggacagacttggtcggcatgaccgtcgtcaacaaagaccataccgttttaggcaaggtaagcaacctgatggaaaccggcgcaaacgacgtattgatgattgacggagaacacgggcagattctgattccgttcgtttcccaatatatcgaaaccgtcgataccggcagcaagattattactgccgactggggtttggactactga

SEQ ID NO: 61304 - DNA, 1005 bp, Neisseria meningitidis; identical to SEQ ID NO: 36487

SEQ ID NO: 61305 - DNA, 792 bp, Neisseria meningitidis
atgaatgtttattttctcggcggcggcaatatggcggctgccgttgcgggcggattggtcaaacaaggcggttaccgcatctatatagccaatcggggtgcggaaaaacgcgaacgtttggaaaaagagttgggggtcgaaacttcggcaaccctgccggagcttcattccgacgatgttttaatccttgccgtcaaaccgcaggatatggaagccgcgtgcaaaaatatctgcaccaacggcgcattggtgctttctgtcgcagccggattgtcagtcggtacgctcagccgttacctcgggggaagccgccgcattgtccgggttatgccgaatacgcccgggaaaataggactgggcgtatccggtatgtatgccgaagcggaagtatcggaaacagaccgcaggattgccgatcgaatcatgaaatcagtcggtttgaccgtttggttggaagatgaagcgcaaatgcacagcattaccggtatcagcggcagcggaccggcttatgtgttttatctgctggacgcattgcaaaatgccgccatccgacaagggtttgatatggcagaagcacgcgcgctcagtctggcaacgtttaaaggagcggttacccttgccgagcagacgggtgaagatttcgagaagcttcaaaaaaatgtaacgtcaaaaggcgggacaacccacgaagccgtggaagctttcaggcggcatcgtgtcgccgaagccataagcgagggcgtttgtgcctgtgtgcgccgttcgcaggaaatggaacggcaatatcaataa

SEQ ID NO: 61306 - DNA, 546 bp, Neisseria meningitidis; identical to SEQ ID NO: 55191

SEQ ID NO: 61307 - DNA, 2274 bp, Neisseria meningitidis
atgaacattactcaaattctttcccaagaactttccgcgactaccgcgcaaatcaatgccgctatcgagcttttggacgacggcgcaaccgtgccctttatcgcccgctaccgcaaggaagccacgggcgggttggacgatacgcagctgcgccggcttgccgagcggctgcaatacctgcgcgagttggaagagcgcaaagccgttgttttaaaaagcattgaagagcaaggcaagctttcagacgacctcagggcgcaaatcgaagccgccgataacaaaaccgcgctggaagacctgtatctgccctacaaacccaaacgccgcaccaaagcgcaaatcgcgcgcgaacacggtttgcagccgctggcggacgtgttgcttgccgagcagccgcaggatgtggaagccgccgcgcagggctacctgaacgaaaacgtccccgacaccaaagccgcattggacggcgcgcgcgcgattctgatggaacagtttgccgaagacgcggaactcatcggcacgctgcgtgataagttgtggaacgaagccgaaatccacgcgcaagtcgttggaggcaaagaaaccgaaggcgaaaaattcagcgattatttcgaccaccgcgaacctattcgtgcgatgcccagccatcgtgcgctggcggttttgcgcggccgcaacgaaggcgtgttgaacatcgcgctcaaataccggcccgacgacacgccgattacgcagcaaagcgaatacgagcaaatcatcgcccgccgtttcaaggtttcagacggccacaaatggctgcgcgacaccgtgcgtctgacttggcgcgcaaaaatctttttgtcgttggaactcgaagccctaaatcgtttgaaagaagccgccgacaccgacgcgattaccgtgtttgcccgaaatctcaaagacttgctgctcgccgcacccgccggacggctgaccactttgggtctagaccctggatacaagaacggcgtgaaatgtgccgtggtggacgacacgggcaagctgctggataccgtcattgtctatttacatcaagaaaacaatatgttggcaacgctgtcgcgcctgattaaaaaacacggtgtgaagctcatcgccatcggcaacggcaccgccagccgcgaaaccgacaaaatcgcgggcgaactggtgcgcggaatgccggaaatggggctgcacaaaatcgtcgtttccgaagccggcgcgtcgatttattccgcgtccgaactggcagcgcgcgagttccccgacttggacgtttccctgcgcggcgcggtgtccatcgcccgcaggctgcaagacccgcttgccgagctggtcaaaatcgaccccaaatccatcggcgtgggccagtatcagcacgacgtgaaccaaagccagctcgccaaatcgctggacgcggtggtcgaagactgcgtgaacgccgtcggcgtggacgtgaatactgcctccgccccgctcttggcgcggatttccggtttgaatcagacccttgcccaaaacatcgtcgcctaccgcaatgaaaacggcgcgttcgacagccgcaaaaaattgctgaaagtaccgcgtttgggcgaaaaaaccttcgagcaggcggcaggctttttgcggattaacggcggcacagagccgttggacgcgagcgccgtccaccccgaagcctatcccgtcgtcgccaaaatgctggcgcaacaaggcattagcgccgccgaactcatcggcaaccgcgagcgcgtgaagcaaatcaaagcgtccgacttcaccgacgaacgcttcggcctgccgaccattttggacatcctgtccgaactggaaaaacccggccgtgatccgcgcggcgcgtttcagacggcatcgtttgccgaaggcatccacgaaatcggcgacttgcaagtcggtatgattttagagggcgtggtttccaacgttgccaacttcggcgcgttcgtggacatcggcgtgcatcaggacggcttggtgcacatctccgccctatccaataaattcgtccaagacccgcgcgaagtggtgaaagccggcgatgtagtgaaagtgaaagtgctggaagtcgatgccgccagaaaacgcatcgcgctgaccatgcgcttggatgacgaaccgggcggcgcaaaacataaaatgccgtctgaaaaccgcagccgcgaacggacagccggccgcaaaccccaacgcaacgaccgcgccccagccaattcggcgatggcggatgcgtttgcgaagctgaagcggtaa

SEQ ID NO: 61308 - DNA, 225 bp, Neisseria meningitidis; identical to SEQ ID NO: 36979

SEQ ID NO: 61309 - DNA, 507 bp, Neisseria meningitidis
atggttgacgcttggtctgtccctgattttgaatcgaaaatctgtccgcccgaggcgttggcggcgcgtttggcgttgttgccgcgcccgctggtgtttaccaacggctgtttcgacatcctccacagggggcacgttacttatctggcgcaggcgcgttcgatggggggcgcgttggtgctggcgttgaataccgatgcttcggtgcggcgtttgggcaagggcggcgaccgcccgattaatcctttggagaaccgtgccgccgttgccgccgctttggaaagtgtggatttggtaacgtggtttgacgaggatacgccggcggcgttgattgaggcggtcaaacctgagattttggtcaagggcggcgattgggctgcggataagattgtcggtgcggcagaaacgttggcgcgcggcggtcaggtgttttcaattccgtttctgcaccagacttcgacaacgaagactttggcaaaaatccgtgcggcagagggcggaaaatga

SEQ ID NO: 61310 - DNA, 369 bp, Neisseria meningitidis; identical to SEQ ID NO: 54592

SEQ ID NO: 61311 - DNA, 786 bp, Neisseria meningitidis; identical to SEQ ID NO: 55814

SEQ ID NO: 61312 - DNA, 1059 bp, Neisseria meningitidis; identical to SEQ ID NO: 55416

SEQ ID NO: 61313 - DNA, 540 bp, Neisseria meningitidis
atggattttttggagatttttattatgtctgcatttagaaaaatattattaataatatcttgcctattgattgctagctgcagttttgttgaaactattttttatatggctattagcccagaacctgttgtggtagactttcctcttggtaaaaaaacaaaaagatctattgaactcaaacagaaaattggtaaaccttatgcaatatcgttaggaactaattttatacattatgatccaaaacagggggagaggtggattgatgataagttaaactatccatataatatatcggttaaaatatttaaagtggaagaagatggtaaaaaacttattatagatgagttgcttacagagagaagtagaaaattaggaggcggagtatttggagctggggggaaatatagtatgcatatttatgatttttatttgcctgaaggggaatatttatttgagatttctgataatagtgaatatattccactttacgatgaaataaataattctataagaatagtagttaatgcacgaattcagtaa

SEQ ID NO: 61314 - DNA, 192 bp, Neisseria meningitidis; identical to SEQ ID NO: 43532

SEQ ID NO: 61315 - DNA, 3135 bp, Neisseria meningitidis
atgaataaaactttaaaaaggcaggttttccgccataccgcgctttatgccgccatcttgatgttttcccataccggcgggggggggggggcgcaggcggaaacccataactacgctattgtaatgaacaatcaaaagctgcctgaggtaaagtgggggcaacaatatcaatcattggtgaacaaagaaaatacccgtcaagttatccatacgagtggttttggaatcaaaaaaaacgtaagtttatcattcaataataccgatgaagttgttgctaaaaaaaacggtactgtcgttttcggcgcagcgacctacctgccgccctacggcaaggtttccggttttgatgaagaaaagctgaaagagcgcaccaatgcccttgattggattggtacgaccgacccagggttggtaggctacagctacgaaaatgttacatgcaacagcggcaactgtcctgaagttagctataaaacccaatttatcttcgataatcaccagttggcaaaaaagaaaacagacagcaagctggatatatacgaagacaaaagccgcgacaattcgcccatttacaaattgcaggattatccttggttgggcgtgtctttcaatttgggcggagagagctccttcaaaccaaagagacaaggttctttggtatcttcttttagcgaggatgtgacgcagcaaaatggtacacaagaccaatacaaaggcaaaaacctcgtttatacgacagaagattacaataatcagggtaatcgtaaccatcaggacaaacaccacgccatcgccttttatctgaacgccaaactgcacctgctggataaaaaagggattaaagatatcaccgacaaaacagtgcagttgggtgtcttgaaaccgcgcatcgatttgacggaagcgtggaaaaacaggcatgggagcttttttagtaatggtaattggacgtttgaagataaaggagcagtcagcgtcaaacttatcttgccggaagtcaaagcaggccgctgcatcaataaatcgaaccccaatcccaaagcccaagtcctttcccccgcactgactgcccccgcgctgtggttcggacctgtgcaaaatggtaaggtgcagatgtattccgcttcggtttctacctaccccgacagttcgagcagccgcatcttccttcaaaatctgaaaagaaaaaccgaccccggcagacccggccgctattccctcgcaaccttgaataagtcggatattgaaagtcgaaagccgactttcacagggcggcaaacaatcatccgattggatggcggcgtacagcagatcaaactggataaaagcaatgaggccaccggtttaaatggaaataccaacaacaacactttcggcattgttaaggaatatagcgtcaatcctgagaccaatgagtggaaaaaagtgctgctgccttggacggttcggagttttagtaatgacaatgaatttgtaaaattcaacaaagaatcagacaaatacagccaaagataccgcatccgcgaaaacggcaacaacagcaagcgcgatttgggcgacatcgtcaacagccccatcgtggcggtcggcgggtatttggctacttccgccaacgacgggatggtgcatatcttcaaaaaaggcaacggcggggatgaccgcaactatagtctgaagctcagctacatccccggcacgatgccgcgcaaggatattgaaagcaaagactccaacctcgccaaagagctgcgcacctttgccgaaaaaagctatgtgggcgaccgctacggcgtggacggcggctttgttttgcgcaaagttgataacttaaacgggcaaaaccgcgtgtttatgttcggcgcgatgggctttggcggcagaggcgcatacgccttggatttgaccaaagccgacggcagtgacccgacaaaagcctctttgtttgatgtaaaagataacggcaataatggcaataatcgcgtggaattaggctacaccgtcggcacgccgcaaatcggcaaaacccacgacggcaaatacgccgctttcctcgcctccggttatgcgactaaagaaattaacagcacagacaataaaaccgcgctgtatgtgtatgatttggaaagcagcggcacgctgattaaaaaaatcgatgtacccggcggcaagggcgggctttcgtcccccacgctggtggataaagatttggacggcattgtcgatatcgcctatgccggcgatcgcggcggcaagatgtaccgctttgatttaagcaatcaagattctagtcaatggactgtacgcactatttttgaaggcacaaaaccgattacttccgcgcccgccatttcccaactgaaagacaaacgcgtggttatcttcggcacgggcagtgatttgagtgaggaggatgttgataataatgatatacaatctatttacggtatttttgacaatgacacagacacgggttttgcgcaagacgggctgggcaaagggctgctcgagcaaaagctggaaaaagacaaagacggcaaaacgctgtttttaagcgactacaaaaggtctgacggctcgggcgacaagggctgggtagtgaaattggaagccggacagcgcgttaccgtcaaaccgaccgtggtattgcgtaccgcctttgtaaccatccataaatatacgggtaatgacaaatgcggcgcggaaaccgccattttgggcatcaatactgccgacggcggcaagctgaccaagaaaagcgcgcgcccgattgtgccggaagccaatacggctgtcgcgcaatattccggccataagaaaacttccagcggcaaatccatccctataggttgtatggaaaaaggcaatgaaaccgtctgcccgaacggatatgtttacggcaaaccggttaatgtgcgttatctggatgaaaagaaaacagacggattttcaacaacggcagacggcgatgcgggcggcagcggtatagaccccgccggcaagcgttccggcaaaaacaaccgctgcttctcccaaaaaggggtgcgcaccctgctgatgaacgatttggacagcttggacattaccggcccgacgtgcggtatgaaacgaatcagctggcgtgaaatcttctactga

SEQ ID NO: 61316 - DNA, 1101 bp, Neisseria meningitidis; identical to SEQ ID NO: 54635

SEQ ID NO: 61317 - DNA, 993 bp, Neisseria meningitidis
atggaaaatgtaaaccgcatcgttgcagaaggcattgccgcagtagaagctgcgcaagacttcaacgctctagaacaaatcaaagcccgttatcttggcaaaaccggcgagttgaccggacttctgaaaactttggggcaaatgtcgcctgaagagcgcaaaaccataggtgcgcatatcaatgaatgcaaaaaccggtttcagacggcttttaatgccaaacgcgatgccctcaacgaagccaagctgcaagcccgacttgccgccgaagccctcgacattaccctgcccggacgcgctcaggaaggcggcagcctgcatcccgtaaccctgaccttgcaacgtgtggtcgaactctttcacggaatgggtttcgaagtggcggacgggcctgaaatcgaagacgattttcacaatttccaagccctgaacatccctgcaaaccatcctgcccgtgcgatgcaggatacgttttacgttgaaaacggtgatgttttgcgtacgcacacttccccgattcaaatccgctatatgctcgataaaaaagagccgcccatccgcattatcgcccccggccgcgtttaccgtgtggacagcgatgccacgcactcgcctatgttccatcaggcggaaggtttgtgggtagaagagggcgtaacttttgccgatttgaaagcagtgttcacggattttatccgtcgcttctttgaacgcgatgatttgcaagtacgtttccgcccgtctttcttcccgttcaccgaaccgtctgccgaaatcgacattatgggcgaaaacggcaaatggctggaagtcggcggctgcggcatggtgcatcccaacgtgttgaaaaatgtgaatatcgattctgaaaaatacaccggtttcgctttcggtatcggtctcgaccgtttcgcgatgctgcgttacaacgtgaacgatttgcgcttgttttttgataacgatttgaattttttgaagcagtttgtaaaatga

SEQ ID NO: 61318 - DNA, 1077 bp, Neisseria meningitidis
atgaagccgtctatcttagaaaaactgcaacaactcggcgaccggttggaagaagttacccaccttttagggcaacccgaagccacggcagatatggacaactaccgcaagctcacgcgcgaacacgccgaactgacccccgtcgtcgaagtgttccaaaactatcggcttgcccaaagcgacttggcggatgccgaagaaatgttgtccgaccccgaaatgaaagattttgccgccgaagaaatcgaagcggcaaaagccaaaatcaacacgctcgataccgaactgcaaaaactgctgctgcccaaagatgccgacgacgacaaaaacatcttcatcgaaatacgcgccggaacgggcggcgacgaagccgcgctgtttgccggcgatttgctgcgtatgtacagccgctacgccgagcgcaaccgttggcaggttgaaatcgtgtccgccaacgaaagcgaattgggcggctataaagaagtcatcgcccgtattgtcggactcggggcgtacagccgtttgaaatttgaatcgggcggacaccgcgtgcagcgcgtccccgccaccgaaagccaaggccgcatccacacctccgcctgcaccgttgccgtcatgcccgaagcggacgaactggaagacatcgaactgaacccagccgacctgcgcatcgacaccttccgcgcatccggcgcgggcggtcagcacatcaacaaaaccgactccgccgtccgcatcacccacctgcccaccggcatggtggtcgaatgccaagacggccgcagccaacatgccaacaaagcgcaggcaatgaaagtcctcgccgcccgcctgaacgacgcgcaaaaacgcgaagcccaagccaaagaagccgccgagcgcaaatccctcatcggcagcggcgaccgcagcgaacgcatccgcacctacaactatccccaaggcagggtaaccgaccaccgcatcaaccttaccctgcacaagctggattttgtgatggacggcgacttggcagaaatcaccaatgccctgattgccgagcatcaggcggagcttctggcggcaatgggcgattga

SEQ ID NO: 61319 - DNA, 1050 bp, Neisseria meningitidis
atgcaaaacaacaacgaatttaaaattggtaatcgttcagtaggttacaaccacgaaccattgattatctgtgaaatcggcatcaatcatgaaggctctttaaaaacagcttttgaaatggttgatgctgcctataatgcaggcgctgaagttgttaaacatcaaacacacatcgttgaagacgaaatgtctgatgaggccaaacaagtcattccaggcaatgcagatgtctctatttatgaaattatggaacgttgcgccctgaatgaagaagatgagattaaattaaaagaatacgtagagagtaagggtatgatttttatcagtactcctttctctcgtgcagctgctttacgattacaacgtatggatattccagcatataaaatcggctctggcgaatgtaataactacccattaattaaactggtggcctcttttggtaagcctattattctctctaccggcatgaattctattgaaagcatcaaaaagtcggtagaaattattcgagaagcaggggtaccttatgctttgcttcactgtaccaacatctacccaaccccttacgaagatgttcgattgggtggtatgaacgatttatctgaagcctttctagacgcaatcattggcctgtctgaccataccttagataactatgcttgcttaggagcagtagctttaggcggttcgattttagagcgtcactttactgaccgcatggatcgcccaggtccggatattgtatgctctatgaatccggatacttttaaagagctcaagcaaggcgctcatgctttaaaattggcacgcggcggaaaaaaagacacgattatcgcgggagaaaagccaactaaagatttcgcctttgcatctgtcgtagcagataaagacattaaaaaaggagaattgttgtccggagataacctatgggttaaacgcccaggcaatggagacttcagcgttaacgaatatgaatcattatttggtaaaattgctgcttgtgatattcgcaaaggtgctcaaatcaaaaaaactgatattgaataa

SEQ ID NO: 61320 - DNA, 684 bp, Neisseria meningitidis; identical to SEQ ID NO: 46781

SEQ ID NO: 61321 - DNA, 1488 bp, Neisseria meningitidis
atgctaaagaaaataaaaaaagctctttttcagcctaaaaagttttttcaagattcaatgtggttgacaacatctccattttatcttacccccccacgtaacaatttatttgtcatatctaatttaggtcagcttaaccaagtccaaagcctaattaaaatacaaaaattaaccaataatttactagtaattttatatacttctaaaaacttaaaaatgcctaagttagttcatcaatcagctaacaagaatctatttgaatctatttatctatttgagcttcctagaagccctaataatataactcctaaaaaattactttatatttatagaagttacaaaaaaatccttaatattatacagcctgctcatctctatatgctgtcttttacaggccactactcctatctgattagtattgcaaaaaaaaagaatattacgactcatttaattgatgaagggactggaacatatgctcctttattagaatcattttcatatcatccaacaaaattagaacgttatttgattggaaataatcttaatattaaaggatatatagattattttgacatattgcatgtcccctttcctgaatatgctaaaaaaatatttaatgcaaaaaaatataaccggttttttgcgcatgctggaggaataagcattaataataacattgcaaacttacagaaaaaatatcaaatatctaaaaatgactatatttttgttagtcaacgctaccccatttcagatgatttgtattataagagtatagtagaaatcttaaacagcataagtttacaaattaaaggaaagatatttattaaactacacccaaaagagatgggcaacaactatgtaatgtctttatttctaaatatggtagaaataaaccctcggctggtagttattaatgaacctccttttctaattgagcccctaatatacttaacaaatcctaaaggaattataggcctggcctctagttctttaatttatacaccattactctcaccctcaacccaatgtctttctattggagagttaattattaacttaattcaaaaatattcaatggtggaaaacactgaaatgatccaagaacacttagagattattaagaaatttaattttattaatatactaaatgatttaaatggggtaataagtaaccctctctttaaaacagaagaaacatttgaaacacttcttaaatctgcagaattcgcatataaatctaaaaactactttcaggctattttttactggcaacttgccagcaaaaacaatattaccttattagggcataaagcattatggtactacaatgcactttataatgtaaaacaaatttataagatggaatattcagatattttttatatcgataatatctccgtagactttcatagtaaagataaattgacatgggaaaaaattaaacattattactattccgccgacaatagaattggtagagatagataa

SEQ ID NO: 61322 - DNA, 981 bp, Neisseria meningitidis
gtgcagccggggctttgggcttcagacggcatattttcggaatggcggcattcttgccgtcggcgcggcagccgtatggggaagggaggggatattgtggtcggtaacggcaaaaaatatgccgcaccattgctggtgctgggttgcgtggtgttcggtctaggcagtctgattgtcagatccgtccccgtcggttcgtatgcaatcgcattttggcggttgctgatttcggtgttcgtattttggtttttagcacggtttttcaggcaaaaattcccaaaaaacaggaaaaccgtccgatatgccctgacggcgggcgtgtttctcgctttcgatttggcgttgtggcacgaaagcatacacgcggtcgggccgggtatttccaccctgctcaacagcctgcaaatctttttcttgtcggcaatcggtgttttctttttcggcgagcgtttgagcgggctgaaaaaggcaggcttaatatcggcagttgccggcgtggcgatgattgccggtgcggaattcggctacaacggtaatgcggtttggggattcgtcagcggtttggtatcgggactgatgctcgccctgtcgatggtgttcgtccgcaaaacccatgaaatcgagacggtggcgcttttcccttcaatgatgattttgagtttgggcggcgcggtatcgctggttgttccggcattgctgatggatggcggcgcgctttatccgacgacttggaaagatgcgggtttggtgcttgtgtacggcgtggtgatgcagtgcttcgcgtgggcgatggttgcctatgcgattccgctgctttcgctgtcgctgacggggctgctgcttttgtccgaaccggttgccgccctgttcatcgattatttcgggttgggcaaaccgattgaaggcgtgcagtgggcaggggtggcgctgacgctttcggcaatttacctcggttcgctgaaacagcagtccgagccttga

SEQ ID NO: 61323 - DNA, 918 bp, Neisseria meningitidis
atgaacgtatctgttctcaattttggtaacacccctgtatctttccgtcaagacggttttttaaatgcaaccgccattgcatctcactttggcaagttacctaaagactacctaaaaagtgaacaaactcaacaatatatctctgcacttgctgagaatttaagcgttaggagaaaaatcctaacggaagcaaatcaaatagttatcgtgaagcgtggtggcagtgagcaaggcacatggctgcatcccaaactcgctattcactttgcccgttggcttaatccgaaatttgcggtttggtgcgatgagcagattgaaattttacttaacggcaaaatttcagacggcataaaaacagttacccccaaacccacccgcgcccttccggacggcttgaccggcgaacaaatcgaagccgtcaaaaaactgcacaacgccctgaccaaatccgcacccaaagaagcgcaggcgcgtatcgccattaccctttggtctgccgtcaaaagcaagttcggatgcagctacaaagaagtacctgccgaacagttccccgaagttttaagcgtgatgagccgcgtggcagttgaaaacggcgtgctgtacggcgaagtcctcgaccgcgaaccgttacccgcgccgcaacctgccctgcccataagcggcaacgccctgtacgacctcgccgttgccgtcagctacggcgcgtgggccatccaaatgggcagagacgtttccctgccgctgaagcagctcggctgcaaacaggcggttacgatgtggacggtctgggcggaaacgcgcagccgcctcaaagccgctgcaaacgccctcgaagccttaaacgcacacgccgacgcggaacacgcggcaaaaatccgcccgatactgcccgaaatccgcaatctgtcgtcggtttga

SEQ ID NO: 61324 - DNA, 435 bp, Neisseria meningitidis; identical to SEQ ID NO: 43698

SEQ ID NO: 61325 - DNA, 855 bp, Neisseria meningitidis
atgccgcccatccctgccccatccgcaccatccgagcacactgtcgcatgggtattcggccaacccgttaccgatttgccgcaggatttgtttatcccgcccgacgcgctgaaagtcgtattgggcagttttcaaggccctttggatctactgctgtatctgatccgcaagcagaacatcgatgttctcgatattccgatggtgaagattaccgagcagtatctgcactacatcgcccaaatagaaacctatcagtttgatttggcggcggaatatcttttgatggcagcaatgctgattgaaatcaaatcgcgcctgctgctgccgcgtaccgaaaccgtcgaagacgaagaagccgacccgcgtgccgagttggtgcgccgcctgctggcttacgaacagatgaagctggcggcgcagggtttggacgcgctgccccgagccggacgggatttcgcgtgggcttacctgccgctggaaattgccgtcgaagccaagctgcccgaagtctatattaccgacttgacgcaagcgtggctgggtattttgtctcgggcaaaacatacgcgcagccacgaagttatcaaagaaaccatctccgtgcgcgcgcaaatgacggcaatcctgcgccgtttgaacaaacacgggatatgcaggtttcacgacctgttcaatcccgaacagggcgcggcttacgtggtcgtcaacttcatctcactgttggagcttgccaaagaaggattggtcagaatcgtgcaggaagtcggtttcggagaaattcgaatcagcctcaatcatgagggggcgcattcagacggcatttccggcacacggggcgggcgcgatgtgttctaa

SEQ ID NO: 61326 - DNA, 279 bp, Neisseria meningitidis; identical to SEQ ID NO: 54981

SEQ ID NO: 61327 - DNA, 2751 bp, Neisseria meningitidis
atgaccgacgcaaccatccgccacgaccacaaattcgccctcgaaaccctgccggtaagccttgaagacgaaatgcgcaaaagctatctcgactacgccatgagcgtcattgtcgggcgcgcgctgccggacgttcgcgacggtctcaagccggtacaccgccgcgtactgtacgcgatgcacgaattgaaaaacaactggaatgccgcctacaaaaaatcggcgcgcattgtcggcgacgtcatcggtaaataccacccccacggcgataccgccgtatacgacaccatcgtccgtatggcgcaaaatttcgctatgcgttatgtgctgatagacggacagggcaacttcggatcggtggacgggcttgccgccgcagccatgcgctacaccgaaatccgcatggcgaaaatttcccacgaaatgctggcagacattgaggaagaaaccgtcaatttcggcccgaactacgacggtagcgaacacgagccgcttgtactgccgacccgtttccccacactgctcgtcaacggctcgtccggcatcgccgtcggcatggcgaccaatatcccgccgcacaacctttccgataccgtcaatgcctgcctgcgcctgctcgatgcacccgacaccgaaatcgacgaactgatcgacattatccaagcccccgacttcccgaccggggcaaccatctacggcttgagcggcgtgcgcgaaggctataaaacaggccgcggccgcgtcgttatgcgcggtaagacccatatcgaacccataggcagaaacggcgaacgcgaagccatcgttatcgacgaaatcccctatcaggtcaacaaagccaagctggtcgagaaaatcggcgatttggttcgggaaaaaacactggaaggcatttccgagctccgcgacgaatccgacaaatccggtatgcgcgtcgttatcgagctgaaacgcaacgaaaatgccgaagtcgtcttaaaccaactctacaaactgactccgctgcaagacagtttcggcatcaatatggtggttttggtcgacggacaaccgcgcctgttgaacctgaaacagattctctccgaattcctgcgccaccgccgcgaagtcgttacccgacgtacgcttttccggctgaagaaggcacgccatgaagggcatatcgccgaaggcaaagcggtcgcactgtccaatatcgatgaaatcatccggcttatcaaagaatcgcccaacgcggtcgaggccaaagacaaactgcttgcgcacccttggcgcagtagcctcgttgaagaaatgctgacgcgttccggtctggatttggaaatgatgcgtccggaaggattggctgcaaacatcggcttgaaagagcaaggttattacctgagcgagattcaggcagatgctattttacgcatgagcctgcgaaacctgaccggcctcgatcaagaagaaattgtcgaaagctacaaaaacctgatgggtaaaatcatcgactttgtggatatcctctccaaacccgaacgcattacccaaatcatccgcgacgaactggaagaaatcaaaaccaactatggcgacgaacgccgcagcgaaatcaacccgttcggtggcgacattgccgatgaagacctgattccgcaacgcgaaatggtcgttaccctgacacatggcggctatatcaaaacccagccgaccaccgactatcaggcgcagcgtcgcggcgggcgcggcaaacaggcggctgccaccaaagacgaagactttatcgaaaccctgtttgttgccaacacgcatgattatttgatgtgctttaccaatttgggcaagtgtcattggattaaggtttacaaactgcccgaaggcggacgcaacagccgcggccgtccgattaacaacgtcatccagttggaagaaggcgaaaaagtcagcgcgattctggcagtacgcgagttccccgaagaccaatacgtcttcttcgccaccgcgcagggaatggtgaaaaaagtccaactttccgcctttaaaaacgtccgcgcccaaggcattaaagccatcgcgctcaaagaaggcgactacctcgtcggcgctgcgcaaacaggcggtgcggacgacatcatgctgttctccaacttaggtaaagccatccgcttcaacgaatactgggaaaaatccggcaacgacgaagcggaagatgccgacatcgaaaccgaaatttcagacggcatcgaagatgaaaccgccgacagcgaaaacgcactgccgagcggcaaacacggtgttcgcccgtccggtcgcggcagcggcggtttgcgcggtatgcgcctgcctgccgacggcaaaatcgtcagcctgattaccttcgcccctgaaaccgaagaaagcggtttgcaagttttaaccgccaccgccaacggatacggaaaacgcaccccgattgccgattacagccgcaaaaacaaaggcgggcaaggcaatattgccattaacaccggcgagcgaaacggcgatttggtcgccgcaaccttggtcggcgaaaccgacgatttgatgctgattaccagcggcggcgtacttatccgcaccaaagtcgaacaaatccgcgaaaccggccgcgccgcagcaggcgtgaaactgattaacttggacgaaggcgaaaccttggtatcgctggaacgtgttgccgaagacgaatccgaactctccgacgcttctgtaatttccaatgtaaccgaaccggaagtcgagaactga

SEQ ID NO: 61328 - DNA, 651 bp, Neisseria meningitidis; identical to SEQ ID NO: 41065

SEQ ID NO: 61329 - DNA, 1929 bp, Neisseria meningitidis
atgtccagaaaccaaaatcacgaagaataccaagacgatgcccgccccctgacgattgaggaacaacgcgctcgcctgcgccaactcatcattatgggcaaagaacgcggctacatcacctactccgaaatcaacgacgcactgcccgacgatatgtccgatgccgatcaaatcgacaacatcgtcagtatgatttccggtttgggtatccaagttaccgaacacgcccccgatgcggaagacatattgttaagcgacaatgccgccgttaccgacgatgatgccgtcgaagaagccgaggccgccctttccagcgcagattccgagttcggcaggacgaccgaccccgtccgtatgtatatgcgcgaaatgggacaggtcgacctgctgacccgcgaagacgaaatcatcatcgccaaaaaaatcgaaaacgccctgaaaaatatggttcaggccatctccgcctgcccgggttccattgcggaaatcttagaactcatcgaaaaaatccgcaaagacgaaatccgcgtcgacgaagtcgtagaagccattatcgacccgaatgaagtattgctcaacgaattgggcttggggcacttggaaaccacagcacccgagaaaccttccaacgacaattcggacgaaaacgaagacgacgaagaatcggaagaagatgcggatgaaatctcggcagccaatctcgccgaattgaaacaaaaagtcatcggccactttgcccaaatcgaaaaagactacaaaaaaatgattggccgtttggaaaaacaccacagccggcacaaagactatctcgcctaccgcgacgcgattgccaacaaacttttggaagtccgcttcgccacccggcaaatcgacagcctcagcagcagcctgcgcggaaaagtagaaaacatccgcaaactcgaacgcgaaatccgcgacatctgcctcgaccgcgtccatatggagcgcgactacttcatccaaaacttcctgcccgaaatcaccaatctggaatggattgaagaagaaatcgccaaaggcagggtttggagcgacgcgctcgaccgcttccgccacgccatcctcgaaaaacaaaccgagttggcggatatggaaaaagaaacccgcatttccatcgaagagttgaaagaaatcaacaaaaatatggtgtcaagcgaaaaagaaaccgcagctgccaaacaggaaatgattcaggcaaacttgcgcctcgtcatttccattgccaaaaaatacaccaaccgtggcttgcagttccttgatttgattcaggaaggcaacatcggcctgatgaaagcggtcgacaagttcgaataccgacgcggctataagttctccacctacgcaacctggtggatccgtcaggcaatcacccgctcgattgccgatcaggcgcgtaccatccgcattccggtacatatgattgaaaccatcaacaagatgaaccgcatctcgcgccaacaccttcaagaaaccggcgaagaacccgattccgccaaacttgccgaactgatgcagatgcccgaagacaaaatccgcaaaatcatgaaaatcgccaaagagccgatttcgatggaaacccccatcggcgacgacgacgattcgcacttgggcgacttcatcgaagatgccaacaatgttgcgccggccgatgcggcaatgtacaccagcctgcacgaagtaaccaaagaaatcctcgaaagcctgacaccgcgtgaggcaaaagtcctgcgtatgcgtttcggcatcgatatgaacaccgaccacacgctggaagaagtcggcagacagtttgacgtaacgcgcgaacgcatccgacaaatcgaggcaaaagcactccgcaaattacgccatccgacaagaagcgaccgtttgagaagtttcttggacagcgaagacagcaagctgtaa

SEQ ID NO: 61330 - DNA, 537 bp, Neisseria meningitidis
atgaacacccttcaaaaaggttttacccttatcgagctgatgattgtgattgccatagtcggcattttggcggcagtcgcccttcctgcttatcaagactacacagcccgcgcacaagtttccgaggccattcttttggctgaaggtcaaaaatcagccgttaccgagtattacctgaatcacggcgaatggcccggcaacaacacttctgccggcgtggcaacctccgccgacattaaaggcaaatatgttcaaagcgttacagtcgcaaacggcgtcgttaccgcccaaatggcttcaagcggcgtaaacaaagaaatccaaggcagaaaactctccctgtgggccaagcgtcaaaacggttcggtaaaatggttctgcggacagccggttacgcgcgacgccaccaacgccgacgacgttaccgccgacggcaacgacaaaatcgacaccaagcacctgccgtcaacctgccgcgatgattcatctgtcgtttgcatagaaacaccacctacggctttctataaaaatacctaa

SEQ ID NO: 61331 - DNA, 396 bp, Neisseria meningitidis; identical to SEQ ID NO: 54508

SEQ ID NO: 61332 - DNA, 648 bp, Neisseria meningitidis; identical to SEQ ID NO: 38134

SEQ ID NO: 61333 - DNA, 168 bp, Neisseria meningitidis; identical to SEQ ID NO: 37435

SEQ ID NO: 61334 - DNA, 972 bp, Neisseria meningitidis; identical to SEQ ID NO: 39558

SEQ ID NO: 61335 - DNA, 1563 bp, Neisseria meningitidis
gtgtttcaagtggggaaggcgatggatggacggcgttgggcggtatggggtgcttttgccctgctgccttcggcttttttggcggtaatggtcgttgcgcctttgtgggcggtggcggcgtatgacggtttggcgtggcgcgcggtgctgtcggatgcctatatgctcaaacgtttggcgtggacggtatttcaggcagcggcaacctgtgtgctggtgctgcctttgggcgtgcctgtcgcgtgggtgctggcgcggctggcgtttccggggcgggctttggtgctgcgcctgctgatgctgccttttgtgatgcccacgttggtggcgggcgtgggcgtgctggctctgtttggggcggacggcctgttgtggcgcggacggcaggatacgccgtatctgttgttgtacggcaatgtgtttttcaaccttcctgtgttggtcagggcggcgtatcaggggtttgtgcaagtgcctgcggcacggcttcagacggcacggacgttgggcgcgggggcgtggcggcggttttgggacattgaaatgcccgttttgcgcccgtggcttgccggcggcgtgtgccttgtctttctgtattgtttttccgggttcgggctggcgctgctgctgggcggcagccgttatgccacggtcgaagtggaaatttaccagttggtcatgttcgaactcgatatggcggttgcttcggtgctggtgtggctggtgttgggggtaacggcggcggcagggttgctgtatgcgtggttcggcaggcgcgcggtttcggataaggcggtttcccctgtgatgccgtcgccgccgcagtcggtcggggaatatgtgctgctggcgtttgcggcggaggtgttgtctgtgtgctgcctgtttcctttgttggcaattgttgtgaaagcgtggtcggccggcgaatcgtggcgtgtgttaatggaaagtgaaacgtggcaggcggtgtggaatactttgcgcttctcggcggcggcggtgtttgcggcggcggttttgggtgtggtgtatgcggcggcggcgcggcggtcggcgtggatgcgcgggctgatgtttttgccgtttatggtgtcgccggtttgtgtttcggcgggcgtgctgctgctttatccgcagtggacggcttcgttgccgttgctgctggcgatgtatgcgctgctggcgtatccgtttgtggcaaaagatgttttgtcggcttgggacgcactgccgccggattacggcagggcggcggcgggtttgggcgcaaacggctttcagacggcatgccgcatcacgttccccctcttgaaaccggcgttgcggcgcggtctgactttggcggcggcaacctgcgtgggcgaatttgcggcaaccttgttcctgtcgcgtcccgagtggcagacgctgacgactttgatttatgcctatttggggcgtgcgggtgaggataattatgcgcgggcaatggtgttgacattgctgttgtcggcgttcgcgctgggcattttcctgctgttggacaacggcgaaggcggaaaacagacggaaacgttataa

SEQ ID NO: 61336 - DNA, 291 bp, Neisseria meningitidis; identical to SEQ ID NO: 45422

SEQ ID NO: 61337 - DNA, 474 bp, Neisseria meningitidis; identical to SEQ ID NO: 49535

SEQ ID NO: 61338 - DNA, 435 bp, Neisseria meningitidis; identical to SEQ ID NO: 55440

SEQ ID NO: 61339 - DNA, 978 bp, Neisseria meningitidis; identical to SEQ ID NO: 55744

SEQ ID NO: 61340 - DNA, 387 bp, Neisseria meningitidis; identical to SEQ ID NO: 55415

SEQ ID NO: 61341 - DNA, 321 bp, Neisseria meningitidis; identical to SEQ ID NO: 54974

SEQ ID NO: 61342 - DNA, 1278 bp, Neisseria meningitidis; identical to SEQ ID NO: 55803

SEQ ID NO: 61343 - DNA, 1410 bp, Neisseria meningitidis; identical to SEQ ID NO: 56141

SEQ ID NO: 61344 - DNA, 1548 bp, Neisseria meningitidis
atgcagcttaatcctgctgaaattagcgatttgattaaagccaagatcgaaaatctgtctgtaaatgccgaagtgcgtacccgtggtacggtgatttcggtaactgacggtatcgttcgcatccatggtttgtcagatgcaatgcaaggtgagatgctcgaattcccgggtaacactttcggcttggcgatgaacctggagcgcgactccgtcggcgccgtagtgttgggcgagtacgaacatattaaagaaggcgacacggttacctgtaccggtcgtatcttggaagtgccggtcggacgcgaactggtcggacgcgtcgttgatgcattgggtcggcctatcgacggcaaaggcccgattaatacaactttgaccgcccctatcgaaaaaatcgcaccgggcgtgattgcgcgcaaatcggttgaccagccgatgcaaaccggtctgaaggcgattgactctatggttcctgtcggtcgcggtcagcgtgagttgatcattggtgaccgtcaaaccggtaaaactgccgtagcactggatgccatcgtcaaccaaaaaggtacgggtgttatctgtatctatgtcgctatcggtcaaaaagcatcttctattgccaacgtggtccgcaaattggaagagcatggcgcgatggaacacacgattgtggttgctgcaactgcttctgaagccgctgcactgcaatacatcgcaccttactccggttgtacgatgggtgaattcttccgcgaccgcggcgaagatgccttgattgtttatgacgatttgtccaaacaggctgtggcttaccgtcaaatttccctgcttttgcgccgtccgcccggccgcgaagcctatcccggcgatgtgttctacctgcactcccgtctgttggaacgtgcggcacgtgtcaatgaacacgaagtggagaaattgaccaacggcgaagtaaaaggcaaaaccggttctctgactgctttgccgattatcgaaacccaagcgggcgacgtatctgctttcgttccgactaacgtcatttcgattaccgacggtcagattttcttggaaaccgacctcttcaacgccggtatccgtcctgcaatcaatgccggtatttccgtatcccgcgtaggcggtgctgcacaaaccaaagtgattaaaaagctgggtggcggtatccgtttggcgttggcgcaatatcgtgaattggcggcgttctcgcaatttgcatccgatttggatgaagctacgcgcaaacaattggagcatggcgaagtcgtaaccgaactgatgaaacagaaacagttcagtacgttgaatacggctgaaatggctttgaccctttgggcaatcaacaacggttcgtattctgatgttccggttgccaaagctctggcttttgaatctgaatttttgagctttgtccgtacccaacatccggaagttttggaagccgtcaatgcttcaggtgcaatgtccgacgagagcgagaaaacgcttgaagcagccatgaaatccttcaaatcttcttacgcctatcaggcataa

SEQ ID NO: 61345 - DNA, 1443 bp, Neisseria meningitidis
atgcatccgacctattccgccgtacaggcgcggctgctcgaagccaaccgcctttcccccgaactgctcgccaaaagcctgtgcatcatcggcgcgcaccacgtcgattacgccgacatctactgccagcgcaccgcttatgaaagctggcatttggaagagggcatcgtcaaatcgggcagcttccaaatcaatcagggcgtgggcgtgcgcgccgtttcgggcgataaaaccgcctttgcctacgccgacagcctgtgcatcgattcgataaaccgttccgcccgcgccgtccgcgcgattggggcggcaggcggcaaggtgtccgccaaaatgccgtctgaaacgcgcggcaagccggtttgttccgcgtccgaccccattgccggcctcgattccgccgccaaagtcgcgctgttgaacaaagtggaagcaatcgccaaagccgccgatccgcgcatcgtgcaagtgatggccggtttgacctgcgaatacgacatggtttacctcgcccgtctggacggtaaacacgctgccgatatccgcccgatggtgcgcatgaacgttaccgttatcgccaaacagggcgaacgccgcgaacagggcagcgcgggcggcggcggacgctacgacttggcttatttcgatgaaaacttggtgcatcggtttgtcgattccgccgtcaaacaagccctgaccaatcttgaatcccgtcctgcgcctgccggcgaaatgaccgtcgttttgggcaacggctggccgggcgtgttgctgcacgaagcggtcggacacggtttggaaggcgatttcaaccgcaagggaaccagcgtcttttccggccgaatcggcgagcgcgtcgccgccaaaggcgttaccgttgtggatcaaggcgatattgccggccggcgcggttcgctcaacatcgacgacgaaggcaacgaaacccgccgcaccgtattgattgaagacggcatcttggtcggttatatgcaggacgaaaccaatgcccgcctgatgggcacgcaatcgaccggcaacggccgccgcgaaagctacgcctccgtccctatgccgcgcatgaccaatacctttatggaaaacggcggctacgaacccgacgaaatcatcgcgtccatcgacaaaggcatttacgccgtcaacttcggcggcggacaggtggacattaccagcggcaaattcgtgttcagcgcgtccgaagcgtggtgggtggagggcggcaggctgcaataccccgtcaaaggcgcgaccattatcggcaacggccccgaagtgctgaaacacgtttccatgataggcaacgatactgcgctcgacagcggtgtcggcgtgtgcggcaaagaagggcagagcgtccccgtcggcgtggggcaaccgactttgcggattgatgccggactgaccgtcggcggcagcgcaatctga

SEQ ID NO: 61346 - DNA, 1509 bp, Neisseria meningitidis
atgcaaaccgattgcgacgtattgattgccggaaacgggctggcggcactgacgctcgccctgtcgctgcctgaatcgttccgcatcgtcattttgtgcaaaaaccggctggacgacaccgccagccgtcatgcgcaaggcgggattgcggcggcgtggtcgggagaggacgacatcgaaaaacacgtcgccgatactttggaagcgagcgcaggtttgtgcgacgaagccgccgtccgcaccatcctgtcgcagggcaaaccggcaatcgaatggctgttggcgcagggtgtggcgttcgaccggaatcataacgacctgcacctgacgcgcgaaggcgggcatacctgccgccgaatcgcccacgtcgccgactacacgggcgaagccgtcatgcagagcctgcttgcccaaatacgccgccgcccgcacatccgcgtttgcgagcggcagatggcgttggacattcaaaccgaatcaggtgtggcgtgcggactgatcgtccttgaccgccgaacgcaagaaacctacctcatccgcgcccgccataccgtactcgcaggcggcggcttgggacagatttacgccgccaccaccacgccgcccgaatgcacgggcgacgccatcgccatggcgatacgcgcaggctgcgcagtcgaaaacctcgaatttatccaattccaccccacaggcttggcaagatcgtctgaaaacggccgcaccttcctgatttccgaagccgtgcgcggcgaaggcggcatcctgaccaaccaagcgggcgaacggtttatgccgtattacgaccgccgcgccgaactcgcgccgcgcgacatcgttgcccgcgccatcgccgccgaaatcgccaaacaaacgcaagacttcgtctcactcgatatcagccatcaacccgcagcgttcgtccgccggcatttcccgtccatccatcggcactgtttatcccaatgcggcctggatatcacgcgccaagccatccccgtccgccccgtgcaacactacacctgcggcggcatccaaaccgacccctgcggcagaacttccctgccgcagctctactccttaggcgaaaccgcctgcaccggcttgcacggagccaaccgccttgccagcaactccctgctcgaatgtgtcgttaccgccagacttgccgcccaaaccatcgcagacggacaagcattccaagccaaaacgtctccaaggccgtctgaaagcctctcctccgaagcaggcatcttttcagacggcatccaaagcgcattcagccgccccgtcctgcaagcgttcaaccaacgccatctgggcatcctccgcaacgataccggtctgcgctgcgccatcgcccagctgcggctttggaaacaaaaccaaaccgaaccgcacaccgcgtccgaatacgaaaaccgcaacctgctcgaatgcagcctcgccgtcgcccaagccgcatacaggcggagacagaacatcggcgcgcattttaatagtgattgttaa

SEQ ID NO: 61347 - DNA, 936 bp, Neisseria meningitidis; identical to SEQ ID NO: 41855

SEQ ID NO: 61348 - DNA, 1395 bp, Neisseria meningitidis; identical to SEQ ID NO: 56093

SEQ ID NO: 61349 - DNA, 966 bp, Neisseria meningitidis
atgagctacacgcaactgacccaaggcgaacgataccacatccaatacctgtcccgccactgcaccgttaccgaaatcgccaaacagctgaaccgccacaaaagcaccatcagccgcgaaatcagacggcaccgcacccaagggcagcaatacagcgccgaaaaagcccagcggcaaagccggactatcaaacagcgtaagcgacaaccctataagctcgattcgcagctgattcagcacatcgacccccttatccgccgcaaactcagtcccgaacaagtatgcgcctacctgtgcaaacaccaccagatcacgctccaccacagcaccatttaccgctaccttcgccaagacaaaagcaacggcagcacgttgtggcaacatctcagaatatgcagcaaaccctaccgcaaacgctacggcagcacatggaccagaggcaaagtacccaaccgtgtcgtcatagaaaaccgacccgctatcgtcgaccagaaatcccgtatcggcgattgggaagccgacaccattgtcggcaaaggacagaaaagcgcattattgaccttggtcgaacgcgttacccgctacaccatcatctgcaaattggatagcctcaaagccgaagacactgcccgggcagctgttagggcattaaaggcacataaagacagggtgcacaccattaccatggataacggcaaagagttctaccaacacaccaaaataaccaaagcattgaaagcggagacttatttttgtcgcccttaccattcttgggagaaagggctgaatgagaacaccaacggactcatccggcaatacttccccaaacaaaccgatttccgtaacatcagtgatcgggagatacgcagggttcaagatgagttgaaccaccgaccaagaaaaacacttggctacgaaacgccaagtgttttattcttgaatctgttccaaccactaatacactag

SEQ ID NO: 61350 - DNA, 2607 bp, Neisseria meningitidis; identical to SEQ ID NO: 55254

SEQ ID NO: 61351 - DNA, 870 bp, Neisseria meningitidis
ttgacaaaacaaattttaatgaatactataagtagcattatgagtttagaaaattttcaattaataaaaacacaattaggtgttcccagttatgaaaatgatagagttgcaatctatcaaggagattgtatccagttaatggataagatttcaaaaggatcattccaaatgacaatcacatctccaccatacaatattggtaaagaatatgagtctattttagatttggaacattatcttgagtggtgtgaaagatggatgcaatcaatacatcacttaactgaagatagcggatgtttttggttaaatttaggatacttacatgttgaaaaaaagggactagcagttcctattccttatcttttatgggataaaactaactttttccttttacaagaggtggtttggaattatgcagctggagttgcatgccgtaatcgattttccccaagaaatgaaaagttattatggtatgtgaaaaatcctgctaaatatacattcaatttagatgctgtacgcgatcccaacgttaaatatccaaatcagaaaaaaaatgggaaattaaaatgtaatcctctaggaaaaaacccaacggatgtttggcaaatagcaaaagtcacttctggaagaaataggtcatcgagagaaagaactgctcatcctgcccaatttccattggaattaatagaaagaataatccgagcaagtagcaatcaaaatgatgtaatcttagatccatttatcggctcaggaacaaccgccttagccggactaaaaaacaaccgttttgtcataggatttgaaattaacgatgagtatatagatattataaaagaacgcttcaaagagtatgatcttcaaaatacttga

SEQ ID NO: 61352 - DNA, 1011 bp, Neisseria meningitidis
atgcacatcggcggctattttatcgacaaccccatcgcacttgcaccgatggcgggcattaccgacaaacccttccgccgcctctgccgcgatttcggcgcgggttgggcggtgtgcgaaatgctgaccagcgacccgacacttagaaataccaaaaagaccctgcaccgcagcgattttgccgatgaaggcggcatcgttgccgtgcagattgccggcagcgatccgcagcagatggcggatgccgcgcgttacaacgtcagccttggggcgcaggttatcgacatcaacatgggctgtcccgccaagaaagtgtgcaatgcccaagccggcagcgcgctgatgcagaacgagccgctggttgccgccattctcgaagccgtcgtccgtgcggtggacgtacccgttaccctcaaaacccgtttgggctggcacgacgaccacaaaaacctgcctgccgtcgcccgcatcgccgaagattgcggcattgccgcccttgccgtccacggacgcactcgcacgcaaatgtacaaaggtgaagcggcttacgacctgattgccgaaaccaaatgccgtctgaacatcccggtttgggtcaacggcgacattacttcgccgcaaaaagcccaagccgtccttaaacaaaccgccgcagacggcatcatgatagggcgcggcgcgcaaggcagaccgtggttcttccgcgatttgaaacattacgccgaacacggtgttttaccgcctgccttgagtttggcagaatgcagtgccgccattttgaaccacgtccgcgccatgcacgcgttttatggtgagaccgccggtgtgcgcattgcacgcaaacacataggctggtacatcgacgaaatgcccgacggcgaacagacacgtcgtgaaatcaaccgcttggacagtgcggcggcgcaatacgacatgcttgcaggttatcttgaaagacttgccggaaaaaccgaccgttgggcgtgcgcctaccgccaaaatgccgtctga

SEQ ID NO: 61353 - DNA, 138 bp, Neisseria meningitidis; identical to SEQ ID NO: 36823

SEQ ID NO: 61354 - DNA, 2559 bp, Neisseria meningitidis; identical to SEQ ID NO: 54653

SEQ ID NO: 61355 - DNA, 225 bp, Neisseria meningitidis; identical to SEQ ID NO: 36622

SEQ ID NO: 61356 - DNA, 483 bp, Neisseria meningitidis
atgaacctgctgacactgttacgccccgccaccgtgcaagactgcaaagacatcttcaaagtccacctgcactccgtccaatacacctgcatcctcagctacaacgaacacgccctaaaagtatgggaaggcttgttaaacacagaaagctacctgccgaccatttccgatcccgacaaagcactttgggttgccgaatacaaaggcaacatacagggatttttccaaatcgactgccaagaagcacaactcgatgcactttacgtccaccccctgttccacaacctcggactgggcactgccctgcttcatcaggcggaaaccatcgcccacaaatctggtttgagctttctgaaactctacgcatcgctcaactccgtcccgttttaccttctcaaccgctacgaatcgctcggttcggcagtattgcagcttgaccccagcatcaaaatcaaatgcgaactgatgcggaaacacctctga

SEQ ID NO: 61357 - DNA, 1311 bp, Neisseria meningitidis
atgaacacgccgcatccgcgcccgaaaatcgccgtcatcggcgcaggctgggcaggactgtccgccgccgtcaccttggcgcggcacgccgacgttaccctgtttgaagccggccggcaggcgggcggcagggcgcgcacactggccggaaataccgacggtttcggttttttggacaacgggcagcacattttgctcggcgcataccggggcgtgttgcgcctgatgaaaaccatcggttcggatccccgtgccgcctttttgcgcgtaccgctgcactggcatatgcacggcggtttgcagttccgcgccctccccctgcccgcgccgctgcatattttgggcggcgtgctgcttgcccggcgtgcaccgactgcattcaaagccaaactgcttgccgatatgtccgatttgcagaagtccgcacgcctcggacagcccgacacgacagtggcgcaatggctgaaacagcggaacgtgccgcgtgccgccgtgatgcagttttggcagcccttggtttggggcgcgctcaacacgcctttggaaaccgcaagcctgcgcgtgttgtgcaacgttttgtccgacggcgtgctgacgaaaaaatccggcagcgactatctcctacccaagcaggatttgggcgcaatcgtcgccgaacccgccttggcggatcttcaacggctcggcgcggacatccgcctcgaaacgcgcgtatgccgtctgaacaccctcccggacgggaaagtgctcgtcaacggcgaagctttcgatgccgccgtccccgccaccgcgccctaccacgccgccgcgctcctgcccgaaggcacgcccgaacacgttcagacggcatatcaaaaccttcgctaccacgccatcaccaccgtctatctgcgctacgccgaacccgtccgcctgcccgccccgctgaccggccttgccgacggcacggtgcaatggctgctttgccggggcaggctcggactgcctgaaaacgaagtgtccgccgtcatcagcgtttccgaccgcgtcggcgcgtttacaaaccgagcgtgggcggacaaagttcacgccgacctcaaacgcatccttccgcatttgggcgaacccgaagccgtgcgcgtcatcaccgaaaaacgcgccacaaccgcagccgatgccccgccgccggatttgtcgtggctgcaccggcaccgcatcttccccgccggcgactacctccacccagactaccccgccacgctcgaagccgccgtacaatcaggtttcgcggcggcggaaacctgcctgcaaagcctgagcgatgccgtctga

SEQ ID NO: 61358 - DNA, 372 bp, Neisseria meningitidis; identical to SEQ ID NO: 39277

SEQ ID NO: 61359 - DNA, 957 bp, Neisseria meningitidis; identical to SEQ ID NO: 54437

SEQ ID NO: 61360 - DNA, 621 bp, Neisseria meningitidis
atgacaaagttatacgcagaaatcgccaagatggagacgcaggacgacgacacggtcaaggtttggggttacgcttcaagcgaggaaatcgattcggacggcgaagtcatcgcggcggcagctatgaaggcggcgattcccgattatatgaagtttggcgcggggcgcgagatgcacggctcaaacgctgcgggaacggcaattgaaatcaacgttgaagacgacggcataacctttttcggtgctcatatcatcgaccccgttgtcgtgtcgaaagtcaaaacaggcgtttacaaaggcttttccatcggcggcagcgttaccgcccgcgatgatttgaacaagtcgcaaatcacgggcttgaagctgacggaaatcagccttgtcgagcgccctgccaatcccgatgcggtgtctacctgctttaaggcggacaaaggtgcggaagcggtaaacaacgatacagaacataatgctacatattttagccatttcccttccaaacaaaaaagcaccgacggcggccgatgccccttcccttacaggttcccctattttttcactgcggtcgttgccggtttggctgggccttttggtgcgggcgcaccgacggaagcctga

SEQ ID NO: 61361 - DNA, 774 bp, Neisseria meningitidis
atgaacactattgcagacgtgcaatccagccgagatttgcgcaatctgccgatcaatcaggtcggtatcaaagacctgcgctttccgattaccctgcaaactgcagaaggcatccagtccacagttgcccgtctgaccatgacggtttacctgcctgccgagcagaagggtacgcatatgtcgcgctttgtcgcattgatggagcaacataccgaagccttggattttgcacaattgcgcaggctgactgctgaaatggtcgcgcttttggattcccgcgccggcaaaatcagcgtttctttcccatttttccgcaagaaaaccgccccggtttccggtattcggtccttactggattatgatgtcagcctcacgggcgaaatcaaagacggggcatacggccacagtatgaaggtcatgattcccgtaacctcgctttgcccgtgttccaaagaaatttcccaatatggcgcgcacaaccagcgttcgcacgttaccgtcagcctgactgccgatgccgaagtcggtatcgaggaagtcatcgattatgtggaggcgcaggcgagctgccaactctacggcctgctcaaacgccccgatgaaaaatacgttaccgaaaaggcctacgaaaacccgaaattcgtggaagatatggtgcgcgatgtcgctacttcgctgatcgccgacaaacgcatcaagagtttcgttgtcgagagcgagaatttcgagtctatccacaaccattcggcttatgcctatatcgcctacccgtag

SEQ ID NO: 61362 - DNA, 183 bp, Neisseria meningitidis
atggaaagtttggtacaaagacgaatttgttataaagcggttggcagtttctcaagcgggcgcgatgttttaaaatatagtggattaaatttaaatcaggataaggcgacgaagccgcagacagtacaaatagtacggcaaggcgaggcaacgccgtactggtttaaatttaatccactataa

SEQ ID NO: 61363 - DNA, 705 bp, Neisseria meningitidis; identical to SEQ ID NO: 42711

SEQ ID NO: 61364 - DNA, 168 bp, Neisseria meningitidis; identical to SEQ ID NO: 43416

SEQ ID NO: 61365 - DNA, 2037 bp, Neisseria meningitidis
atgactgacaacgcactgctccatttgggcgaagaaccccgttttgatcaaatcaaaaccgaagacatcaaacccgccctgcaaaccgccatcgccgaagcgcgcgaacaaatcgccgccatcaaagcccaaacgcacaccggctgggcaaacactgtcgaacccctgaccggcatcaccgaacgcgtcggcaggatttggggcgtggtgtcgcacctcaactccgtcgccgacacgcccgaactgcgcgccgtctataacgaactgatgcccgaaatcaccgtcttcttcaccgaaatcggacaagacatcgagctgtacaaccgcttcaaaaccatcaaaaactcccccgagttcgacaccctctcccccgcgcaaaaaaccaaactcaaccacgatctgcgcgatttcgtcctcagcggcgcggaactgccgcccgaacagcaggcagaactggcaaaactgcaaaccgaaggcgcgcaactttccgccaaattctcccaaaacgtcctagacgcgaccgacgcgttcggcatttactttgacgatgctgcaccgcttgccggcattcccgaagacgcgctcgccatgtttgccgctgccgcgcaaagcgaaggcaaaacaggctacaaaatcggtttgcagattccgcactacctcgccgtcatccaatacgccgacaaccgcgaactgcgcgaacaaatctaccgcgcctacgttacccgcgccagcgaactttcagacggcggcaaattcgacaacaccgccaacatcgaccgcacgctcgcaaacgccctgcaaaccgccaaactgctcggcttcaaaaactacgccgaattgtcgctggcaaccaaaatggcggacacgcccgaacaagttttaaacttcctgcacgacctcgcccgccgcgccaaaccctacgccgaaaaagacctcgccgaagtcaaagccttcgcccgcgaaagcctgaacctcgccgatttgcaaccgtgggacttgggctacgccagcgaaaaactgcgcgaagccaaatacgcgttcagcgaaaccgaagtcaaaaaatacttccccgtcggcaaagtattaaacggactgttcgcccaaatcaaaaaactctacggcatcggatttaccgaaaaaaccgtccccgtctggcacaaagacgtgcgctattttgaattgcaacaaaacggcgaaaccataggcggcgtttatatggatttgtacgcacgcgaaggcaaacgcggcggcgcgtggatgaacgactacaaaggtcgccgccgtttttcagacggcacgctgcaactgcccaccgcctacctcgtctgcaacttcgccccgcccgtcggcggcagagaagcgcgtttgagccacgacgaaatcctcatcctcttccacgaaaccggacacgggctgcaccacctgcttacccaagtggacgaactgggcgtgtccggtatcaacggcgtagaatgggacgcggtcgaactgcccagccagtttatggaaaatttcgtttgggaatacaatgtattggcgcaaatgtccacccacgaagaaaccggcgagcccctgccgaaagaactcttcgacaaaatgctcgccgccaaaaacttccaacgcggaatgttcctcgtccgccagatggagttcgccctcttcgatatgatgatttacagcgaagacgacgaaggccgtctgaaaaactggcaacaggttttagacagcgtgcgcaaagaagtcgccgtcatccaaccgcccgaatacaaccgcttcgccttgagcttcggccacatcttcgcaggcggctattccgcaggctattacagctacgcgtgggcggaagtattgagcgcggacgcatacgccgcctttgaagaaagcgacgatgtcgccgccacaggcaaacgcttttggcaggaaatcctcgccgtcggcggatcgcgcagcgcggcagaatccttcaaagccttccgcggccgcgaaccgagcatagacgcactcttgcgccacagcggtttcgacaacgcggcctga

SEQ ID NO: 61366 - DNA, 1479 bp, Neisseria meningitidis
atgaaatacaaagacctgcgcgacttcatcgccatgctcgagcagcagggcaaactcaaacgcatcgcgcaccccgtttccccgcatttggaaatgaccgaaatcgccgaccgcgtgctgcgcgccgaagggccggcgttgctgtttgaaaacccggttaagcccgacggtacgcgctacggttatcctgtgttggcaaacctgttcggcacgcccgaacgtgtggcgatgggcatgggcgcggacagcgtgtccaagctgcgtgaaatcgggcagacgctggcgtatttgaaagaacccgaaccgcccaaaggcatcaaagatgcgttttccaaactgccgctactgaaagacatttggagcatggcgccgaacgtggtgaaaaacgcgccgtgtcaggaaatcgtgtgggaaggcgaaaacgttgatttgtataaacttccgattcagcattgctggccggaagacgttgcgccgctggtaacatggggcttgaccgtaacgcgcgggccgcacaaaaaacgccaaaatctcggcatttaccgccaacaactcatcggcaaaaacaagctgattatgcgctggctgtcgcatcgcggcggcgcgttggattatcaggaattccgcaaactcaatcccgatacgccgtatcccgtcgccgtcgtgctcggctgcgaccctgccaccattttgggcgcggtaacgcccgttcccgataccttgagcgaataccagtttgccggactgctgcgcggttcgcggacggagctggtgaaatgtatcggcaacgatttgcaagtgcctgcacgcgcagaaatcgtgctggaaggtgtgattcatccgaacgaaaccgcgttggaaggcccgtacggcgaccacacgggctattacaacgagcaggattatttccctgtgtttacggtcgaacgcatcaccatgcgcgaaaacccgatttaccattcgacctacacaggcaaaccgcccgatgagcctgccgttttgggcgtggcgttgaacgaagtgttcgtaccgctcttgcaaaagcagttccccgaaatcaccgatttttacctgccgcccgaaggctgctcctaccgcatggcggtggtgagcatgaaaaaacagtacgccggacacgccaagcgcgtgatgatgggctgctggtcgttcctgcgccagtttatgtacaccaaattcatcatcgtggtggatgacgatgtgaacgtgcgcgactggaaagaagtcatctgggcggtaaccacgcgcatggaccccgtgcgcgacaccgttttggtggaaaacacgcccatcgactatctcgacttcgccagcccggtcagcggactcggcggcaaaatgggcttggacgcaaccaacaaatggccgggagaaaccgaccgcgaatggggacgcgtcatcaaaaaagaccctgcggttacggctaagattgatgggatttgggaggaattggggttgtag

SEQ ID NO: 61367 - DNA, 411 bp, Neisseria meningitidis
atgattgaatttgtccgagccaaaaaacggctgctttgggcatttgtgcttttgcttgtgtggacgtgcggttaccgatacgccgccgacaaggccgaagcgaaacaaaccgccctgattgccacctatcggcattcttctatggttgcggcggaacaatacgccttgcagcttaaaaaagcgcaggacgaaaggcagcggtggtacgacttttcccaaaaacaaggaagaaagcccgtgaaaaaacagtatccgccgcaaacgaaaaaagccggctatctgaaaaccaaggaagaactgcttgcggaattggcttgccttaaagcggaaatggctgccctaaaaaagctcgatgccttaatctatgggaaagaagtgcggcagaaagaacgcaactcgtcgcagggttaa

SEQ ID NO: 61368 - DNA, 780 bp, Neisseria meningitidis
atgagcgcaaccattcccccaaaaatcatccgatacgacagcaatccgaccgatgtctattttttcggcacttgcgtccttgatctttttatgcccgaagcaggcatggatgccattgccctaatcgagcagcagggcatacgcgtccatttcccgatggcgcaaagctgctgcggccagcctgcctattcatccggccatccgaccgaagcctttgatgtcgccagagcgcaactcgaccttttccccgaggagtggccgattgtcgtaccgtccggttcgtgcggcggtatgatgaaacaccattggccgacgctgtttaaaggcagcgagtacgaggaaagggctgtggattgcgccggccgcatcatcgagtttacccatttcctgcttgccatcggtttcaaacccgaagacaagggcgaaccgctcaaagtcgccgttcacacttcctgcgccgcccgccgcgaaatgaatgtccatctttcaggctggcaactgattgacggtatggaaaacgtcgaacgcatcgtccacgaccacgaaagcgaatgttgcggcttcggcggcacattctccgtcaaacaagccgatatttccggcgcgatggtaaccgacaaagtcgccgcgctgaaagaaaccggcgcaaccgaaatcatcagcgcggactgcggctgtatgatgaacatcggcggcaaaatcgccaaggacgagccggatatgccgcgtccgaaacatatcgcatccttcttgttggaacgcaccggaggcaaagcatga

SEQ ID NO: 61369 - DNA, 1017 bp, Neisseria meningitidis; identical to SEQ ID NO: 55825

SEQ ID NO: 61370 - DNA, 537 bp, Neisseria meningitidis; identical to SEQ ID NO: 37832

SEQ ID NO: 61371 - DNA, 753 bp, Neisseria meningitidis
atgattaccctgccttccttaaacaatctgccgtcaaaatgggatgaaatccgctattggctcgaaacccgggtttgtgagtgcggcgttatgccgcatcccaatttgacggaatgcgaagccgggcagttcgatcgggatttttgggacaatatcggctgcgcgcctgaagaatatgtccgtatccgccgagccatccgtctgttggaagcgcgttatcccgacagtttgaatgagctggtgtgtgccgccattgccacgcctttgggcgagatgctggcggtgttcggaaataagggattgtgtctgctggagtttgtcggacagaaacatatggagcaggaaattgccgccgtccaaaaagccttgcgcggacggtttgtgtttcgggaggatgagcggacgcaacttttgcggcaggaattggacttatacttcaagggtcgtctgaaaacctttgccacgcctttggagcagattggcaccgagtttcaaaagcaggcatgggacgcgctcttggcgattccttacggcgaaacgcgcagctacaaagagcaggcgcagcgtttgggcaaccccaacgccgtccgcgccgttgccgccgccaacgggcagaacaaggtgtctatcttgattccctgccaccgcgtcatcggcagcgacggcaaactgaccggctacgcgggcgggttgaaccgcaaacagtttttactggctttggaacgcggcgaagttcagacggcattgttttaa

SEQ ID NO: 61372 - DNA, 960 bp, Neisseria meningitidis
atgaaacctgtttttttggattttgaacaacccatagccgaactgaccaacaaaatcgatgagctgcgtttcgtccaagacgagtctgccgtcgatatttcggacgaaatacaccgtttgcagaaaaaaagcaacgacctgaccaaatcgattttcagcaaactcacacccgcccaaatttcacaggtttcccggcatccgcagcgtccctatactttggattacattgaggcactgtttaccgattttgaagaactgcacggcgaccgccactttgccgacgattatgcgattgtcggcggattggcgcgtttcaacggacaaagcgtgatggtcgtcgggcatcagaaagggcgcgacaccaaagaaaaaatccgccgcaacttcggtatgccccgtcctgaaggctaccgcaaagccctgcgcctgatgaagacggcagaaaaattcggcttgcccgtcatgacctttatcgatacgccgggcgcgtatcccggcatcggcgcggaagaacgcggacagtcggaagccatcggcaaaaacctgtacgaactgacgcgcctgcacgtccccgttttgtgtaccgtcatcggcgaagggggctcgggcggtgcgttggcggtcgccgtaggcgattacgtcaatatgctgcaatattcgacctattctgttatctcccccgaaggctgcgcttcgattttgtggaaaaccgccgaaaaggcggcggatgcggctcaggctttgggcattactgctgaccgcctgcaaaagctggacttggtcgataccgtcatcaaagaaccattgggcggcgcgcatcgggatttcgggcaaaccatgaaaaacgtaaaagccgttttggaaaaacaactgcacgaagcgcaaagcatcccgcttgccgatttgctttcgcgccgtttcgaccgcattatggcttacggcaaattttcggaacaataa

SEQ ID NO: 61373 - DNA, 285 bp, Neisseria meningitidis; identical to SEQ ID NO: 47739

SEQ ID NO: 61374 - DNA, 1296 bp, Neisseria meningitidis
atgcccgcgcctgatttgggatttgccttaagtctgccgccaaaaaaggcaatcgagtggctggaaagtaaaaaggttacggcggagagctaccgcaatctgacagcctccgaaattgccaaagtctatacgattgcccgcatgaccgacttggatatgctcaacgacatcaaaacttcgatggttgaatcggcaaaaagtggacagtcgtttgacgattggcgaaaaggtatcttgaatctgctcagcaacaagggctggctgcatccgaacgggcataacggtaaggatatcatcgacccagccaccggcgaggtattcggttcgccgcggaggttggagacgatttaccgtaccaacatgcaaactgcctacaacgccggtcaatatcaaggatatatggcaaatattgatgcacgaccttattggatgtatgacgcggtaggcgacagccgcacccgtccggcgcattcggcaatagacgggctggtgtaccgctacgacgacccgttttgggcaacgttttacccgcccaacggctacaactgccgctgctcggtcatcgcgctgtcggagcgggatgtggaacgccaggggcggattgtcgggcaaagcacggcggataatctggtcgagacccataaaatctataacaaaaaaggcgacagctacccgacgactgcctacaaggccccggacggcagcctctacacggctgacaaaggcttcggctacaacgccgggcgaatgaactaccgccccgatttagacaagtacgaccgcgcgctggcgcatcaatttgccaaagcggaaatgggtggtgcagattttaaaaccagctttaaacagcttgaaaaagagttttatgaagtcaagcaacgtttggatattgatggcaagcccgataaagagcagaaaatcaaaatccgaaatgcgctatcaagacagcttaaatttgctgcgggtgtattgagcaaggaaacgcaagaattggcaggtatgacacgagcgacggtgtggctgtctgatgatacgttggttaaacaggtagacagccgtgaggggcagaatttcgatgactcctactatgcttttttgccggatatgctgcaaaaccctgaacatgtcatccgcgacaatcgtgaattgattttcacagctcgctataaaggctcggcattgtgggcagttttaaaatatattaaggaggtggatgagatttatctacagtcgtaccgaatcagcaacgacaaagagattgccaaatttatggcgaagaagaaagtattgaaatag

SEQ ID NO: 61375 - DNA, 480 bp, Neisseria meningitidis; identical to SEQ ID NO: 55752

SEQ ID NO: 61376 - DNA, 849 bp, Neisseria meningitidis; identical to SEQ ID NO: 37505

SEQ ID NO: 61377 - DNA, 648 bp, Neisseria meningitidis; identical to SEQ ID NO: 55792

SEQ ID NO: 61378 - DNA, 1080 bp, Neisseria meningitidis
atgaacatacaaaacatccgcaccctcctcgacaccgtcgccgttccgaatacggcacgcacgctcggcggcgaaaaggccgtccgttcggtcgaacagcgttcagacggcatccatatcgccctgcatttcggtttccctgtcgcgcacattgcctcagaaacagccgaccgcatacaggaaatcctgatgccgctgacaggcgacacacacatccatctgtccatggacactgaaatcggcacacataaagtccaacctggcgttaccaccatcaaaggtgtgaaaaacatcattgccgtcgcctccggcaaaggcggcgtgggcaaatcaacaaccaccgccaaccttgccgccgcaatggcgcggatgggcgcgcgcgtcggcgtgctcgatgccgacctttacggcccgagccaaccgaccatgttgggtgtggacgaccgcaaacccgatcagaaaaaccaaaaactcattcccgtcgaatcttcagacggcatacaggtcatgtctatcggctttctcgtcgataccgaccaagccgtcgtctggcgcgggccgatggtcagccaagccttgcagcaactgatgtttcaaagcgagtgggacgaagtggactacctgtttatcgacctgccccccggcacgggcgacatccaactcacgctgtcccaacgcatccccgtaaccggatcggtcatcgtaaccacgccgcaggacatcgccctgatagacgcgcgcaaagccgtggatatgttccgcaaagtcaacattcccattttgggcgtattggaaaatatgtccgtccacatctgctccaactgcggacacagcgaagcactgttcggcacggacggcggcaaagatttggcggcacgcctcaacgtccccctgctcggacagcttcccctaagcctgcccgtgcgcgaagccatggacggcggcacaccggcgcaactgttcgacgaacaccccgccatcgccaaaatctacaccgatgccgcattccaaatcgccctgagcattgccgacaaaggcaaagacttcagcagccgcttccctaaaattgtcgtcgaataa

SEQ ID NO: 61379 - DNA, 1128 bp, Neisseria meningitidis; identical to SEQ ID NO: 36955

SEQ ID NO: 61380 - DNA, 282 bp, Neisseria meningitidis
atggacgaagggcggatgttttgtttgttggacgtgcgtacggatgaagaaacggcggtttgttcgctgccaaatgcgctgcatatcccgatgaatctgattccgctgcggcagaacgagctgccggatgatgtgccgcttgtggtgtattgccatcacggtatccgcagtctgcatacggcgatgtatttggcggacgcgggttttgaaaacctgtacaaccttcagggcggcatcgatgcatgggcggccgagattgacggcaacatgatgcgttattga

SEQ ID NO: 61381 - DNA, 303 bp, Neisseria meningitidis; identical to SEQ ID NO: 56191

SEQ ID NO: 61382 - DNA, 336 bp, Neisseria meningitidis; identical to SEQ ID NO: 44858

SEQ ID NO: 61383 - DNA, 1911 bp, Neisseria meningitidis
atgaatatattatccgtagaaaacgcttcctttgccgtcggccatgtcgccctgctcgacaaaacgtccttccaactcgacagcggcgaaaaaatcggcttaatcggacgcaacggtgcgggtaagtcttcgtttttaaaaatcctcgccggtttgcaaaagctcgacgacgggcagattattgttcaaaacaacctcaaaatcgtttatgtaccgcaggaatccttttttgataaggacgcaaccgtatttgataccgttgccgaaggtttgggtaaaattcgcgatttattgcgccgttaccaccgcgtcggtcatgagttggaaaacggttcgggtgaggctttgttgaaagaactcaacgaattacaacttgaaatcgaagcgaaggacggctggaagctggatgcggcagtcaagcagactttgggcgaactcggtttgccggaaaacgaaaaaatcggcaacctttccggcggtcagaaaaagcgtgtcgccttggcgcaggcttgggtgcagaagcccgacgtattgctgctggacgaaccgaccaaccatttggatattgacgcgattatctggttggaaaacctgctcaaggcgtttgaaggcagcttggtcgtgattacccacgaccgccgttttttggataatatcgctacgcggattgttgaacttgaccgcggcattctacgttcctatcccggctcgttctctaaatacagtgagaaaaaagcgcaagagttggcagtcgaggcggaacataaccgcttgtttgacaaatttcatgctcaggaagaagcgtggatacgcaaaggcatcgaagcgcgacgtacccgtaacgaaggacgcgtgcgccgtttggaagagctgcgccgccaacgtgcagaacgccgcaacgtgcagggacaggtcaactttaagctcgatagcggtgagaaaagcggcaaaatcatcgccgaattggaacacacttcgtttgcctatggcggcaaagtcattatggacaaattctccgccatcttgcagcgtggcgacaaaatcggcttaatcggcccaaacggtatcggcaaaaccaccttcctcaagctgattttgggcgaattgcagccgacctacggcagaatccgtatcggcagcaagcaggaagtcgcctatttcgaccagttccgcagcgcgttgaatgaaaacgaaaccgtgttttacacgctcggacagggcaatgattacgttgaagtcggcggtaagaaaaagcatgtgatgagctatttagaagatttcctgttcccccctgcccgcgcgcaaagtcctgtttcttcactctccggcggcgaacgcaaccgccttttgctggcaaaactctttacccgtcccgccaatattttggtcttggacgaaccgaccaatgacttggacatcgacacccaagagctgctcgaagacctgttgcgcgattatcaaggcacggtattccttgtctcgcacgaccgtatgttcctcgataacgtgattacccaaagccttgtttttgaaggaaatggaaggttaaaagaatatatcggcggctatcaggactacatcgacgcaaaatcacgcgaagcgaagattcagacggaatccgcacccaaaacagccgatgccgaaccggtgaaagaaaaacccaaagccaaccgcacggtcaaactgtcctacaaagaacagcgagaactcgatgccctgcccgacgaaatcgccgccttggaagccgaacaggcagaaatcaacgcgcagctttccgatcccgaaatcttcaaagattacgaaaaagccggcgcactgcaaagccgcgccgaagaaatcgaaatgctgcttttggaaaagctggaacgctgggagctgctggaaaccaaacagaacggcaatgccgtctga

SEQ ID NO: 61384 - DNA, 1257 bp, Neisseria meningitidis; identical to SEQ ID NO: 55939

SEQ ID NO: 61385 - DNA, 753 bp, Neisseria meningitidis; identical to SEQ ID NO: 54232

SEQ ID NO: 61386 - DNA, 909 bp, Neisseria meningitidis; identical to SEQ ID NO: 56059

SEQ ID NO: 61387 - DNA, 765 bp, Neisseria meningitidis
atgtgttcctgccttgttgtcaaaaataccgttatcggaagcggacgcaccaaaatcgccgtgccgcttgtcgcccgcgatgctgccgaactttccgccgtacttgagcaaatcaaaaatatgcccttcgatattgcggagttccgcgccgactttttggaatgcgcgggcagcatcggcgaagtattgcgccacacgcagaccgtccgcgacgcgctgcccgacaaaccgctgctgtttacgttcagacggcatggcgaaggcggctcgttcccgtgttcggacgattattattttgaactgctcgacgcgctgatcgaaagccgcctgcccgacatcatcgacatcgagctgttttccggcgaaaccgccgtccggcgcgccgtggcaaatgctcaaaaaaacggcatcgccgccctactctgcaatcatgagtttcaccgcacgccgccgcaagaagaaatcgtatgccgtctgaaacagatggaggactgcggcgcggacatctgcaaaattgcggtgatgccgcaaagcgcggaagatgtgctgactttgctttccgccacgctcgaagcgaaacggcttgccgccaaaccgattgttacaatgtcgatgggacagacggggacggtcagccggcttgccggacaggtgttcggctcaagcatcacgttcggttcgggaacgcaaaactccgcgccggggcaaatcggcgtatccgccctccgtgcggcactcgactgtctcgaaagcggcgcagactga

SEQ ID NO: 61388 - DNA, 369 bp, Neisseria meningitidis; identical to SEQ ID NO: 42386

SEQ ID NO: 61389 - DNA, 1422 bp, Neisseria meningitidis; identical to SEQ ID NO: 55200

SEQ ID NO: 61390 - DNA, 756 bp, Neisseria meningitidis; identical to SEQ ID NO: 51882

SEQ ID NO: 61391 - DNA, 594 bp, Neisseria meningitidis; identical to SEQ ID NO: 42358

SEQ ID NO: 61392 - DNA, 1815 bp, Neisseria meningitidis
atgagtgaacacgatatgcagaacacaaatccgccattaccgcctctgccgcccgaaatcacgcagctcctgtcggggctggacgcggcacaatgggcgtggctgtccggctacgcttgggcaaaagcaggaaacggggcatctgcaggactgcccgcgcttcagacggcattgccgacggcagaacctttttccgtaaccgtcctttccgcctcgcaaaccggcaatgcgaaatccgttgccgacaaagcggcggacagcctggaagccgccggcatccaagtcagtcgcgccgaactgaaagactataaggcgaaaaacatcgccggcgaacgccgcctgctgctggttacgtccacccaaggcgaaggcgaaccgccggaagaagccgtcgtgctgcacaaactgctgaacggcaaaaaagccccgaaattggacaaactccaatttgccgtactgggtttgggcgacagttcctatccgaatttctgccgggcgggcaaagatttcgacaaacgttttgaagaattgggggcgaaacgcctgctcgaacgcgttgatgcggatttggactttaccgcctccgcaaacgcctggacagacaatatcgccgcactcttaaaagaagaagccgcaaaaaaccgggcaacgcccgcgccgcaggcaacgccccccgccgaccttcagacggcatcggagggcaggtactgcaaggcagccccctttcccgccgccctgctggccaatcagaaaatcaccgcccgccaatccgataaagacgtgcgccacatcgaaatcgatttgagcggttcggatttgcactacctcccgggcgacgcgctcggcgtttggtttgacaacgatccggcactggtcagggaaatcctagacctgctcggcatcgatcaggcaacggaaatacaggcgggcggaaaaaccctgccggttgcctccgcactgttatcccattttgaactcacgcaaaacacccccgcctttgtcaaaggctatgcctcgttcgccgatgatgacgaactcgaccgtattgctgccgacaacgccgttttgcaaggctttgtgcaaagcacgccgattgccgatgtgctgcaccgcttccctgcaaaactgacggcggaacaattcgccggcctgctgcgcccgcttgcgccgcgcctgtattcgatttcctcgtcgcaggcggaagtgggggacgaagtgcacctgaccgtcggcgcggtgcgttttgaacacgaagggcgcgccagagcgggcggcgcatcgggtttccttgccgaccggctggaagaggacggcacggtgcgcgtgtttgtggaacgcaacgacggcttcaggctgcccgaagacagccgcaagccgattgtgatgatcggctcgggcaccggcgtcgcaccgttccgcgctttcgtccaacaacgtgccgcagaaaatgcggaaggcaaaaactggctgattttcggcaatccgcattttgccgccgacttcctctatcagaccgaatggcagcagtttgccaaagacggcttcctgcacagatacgatttcgcctggtcgcgcgatcaggaagaaaaaatctatgtgcaggacaaaatccgcgaacaggcggaaggactttggcaatggctgcaggaaggcgcgcatatctatgtgtgcggcgatgcggcaaaaatggcaaaagacgtggaagccgccttgctggatgtgattatcggggcaggacatttggacgaagagggcgcagaagaatatttggatatgctgcgcgaagaaaaacgctatcagcgtgatgtttattga

SEQ ID NO: 61393 - DNA, 1554 bp, Neisseria meningitidis; identical to SEQ ID NO: 39330

SEQ ID NO: 61394 - DNA, 1251 bp, Neisseria meningitidis; identical to SEQ ID NO: 56158

SEQ ID NO: 61395 - DNA, 1845 bp, Neisseria meningitidis
atgctacctaaccgtttcaaaatgttaactgtgttgacggcagccttgattgccggacaggtatctgccgccggaagcggtgcgggggatatgaaacagccgaaggaagtcggaaaggttttaaggaaacatcagcgttacagcgaggaagaaatcaaaaacgaacgcgcacggcttgcggcagtgggcgaacgggttaatcagatatttacgttgctgggaggggaaaccgccttgcaaaaggggcaggcgggaacggctctggcaacctatatgctgatgttggaacgcacaaaatcccccgaagtcgccgaacgcgccttggaaatggccgtgtcgctgaacgcgtttgaacaggctgagatgatttatcagaaatggcggcagattgagcctataccgggtaaggcgcaaaaacgggcggggtggctgcggaacgtgctgagggaaagaggaaatcagcatctggacggactggaagaagtgctggctcaggcggacgaaggacagaaccgcagggtgtttttattgttggcacaagccgccgtgcaacaggacgggttggcgcaaaaagcatcgaaagcggttcgccgcgcggcgttgaaatatgaacatctgcccgaagcggcggttgccgatgtggtgttcagcgtacaggggcgtgaaaaggaaaaggcaatcggagctttgcagcgtttggcgaagctcgatacggaaatattgccccccactttaatgacgttgcgtctgactgcacgcaaatatcccgaaatactcgacggcttttttgagcagacagacacccaaaacctttcggccgtctggcaggaaatggaaattatgaatctggtttccctgcacaggctggatgatgcctatgcgcgtttgaacgtgctgttggaacgcaatccgaatgcagacctgtatattcaggcagcgatattggcggcaaaccgaaaagaaggtgcttccgttatcgacggctacgccgaaaaggcatacggcagggggacggaggaacagcggagcagggcggcgctaacggcggcgatgatatatgccgaccgcagggattacgccaaagtcaggcagtggttgaaaaaagtgtccgcgccggaatacctgttcgacaaaggtgtgctggcggctgcggcggctgtcgagttggacggcggcagggcggctttgcggcagatcggcagggtgcggaaacttcccgaacagcaggggcggtattttacggcagacaatttgtccaaaatacagatgctcgccctgtcgaagctgcccgacaaacgggaggctttgagggggttggacaagattatcgaaaaaccgcctgccggcagtaatacagagttacaggcagaggcattggtacagcggtcagttgtttacgatcggcttggcaagcggaaaaaaatgatttcagatcttgaaagggcgttcaggtttgcacccgataacgctcagattatgaataatctgggctacagcctgctttccgattccaaacgtttggacgaaggcttcgccctgcttcagacggcataccaaatcaacccggacgataccgctgtcaacgacagcataggctgggcgtattacctgaaaggcgacgcggaaagcgcgctgccgtatctgcggtattcgtttgaaaacgaccccgagcccgaagttgccgcccatttgggcgaagtgttgtgggcattgggcgaacgcgatcaggcggttgacgtatggacgcaggcggcacaccttacgggagacaagaaaatatggcgggaaacgctcaaacgtcacggcatcgcattgccccaaccttcccgaaaacctcggaaataa

SEQ ID NO: 61396 - DNA, 1035 bp, Neisseria meningitidis; identical to SEQ ID NO: 55309

SEQ ID NO: 61397 - DNA, 1569 bp, Neisseria meningitidis; identical to SEQ ID NO: 54288

SEQ ID NO: 61398 - DNA, 927 bp, Neisseria meningitidis; identical to SEQ ID NO: 54382

SEQ ID NO: 61399 - DNA, 360 bp, Neisseria meningitidis; identical to SEQ ID NO: 52616

SEQ ID NO: 61400 - DNA, 867 bp, Neisseria meningitidis; identical to SEQ ID NO: 39010

SEQ ID NO: 61401 - DNA, 1095 bp, Neisseria meningitidis; identical to SEQ ID NO: 54326

SEQ ID NO: 61402 - DNA, 435 bp, Neisseria meningitidis; identical to SEQ ID NO: 39366

SEQ ID NO: 61403 - DNA, 789 bp, Neisseria meningitidis; identical to SEQ ID NO: 55632

SEQ ID NO: 61404 - DNA, 360 bp, Neisseria meningitidis; identical to SEQ ID NO: 42625

SEQ ID NO: 61405 - DNA, 702 bp, Neisseria meningitidis
atgacggaacctgcggccgaaggcggcaaagctgccaaggcgttaaaaaaatatctgattacgggcattttggtctggctgccgattgcggtaacggtttgggtggtttcctatatcgtttccgcgtccgaccagcttgtcaacctgctgccgaagcaatggcggccgcaatatgttttggggtttaatatcccggggctgggcgttattgttgccattgccgtattgtttgtaaccggattgtttgccgcaaacgtattgggccggcagattcttgccgcgtgggacagcctgttggggcggattccggttgtgaagtccatctattcgagtgtgaaaaaagtatccgaatcgttgctgtccgacagcagccgttcgtttaaaacaccagtactcgtgccgtttccccaatcgggtatttggacaatcgcattcgtgtccggtcaggtgtcgaatgcggttaaggccgcattgccgaaggacggcgattatctttccgtgtatgttccgaccacgccgaatccgaccggcggttactatattatggtaaagaaaagtgatgtgcgcgaactcgatatgagcgtggacgaagcgttgaaatatgtgatttcgctgggtatggtcatccctgacgacctgcccgtcaaaacattggcaggacctatgccgtctgaaaaggcggatttgcccgaacaacaataa

SEQ ID NO: 61406 - DNA, 822 bp, Neisseria meningitidis; identical to SEQ ID NO: 44347

SEQ ID NO: 61407 - DNA, 825 bp, Neisseria meningitidis
gtgaaccgaactgccttctgctgcctttctttgaccgccgccctgattctgaccgcctgcagcagcggaggcggcggtgtcgccgccgacatcggcgcggggcttgccgatgcactaaccgcaccgctcgaccataaagacaaaagtttgcagtctttgacgctggatcagtccgtcaggaaaaacgagaaactgaagctggcggcacaaggtgcggaaaaaacttatggaaacggcgacagcctcaatacgggcaaattgaagaacgacaaggtcagccgcttcgactttatccgtcaaatcgaagtggacgggcagctcattaccttggagagcggagagttccaagtgtacaaacaaagccattccgccttaaccgcccttcagaccgagcaagtacaagattcggagcattcagggaagatggttgcgaaacgccagttcagaatcggcgatatagcgggtgaacatacatcttttgacaaacttcccgaaggcggcagggcgacatatcgcgggacggcattcggttcagacgatgccagtggaaaactgacctacaccatagatttcgccgccaagcagggacacggcaaaatcgaacatttgaaatcgccagaactcaatgttgacctggccgcctccgatatcaagccggataaaaaacgccatgccgtcatcagcggttccgtcctttacaaccaagccgagaaaggcagttactctctaggcatctttggcgggcaagcccaggaagttgccggcagcgcagaagtggaaaccgcaaacggcatacgccatatcggtcttgccgccaagcagtaa

SEQ ID NO: 61408 - DNA, 393 bp, Neisseria meningitidis; identical to SEQ ID NO: 40523

SEQ ID NO: 61409 - DNA, 462 bp, Neisseria meningitidis
gtgagcggcgagcaaactttggaaacggcggccttgatgtgcgaaatcccgcagaccactgcgcgtgcgtggaaacgtgcggataaggaaaaaggcgacgactgggataagatgcgcgccgcctacactttggccggcggcggtattgaggacttgagccgtgcgatgttggccggttttatggtgcagtacaacagcacgatgacgatgctgcaggattcgagtaccgaagatttgcccccgtccgaccgcgccaagctgttggccagcctggccgatgcgtttacgaaaaccgtatcggccaatgcgcgtgtgatgccggaaacgtcaaaactggcgacggctttggaattgattgagttcttgatggcgtttgtgcaagaaaaacatcccaaacatttgcctgcctttgtggaggtattggagccgtttggggcggaagtggagaagaagtttggttaa

SEQ ID NO: 61410 - DNA, 906 bp, Neisseria meningitidis
atgcttaccttccaacaaatcatcttcaaactgcaaacattctgggcagacaaaggctgcaccgtcatccaacccttcgacatggaagtcggtgccggcacatcccatcccgccacctgcctgcgcgcactcggccccgagccttggtttgccgcctacgtccaacccagccgccgccccaaagacggccgctacggcgacaaccccaaccgcctgcaacactattaccaattccaagtcgccctcaagcccgctcccgccaatatccaagacctctatctcgactctctgcgcgaattgggcatcgatcccaaagtccacgacatccgctttgtcgaagacgactgggaaaaccccaccctcggcgcgtggggtttgggctgggaagtctggctcaacggcatggaagtaacccagtttacctatttccaacaagtcggcggcatcgactgcacccccgtactcggcgaaatcacctacggcatcgaacgcttggcgatgtacctgcaaggcgtggaaaacgtctatgacctcgtttgggcaaaaacgctggacggtaatacagtaacttacggcgacgtgtaccaccaaaacgaagtcgaacaatccacctacaacttcgaatacagcgatgccgactggctgctgcgccagttcaacgactacgaagcgcaagccaaacgcctgcttgccgaagaaaacgccgccctcgccctgcctgcctacgagcttgtcctcaaagcggggcatacgttcaaccttttagacgcacgcggcgcgatttccgtaactgagcgggcaacttatattggacgtattcgtgcattgagccgcgccgtggcgcaaaaatatgttgaaagccgcgaaaaactgggcttccctttaatgaaggcaaacgccgcctaa

SEQ ID NO: 61411 - DNA, 954 bp, Neisseria meningitidis; identical to SEQ ID NO: 47463

SEQ ID NO: 61412 - DNA, 1041 bp, Neisseria meningitidis; identical to SEQ ID NO: 45119

SEQ ID NO: 61413 - DNA, 1806 bp, Neisseria meningitidis
atgcgtaaggtgtgtgcttcagcacgcacgcgttccatgatttacggctcaatgccgtctgaaaagctcacaatttttcagacggcatttgttatgcaagtaaatattcagattccctatatactgcccagatgcgtgcgtgctgaagacaccccctacgcttgctatttgaaacagctccaagtcaccaaagacgtcaactggaaccaggtacaactggcgtacgacaaatgggactataaacaggaaggcttaaccggagccggagcagcgattattgcgctggctgttaccgtggttactgcgggcgcgggagccggagccgcactgggcttaaacggcgcggccgcagcggcaaccgatgccgcattcgcctcgctggccagccaggcttccgtatcgctcatcaacaacaaaggcaatatcggtaacaccctgaaagagctgggcagaagcagcacggtgaaaaatctgatggttgccgtcgctaccgcaggcgtagccgacaaaatcggtgcttcggcactgaacaatgtcagcgataagcagtggatcaacaacctgaccgtcaacctggccaatgcgggcagtgccgcactgattaataccgctgtcaacggcggcagcctgaaagacaatctggaagcgaatatccttgcggctttggtgaatactgcgcatggagaagcagccagtaaaatcaaacagttggatcagcactacattacccacaagattgcccatgccatagcgggctgtgcggcagcggcggcgaataagggcaagtgtcaagatggcgcgataggcgctgcagtcggtgagattgttggtgaggctttggttaagaatactgatttcagtcgtatgagtgcgaccgaaatcgaaaaagctaaagcgaagattactgcctattcaaaactggttgccggcactgcgtctgccgttgtaggcggggatgtgaatacagcggcgaatgcggctactgtggcggtggagaataatactttgtatcctagatgcgttggtgcaaagtgtgatgaatttcaaaaggaacaacaaaaatggatacgtgaaaatcctgaagaatatcgagaagttttgcttcttcagacaggatttattccaattatcggtgatatacagagttttgtacaagcacagaccgctgccgatcacctgtttgctttgctgggtgtggttccgggtatcggtgaatcgatacaggcctataaagtagcgaaagcggcaaaaaatttacaaggcatgaaaaaagccttggacaaggcagcaaccgttgccactgcacagggctatgtcagtaaaaccaaaatcaaaatcggtcaaactgaattaagggttactgcagcaactgacaaacaattgctgaaagctattggcgaaggaagggacacgacaggtaaaatgaccgagcagttatttgactctttagctaaacaaaatggcttcagagtgctttcgggcggcaaatacggcggaaataacggttttgatcatgtatggcaggctgccgatggtagtgttgttttgattgtagaaagtaagcagattaggaacggtacggtacagctgaatccgaatggtgcgggtggatatacgcagatgagtcgtgaatggattaaacaagttgtaaaaagtttacctgatggtagtcctgctaaggcagttgtcttaaaagcaaatcagaacggcaaattaaaaacggcaatagcaggcgttgatcgtcaaacaggtaaggccgttattctttctgtcaaagttccttctaaaaccaatataaggagataa

SEQ ID NO: 61414 - DNA, 1311 bp, Neisseria meningitidis; identical to SEQ ID NO: 39855

SEQ ID NO: 61415 - DNA, 567 bp, Neisseria meningitidis
atgagcatcaagtccgacaaatggatacgccgaatgagcgaagaattcggcatgatcgaccctttcgagccgaaccaaatcaaagaagccgacggcaaacgcatcatctcctacggtacgtccagctacggctacgacatccgctgcgcaaacgaatttaaaatcttcaccaacatcaacagcaccatcgtcgatcccaaaaacttcgacccgaaaaacttcgttaccgttgaagacgactgctgcatcatcccgcccaattccttcgcactggcgcgcacggtcgaatatttccgcatcccgcgcaacgtcctgaccgtctgcctgggcaaatccacctacgcccgctgcggcatcatcgtcaacgttaccccgttcgaaccggaatgggaaggctacgttaccctcgaattttccaacaccacccccctgcccgccaaaatctacgccggcgaaggcgtagcgcaagtcctcttcttcgagagcgacgaaatctgcgaaacctcatacaaagaccgcaacggcaaatacatgggacaaaccggcgtaaccctgcccaaagcctga

SEQ ID NO: 61416 - DNA, 1140 bp, Neisseria meningitidis
atgagtcaaaatgcctcggtgggcattgtaatgccccaaaaaattccgtttgaggtgccgctggttttggaaaacggtaaaactttgccgcgtttcgatctgatgattgaaacctacggcgagctgaatgctgaaaaaaacaatgcggttttaatctgccacgcgctgtcgggcaaccatcatgttgcgggcaggcattcggcggaagataaatatacgggctggtgggacaatatggtcggacctggcaaaccgattgatacggaacgttttttcgtggtcggtttgaataatctgggcggctgcgacggcagcagcgggcctttgtcgatcaatcctgaaacgggtagggaatacggcgcggattttccgctggttacggtgaaggactgggtaaaatcccaagccgcgcttgccgattatctcagcatcgggcaatgggcggcggttgtcggcggcagcttgggcggcatgcaggctttgcagtgggcgatttcctatcccgaacgcgtgcgccacgccttggtgattgcgtccgcgccgaaactgtccacgcaaaatatcgcgttcaacgatgtggcgcgtcaggcgattttgaccgatcccgatttcaacgaaggacattaccgcagccgcaacaccgttcccgctcggggcttgcggattgcccgcatgatggggcacatcacctatcttgccgaagacggtttgggcaaaaaattcggacgcgatttgcgttccaacggctatcaatacggctatggcgttgaatttgaagtagaatcctatctgcgctatcaaggcgacaaattcgtcgggcggtttgatgccaacacctatttgctgatgaccaaggctttggactatttcgatccggcggcagatttcggcgacagcctgacccgcgccctgcaaaatgtgaaagcgaaattctttgtcgccagcttcagcaccgactggcgtttcgcacccgaacgttcgcacgaactggtcaaggcactgattgccgcccaaaaatccgtgcagtatatcgaagttaaatccgcacacgggcacgatgcctttttaatggaagacgaagcctatatgcgtgcggtcgccgcctatatgaacaacgtttataagggatgtcagcaatga

SEQ ID NO: 61417 - DNA, 531 bp, Neisseria meningitidis
atgaacgcaatccgaactttccaaaaccgcacgcccgaaatccacgaaagctgtatgatagacgaagcgtgcgtcgtcatcggcgaagtgtcgcttgccgaagacgtttctgtgtggccgtgcgccgtgttgcgcggcgatgtgaacagcatcaccgtcggcgcgcgcagcaatatacaggacggcagcgtcctgcacgtttcccacaaaaccgccgccaaacccgaagggtcgccgctggttatcggcgaagacgttaccgtggggcacaaagtgatgctgcacggctgccgtatcggcaaccgcgtcttggtcggtatgggcagcaccgttttggacgatgccgtgattgaggacgaagtgatgatcggcgcgggcagcctcgttccgccgcgcaaacgtttggcgggcggctacctttatgtcggttcgccggtcagacaagtgcgcgtgctgaccgatgaggaaaaagcctttttgaaatattccgccgcgcattatgtgaagctgtcgaaacagtacgggatgtga

SEQ ID NO: 61418 - DNA, 1104 bp, Neisseria meningitidis; identical to SEQ ID NO: 44519

SEQ ID NO: 61419 - DNA, 654 bp, Neisseria meningitidis; identical to SEQ ID NO: 55457

SEQ ID NO: 61420 - DNA, 1002 bp, Neisseria meningitidis; identical to SEQ ID NO: 60919

SEQ ID NO: 61421 - DNA, 720 bp, Neisseria meningitidis; identical to SEQ ID NO: 55005

SEQ ID NO: 61422 - DNA, 1776 bp, Neisseria meningitidis; identical to SEQ ID NO: 55048

SEQ ID NO: 61423 - DNA, 615 bp, Neisseria meningitidis
atgaagaataatgattgcttccgcctgaaaaacccccagtccggtatggcgctgatagaagtcttggtcgctatgctcgttctgaccatcggtattttggcactattgtctgttcagttgcggacagtcgcttccgtcagggaggcagagacgcaaaccatcgtcagtcaaatcacgcaaaacctgatggagggaatgttgatgaatccgaccattgattcggacagcaacaagaaaaactataatctttacatgggaaaccatcatacactatcagctgtggatggcgattttgcggttgatgccgtgaaaagcaagaaggatttggcaaaagcccagttggacaggttcggttatgaattgaaaaatgccttgcaggatgcggcagccatctattacgccgtctgcaaggattcgtcgggtgctgcgccgacattgtccgccggcagtactttttcttcaaattgcgacaataaggcaaacggggatactttgattaaagtattgtgggtaaatgattcggcaggggattcggatatcgcccgtacgaatcttgagacgaacggcaacaatatcgtatatacctatcaggcaagggtcggaggtcgggaatga

SEQ ID NO: 61424 - DNA, 231 bp, Neisseria meningitidis; identical to SEQ ID NO: 55669

SEQ ID NO: 61425 - DNA, 402 bp, Neisseria meningitidis
atggttgcccccgtatatgcacaggggcaaccggatgcgatcaatgcctatatccaaaagaaaaaagtcatcgtcgatacatccaaagcggaactctgtttcgctgacgaccgtcagtgccaccccgtcctcatcggtgttgccacgcccaaggggacgttcgggctgacgctgaacagtaccgacaagcctggatacggcggcgaagtcatcggtttcaagcaggagggtgattttcttttcgccctgcaccgcgtttggaatcagataccgtcggaaaggcggaacgaacgcatcgcctccccgtccgtgtccgacaggattatgaccaacggctgcatcaacgtcagcgatgcggtgtacgaaaaactgcgtcattattttgtgttggaagtgatttga

SEQ ID NO: 61426 - DNA, 402 bp, Neisseria meningitidis; identical to SEQ ID NO: 51684

SEQ ID NO: 61427 - DNA, 1152 bp, Neisseria meningitidis; identical to SEQ ID NO: 55765

SEQ ID NO: 61428 - DNA, 411 bp, Neisseria meningitidis
atggaaattcgggcaataaaatatacggcaatggctgcgttgcttgcatttacggttgcaggctgccggttggcaggttggtatgagtgttcgtccctgtccggctggtgtaagccgagaaaacctgccgccatcgatttttgggatattggcggcgagagtccgccgtctttagagggctacgagataccgctttcagacggcaatcgttccgtcagggcaaacgaatatgaatccgcacaacaatcttacttttacaggaaaatagggaagtttgaagcctgcgggttggattggcgtaggcgtgacggcaaacctttgattgatgagacgttcaaacaggaaggttttgattgtttgaaaaagcaggggttgcggcgcaacggtctgtccgagcgcgtccgatggtaa

SEQ ID NO: 61429 - DNA, 537 bp, Neisseria meningitidis
atgtcggcaaccgtccgtatcttgggcattgacccgggcagccgcgtaacgggtttcggcatcatcgatgtcagggggcgggatcatttttatgttgcctccggctgcatcaaaacgcctgccgatgcgtctctggcagacaggattgccgtgattgtgcggcatatcggcgaagtcgttgccgtttacaagcctcaacaggcggcagtggaacaggtgttcgtcaacgtcaatcctgcatcgacgctgatgctgggtcaggctaggggcgcggcattggcggcattggtcagccataagctgcccgtttcggaatacacggccttgcaggtcaaacaggcggtagtcggcaaaggcaaggcggcgaaagaacaggtgcagcatatggtggtgcagatgctggggctttcgggaacgccgcaggcggatgcggcggacggtcttgccgtcgcgctgacccacgccttacgcaaccacgggcttgccgccaaactcaatccttcggggatgcaggtcaagcgcggcaggtttcaatag

SEQ ID NO: 61430 - DNA, 1302 bp, Neisseria meningitidis
atgccgtctgaaaccgcccgccccctttatgcggacacgcgcgccgcacacacgctcgtctggttccgccaaaacctccgcatccgcgacaacgccgccttatgcgccgccgttgccgaaggtttgcccgttatcggtatttggattgacgatgccgaaacagacaaccctcgccgcgccgcgttctaccgccaatccgccgccgaactcgcccaagggcttgcagggcgcggcatcccgctctacacggcggcatcgcctgccgagctcgtccggctcgccgtccgcctcaatatccgcgccgtcatcgccgacgaatcccatacttttgccgacaaactcgccgacaacgccctttggcatgaattggacaaacacggcatcgcgttaaccttcgtcaatgaccgcgccgttttcggcaaaaccgacctgatacccgacggcggcacggcacacaccgatttcgaccgctaccgcgaagtatggctcgaccgcttttccaagcagccccccgccggtccgaacctattcgcggcataccgccaacccttccccgaaaacctttccgccccgccgcctgccgccctttcagacggcatcttcctgccgcaaaacagcggcgaaacggcggcttggcggcagtggcggcggtttctcgaacaggcggattcctactccgttttaaaggatttcccctcgcgcaaacacacttcgctgatgggcgcgtatttgagtgccggctgcatctcgccgcgcctgctcgcgcgggaaagcctcgaacgccgtctgaacgcgtgggcggacaacatcatccgccgcgattttttccttcaacttgccttgcagcacacggatgacagcccttcagacggcaatccggaacacaccctgcgcctgacgctttggcagcagggccagaccggcattccgattatcgatgccgcgatgcgctgtttgcacaaaaccggcagcctccaccccgccctgagacgcttgagcgcggattttttctgccacgttttaaacctcccccgccgcgaaggcgagatatggtttgcccgacagctgaccgatttcgatgcggcaatcaaccaaggcaactggtggcttgccgcctcacggcacacctgccccgacattgccgccgcctcataccgtaccgacccggacggtacttttatcaaacggcacattcccgaactcgcccacctgtccgccgacaccgtccacacgccttggcggtttgcctgttcggtcgatacccacggctatcccgcctatcctgtcgccggtattccctaa

SEQ ID NO: 61431 - DNA, 1773 bp, Neisseria meningitidis
atgatactgccagcccgtttttcagacggcatcagcctttccctacgcctgaaactcctgaccggagtgtgggtcgggttggcggcattgtctgtcgttttgacactgctgctctctttgcgtctggaaaacgcggcctccgtcatcgaagaggcgggcaacttgagaatgcaggcataccgtctggcatacatggcgggtgaaggatctccccgctcccaaatagacaatcaggttgacgaatttgaaaaaagcctgaatcgtatttcacaaagtgatgccatccatccgctgattccttcggacacccctcttgcttatgatttgatacaatccatgctgattatagattggcaggcacacatcctccccccgctccagtcctaccggcgaccgactcaggtcgatctctaccgctttgccggaaacatcgaactgtttttgcaggcattggaaaatgccaacgaaaaaaacacatggtggctcaggcgttttcaatgggcaattatgttgatgacgctggtgtcgtctgtactgatgctgttttggcaccagatttgggttatccggccgctgcaggcgttaagggaaggtgcggaacgcatcggacggaggtgtttcgatattccggttcccgaaggcggtacgccggaattcaaacaggtcgggcgttgtttcaatcaaatgggcggcaggttgaaaattttatatgatgatttggaaggacaagtcgccgagcagacacgcagtctcgaaaaacaaaatcaaaacctgaccctgctgtaccaaactacacgggacctgcaccaatcctacataccgcaacaggctgcagaacattttctaaaccgtatcctgcccgccgtaggagcagattccggcagagtttgtttggacggcggatccgatgtttatgtttccattcatcatgcggattgcggcacagcagcttcggatttggggaagtaccatgaggaaatcttccccattgagtaccagaacgaaacattgggcaggctgttgctcagcttttcagacggcatttccctcaccggagacgaccgcacgctgcttcaaaccctgattcggcaattgggcgtatcgctcgctagcgcgaagcaggaagaagaaaaacgcctgcttgcagtattgcaggaacgcaacctgattgcgcaaggattacatgacagcatcgcacaagcattaacgttcctaaacctacaggtacagatgctggaaaccgcctttgccgaaaacaaacgggaggaagccgcagaaaacatcagcttcatcaaaacaggcgtgcaggaatgttatgaagatgtccgcgaactgctgctcaacttccgtaccaaaatcagcaataaagaatttcccgaagccgttgccgacctattcgcccgctttacgcaacaaaccgggataacggtcgaaaccgcctgggaaaacggttcgttcctgccgcctcaggaagcgcagctccaaatgatttttatcctgcaggaaagcctgtccaacatccgcaaacacgcccgcgccacccatgtaaaattcaccctttccgaacacggcggacgctttaccatgaccatccaagacaacggacaaggtttcgacacggagaaaataggagaacccacgggcagccatgtcggactgcacatcatgcaggagcgtgccaaacgcatccatgccgttttagaaatccgttcccaagctcaacagggaaccaccgtctcattgacggttgcatctgaagaaagcttgaaatga

SEQ ID NO: 61432 - DNA, 1005 bp, Neisseria meningitidis; identical to SEQ ID NO: 54871

SEQ ID NO: 61433 - DNA, 1080 bp, Neisseria meningitidis
atgattgccaaacacatcgaccgtttcccgctattgaagttggaccaggtgattgattggcagccgatcgagcagtacctgaaccgtcaaagaacccgttacctccgagaccaccgcggccgtcccgcctatcccctgttgtccatgttcaaagccgtcctgctcggacaatggcacagcctctccgatcccgaactcgaacacagcctcatcacccgcatcgatttcaacctgttttgccgttttgacgaactgagcatccccgattacagcaccttatgccgctaccgcaactggctggctcaagacgacaccctgtccgaactgttggaactgattaactgccaactgaccgaaaaaggcctaaaaatagagaaagcatccgccgccgtcgttgacgccaccattattcagaccgccgacagcacacagcgtcaggccatagaagtcgatgaagaaggacaaatcaacggccaaaccacaccgagtaaggacaaagatgcccgttggataaagaaaaacggcctctacaaactcggttacaaacaacatacacgtaccgatggggaaggctatatcgagaaactgcacatcacccccgccaatgcccatgagtgcaaacacctgtcaccgttgttggaaggactgcccaaaggtacgaccgtctatgccgacaaaggctacgacagcaaggaaaaccggcaacatctgaaagaacatcggttgcagaacggcattatgcgcaaagcctgccgcaaccgtccgctgacggaaacgcaaaccaaacgtaaccgatatttatcgaagacccgttatagtggattaaatttaaatcaggacaaggcgacgaagccgcagacagtacaaatagtacggcaaggcgaggcaacgccgtactggtttaaatttaatccactatatgtggtcgaacagagcttcggtacgctgcaccgtaaattccgctatgcgcgggcagcctatttcgggctgagcaaagtgagtgcacaaagccatctgaaggcgatgtgtttgaaccttttgaaagcggccaacaggctaagtgcgcccgctgccgcctaa

SEQ ID NO: 61434 - DNA, 1380 bp, Neisseria meningitidis
atgctgctcgacctcaaccgcttttccttttccgtcttcctgaaagaagtccgcctgctgaccgctcttgccctgcccatgctgttggcgcaggtcgcgcaggtgggcatcggttttgtcgataccgtgatggcgggcggtgcgggcaaggaagacttggcggcggtggctttgggcagcagcgcgtttgccacggtttatattacctttatgggcattatggcggcgctgaacccgatgattgcccagctttacggcgcgggtaaaaccgacgaagtgggcgaaacgggacggcaggggatttggttcgggctgtttttgggcgtgttcggcatggtcttgatgtgggcggcgattacgccgttccgcaactggctgaccttgagcgattatgtggaaggcacaatggcgcagtatatgctgttcaccagcttggcgatgccggcggcaatggtacaccgcgcactgcacgcctacgcctccagcctgaaccgcccgcgcctgattatgttggtcagctttgcggcgtttgtgttgaacgtgccgctgaactatattttcgtttacggcaaattcggtatgcccgctttgggcggcgcaggctgcggactggcgacgatggcggtgttttggttcagcgcgctggcattgtggatttatatcgccaaggaaaatttcttccgcccattcggactgacggcgaaattcggcaaaccggattgggcggtgttcaaacagatttggaaaatcggcgcacccatcgggctgtcttattttttggaagccagcgcgttttcgtttatcgtgtttttgattgcgcctttcggcgaggattatgtggcggcgcagcaggtcggcatcagtttgtcggggattctctatatgattccgcaaagcgtcggctcggcggggacggtgcgcatcggcttttcgcttgggcggcgcgaattttcgcgggcgcgttatatttcgggcgtgtcactggtgtcaggatggatgctcgccgtgattaccgtgctttccttggtattattccgttcgccgctggtaagtatgtacaacaatgatccggcggttttaagcatcgccgccaccgtcttactgttcgccggcttgttccaaccggcagacttcacccaatgtatcgcctcctacgccttgcgcggctacaaagttacaaaggtgccgatgttcatccacgccgccgccttttggggctgcggtctgctgccgggctacctgctcgcctaccgtttcgatatgggcatttacggcttctggacggcattgattgcctcgctcaccatcgccgccatcgccttggtgtggtgcttggaattgtgcagtagggagatggtcagatcgcataaggctgtctga

SEQ ID NO: 61435 - DNA, 402 bp, Neisseria meningitidis; identical to SEQ ID NO: 38334

SEQ ID NO: 61436 - DNA, 408 bp, Neisseria meningitidis; identical to SEQ ID NO: 54784

SEQ ID NO: 61437 - DNA, 1281 bp, Neisseria meningitidis
ttgaaggattgttttcctcaaggtctgaatggaaaaaaaacagcggtggcattaagcggcggcttggattccgtcgttttgctgcatctgcttgtccgcgccgggaaaaaaggcggttttattccggatgcattgcatatccatcacggcttgagtccccgtgccgacgattgggcggatttctgccaaaactattgcgatatgctcggggtggggctggaaacggttaagatctgcgtggaaaaaaacggtttgggcatcgaggcggcggcgcggcaaaagcgttatgccgcgtttgccgaaaaaggctttgacgttttggcgttggcgcaccacagggacgatcaaatcgaaacctttatgctggcggtcgcgcgcggcggcggtttgcgcgctttggcggctatgcccgccgtccgcccttttggggaaaaaggcattatctggcggcccttgctgcctttttcgcgccaagatatatgggattatgcccaaaaacacggtttgccgaatatcgaggacgaaagcaatagcgatacggcttatttgcgaaaccgcttccggcaccgtattttgcccgaactttcggcgcagattccccatttcgggcggcatctgttgaacaatgtccgtgccttgcaggaggatttggctttgttggacgaggtcgtcgttcaagactgccgttgggtttgcggagccggttatttcgatacggcgcggtggctgacgttttccccgcgccggaaaacccatattttgcggtattttttgaaggaaaacggcatccccatgccgaatcagaatgcccttgccgacattgcccgggttttgacggaggcaaaaaccggacgttggaacttgcaaggctttgaattgcatcattatgcaggcaggctgtttgtgttccgactggaaaaaacggataaactgcggtttttgaaagacaggcagataagcggaaatttaagggaaatattgacggggcagggatttgttttaaaacgtcatccgtttgggcttcctgagcatcttttggagcaggacggaattttgaggacggtagcggtatcggatacgttggctgtcggcggcatccataaggatgtgaaaaaaatccttcaggggaaacgggttttgcctgtcctgcgcccaatttggccgcttgttgccgacagcggaaaccgtccattggcgttggcaaactgttgtgcggatttccaatactcggtttcagacggcattttgcccgtccatcctgactttcccattttattttga

SEQ ID NO: 61438 - DNA, 1155 bp, Neisseria meningitidis
atgaaatttaccaagcaccccgtctgggcaatggcgttccgcccattttattcgctggcggctctgtacggcgcattgtccgtattgctgtggggtttcggctacacgggaacgcatgagctgtccggtttctattggcacgcgcatgagatgatttggggttatgccggactggtcgtcgtcgccttcctgctgaccgccgtcgccacttggacggggcagccgcccacgcggggcggcgttctggtcggcttgactatcttttggctggctgcgcggattgccgcctttatcccgggttggggtgcgtcggcaagcggcatactcggtacgctgtttttctggtacggcgcggtgtgcatggctttgcccgttatccgttcacagaatcaacgcaactatgttgccgtgttcgcgctgttcgtcttgggcggcacgcacgcggcgttccacgtccagctgcacaacggcaacctaggcggactcttgagcggattgcagtcgggcttggtgatggtgtcgggttttatcggtctgattggtacgcggattatttcgttttttacgtccaaacggttgaatgtgccgcagattcccagtccgaaatgggtggcgcaggcttcgctgtggctgcccatgctgaccgccatgctgatggcgcacggcgtgatgccttggctgtcggcggctttcgcgtttgcggcaggtgtgatttttaccgtgcaggtgtaccgctggtggtataaacccgtgttgaaagagccgatgctgtggattctgtttgccggctatctgtttaccggattggggctgattgcggtcggcgcgtcttatttcaaacccgctttcctcaatctgggtgtgcatctgatcggggtcggcggtatcggcgtgctgactttgggcatgatggcgcgtaccgcgctcggtcatacgggcaatccgatttatccgccgcccaaagccgttcccgttgcgttttggctgatgatggcggcaaccgccgtccgtatggttgccgtattttcttccggcactgcctacacgcacagcatacgcacctcttcggttttgtttgcactcgcgcttttggtgtatgcgtggaagtatattccttggctgattcgtccgcgttcggacggcaggcccggttga

SEQ ID NO: 61439 - DNA, 999 bp, Neisseria meningitidis; identical to SEQ ID NO: 55281

SEQ ID NO: 61440 - DNA, 180 bp, Neisseria meningitidis; identical to SEQ ID NO: 39090

SEQ ID NO: 61441 - DNA, 516 bp, Neisseria meningitidis; identical to SEQ ID NO: 55128

SEQ ID NO: 61442 - DNA, 870 bp, Neisseria meningitidis; identical to SEQ ID NO: 38859

SEQ ID NO: 61443 - DNA, 1104 bp, Neisseria meningitidis; identical to SEQ ID NO: 39574

SEQ ID NO: 61444 - DNA, 582 bp, Neisseria meningitidis; identical to SEQ ID NO: 54271

SEQ ID NO: 61445 - DNA, 180 bp, Neisseria meningitidis
ttggcagaaggatatacttatttcttcaatgaaaatacggatgattgctatgttttgaaagaggattttattaataatgagcgatatgaaaaaacagaattatatccccaaaaagataaggtaattctatttccaaagtttggcgaatatgatttggtgttaaatccggacattatttaa

SEQ ID NO: 61446 - DNA, 690 bp, Neisseria meningitidis; identical to SEQ ID NO: 54630

SEQ ID NO: 61447 - DNA, 1026 bp, Neisseria meningitidis
atggattatcagggtaagaaagaccgattggaagaagttatcggtctttccgaagaccccgaactttggaacgacccgaaacgcgcccaagaaatcggcaaagagcgcaaaatcctcgaaggcatcgtgttgacgctcgacaacatcgcttcgggcatcgaagacaaccgcatgctgattgaaatgaccgtcgaagaaaacgacgaagaaggttttgccgccgtgcaggaagatgtggcggggctggaaaaacagatggcggatttggagttcaaacggatgttcaaccagcccgccgacccgaacaactgctttatcgacatcaccgcaggcgcgggcggtacggaagcggaagactgggcgggtatgctgttccgcatgtacagccgctacgccgagcgcaaaggcttcaaaatcgaaatcctcgaagaagacgacggcgaaatcgcgggcatcaaccgcgcgactatccgagtggaaggcgaatacgcctatggtttgctgcgtaccgaaactggcgttcaccgcttggtgcgctattcaccgtttgactcgaacaacaaacgccatacttcgtttgcctccgtgttcgtttaccctgaaatcgatgattccatcgaaatcgaaatcaaccccgccgatttgcgtatcgacacctatcgcgcatcgggcgcgggcggtcagcacatcaacaaaaccgactccgccgtgcgtattacccacgagccgacggggattgtggtgcaatgtcaaaacgaccgttcgcaacacgccaacaaagcggccgcgatggaaatgttgaagtccaaactgtatgaattggaaatgcgcaaacgcaatgaagagaaacaggcgttggaagaaggtaaatccgatgtaggttggggcagccaaatccgttcgtatgttttggattcctcacgtatcaaagacttgcgtacaggctacgaagtcggcaacaccaaagccgtattggatggcgatttggacggctttatcgaagccagcctgaaacagggcgtgtag

SEQ ID NO: 61448 - DNA, 597 bp, Neisseria meningitidis
atgaatatcaatacttccgaaaataaagatgctgttgccgaacacaccggacaatggttggaaaaagccgtcatcggtctgaacctgtgtccctttgccaaagccccccacgttaaaaaccttgtccgcatcgcaatcagcgaagccaaacaccttgacagttttttggaagacttggacgaagaactgcagcgactgggcaatacacccgccaccgaactggaaaccaccctgctggttcacccgaccctattccccgatttcgacgtattcaacgatatgctcgatattgccgatgccgccgttatcgaaaacggcttggaaggcatcgtccaaatcgcaccgttccatccccaattccgctttcagaataccgaacccgacgacatcggcaactacaccaaccgttctccctatccgacgctgcacctcatccgcgaagacagcattgccaaagccgcacaagcctttcccgacacttcggcaatattcgaacgcaatatcgccctgctggaaaaaatgggacatgaaggctgggcaaaactcggtatcacatcctgcccttatccgcacaataagaaaaatatttcaaaatga

SEQ ID NO: 61449 - DNA, 975 bp, Neisseria meningitidis
atgccgtctgaaaaaaatatcggttttatggcaggaagcagccgtccgttgtgggttgcctttgcgctgttgctggtttcctgcgtcctgtttttaacgctcaacgtcaaaggcgattgggactttgtactgcacctgcgtctgaccaaacttgccgcgctgctgatggtcgcctatgcggtcggcgtgtccacgcaactcttccaaacgctgaccaacaatccgattctgaccccttcgattttgggtttcgattcgctgtatgtgtttttgcagaccttgctggtgtttacgttcggcggcgtgggctatacgtccctgcctgcggtcggcaagttcggctttgaattggtcgttatgatgggcggctcgctgctgttgttctacacgctcgtcaaacaaggcgggcgcgatttgtcgcgcatgattttaatcggcgtgattttcgggattttgttccgcagcctgtcgtcgctgctttcgcgcatgatcgaccccgaagaatttatggcggcgcaggcgaatatgtttgccggattcaataccgtccacagcgagcttttgggcataggcgcgctgattctgctcgtcagcgcggcggtcgtttggcgcgaacgctaccgcttggacgtacaccttttggggcgcgaccaagccgtcaatttgggcatcagctacacgcgcaacaccttatggatactgctttggattgccgcattggtggcgacggcgaccgccgttgtcggcccggtaagctttttcgggcttctcgccgcctcgcttgccaaccacttttccccgtccgtgcgccattccgtccgcctgccgatgacggtttgtgtcggcggcatcctcctggtcggcggacaaaccgtattcgaacacttcttgggcatgaaggcggtattaagcgtggtggtcgaatttgcgggcggactcgttttcctctatctcgttttaaaacacaaaaaatga

SEQ ID NO: 61450 - DNA, 1263 bp, Neisseria meningitidis
atgtcaaacacacaaaaacagcttgcccttgccaaagcggcaaaaaaatccgtcaacacggcggatacggaagaaaaaaaccgcgcgctgcttgctatggcggacagtctggaagcggcggcggcagatattttggcggcaaaccgtttggatttggaagcggcggcaggcaaaattcccgaaagcatgaccgaccgccttttgttggacggcaaacgcatttgcgcgatggcggacggcatcagggcggttgccgcgctgcccgaccccgtgggcgaaatactggaaacctcgactctgcccaacggcttggaaatcgtcaaaaagcgtgtggcgatgggcgttatcggcattatttacgaaagccgcccgaacgttacgtccgatgcggcggctttggcactgaaaagcggcagcgcggtcgtactccgcagcggcaaagatgcattccaatccgcacgcgccatcgttgccgcactcaaagccggtttggcgcaaacccgcatcgaccccgacgcgctccagttgattgaagacaccgggcgtgagggcagttacgaaatgatgagggcgaaagattatctagacctgctgattccgcgcggcggggcggggctgatacgggcggtggttgaaaatgccgtcgtgccggttattgaaacggggacgggcatcgtccacatttatatcgacaaggacgcggattgggacaaggcgctccgtatcgtgtacaacgccaaaaccagccgtccgtccgtgtgcaactcgatggaagtgctgctggtgcatgaagacattgctgccgacttcctgcccaagctcgaacggctgttggttcgcgaccgtataaaagccggactgccgcccgtccgcttccgtttggatccgcaggcggcacggcatatcggcggcgaagcggcgggtgcagacgatttcgataccgagtttttagactacatcctcgccgtgaaaaccgtcgcttcggtcgaagaggcggtcgggcacatcgaaacgcacggcacgcaccattcagacggcatcgttaccgaaaaccgccacgctgcggactatttcacgacccatatcgattctgccgccgtgtatgtcaacgcgtccacgcgctttaccgacggcggcgaattcggcttgggttgcgaaatgggcatctccacgcaaaaactccacgcccggggtccgatgggtttgaaagagctgacaagctataaatacatcattcggggcgttgggcaggtcagggaataa

SEQ ID NO: 61451 - DNA, 210 bp, Neisseria meningitidis; identical to SEQ ID NO: 39306

SEQ ID NO: 61452 - DNA, 435 bp, Neisseria meningitidis
atgaactttgctttatccgtcatcacatttaccctcgcctctttcctgcccgtcccgcctgccggagccgccgtctttacttggaaggacggcggcggcaacagctattcggatgtaccgaaacagcttcatcccgaccaaagccaaatcttaaacctgcggacgcgccaaaccaaaccggcggtcaaacccgcccaagccgacgcagggaagcgcacagacggcgcggcacaggaaaacaatcccgacactgccgagaaaaaccggcagcttgaggaagaaaagaaaagaattgccgaaaccgaacggcagaacaaagaagaaaactgccggatttcaaaaatgaacctgaaggcggtgggaaattcaaatgcaaaaaacaaggatgatttgattcggaaatacaataacgccgtaaacaaatactgccgttga

SEQ ID NO: 61453 - DNA, 2715 bp, Neisseria meningitidis
atgctatatcatcatagttatgccgaagatgcagggcgcgcgggcagcgaggcgcagatacaggttttggaagatgtgcacgtcaaggcgaagcgcgtaccgaaagacaaaaaagtgtttaccgatgcgcgtgccgtatcgacccgtcaggatatattcaaatccagcgaaaacctcgacaacatcgtacgcagcatacccggtgcgtttacacagcaagataaaagctcgggcattgtgtctttgaatattcgcggcgacagcgggttcgggcgggtcaatacgatggtggacggcatcacgcagaccttttattcgacttctaccgatgcgggcagggcaggcggttcatctcaattcggtgcatctgtcgacagcaattttattgccggactggatgtcgtcaaaggcagcttcagcggctcggcaggcatcaacagccttgccggttcggcgaatctgcggactttaggcgtggatgacgtcgttcagggcaataatacctacggcctgctgctaaaaggtctgaccggcaccaattcaaccaaaggtaatgcgatggcggcgataggtgcgcgcaaatggctggaaagcggagcatctgtcggtgtgctttacgggcacagcaggcgcagcgtggcgcaaaattaccgcgtgggcggcggcgggcagcacatcggaaattttggcgcggaatatctggaacggcgcaagcaacgatattttgtacaagacggccagttgaaattcaattccgacagcggaaaatgggagcgggacttgcaaagacaacagtggaaatacccgtggtataaaaaatacgaaaacccccaagaactgcaaaaatacatcgaagagcatgacaaaagctggcgggaaaacctggcgccgcaatacgacatcacccccatcgatccgtccagcctgaagcagcagtcggcaggtaatctgtttaaattggaatacgacggcgtattcaataaatacacggcgcaatttcgcgatttaaacaccaaaatcggcagccgcaaaatcatcaaccgcaattatcaattcaattacggtttatctttaaactcatatgccaacctcaatctgaccgcagcctacaattcgggcaggcagaaatatccgaaagggtcgaagtttacaggctgggggcttttaaaagattttgaaacctacaacaacgcgaaaatcctcgacctcaacaacaccgccaccttccggctgccccgcgaaaccgagttgcaaaccactttgggcttcaattatttccacaacgaatacggcaaaaaccgctttcctgaagaattggggctgtttttcgacggtccggatcaggacaacgggctttattcctatttggggcggtttaagggcgataaagggctgctgccccaaaaatcaaccatcgtccaaccggccggcagccaatatttcaacacgttctacttcgatgccgcgctcaaaaaagacatttaccgcttaaactacagcaccaataccgtcggctaccgtttcggcggcgaatatacgggctattacggctcggatgacgaatttaagcgggcattcggagaaaactcgccgacatacagggaacattgcaaccagagctgcggaatttatgaacccgtattgaaaaaatacggcaaaaagcgcgccaacaaccattcggtcagcattagtgcggacttcggcgattatttcatgccgttcgccagctattcgcgcacacaccgtatgcccaacatccaagaaatgtatttttcccaaatcggcgactccggcgttcacaccgccttaaaaccagagcgcgcaaacacttggcaatttggcttcaatacctataaaaaaggattgttaaaacaagatgatacattaggattaaaactggtcggctaccgcagccgcatcgacaactacatccacaacgtttacgggaaatggtgggatttgaacgggaatattccgagctgggtcagcagcaccgggcttgcctacaccatccaacaccgcaatttcaaagacaaagtacacaaacacggttttgagttggagctgaattacgattatgggcgttttttcaccaacctttcttacgcctatcaaaaaagcacgcaaccgaccaacttcagcgatgcgagcgaatcgcccaacaatgcgtccaaagaagaccaactcaaacaaggttatgggttgagcagggtttccgccctgccgcgagattacggacgtttggaagtcggtacgcgctggttgggcaacaaactgactttgggcggcgcgatgcgctatttcggcaagagcatccgcgcgacggctgaagaacgctatatcgacggcaccaacgggggaaataccagcaatgtccggcaactgggcaagcgttccatcaaacaaaccgaaacccttgcccgccagcctttgatttttgatttttacgccgcttacgagccgaagaaaaaccttattttccgcgccgaagtcaaaaatctgttcgacaggcgttatatcgatccgctcgatgcgggcaatgatgcggcaacgcagcgttattacagctcgttcgacccgaaagacaaggacgaagacgtaacgtgtaatgctgatggcttgtgcaacggcaaatacggcggcacaagcaaaagcgtattgaccaattttgcacgcggacgcacctttttgataacgatgagctacaagttttaa

SEQ ID NO: 61454 - DNA, 1008 bp, Neisseria meningitidis
atgagcaccttcttccggcaaaccgcacaagccatgattgccaaacacatcgaccgtttcccgctattgaagttggaccaggtaattgattggcagccgatcgaacaatacctgaaccgtcaaagaacccgttacctccgagaccaccgcggccgtcccgcctacccgctgttgtccatgttcaaagccgtcctgctcggacaatggcacagcctctccgatcccgaactcgaacacagcctcatcacccgcatcgatttcaacctgttttgctgttttgacgaactgagcatccccgattacagcaccttatgccgctaccgcaactggctggcgcaagacgacaccctgtccgaattgctcaaactgattaaccgacaactgaccgaaaaaggcttaaaagtagagaaagcatccgccgccgtcattgacgccaccattattcagaccgccggcagcaaacagcgtcaggccatagaagttgacgaagaaggacaaatcagcggccaaaccacaccgagtaaggacagcgatgcccgttggatcaagaaaaacggcctctacaaactcggttacaaacaacatacccgtaccgatgcggaaggctatatcgagaaactgcacatcacccccgccaatgcccatgagtgcaaacacctgtcgcctttgctggaaggactgcccaaaggtacgaccgtctatgccgacaaaggctacgacagtgcggaaaaccggcaacatctggaagaacatcagttgttagacggcattatgcgcaaagcctgccgcaaccggccgctgtcggaagtgcaaaccaaacgtaaccgatatttgtcgaagacccgttatgtggtcgaacagagcttcggtacgctgcaccgtaaattccgctatgcgcgggcagcctatttcggactgattaaagtgagtgcgcaaagccacctgaaggcgatgtgtttgaacctgttgaaagcggccaacaggctaagtgcgcccgctgccgcctaa

SEQ ID NO: 61455 - DNA, 480 bp, Neisseria meningitidis; identical to SEQ ID NO: 54289

SEQ ID NO: 61456 - DNA, 246 bp, Neisseria meningitidis; identical to SEQ ID NO: 43892

SEQ ID NO: 61457 - DNA, 870 bp, Neisseria meningitidis
atgaaatttatattttttgtactgtatgttttgcagtttctgccgtttgcgctgctgcacaaacttgccgatctgacgggtttgcttgcctaccttttggtcaaaccccgccgccgtatcggcgaaatcaatttggcgaaatgttttcccgaatggagtgaggaaaagcgtaaaaccgtgttgaaacagcatttcaaacatatggcgaaactgatgctcgaatacggcttatattggtacgcgcccgccgggcgtttgaaatcgctggtgcgctaccgcaataagcattatttggacgacgcgctggcggcgggggaaaaagtcatcatcctgtatccgcactttaccgcgttcgagatggcggtgtacgcgcttaatcaggatgtcccgctaattagtatgtattcccaccaaaaaaacaagatattggacgcacagattttgaaaggccgcaaccgctacgacaacgtcttccttatcgggcgcaccgaagggctgcgcgccctcgtcaaacagttccgcaaaagcagcgcgccgtttctgtatctgcccgatcaggatttcggacgcaacgattcggtttttgtggatttcttcggtattcggacggcaacgattaccggattgagccgcattgccgcgcttgcaaatgcaaaagtgatacccgccatccctgtccgcgaggcggacaatacggttacattgcaattctacccggcttggaaatcctttccgggtgaagacgcgcaagccgatgcgcagcgtatgaaccgctttatcgaagagcgggtgcgcgaacatccagaacaatatttttggctgcacaagcgttttaaaacccgtccggaaggcagccccgatttttactga

SEQ ID NO: 61458 - DNA, 1344 bp, Neisseria meningitidis
atgattaaaatcaaaaaaggtctaaacctgcccatcgcgggcagaccggagcaagtcatttatgacgggcccgtcattaccgaagtcgcgttgcttggcgaagaatatgccggtatgcgcccctcgatgaaagtcaaggaaggcgatgccgtcaaaaaaggccaagtgctgtttgaagacaaaaagaatccgggcgtggtgtttaccgcgccggtttcaggcaaaatcgccgccatccatcgcggcgaaaagcgcgtgcttcagtcggttgtgattgccgttgaaggcaacgacgaaatcgagttcgaacgctacgcgcccgaagcgttggcaaacttaagcggcgaagaagtgcgccgcaatctgattcaatccggtttgtggactgcgctgcgtacccgtccgttcagcaaaatccctgccgtcgatgccgagccgttcgccatcttcgtcaatgcgatggacaccaatccgctggcggcagaccctgtggttgtgatcaaagaagccgccgaggatttcagacgaggtttgctggtattgagccgtttgaccgagcgtaaaatccatgtgtgtaaggcagctggcgcagacgtgccgtctgaaaatgctgccaacatcgaaacacatgaattcggcggcccgcatccggccggtttgagtggcacgcacattcatttcattgagccggtcggtgcaaacaaaaccgtttggaccatcaattatcaagatgtaattgccatcggacgtttgtttgcaacaggccgtctgaacaccgagcgcgtgattgctttgggtggttctcaagtcaacaaaccacgcctcttgcgtaccgttttgggtgcgaaagtatcgcaaattactgcgggcgaattggttgacgcagacaaccgcgtgatttccggttcggtattgaacggcgcgattacacaaggcgcgcacgattatttgggacgctaccacaatcagatttccgttatcgaagaaggccgcagcaaagagctgttcggctgggttgcgccgcagccggacaaatactccatcacgcgtacgaccctcggccatttcctgaaaaacaaactcttcaagttcacgacagccgtcaacggtggcgaccgcgccatggtgccgattggtacttacgagcgcgtaatgccgctggacatcctgcctaccctgcttttgcgcgatttaatcgtcggcgataccgacagcgcgcaggcattgggttgcttggaattggacgaagaagacctcgctttgtgcagcttcgtctgcccgggcaaatacgaatacggcccgctgttgcgtaaggtgctggaaaccattgagaaggaaggctga

SEQ ID NO: 61459 - DNA, 633 bp, Neisseria meningitidis; identical to SEQ ID NO: 41857

SEQ ID NO: 61460 - DNA, 828 bp, Neisseria meningitidis
atgcaaaaccacgttatcagcttagcttccgccgcagaacgcagggcgcacattgccgataccttcggcaggcacgacattccgtttcagtttttcgacgcactgatgccgtctgaagaactgaatcgggtgatggcggaattggtgccgggattggcaaaacagcacctgttgagcgaagtggaaaaagcctgctttatgagccacgccgtattgtggaaacaggcattggacgaaggtctgccgtatatcgccgtatttgaggacgacgttttactcggcgaaggcgcggagaaattccttgccgaagacgcttggctaaaagaacgctttgaccccgattccgcctttatcgtccgcttggaaacgatgtttatgcacgtcctgacctcgccctccggtgtggcggactactgcgggcgtgcctttccgctgttggaaagcgaacactgggggacggcgggctatatcatttccaaaaaagcgatacggtttttcctgcaacatttcgtaatgttgcagccggaacagataaaacctatcgacttaatgatgttcagtgattttttcgataaggaggggatgcctgtttatcaggtcagtccggccttatgcgcccaagagctgcattatgccaagtttcacgaccaaaacagcgcattgggcagcctgatcgaacacgaccgcctcctgaaccgcaaacagcaaaggcgcgattcccccgccaacacattcaaacgccgcctgatccgcgccttgaccaaaatcagcagggaaagggaaaaacgccggcaaaggcgcgaacagttcattgtgcctttccaataa

SEQ ID NO: 61461 - DNA, 915 bp, Neisseria meningitidis; identical to SEQ ID NO: 55938

SEQ ID NO: 61462 - DNA, 1134 bp, Neisseria meningitidis; identical to SEQ ID NO: 49200

SEQ ID NO: 61463 - DNA, 321 bp, Neisseria meningitidis
atgttcggcaagcagctttttgaagaagtcggttcgaaaatcagcgaaaccatcgtcaacagccctgccaaagatgtggaaaaaaatattaaggcgatgctgggcggcgcgttcaaccgtatggatttggttacgcgcgaagaattcgacatccagcagcaggttttaatcaaaacccgtaccaaactggcggctttggaagcgcgtttggcaaaactcgaagccgcgcaaaatcccgaacgggcagcattggaagcggctgaagccgctgccgaagaagccgtcgccgaaatcaggcagcaaaccgaagccggcgaataa

SEQ ID NO: 61464 - DNA, 1407 bp, Neisseria meningitidis
gtggaatttagcacaaaaaccgaaatcttgcaggaacagcaggcaggcgcacagttatttgtctgcaccgaagaggcgcaattaaaccatccgaccgcccttgcccttttgtcttcgcttgaagaaggtcaaaattttgccgacacaaaaatcccgacaggcaacggtttgcaggctgttgccgtatgctgtctgaaaagcaccggccgcgccgcattgaacaaggccgccgccgaagccgccaaatgggcgcaaaatcaggaaacggtcaatgtggacatccatgccttcgatgaagcgcaagccgccgccgtagccgaagcgtttgcgattgcgttcggcaacgccgcctaccgtttcgaccgctacaaaaaagaagccaagcccgccaaatttgaaaccgccgtgttccacagcgcacacgaagccgtcgttaaagaagccttgcgcgtcgccgaagcgcaagtttacggacaaagcctctgccgcgacttgggcaacgccgcgcccaacgaatgcacgcccgaatttttagcgcgcaccgccaaagccgaagccgaaaaactgggcgcgcacgccaaaatcatcgaaaaagactacatcaaagaaaacatgggttcgttttggtcggtcgccaaaggcagcgcggaagccccctatttggtcgaactgagctatttcggtgcagccgacaaagaagccgcgcctgtggtattggtcggcaaaggcattaccttcgacaccggcggcatctccctcaagcccggcctgaacatggacgaaatgaagtttgatatgtgcggcgcggcaaccgtcatcagcaccttctgcgccgccgtcaaactgcaactgccgattaacctgattgccgtcgtcgccacttgtgaaaatatgccttccggcgcggcaaacaaaccgggcgatgtcgtgaaaagtatgaaaggtctgaccatcgaagtgttgaacaccgatgccgaaggccgtctgattttgtgcgacgcgctcacttacgccgagcagttcaaacccaaagccgtcatcgacgtcgccaccctgaccggcgcgtgtattgttgccttggggcacgatgtcagcggcgtgatgggcaacaatcaggatttgatcgacagcctgcttgccgcttcctacaacgtggacgacaaagcatggcaactgccgctctttgagacctacaaagaccaactcaaatccaactttgccgacattccaaacatcggcacgcccggcgcgggcacgattaccgccgcaacattcctgtcttacttcaccgaaggctacccgtgggcgcaccttgacatcgcgggtacggcgtggaaatccggagcggaaaaaggtgcgactggccgtcccgttcccttgctgctgaactatctgcggaatctttaa

SEQ ID NO: 61465 - DNA, 738 bp, Neisseria meningitidis
atgctgctgatacccgccatcgatttgaaagaaggacgctgcgtccgcctgaaacaagggctgatggaagaggcgaccgtcttttccgattcgcccgccgaaaccgcgctgcactggttcaaacaaggcgcgcgccgcctgcatctggtagatttgaacggcgcgtttgccggcgttccgcaaaacctgcccgccatcaaagacatccttgccgctgtcgccaaagacatccccgtacagctcggcggcggcatacgcgatttgaaaaccatcggacaatatttggatttgggcttaaacgacgtgattatcggcacggcggcggtcaaaaaccccgacttcgtgcgcgaggcgtgcaaagccttccccggcaggattattgtcgggctggatgccaaagacggtatggccgccatcgacggctgggcaaccgtaaccgggcatcatgtaattgatttggcaaaacgctttgaagacgacggtgtcaacagcatcatctacaccgacatcgggcgcgacggtatgatgagcggcgtgaacatcgacgcgacggtcaaactcgcccaagccgtccgcattcccgtcatcgcctccggcggactgaccggcttggacgacatccgcgccctgtgtgccgccgaaaaacatggcgtagcaggcgcgattaccggccgcgcgatttacgagggcagcatcgattttgcccaagcgcagcaactggcagattccctcgactaa

SEQ ID NO: 61466 - DNA, 750 bp, Neisseria meningitidis
atgccatccgttgaactgctgttggtgattgtcggactgccacgcggcaccttctattaccaattggccgtccaatcggcagaagacaaatatgccgatttgaaacggcatatccatgatatttatcgacgacataagggaagatacggctaccggaggattgcggcagccatccgtcacgcaggaacaccggtcaatcacaagaaagtcagccgtctgatggcgaagacggggctgaaggcagtgatacggcggcgcaaataccgctcgttcaaaggagaagtcggcaaaattgcgccgaatatcctgcgacgctgtttccatgcagaaaagccgaatgagaaatgggtaacggacgttaccgagttcaatgtaggcggagaaaagatatacctttctccgattatggatttgtttaacggggaaatcgtcagttaccgtattcaaacccgcccgactttcgatttggccgacgagatactgaaaggtgcgccggagaaaccgggatcgtctgaaaagccgatactgcattcggatcaaggttggcaatatcagatgtttttttatagtggattaaatttaaatcaggacaaggcgatgaagccgcagacagtacaaatagtacggcaaggcgaggcaacgccgtactggtttaaatttaatccactatacaacaacgatagaatcaagttgaaattaaaagggctgagccttgttcagtacagaattcagtccctgaaagccgcttga

SEQ ID NO: 61467 - DNA, 348 bp, Neisseria meningitidis; identical to SEQ ID NO: 55469

SEQ ID NO: 61468 - DNA, 846 bp, Neisseria meningitidis
atgctcagttacagacacgcattccacgccggcaaccacgccgatatgctcaaacacttcaccttgtttttagtgctgcaatatttcaaccgcaaagacaagccctactggtacatcgacacgcacggcggcgcgggtgtgtacaatctcgaaggcagcgaggcacaaaaagtcggcgaataccggcaaggcatcgccctacttcgacaagcaaaaaacctgccaaccgagttaaacggctttatcgcgcacatacaaaaaatcctgccctcgcccgaactttactgcggttctccgtggctggcgcaatcgctgacccgcgtcggcgacaaattacgcctgtttgagctgcaccccaccgactttgtccatctgcaaaacaatatgggcgaagcaggattgggcaaacgcggacaagtgttgcgcgaagacggttacaaagggctgatttccctgctgccgcccccgccgcgccgcgccaccgtcctcatcgacccgccctatgaggaaaaacaggactaccggcatgtaacggaaacgctgaaagccgctttaaaacggtttgagtccggctgttatctcatttggtatccctgcctcagccgcgaagaaagccgcaagctgcccgaagaattgaaaaaactcctgcccgacaactaccttcacgccgaacttcacgtccacgcgccgaaagccgacggtttcggtatgcacggcagcggaatgttcgtcatcaatccgccctatctgttggcggaacaattggcggcaaacctccccgccctgacgcggctgctggcgcaagacgaaggcgcgcgctaccttttggacagcaaaatccgctga

SEQ ID NO: 61469 - DNA, 1194 bp, Neisseria meningitidis
atgaaccccaaacacctcatcgcattttccgccctgttcgccgccacgcaggcagaagccctgcccgtcgcctccgtcagcctcgacaccgttaccgtttccccgtccgccccctacaccgatacaaacgggctcttgaccgactacggcaacgccgccgcctcgccttggatgaaaaaaatccgatccgtcgcacaaggcagcggcgagaccttccgcatcctgcaaatcggcgactcgcataccgccggcgacttctttaccgacagcctgcgcaaacgcctgcaaaaaacttggggcgacggcggcataggctgggtttaccccgccaacgtcaaagggcagcgcatggcggcagtccggcacaacggcaactggcaaagcctcaccagcaggaacaatagcggagacttcccgctcggcggcatcctcgcccacaccggcagcggcggcagcatgaccctgaccgcatcggacggcaagaccggcaaacagcgcatttccctgtttgccaaacccctgctcgccgaacaaaccctgaccgtcaacggcaacaccgtctccgccaacggcggcggctggcaggtactggatacccgcgcggcactgcccttgaccatacagaccgaaatgccgtgggacatcggcttcatcaacatcgaaaatcccgccggcggcattaccgtttccgccatgggcatcaacggcgcacaattgacccattggtcgaaatggcgtgccgaccgtatgaacgaccttgcccaaaccggcgccgatttggttatcctttcctacggcaccaacgaagccttcggcgacaacatcgacattgccgacaccgaacaaaaatggctggataccgtccgccaaatccgcgacagcctgcctgccgccggcatcctcatcatcggcgcacccgaatccctgaaaaacacgctcggcgtatgcggcacacgccccgtccgcctgaccgaagtccaacagatgcagcggcgcgtcgcccgacaggggcagacgatgttctggtcttggcaaaacgccatgggcggcatatgcagcatgaaaaactggctcaaccaaggatgggccgccaaagacggcgtacacttctccgccaaaggctaccggcgcgcggcggaaatgctcgccgacagcctcgaagaactcgtccgcgccgccgcaatcaggcaataa

SEQ ID NO: 61470 - DNA, 924 bp, Neisseria meningitidis; identical to SEQ ID NO: 55898

SEQ ID NO: 61471 - DNA, 1410 bp, Neisseria meningitidis; identical to SEQ ID NO: 54643

SEQ ID NO: 61472 - DNA, 843 bp, Neisseria meningitidis
atgcaaaaccacgttatcagcttagcttccgccgcagaacgcagggcgcacattgccgataccttcggcaggcacgacattccgtttcagtttttcgacgcactgatgccgtctgaagaactgaatcgggtgatggcggaattggtgccgggattggcaaaacagcacctgttgagcgaagtggaaaaagcctgctttatgagccacgccgtattgtggaaacaggcattggatgaaggtctgccctatgttgccgtatttgaggatgatgtcctgcttggcaaagacgcagaaaagttccttgccgaagatacttggttggaagagcgttttgataaggattctgcctttatcgttcgtttggaaacgatgtttgcgaaagttattgtcagaccggataaagtcctgaattatgagaaccggtcatttcctttgctggagagcgaacattgggggacggctggctatatcatttcgcgtgaggcgatgcggtttttcttggaaaggtttgccgttttgccggcagagtggattaaagcggtagattggatgatgtttacttatttctttgataaggaggggatgcctgtttatcaggttaatcccgccttatgtacccaagaattgcattatgccaagttcctcagtaaaaacagtatgttgggtagcgatttggaaaaagatagggaacaagaaagaagacaccgccgttcgttgaaggtgatgtttgacttgaagcgtgctttgggtaaattcggtagagaaaagaagaaaagaatggagcgtcaaaggcaggcggagcttgagaaagcttacggcaggcgggtcatatcgttcaaatag

SEQ ID NO: 61473 - DNA, 372 bp, Neisseria meningitidis
atgaataactcttccttttttggcaaccgattgaaagaagaaagaaaaaaattaaaaatgactcaagctgaaatcgctgaaaaatgtggggtttcaggaagaatgtggggggattatgaacgtggcatcagccagccaaaagcggaacttttcttccaatttgaaaaggtgggtatagacgttcaatacgtcatgcacggcagacgcggcgaaacagcggtcatgccgtctgaaaccctgaacgccgaagaacaagaactgcttgccctgttccgcgaggcggcagctgccgaccgtgaaatgattctgatggttgcgcgcagggcagagaaaaaagcccaaactgcgcttggtaaagtgagtaatggataa

SEQ ID NO: 61474 - DNA, 948 bp, Neisseria meningitidis; identical to SEQ ID NO: 55151

SEQ ID NO: 61475 - DNA, 270 bp, Neisseria meningitidis; identical to SEQ ID NO: 56104

SEQ ID NO: 61476 - DNA, 828 bp, Neisseria meningitidis
atggatggagaaggtatgtcggttgggcattatgaaaattttcccgtcggttcgctgattttgccgcgcaggttgaggaagccggttcacgcggtgtacgcgtttgcacggacggcggacgatatggcggacgagggcagtatgccgtctgaagccaggttggcggggttggagggtttgcggcgcgagttggacgtgttggcatcgggcggccggtcggcgcatcctttgattgcacgattggatgccgaggcggttgtgccgttcggtttggatttgcagccgttttatgatttgctttctgcattttctcaggatgtggttaaaacaaggtatggaaatttcggcgagctggccgattattgccgacgttctgccaatcctgtcggacgcattatgctggctttgtacgggaaaacggatgcggtgtgcgtggcgcaaagcgacggcatctgtacggctttgcaactggtgaatttttggcaggatgtggctgtggattggcaaaagggcagggtttatattccgcaggacgatttgttgaaattcggtgtttccgaaggacagattgcggagggtagggcggatgcggcgtttcagcggctgatggcgtatgagtgccggcgcgcatttcgtatgctgaaggcgggttcgcctttagcgcgcgaattgaaagggcgtatcggtttggaactccgtatgattgtgttaggggcgcagttgattttgcagaaactggacgcgtgccgatacgatgtgtttgcacaacgccccgttttggataagaaggattggttgattatgctgaaacgcgcgttgtggaaatga

SEQ ID NO: 61477 - DNA, 519 bp, Neisseria meningitidis
gtgttccaaaactgggccgcctgccgcgccgtttaccgctatgccgaagaacacctgccccggtattcaaaagtggttttggcgatgcgctggggcagccagatgcccgaaaacagccgctcccttgcctacgatgccggttttttccaaaaattcgaccgtatgctgcacaaactctcatccgaaaaacaagccgtttacctgatggcggacaaccttgcctcgtcttacaacgtccagcgcgcctatatcttgtcttcacgcataccgggttaccgccaaaccctgcgcccggacgacgaaagcaccctgaaagccaatgcacgcatcagggaattggcagccaaataccccaacgtctatattattgatgccgccgcctatatccccgcagattttcaaatcggcggattgccggtttactcggacacagaccacatcaacccttacggcggcacggaattggcaaagcgtttttccgaaaaacaacggtttctcaatacgcgccataaccattga

SEQ ID NO: 61478 - DNA, 477 bp, Neisseria meningitidis
atggaacacctatttgggaaatggctgcccgacttgcccacccccatttcagacggcatcagcctgccgatggtgcggctgctgcacacccggtcgctgaccgccgcattgcgcgccttgccgcatacattttcggtggaactgctgaaactgggcgaattggagacggaatgcggagggaggctggtgcgcgaagttttgttgaagctggacggtatccctgttgtcgcggcaaggagcgagtgccggataggttcggcgttttggcaaaacattttggactgcggcacgcgtcctttgggcgaacgtctgtttcaagccgatttggaaggggcgcgttcggcgtttgagtttgccgttttcggcgaaggatgcggacggtactttgccgctcggcgttcgcggttttcccatcacggcgaggaaatgctgctgaccgagtattttctgcccgaactgaaacgctttatcggataa

SEQ ID NO: 61479 - DNA, 795 bp, Neisseria meningitidis
atgaatacgattttggctttcgatattgaaaccgtacccgatgtgcagggtatccgaacattgtacgagctgccgtcctcgctgcccgacgatgaagtggtgctgtttgcccagcaaaaacgccgtgctcagacgggtggggattttatgcagcatcatcttcatcagattgtggcgatttcgtgctgcatgcgttgggggcaggataaagtccatgtcggcaccatcggcgagatggacgatggcgaagaagtcgtgattgccaaatttttcgagttgattgaaaaacatacgccgcaactggtcagttggaacggcggcggtttcgacctgccggttctgcattaccgctccctgatatacggcattaacgccgcgcgctattgggatatgggcgacggcgatttcggcgacagccgcgatttcaagtggaacaactacatcagccgttatcaccaacgccactgcgatttgatggatttgctcgcgctttaccagccgagggcaaacgtgccgctggacgatatggcgaaactgtgcggttttccgggcaagctgggtatggacggcagcaaggtgtgggatgcgttccacgcgggcaggctgaaagaaatccgcaattattgcgaaaccgatgccgtgaatacgtatttgatgtatctgcgtttttgtctggtcagcggcagattcgacgcggacgaatacgaaatggaaatcaagcggatcagaaactatctttccgcccaaacagaagataaaccgcattggtcagaatttgcccaagcgtggaaatag

SEQ ID NO: 61480 - DNA, 969 bp, Neisseria meningitidis
atgactgccaaacctttttccctcaacctgaccaacctcctgctgctggcggtattgtttgccgtcagcctgtcggtcggcgttgccgatttccgctggtcggatgtgttttcgctgtccgacagccagcaggttatgttcatcagccgcctgccgcgcacgtttgcgattgtgctgacgggcgcgtcgatggcggtggcggggatgattatgcagattctgatgcgtaaccgttttgtcgagccttctatggcgggcgcgggtcagagtgcggctttgggtttgcttctgatgtccctgctgctgcctgccgcgccgctgccggtcaaaatgtcggttgccgccgttgccgcgttaatcgggatgttggtgtttatgatgcttatccgccgcctgccgccgacggcgcaactgatggtgcctttggtcgggattattttcggcggcgtggttgaggcggtggccacctttattgcgtatgaaaacgaaatgctgcaaatgctgggcgtgtggcaacagggcgatttttcgagcgtgctgctggggcggtacgagctgctttggattacgggcggtttggcggtgtttgcctatctgattgccgaccggctgacgattttggggctgggcgaaacggtcagcgtgaatttgggtttgaaccggacggcggtgttgtggtcggggctgattattgtggctttgattacgtcgctggttatcgttacggtcggcaatattccgtttgtcgggctggtcgtgccgaacatcatcagccgcctgataggcgacaggctgcgccaaagcctgcctgcggtggccttgttgggcgcgtctttggttttattgtgcgacattatcggacgcgtgattgtgtttccgtttgaaattccggtatcgaccgtcttcggcgtattgggtacggcgttgtttttatggcttttgttaaggaaacctgctcatgccgtctga

SEQ ID NO: 61481 - DNA, 894 bp, Neisseria meningitidis
atgattattgtcatgagcaggcgtgccgccgaagcggacattgccggcgttgtcgcctttatccgcagcagaggtctgcgagaacacatttctcacggcgacgagcgtaccgtcatcggcgcaatcggcgacgatagggttttgagcgtcagggaggtgcagacgctgccggaggtcgagaaagccgtccgcattttggatacatggaaaaccgtcagtcgggaaaatcgggcggaagacagccgcgttgccgccaaaggcgtggctttcggcggcggggaaaccgtctgtatcgccgcagaaccgtcagtatggcgcaatgcggatgcagtgtttctggatccgtttttcacttcggcaaacttatacgacacttcaagtgcggatgaagggcgaggacggtgcagacggttggcggaacagaccgcatcggcgcatggcgcagggaaacccgtattggtgcgcgtccgcaacgtccgccatgtcgaagcggctttgaatgcgggggcggacatcctgtatttgggcggcgggctgatgtccgatcttgccgtattgaatgaagccggaagcctgaacattcccttggtgctgtgtaaagacaagcaccattctgccgaagattggttgaatgccgcagaatatgtcgtctcgcgcggcaaccgccacctgattctgggcgagtcgggcgtgttgagccataccaaagaccatccctaccgtttggatgtcgaatccatcgtgaaagtccgccaaatcagccatctgcccgtgattgcgaatattacgggattatggaaccgcgatatgccgcaggaaatcctgtacggcttggcaaaggcggcaggcgcgtgcggaatcgtcggaacctgttttgaaaagtcgggcggatag

SEQ ID NO: 61482 - DNA, 159 bp, Neisseria meningitidis; identical to SEQ ID NO: 43473

SEQ ID NO: 61483 - DNA, 1056 bp, Neisseria meningitidis
gtgtttgaaacgccgacatttgagcaaatccgcgagcgtatcctgcgcgataccaaaagcctgtggccggatgccgatatcagccccgacagcgaccattatgtgcacgccagccgtttggccagctgcgccgaagggcaatatgcgcatcaaagctggattgtgcggcagattttccctgataccgccgaccgcgagtatttggagcggcatgcctccatgcgcggcttgcgccgccgcaatcctaccacggccagcggcacgctgaccgtaagcggtattgcgcaatccatgctttcagacggcctgcaagtgcgtatcggccagcgtttttaccgcactaccgcccgcgccgttatcggcagcggcggcacggcggaaataccggcaatcgccgacgagctgggcgcggccgccaatgtgcgcgacggcgaggcgcaactgatggccgcccccgccggtgtgtccaccgaatgccgccttaccgtacaaggcggcaccgaccgagaaagcgatgcctcactgctggcgcgtctgttggaaatcatccgccgaccgcccgcaggcggcaaccgttacgactataaaaactgggcgttgagtgttgacggcgtaaccagcgcatatgtttatccgctgcgccgcggcttgggtacggtggatattgccattacctccgccgacggtgtgccgtcggaagaaactgtgcgccgcgtacaggcttatatcgacgagatgcgcccggtaacggcaaaaaatgcgctggtactcaagccaaccgtaacggcggtgcctgttaccgtgcaagtcaagctcgacggcatcgacttggacgatgccaagcgccgcatacggacggctctaaaagaatatttcgacaccctgatccccggcgacggtctgactgtgtcgcaaatcgaggcggctatcagcaatgtggatggtgtgatcgaccgccgtctgactgcgccgacggccaaccgtgccgccgatacggttaaccgcatcgagtggtttaaagcgggcgcgattaatgtaacggagatgccgtcatga

SEQ ID NO: 61484 - DNA, 480 bp, Neisseria meningitidis; identical to SEQ ID NO: 39570

SEQ ID NO: 61485 - DNA, 618 bp, Neisseria meningitidis
atgaccttcccgccactcaaatccccgctcaaattctacgccgtcgtccccaccgccgattgggtggggcgcatggtcaaagcaggtgccgacacggtgcaactgcgctgcaaggccctgcacggcgatgaattgaaacgcgaaatcgcccgctgtgtcgccgcctgtcagggcagccatacgcagcttttcatcaacgaccactggcgcgaggcaatcgaagcaggcgcatacggcgtgcatctcgggcaggaagatatggacaccgccgacctcgccgccattgccgccgccggtttgcgcttgggtttgagtacgcactccgtcgccgaactcgaccgcgccctgtccgtacaccccagctatgtcgccagcggcgcgattttcccgaccacgaccaagcaaatgcccaccgccccgcaaggcttggacaaactgtgcgagtatgtgaaacaggcaggcggcacgcccgtcgtcgccatcggcggtatcgacttgaacaacgcccgagccgtactcgccaccggcgtttcctcactcgccgccgtccgcgccgtaaccgaagcggcaaatcccgaagcggtggttaaagcgtttcaggctttgtgggatggataa

SEQ ID NO: 61486 - DNA, 165 bp, Neisseria meningitidis; identical to SEQ ID NO: 54463

SEQ ID NO: 61487 - DNA, 543 bp, Neisseria meningitidis; identical to SEQ ID NO: 42127

SEQ ID NO: 61488 - DNA, 336 bp, Neisseria meningitidis
atgtttaaagattggaaagaacataccgcattggttaaaaaatcgttcggcgagctgggtaaggcgcatcctaaaatgctgcaggcctacggcgcattggaacaggccgccgccgccgaagcacttgatgccaaaacgcgcgaactgattgccatcgccgttgccattaccacacgttgtgagagctgcatcagcgttcacgccgccgctgccgccaaagccggtgcgaccgacagcgaaatcgcaggcgcattggcaaccgccatcgccctgaatgccggtgccgcttacacttacgccctgcgtgcattggaagcggttgaaacgcaaaaataa

SEQ ID NO: 61489 - DNA, 273 bp, Neisseria meningitidis; identical to SEQ ID NO: 36489

SEQ ID NO: 61490 - DNA, 2391 bp, Neisseria meningitidis
atgactgaacaaaaacacgaagaatacggcgccgacagcattcaggtgctcgaaggcttggaagcggtacgcaaacgccccggtatgtacatcggcgacacgcaggacggcagcggcctgcaccacatggtgttcgaagtattggacaacgccattgacgaagcactcgccggacattgcgacaaaatcaccgttaccatccacgccgaccattccgtcagcgtcgccgacaatgggcgcggtatgcccaccggcatccacccgaaagaaggacgctccgccgccgaagtcatcatgaccgtcttgcacgcgggcggtaaattcgacaacaacagctacaaaatctccggcggcctgcacggcgtgggcgtgtccgtcgtcaacgcgctgtccgactgggttacgctgaccatctaccgcgacggcaaagaacacttcgtccgcttcgtgcgcggcgaaaccgaagagccgctgaaagttgtcggcgattccgacaagaaaggcacgaccgtacgcttcctcgccagcacggaaactttcggcaacgtcgaatacagcttcgacatcctcgccaaacgcattcgcgaactttccttcctgaacaacggcgtggacatcgaattgaccgacgaacgcgacggcaaacacgaaagcttcgccctttccggcggcgtggccggtttcgtgcaatacatgaaccgcaaaaaaacgccgttgcacgaaaaaatcttctatgcgttcggcgagaaagacggcatgagcgtcgaatgcgcgatgcagtggaacgacagctaccaagaaagcgtgcagtgcttcaccaacaacatccctcagcgcgacggcggtacgcacttgaccgcgttgcgccaagtgatgacacgcaccatcaacagctacatcgaagccaacgaagtcgccaaaaaagccaaagtggaaacagcaggcgacgatatgcgcgaaggtttgacctgcgtgttgtccgtcaaactgcccgaccccaaattctcatcccaaaccaaagacaaactggtttccagcgaaatcggccccgttgtcaacgaagtcatcaaccaagcgctgaccgacttccttgaagaaaacccgaacgaagccaaaatcatcaccggcaaaatcgtcgatgccgcccgcgcgcgcgaagccgcccgcaaagcccgcgaaatcacccgccgcaaaggcgtaatggacggcttggggctacccggtaaactcgccgactgccaagaaaaagaccccgcattgtcagaactttatctggtcgagggcgattctgcaggcggttccgccatgcaggggcgcgaccgcaaattccaagcgattttgccgcttaagggcaagattttgaacgtcgaaaaagcgcgctttgaaaaaatgctcgccagtcaggaagtagccgctttgattaccgcgttgggcgcgggcatcggcaaagaagaattcaatgccgaaaaactgcgttaccaccgcatcatcatcatgaccgatgccgacgtggacggcgcgcacatccgcaccctgctcctgaccttcttctaccgccaaatgcccgagctggtcgaacgcggctacatctacattgcccagccgcctttatacaaagccaaatacggcaaacaagaacgatatctcaaagacgaattggaaaaagaccaatggctgctcggtttagccttggaaaaagccaaaatcgtttcagacagccgcaccatcgaaggcgaagagcttgccaataccgccaaacaattcctgttggccaaaaccgtcatcgagcaagaaagccgcatcattgacgaactcgtcctgcatgccatgctacatgcttcgccggtcgatctcagcacagcagaaagcgcagaccgctccgttgccgaattgaacggcctcttggacgaaaaagaagtcgcgctcgaacgtatcgaaggccacgaaggacaccagttcatcaaaatcacacgcaagctgcacggcaatgtggtggtgagctacctcgagcctaagttcctcaacagcaaagcctatcaaacccttacccaaaccgccgccgcacttaaaggcatggtcggcaaaggggcgaagctctacaaaggcgacaacgaatacgacatcgacagctttgaaggcgctttggacatcttgatgagcgttgcccaaaaaggtatgtccatccaacgatacaaaggcttgggcgagatgaaccccgaacagctgtgggaaaccacgatggatcccgccgtgcgccgcctgttgaaagtgcgcatcgaagatgccattgccgccgacgaagtattcgttaccctgatgggcgacgaggtcgaaccgcgccgcgcctttatcgaaaacaacgcgctgattgcccaaaatatcgacgcataa

SEQ ID NO: 61491 - DNA, 717 bp, Neisseria meningitidis; identical to SEQ ID NO: 54670

SEQ ID NO: 61492 - DNA, 2259 bp, Neisseria meningitidis
atgtacacaagaattatggaaatcagcccttggacgctgcgttcggcaaagctggaaaaagaacacaaacggctgcaagagagcctgaccagtttgggcaacggctatatgggtatgcgcggcagctttgaggaaacctattccgccgacagccacttgggtacctacatcgccggtgtgtggtttcccgacaaaacccgcgtcggctggtggaaaaacggctaccccaaatatttcggtaaagccatcaacgcgctcaatttcagcaaagtcaaaatctttgtcgacggacaagaggtggacttggcgaaaaacgatgttgccggcttctccgtcgaactcgatatgcagcacggcgtgttgcgccgctcgttcaccgtattcggcgtgcgtttcgatgtgtgtaaattcctgtccgtcgcgcaaaaagagttggcggtcatccgctgggaagccgtatccgttgacggcaaaacccaccaagtccgcatcgattccatcatcgatgccgacgtgaaaaacgaagactccaactacgaagaaaaattctggcaggtattggacaaaggcgtttcagacagtctctcctacattgccgcccaaaccgtcgccaatcccttcggcgtggaacaatttatcgtcaacgccgagcaaactttcgccggcagcttcaaagccctcggcggcagccaaaccgactggcaggtctccaattctttcgagtccgaagtcggcggcacgcccaaaacctttgaaaaacgcgtgattgttaccaccagccgcgattatcagggcttggaagcagtgaaagccgcaggccgcgccttgtcggaaaaagtcgcaggcgttgcgtttgaaaccttgctggacgcgcacaaagcaggctggctgcaccgttgggaaatcgccgacgtggtcatcgaaggcagcgacgaagcgcagcaaggcatccgtttcaatctgttccaactgttctccacctactacggcgaagacgcgcgcctgaacatcggccccaaaggctttaccggcgaaaaatacggcggcgcgacctattgggataccgaagcctatgccgtaccgctctacctcgcactggcggaacccgaagttacccgcaacctgctgcaataccgccgcaaccaactgccgcaggcgcagcacaacgcgcgcgaacagggcttggcgggcgcactctatccgatggtaacgtttaccggcatcgagtgccacaacgaatgggaaatcaccttcgaggaaatccaccgcaatggcgcgattccttacgccatctacaactacaccaactacaccggcgacgaaagctatcttgccaaagaaggcttggaagtcttggtcgaagtgtcccgcttctgggcggaccgcgtccacttctccaaacgcagcggcaaatacatgattcacggcgtaaccggcccgaacgaatacgaaaacaacatcaacaacaactggtacaccaacaccctcgccgcatgggtattggactacacccgcgaagccctggcgaaatacccgcgtccggatttgaacgtgagcgccgccgagttggaaaaatgggcggacatcagcgcgaatatgtaccgtcctcatgacgaagaactcggcgtattcgtgcaacacgacggcttcctcgacaaagacatccgccccgtgtccgcgctttcgcccgacgatttgccgctcaaccagaaatggtcgtgggacaaaatcctgcgttcgccctttatcaaacaggcggacgtattgcaaggcatctatttcttcggcgaccgtttcaatatcgacgaaaaacgccgcaacttcgacttctacgaaccgatgaccgtgcatgaaagctcgttgtcgccgtgtatccactctattctcgccgccgaactgggcaaagaagaaaaagccgtggaaatgtaccggcgcaccgcacgcctggacttggacaactacaacaacgacaccgaagacggcctgcacattacttctatgaccggctcgtggctcgccatcgtccaaggtttcgcccaaatgaaaacttggggcggtaaactcagcttcgcaccgttcctgccgagcgcgtggacaggctacaccttccatatcaactaccgaggccgtctgattaaagtcgccgtcggcaaagaaaacgtcgtcttcaccctgctcaaaggcgagccgctcgatttgcaggtgtacggcaaagacatcacactcaacggcagccataccgccgcgttggaaaaataa

SEQ ID NO: 61493 - DNA, 894 bp, Neisseria meningitidis
atggtaacgttttcaaaaatcagaccgcttttggcaatcgccgccgccgcgttgcttgccgcctgcggcacggcgggaaataatgctgcccgcaagccggtgcaaaccgccaaacccgccgcagtggtcggtttggcactcggtggcggcgcatctaaaggatttgcccatgtaggtattgttaaggttttgaaagaaaacggtattcctgtgaaggtggttaccggcacatcggcaggttcgattgtcggcagcctttttgcatcgggtatgtcgcccgaccgcctcgaattggaagccgaaattttaggcaaaaccgatttagtcgatttaaccttgtccaccagtggttttatcaaaggcgaaaagctgcaaaattacatcaaccgaaaagtcggcggcaggcagattcagcagtttcccatcaaatttgccgctgttgctactgattttgaaaccggcaaggccgtcgctttcaatcaagggaatgccgggcaggctgtgcgcgcttccgccgccattcccaatgtgttccaacccgttatcatcggcaggcatacatatgttgacggcggtctgtcgcagcccgtgcccgtcagtgccgcccggcggcagggggcgaatttcgtgattgccgtcgatatttccgcccgtccgggcaaaaacatcagccaaggcttcttctcttatctcgatcagacgctgaacgtaatgagcgtttccgcgttgcaaaatgagttggggcaggcggatgtggttatcaaaccgcaggttttggatttgggtgcagtcggcggattcgatcagaaaaaacgtgccatccagttgggtgaggaggcagcacgtgccgcattgcctgaaatcaaacgcaaactggcggcataccgttattga

SEQ ID NO: 61494 - DNA, 468 bp, Neisseria meningitidis
atggcacaaacgcgacgcgaagccaaagcagaaatcatacctttccaagcacctaccctgccggttgcgccggtatacagcccgccgcagcttacagggccgaacgcattcgacttccgccgcatggaaaccgacaaaaaaggggaaaatgcccccgacaccaagcgtattaaagaaacgctggaaaaattcagtttggaaaatatgcgttatgtcggcattttgaagtctggacagaaagtctccggcttcatcgaggctgaaggttatgtctacactgtcggtgtcggcaactatttgggacaaaactacggtagaatcgaaagcattaccgacgacagcatcgtcctgaacgagctgatagaagacagcacgggcaactgggtttcccgtaaagcagaactgctgttgaattcttccgacaaaaacaccgaacaagcggcagcacctgccgcagaacaaaattaa

SEQ ID NO: 61495 - DNA, 933 bp, Neisseria meningitidis; identical to SEQ ID NO: 38763

SEQ ID NO: 61496 - DNA, 483 bp, Neisseria meningitidis
atggctatcgtgaaaaattccgtggtttcgctgcattatgagatgtatgatgccaacaatcagcttttggacaaaaccgaagaaccgattgcgtatctgcacggcggttacgacggcattttccctttggtggaagaggcgttgcacggtaaggatgccggcgatacggtcgatgtggcgctgtcgcccgacgatgcgttcggcgagcaggatccggagttggtccgtattgaagatgcgggcgtgttccctgttgaagtcgaagtcggcatgatgtttgaagccgacgatcctgaaaccggcgatgttgtcgtctatcgtgtaaccgatgttgccgacggcaaggcggtggtggacggcaaccatcctttggcaggcatgaaaatccgctttaaggctacggttgaaagtgtgcgcgatgcatccgatgaggaaatcgcacacggtcatgtccacggtccgcacggtcatcaccaccactga

SEQ ID NO: 61497 - DNA, 1518 bp, Neisseria meningitidis
atgtctcctaaaaaaatacccatttggcttaccggcctcatcctactgattgccctaccgcttaccctgccttttttatatgtcgctatgcgttcgtggcaggtcggcatcaaccgcgccgtcgaactgttgttccgcccgcgtatgtgggatttgctctccaacaccttgacgatgatggcgggcgttaccctgatttccattgttttgggcattgcctgcgcccttttgttccaacgttaccgcttcttcggcaaaaccttttttcagacggcaatcaccctgcctttgtgcatccccgcatttgtcagctgtttcacctggatcagcctgaccttccgtgtcgaaggcttttgggggacagtgatgattatgagcctgtcctcgttcccgctcgcctacctgcccgtcgaggcggcactcaaacgcatcagcctgtcttacgaagaagtcagcctgtccttgggcaaaagccgcctgcaaacctttttttccgccatcctcccccagctcaaacccgccatcggcagcagcgtgttactgattgccctgcatatgttggtcgaatttggcgcggtatccattttgaactaccccacttttaccaccgccattttccaagaatacgaaatgtcctacaacaacaataccgccgccctgctttccgctgttttaatggcggtgtgcggcatcgtcgtatttggagaaagcatatttcgcggcaaagccaagatttaccacagcggcaaaggcgttgcccgtccttatcccgtcaaaaccctcaaactgcccggtcagattggcgcgattgtttttttaagcagcttgttgactttgggcattattatcccctttggcgtattgatacattggatgatggtcggcacttctggcacattcgcgctcgtatccgtatttgatgcctttatccgttccttaagcgtatcggctttaggtgcgattttgactatattatgtgccttgccccttgtttgggcatcggttcgctatcgcaattttttaaccgtttggatagacaggctgccgtttttactgcacgccgtccccggtttggttatcgccctatccttggtttatttcagcatcaactacacccctgccgtttaccaaacctttatcgtcgtcatccttgcctatttcatgctttacctgccgatggcgcaaaccaccctgaggacttccttggaacaactcccaaaagggatggaacaggtcggcgcaacattggggcgcggacacttctttattttcaggacgttggtactgccgtccatcctgcccggcattaccgccgcattcgcactcgtcttcctcaaactgatgaaagagctgaccgccaccctgctgctgaccaccgacgatgtccacacactctccaccgccgtttgggaatacacatcggacgcacaatacgccgccgccaccccttacgcgctgatgctggtattattttccggcatccccgtattcctgctgaagaaatacgccttcaaataa

SEQ ID NO: 61498 - DNA, 630 bp, Neisseria meningitidis; identical to SEQ ID NO: 54824

SEQ ID NO: 61499 - DNA, 1176 bp, Neisseria meningitidis
atgttgaacacttccctttccccgtggccctgcttcacccaagaagaagccgatgccgtttccaaagtcctcttgtccaacaaagtcaattactggacgggcagcgaatgccgcgaatttgaaaaagaatttgccgcctttgccggcacgcggtacgccgtcgccctttccaacggcacgctggcactcgatgccgcgctcaaagcaatcggcataggcgagggcgatgatgtggttgttacctcgcgcaccttcctcgcctccgcgtcctgcatcgtgaacgcgggcgcaaaccccgtgtttgccgacgtggatttgaacagccaaaacatcagcgcggaaaccgtcaaggctgtgctgaccccgaataccaaagcgattatcgtggttcaccttgccggtatgcctgccgaaatggacgacatcatggctttggcaaaagaacatgatttgtgggtaattgaagactgcgcccaagcgcacggcgcaaaatacaaaggcaaatccgtcggctctatcggacacgtcggcgcgtggtcgttctgccaagacaaaatcatgaccaccggcggcgaaggcggtatggttacgaccaacgacaaaaccctgtgggaaaaaatgtggtcgtacaaagaccacggcaaaagctacgatgccgtgtaccaccgcgaacacgcgcccggtttccgctggctgcacgaaagtttcggcacaaactggcgtatgatggaaatgcaggcggcaatcgggcgcatccagctcaaacgcctgcccgaatggactgcctgccgtcaagcgcacgccgccaagctggcggaaagcctaggcaaattcaaaagtatccgcttggttgaagtcgccgactacatcggacacgcgcaatataagttctacgctttcgtcaaacccgaacacctcaaagacggctggacgcgcgaccgcatcgtcagcgaactgaacgcgcgcaaagtcccctgctatcaaggcagctgctccgaagtctatttggaaaaatctttcgacgacacgccttggcggccgaaagagcgtttgaaaaatgctgtcgaactgggcgacaccagcctgatgttcttggtgcacccgacgctgaccgacgacgaaatcgcgttctgcaaagaacacatcgaagccgtattggtagaagccacacgataa

SEQ ID NO: 61500 - DNA, 1518 bp, Neisseria meningitidis
atgttgtatttcagatacggttttttggttgtttggtgtgcggcaggtgtttctgccgcctatggggcggatgcgcccgcgattttggatgacaaggcattgttgcaggtgcaacggttggtgtcggataagtgggcggaatcggattggaaagttgaaaatgatgccccgcgcgtggttgacggggattttttgttggcgcatccgaaaatgttggaacatagtttgcgcgacgcgctcaacggcaatcaggcggatttaatcgcttcgttggcggatttgtatgccaagctgccggattatgacgcggttttgtacggcagggcgcgggctttgctggcgaaattggcgggaaggccggcggaggcggtggcgcggtatcgggaactgcacggggaaaatgcggcagacgagcggattttgctggatttggcggcggcggagtttgacgatttccgactgaagtcggcagaaaggcattttgcggaggcggcaaaattggatttgccggcaccggttttggaaaatgtggggcgttttcggaaaaaaacggaggggctgacgggctggcgtttttcgggcggcatcagtccggcggtcaatcaaaacgccaataatgccgcgccgcagtattgccggcaaaacggaggccggcagatatgcagtgtcagccgggcggagcgggcggcagggttgaattatgaaatcgaggcggaaaaactgacggcgttggcagataatcattatttgttgttccgttccaatatcggcggcacgagctattatttcagtaaaaaatcagcttatgacgacgggttcggcagggcgtatttgggttggcagtataaaaatgcacggcagacggcggggattttgccgttttatcaggtgcagttgtcgggcagcgacggctttgatgcgaaaacaaaacgggtaaacaaccgccgcctgccgccgtatatgctggcgcacggagtcggcgtgcagctgtcccatacttaccgaccaaacccgggatggcaattttcggtcgcgctggaacattaccgccaacgctaccgcgaacaggatagggcggaatacaataacggcaggcaggacgggttttatgtttcgtcggcaaaacgtttgggcgaatcggcaactgtgttcggcggctggcagtttgtgcggtttgtgccgaaacgcgaaacggtgggcggcgcggtcaataatgccgcctaccggcgcaacggtgtttatgccggttgggcgcaggagtggcggcagttgggcggtttgaacagtcgggtttccgcgtcttatgcccgccgcaactataagggcgttgcggctttctcgacagaggcgcaacgcaaccgcgaatggaatgtctcgctggctttgagccacgacaagttgtcgtataaaggtatcgtgcccgcgttgaattatcgtttcggcaggacggaaagtaatgtgccgtatgcgaaacgccgcaacagcgaggtgtttgtgtcggcggattggcggttttga

SEQ ID NO: 61501 - DNA, 213 bp, Neisseria meningitidis; identical to SEQ ID NO: 48329

SEQ ID NO: 61502 - DNA, 582 bp, Neisseria meningitidis
atgaaacacactgtatccgcatcggtcatcctgcttttgaccgcttgcgcgcaattacctcaaaataacgaaaacctgtggcagccgtccgaacacacccgcagtttcacggcagaagggcggttggcagtgaaagcggaagggaaaggttcgtatgcaaatttcgattggacataccaaccgcccgtggaaaccatcaatatcaatacccctttgggcagtacgctcgggcagttgtgtcaagacagggacggcgcattggcagtggacggcaaaggaaatgtctatcaggcggaaagtgcggaagaattaagcaggcagctggtcggtttcaaactgccaatccaatatctgcatatctgggcagatggcaggcgtgtggcgggcgcgccttaccgcatcctgccggacggcatattggaacaatacggttggactgtcggcagaaccgccgacagtggggggcaagtccgaacgttgcaactgaataacggaaatttgaacatcaggctggttttcaccgaaatcggtatgccgtctgaaactgaaaccctggaacgctgtgcggcgcgcacgagataa

SEQ ID NO: 61503 - DNA, 126 bp, Neisseria meningitidis; identical to SEQ ID NO: 54367

SEQ ID NO: 61504 - DNA, 1413 bp, Neisseria meningitidis; identical to SEQ ID NO: 54698

SEQ ID NO: 61505 - DNA, 441 bp, Neisseria meningitidis; identical to SEQ ID NO: 41798

SEQ ID NO: 61506 - DNA, 660 bp, Neisseria meningitidis; identical to SEQ ID NO: 54572

SEQ ID NO: 61507 - DNA, 180 bp, Neisseria meningitidis
atgttctgtatcgttgtttaccgcttccgcacctttgtccgccttaaagcaggtagacaccgcaatgaatcgacgcaaagaaaatgccgtctgaacatgcgttcgggcggcgttttgttggggggtatcggagcggaacgtctgaaaaagggtttcaggcggtctttgggcgtgtggtaa

SEQ ID NO: 61508 - DNA, 198 bp, Neisseria meningitidis
atgaccgctatgccgtctgaaccgcctttcagacggcattccacacatcaaaacagaaaaaccgcgcccaaaatcatcatcacaagacacaacggcaaaccggatacaaaacccaacaccgccgccaaaatgccgtctgaagccgtcggcgcaaccatccttatctggggcataactttccttaaccatcccttttga

SEQ ID NO: 61509 - DNA, 195 bp, Neisseria meningitidis; identical to SEQ ID NO: 42321

SEQ ID NO: 61510 - DNA, 864 bp, Neisseria meningitidis; identical to SEQ ID NO: 53312

SEQ ID NO: 61511 - DNA, 489 bp, Neisseria meningitidis; identical to SEQ ID NO: 54373

SEQ ID NO: 61512 - DNA, 540 bp, Neisseria meningitidis; identical to SEQ ID NO: 36581

SEQ ID NO: 61513 - DNA, 1074 bp, Neisseria meningitidis
atgagtatcaccatccaaaacttaaacaaacacttcggcaattttcacgcgctgaaaaacatcaacctcaacgtccccaccggcaaactcgtttccctgctcggcccgtccggctgcggcaaaaccacgcttttacgcattatcgccggactggaaaacgccgacggcggcaagattctgtttgatgggcaagacgtaaccgccaagcacgtgcgcgagcgcaaagtcggcttcgtgttccaacactacgcccttttccgccatatgaacgtgtttgacaacgttgccttcggtttgaccgtattgcccaagtccgaacgcccgtccaaaggacaaatccgcgccaaagtcgaagaattgctcaagctcgtgcagctctcgcatttggcaaaatcctatccgcaccaactctccggcgggcaacgccagcgcatcgccctcgcccgtgcgcttgcggtcgaaccgaaactcctgcttttggacgaacccttcggcgcgttggatgccaaagtacgcaaagaattacgcacctggctgcgcgacatccatcacaacctgggtgtaaccagcattctggttacgcacgaccaagaagaagccctcgaagtttccgacgaaatcgtcgtgatgaaccacggcaaaatcgaacaaaccggcagcgccgaagctatttaccgcaaacccgaaaatgccttcgttaccgagttcctcggcgaaaccgacgcttttgaaggacgcatcgaaaaaggcttctggcattataacggcttcgcgtggaaattggacgcacaatacaaatggcaggaacaaaccgccaccggctatatccgcccgcacgaatggcagatcgccgccgaacacgaaacaccgatgatttgtgccgaaatcgaaaaagtccacgccgtcggggcattgacgcatattttggtgaaacacggcaaacaagacgtgcatatcacgctggctggcagcgatgccgcgcgttacccaatcgccgaaggcaaagaattgaagctgattccgaaacaggtttatgtcttctctcaaaacgaactgattgaatattcgatttaa

SEQ ID NO: 61514 - DNA, 2703 bp, Neisseria meningitidis
atgcaactgcatattctgaacaatccaaaggacgcggctttggcggcggacgcggaatttctgaaacaatccctgttcaacctcctgcacgaagaagcctcgccattggttgtcgaaacggtcaaactcttgtccacttccgacgacagcgcggcattgattgaaaaagtattgccgcaattggacgaacaacaaacccacgatttaaccttggcctgcggcctgttcgcccagattttgaatatcgccgaagacgtgcaccacgaacgccgccgccaaatccacgaagaagccggacgcggcggcgcggaaggcagcctgacggaaaccgtccgcaggctcaaagcggggaaagccgacggcaaatcggtgcagcggcagttggacaatacgtccgttaccgccgttttgaccgcgcacccgaccgaagtgcaacgccaaaccgtcttaagcttcaaccgccgcatccgcgcactgttgccgcaacgcgaacgctgcaccaatgccgacgcgctggcacggctgcgccgcgaaatcgacactatcctgctgggcttgtggcagaccagcgaaacgcgccgccacaaactcagcgtcaacgacgaaatcaacaacggcgtgtccatcttcccgatgagctttttcgaagccctgcccaagctctaccgcaatatggaacacgactttcagatggtctatcccgatgtctgcgttccgaacatcctcaaaatcggcggctggatcggtggcgaccgcgacggcaatccgttcgtttctgccgaaaccttgcgttttgccttccgccgccacgccgatgccgtgttccgtttttaccgtggcgaactcgacaaactttaccgcgaactgccgctctccatccgccgcgtcaaagtcaacgacgacgtaatggcactggcagccctctcgcctgacgaagaacttgcccgcacggaagaaccctaccgccgcgccattgcttacatcatggcgcgcgctatgggcaaagcgcgcgcgctcggtttgggcatgggctgcaaattcggctttctcgagccttatgcttcggcacaagaatttctcgatgatttgaaaaaattgcaacgttcccttatcgacaacggcagccgcctgcttgccgaaggccgtctggcagacctcatccgttccgtgtccgtgttcggcttccacatgatgccgctcgacctgcgccaacacgcaggcaaacacgccgatgtggttgccgagcttttccaacacgcaggcttggaagactacaacagcctgaatgaagagcaaaaacaagccgccctgttgcgcgaattgagccatcaacgtccactgtacagtccgttcatcacatacagcgaccatactcgccacgaactggcgattttcaatgaagcgcgcaaaatcaaagacgaattcggcgaagatgccgttacgcaaagcattatttccaactgcgaacaacccagcgacctgctcgccttggcattgctgctgaaagaaagcggcctgttggcggtagaaaacggcaaaccgcaaagccgcatcaatatcgtgccgctgtttgaaaccatcgaagcgttggaaaacgcctgtccggtcatggaaaccatgttccgcctcgactggtacgatgccctgctcgaaagccgcggcaatatccaagaaatcatgctgggctactccgactccaacaaggacggcggctacgttaccagctcatggtgcctctatcaggcggaattgggcttggtcgaactcttcaaaaaatacgatgtccgcatgcgcctgttccacggacgcggcggcagcgtcggacgcggcggcggcccttcttaccaagccattttggcgcaaccggccggcagcgtggcgggacaaatccgcattaccgaacaaggcgaagtcattaccgccaaatacgccgaccccggcaatgcccaacgcaacttggaaaccttggttgccgcgactttggaagccagcatcctgccggataaaaaagaccctgatgccaaactgatgcaggcattgtcggacgtatcgttcaaatactaccgcgaactgattacccaccccgacttcatcgactacttcctgcaaaccagcccgattcaggaaatcgccaccctcaacctcggcagccgtcctgccagccgcaagaccttagcgcggattcaagacttgcgcgcgattccgtgggtattttcctggatgcaaaaccgcctcatgctgcctgcttggtacggtttcggcagcgcggtggaaaccttgtgcgaagacaaacccgaaacgctcgccgccctgcgcgaacacgcccaaagcaacccgttcttccaagccatgctttccaatatggagcaagtgatggcgaaaaccgacatcaccctcgcggaaaactatgccggcttgagcgaatcgccggaaaaagccgccgtcatcttcggcatgattaaggaagaataccaacgcagccgcaaagccctgctcgacctgctgcaaaccgaagaacttttacgcgacaaccgcagcctcgcccgttcgcttgccttgaggattccctacctgaacgcgctcaacggcctgcaggtcgccatgctcaaacgcctgcgtaaagaacccgacaatccgcacgcgctgctgatggttcacctgaccatcaacggcgtggcgcaaggtttgcgcaatacaggctga

SEQ ID NO: 61515 - DNA, 1356 bp, Neisseria meningitidis; identical to SEQ ID NO: 54732

SEQ ID NO: 61516 - DNA, 1335 bp, Neisseria meningitidis
atggcaaaaaaatatttcggcacggacggcgtgcgcggcgaagtcgggcagtttccgattacgcccgattttgtattgaaactcggctatgcggcggggcaggttttggttcagcacgacactgaccagaaaccgaccgttttaatcggcaaggatacgcgtatttccggttatatgctggaagccgctttggtggcaggttttaccgccgcaggtgtcaacgttatccaaaccggtccgctgcctacgcccggcgtggcttatctgacccgtgcgctgcgtttgtccgccggtgtgatgatttccgcgtcgcataatgcctattccgacaacggcatcaaattctttgccgagggtggcgtgaagctttccgatgaaatcgagttggaaatcgaagccaaaatcgacgaagaaatgaaaacccagccttctgcacgcctcgggcgcgcacgccgtatcagcggtgcggacgaccgctatatcgaattttgcaaatccacctttcccagccattccgaccttcgtggtttgaagttggttatcgataccgccaacggcgcggggtacggtgtcgcacccaaggtgtttcacgaactgggtgcacaggtcgtcagcatcggcgacgaacccaacggctacaacatcaacgaaaaatgcggtgcgacttataccaagacactccaggccgccgttttacagcatgaagccgactacggcatcgccttagacggcgacggcgaccgcctgatgatggtcgataaaaacggtaaggtttacgacggcgacagcctgatttacgtcattgctaaagcccgcgcccgagaaggtatcaacatcggcggcgtggtcggcacggtcatgaccaatatggcgatggaaatcgccctgaaagagcagggcgtggatttctgccgcgccaaagtcggcgaccgctatgtgttggaacagctgaaccaacgcggctggctcgtcggcggcgaagccagcggccatattttgtgcatggacaaacacaacaccggcgacggcattatttccgccttgcaggttttggcggcattgcaaacgctgaaccaagaccttgccgccgtttgcgccgactggcagccgtatccgcaaacgatgattaatgtccgtatcggcaaagggcaaaactggcaggaagcctcaaaagacgtgttggcggaagtggaaaaagaactcgaaggcaaagggcgtgtcgtgttgcgcgcttcgggaaccgaacccgtcgtgcgcgtgatggtggaggcgcggcaggcggattgggcgcgcgacggtgcggaacgtattgcttccgccatcggcagcctttag

SEQ ID NO: 61517 - DNA, 924 bp, Neisseria meningitidis; identical to SEQ ID NO: 39069

SEQ ID NO: 61518 - DNA, 342 bp, Neisseria meningitidis; identical to SEQ ID NO: 43005

SEQ ID NO: 61519 - DNA, 447 bp, Neisseria meningitidis; identical to SEQ ID NO: 37478

SEQ ID NO: 61520 - DNA, 1419 bp, Neisseria meningitidis
atggacacaaaagaaatcctcggctacgcggcaggctcgatcggcagcgcggttttagccgtcatcatcctgccgctgctgtcgtggtatttccctgccgacgacatcgggcgcatcgtgctgatgcagacggcggcgggactgactgtgtcggtattgtgcctcgggctggatcaggcatacgtccgcgaatactatgccgccgccgacaaagacattttgttcaaaaccctgttcctgccgccgctgctgtctgccgccgcgatagccgccctgctgctttcccgcccgtccctgccgtctgaaatcctgttttcgctcgacgatgccgccgccggcatcgggctggtgctgtttgaactgagcttcctgcccatccgctttctcttactggttttgcgtatggaaggacgcgcccttgccttttcgtccgcgcaactcgtgcccaagctcgccatcctgctgctgctgctgacggtcgggctgctgcactttccggcgaacaccgccgtcctgaccgccgtttacgcgctggcaaaccttgccgccgccgcctttttgctgtttcaaaaccgatgccgtctgaaggccgtccggcgcgcaccgttttcatccgccgtcctgcatcgcggcctgcgctacggcataccgatcgcactaagcagcatcgcctattgggggctggcatccgccgaccgtttgttcctgaaaaaatatgccggcctagaacagctcggcgtttattcgatgggtatttcgttcggcggagcggcattattgttccaaagcatcttttcaacggtctggacaccgtatattttccgcgcaatcgaagcaaacgccccgcccgcccgcctctcggcaacggcagaatccgccgccgccctgcttgcctccgccctctgcctgaccggcattttctcgcccctcgcctccctcctgctgccggaaaactacgccgccgtccggtttatcgtcgtatcgtgtatgctgccgccgctgttttgcacgctggtagaaatcagcggcatcggtttgaacgtcgtccgaaaaacacgcccgatcgcgctcgccaccttgggcgcgctggcggcaaacctgctgctgctggggcttgccgtaccgtccggcggcgcgcgcggcgcggcggttgcctgtgccgcctcattttggctgttttttgttttcaagaccgaaagctcctgccgcctgtggcagccgctcaaacgcctgccgctttatatgcacacattgttctgcctggcctcctcggcggcctacacctgcttcggcacgccggcaaactaccccctgtttgccggcgtatgggcggtatatctggcaggctgcatcctgcgccaccggaaagatttgcacaaactgtttcattatttgaaaaaacaaggatttccattatga

SEQ ID NO: 61521 - DNA, 276 bp, Neisseria meningitidis
atgaatgagggtgaagttgttttaacaccagaacaaatccaaaccttgtatggttatgcttcccgtggcgatacctatggcggttggcgttatttggctaatttgggtgaccgttatgcggatgatgctgctgcaattgtcggtaaggatgcaaacttaaatggtttgaatttatggatgaaaaaaggtgtggaaaacctatgggatgatacggtcggtaaaaagatccgtttaatgtgtatttccgttttttggattgtggttttcaatttgtag

SEQ ID NO: 61522 - DNA, 1071 bp, Neisseria meningitidis; identical to SEQ ID NO: 56015

SEQ ID NO: 61523 - DNA, 1857 bp, Neisseria meningitidis; identical to SEQ ID NO: 56086

SEQ ID NO: 61524 - DNA, 1101 bp, Neisseria meningitidis
atggcaggcaacactttcggacaactcttcaccgttaccaccttcggcgaaagccacggcgcgggtttgggctgtatcatcgacggctgcccgcccggcttggaattaagcgaagcggatatccaatttgacctcgaccgacgcaaacccggcaccagccgccacgttacccaacgccgcgaagccgaccaagtcgaaatcctctccggcgtattcgaaggcaaaaccaccggcacgcccatcgccctcttaatccgcaataccgaccagcgcagcaaagactacggcaacatcgccaccagcttccgccccggccacgccgactatacctattggcacaaatacggcacgcgcgactaccgcggcggcggcaggagctccgcccgtgaaaccgccgcccgcgttgctgccggagccgttgccaaaaaatggttgaaagaaaaattcggcacggaaatcaccgcctacgttacccaagtcggcgaaaaagaaatccggtttgaaggctgcgaacacatttcccaaaatcctttttttgccgccaaccatagccaaattgccgagctggaaaactatatggacggcgtgcgcaaatccttggattccgtcggcgcgaagctgcatatcgaagcagccaatgtccctgtcggcttgggcgaacctgtttttgaccgcctcgatgccgaaatcgcctacgcgatgatgggcatcaacgccgtcaaaggcgtggaaatcggcgcaggttttgacagcgtaacgcaacgcggcagcgaacacggcgacgaactgaccccgcaaggcttcctgtccaaccactcaggcggcatcctcggcggcatcagcaccgggcaagacatccgcgtcaatatcgccatcaaacccaccagctccatcgccaccccgcgccgcagtatcgacatcaacggcaaccccatcgaactcgccacgcacggcaggcacgacccctgcgtcggactgcgctccgcgccgatcgccgaagccatgctcgcgttagtcctcatcgaccacgccctgcgccatcgcgcgcaaaatgccgacgttcaggttaatacgcccgacattaccctttcaaacaaataa

SEQ ID NO: 61525 - DNA, 540 bp, Neisseria meningitidis; identical to SEQ ID NO: 55002

SEQ ID NO: 61526 - DNA, 567 bp, Neisseria meningitidis; identical to SEQ ID NO: 37899

SEQ ID NO: 61527 - DNA, 462 bp, Neisseria meningitidis; identical to SEQ ID NO: 39618

SEQ ID NO: 61528 - DNA, 1977 bp, Neisseria meningitidis
atgtccaaactcaaaaccatcgccctgaccgcgtcaggtctgtccgtttgtccgggtttcctatacgcccaaaacacctcatcacaccaaatcggtttggcgattatgcgcttaaactcttcaatactcgacctgccaccgacaaaacaatatttccaatccggcagcctgtggagcgagctgcgccaaggcttccggatgggcgaagtcaatcccgaactggtacgccgccacgaaagcaaattcatcgcaagccacagctatttcaacagggtcatcaaccggagtagaccctatatgtaccatatcgccaacgaagtcaaaaaacgcaatatgcccgccgaagccgccctgcttcccttcatcgaaagcgcgttcgtcaccaaagccaaatcacacgtcggcgcatcgggcctgtggcagttcatgcccgctaccggcaggcattacggcctggaaaaaacaccggtttacgacggcaggcacgacatttacgccgccaccgatgccgcactcaactatctgcaatacctctatggactgttcggcgactggccgctcgcctttgccgcctacaactggggtgaaggcaacgtcggacgcgccatcaaccgcgcccgcgcccaagggctcgaaccgacctacgaaaacctgcgtatgcccaacgaaacgcgcaactatgtccccaagctgctcgccgtgcgcaacattattgccactccccaatctttcggtatgaatatcagcgacatagacaacaaaccctattttcaggcagtcgaaccggatcgtccgctcgacaacgaagccatcgtccggcttgccggcatcacgcaaagcgagctgctcgccctaaaccccgcattcaacgtccccgcgtttatccccaaaagcaaacgcaaactgctgcttcctgtcgcatccgtccaaaccttccaaagcaactacctcaacgccgcacccgacagcctgttttcatgggaagtctatacgcctgccgccaaaaccagcctgtccgacatctcgacggcaaccggcatgagcattgccgacatcaaacgcctcaacaacctgaacggcaaccttgtcaacgcaggacgcagcatccttgtcgccaagaacggcaaaacccttcagacggcatcggaatccgtcgtttccatcgacatcgacaatacgcccgacacctaccgttccaatatgccggcaggcacggtgaacgtcggcattgcccgaatccgacccgccgccgcacagacagcggacattaccgtcgcacctttgccgcagaaaaccgtccgtacggaacccgatccccttgtccgtattgccgaacctgcccttgcgacagccgcagcgcaacctcaaaccgaaaaacagaccgccatgccgtctgaaacccaaaccgcaacactcgcgcagatcatcccccaaaacgacatgcaggcggcagacgaactcatgcagcttgttgcccgaaacaacctgcgccgacaggctgaagaaaccatctccgccgtcatcggcacgcctgacacagttgccgaacacaacatttcctcatctccgcaacataccgttgccgccgacggcaaacgccgggcacgtttggaaacgcgcgtagccaaagctgccgacggcgaagccgaaatctccccgctccatgccagcatccaccgcgttgtagaaggcgacaccctgttcaacattgccaaacgctacaacgtcagcgtagccgacctgattgtcgccaacaacatcaaaggcaacaccatccaaaaaggacaggtactccgcctggcgcaggcagcccctgcccaaacccgtattgaaaaagtatcctacaccgcgcgcaaaggcgacaccttcaaaagtatcgccgcgcgcttcaatatccatatcgacgacatccgccggctcaatcccaacctgaacaccatcaatccgggacagagggtcaaactgattggaagctga

SEQ ID NO: 61529 - DNA, 711 bp, Neisseria meningitidis
atgaatgcagccatcgaacacgtccaagccgtcgccttcgatttggacggcacactgtgcgattccgtccccgaccttgccgccgccgcagaagcgatgttggagcaactcggtatgaaaccgctgcctgcaaaagtggtcgaaagctatgtgggcgacggcatcggcaaactggttcaccgcgtcctcaccaacgaccgcgaccgcgaagccgattccgaactgtgggaaaaaggtttcgtatcctatatgaaatactaccgcgaccatttgagcgtcttcacccgcccctatcccgaaaccgaagccgggctggcattgctcaaatctttgggcatcccgctggcagtcattaccaacaaaaacgaaatccttgccgtcgaactgttgaaacagctcggacttgccgactacttcagcctgatactcggcggcgacagcctgcccgagaaaaaacccagccccctgccgctgcggcatgccgccgaagttttgggtatcgatgttgcaaacatggttatggtcggcgactcgcgcaacgacatcatcgccgccaaagccgccggctgcctgagcgtcggcgttaccttcggttacggcgatatgacgctgctctcgcaagacgatgcgacccgccccgactggattatcggctcgctgcccgaaatttacgaaaacctgcaaccgcagaaaaataaagacgaagaataa

SEQ ID NO: 61530 - DNA, 357 bp, Neisseria meningitidis; identical to SEQ ID NO: 55433

SEQ ID NO: 61531 - DNA, 372 bp, Neisseria meningitidis; identical to SEQ ID NO: 36794

SEQ ID NO: 61532 - DNA, 396 bp, Neisseria meningitidis; identical to SEQ ID NO: 39569

SEQ ID NO: 61533 - DNA, 408 bp, Neisseria meningitidis; identical to SEQ ID NO: 55717

SEQ ID NO: 61534 - DNA, 1287 bp, Neisseria meningitidis; identical to SEQ ID NO: 54510

SEQ ID NO: 61535 - DNA, 564 bp, Neisseria meningitidis
gtgcaggacaaaaacaacctctgctggctcgatatggaaatgacggggctgaatcccgaaaccgaccgcattatcgaagtcgcgatgattattaccgactcggatttgaatgtattggcgcaatccgaagtttacgccgtccaccaaagcgacgagctgctcgacaatatggacgagtggaacaccgccacacacggcaggacggggctgacgcagcgcgtgcgcgaatcgtcgcataccgaagccgaagtcgaacagaaactgctggactttatgtcggaatgggtacccggacgcgccacgccgatgtgcggcaattccatccaccaagaccggcgttttatggtcaaatatatgccgaaactggaaaactacttccactaccgcaaccttgacgtttccacactgaaagagcttgccaaacgctggaatccgcccgttgccaaaagcgtcgtcaaacgcggttcgcacaaggcattggacgacattttggagagcatcgaagaaatgcgccactaccgcgaacactttctgatttccgccccgagagccgaagcgcaataa

SEQ ID NO: 61536 - DNA, 573 bp, Neisseria meningitidis; identical to SEQ ID NO: 48968

SEQ ID NO: 61537 - DNA, 1266 bp, Neisseria meningitidis
atgtctgaagcccttgcaaaagaaaccctcaatccgtttgaaatcgcgcgcaaacaggtcaaaaccgcctgcgaccggctgaaaaccgatccggccgtttatgaaatcctgaagagtccgacccgcgtgttggaagtcaatttccccgtcaaactcgacgacggcacggtcaaaaccttcacgggctaccgttcgcaacacaacaacgccgtcggcccctataaaggcggcgtgcgcttccatcccggtgtgaatctggacgaagtcaaagccctgtcaatttggatgaccatcaaatgctgcgtggccggcattccttacggcggcggcaaaggcggcgttaccttggatccgcgcgattattccgaggcggaactggaacgcatcgcccgcgcttattccgaagccatttctccgctcatcggcgaaaaaatcgatattcccgcccccgatgtgaataccaacggcaaaattatgtcgtggatggtggatgcttatgaaaacgtggtgaaacattccgcgccgggcgtatttaccggaaaaccggttgagttcggcggctctttggcgcgtaccgaggctaccggttacggcgtgaacctcgccgccgtccaagctttggaaaaactgggcaaggacgtgaaaggcgcgacttacgccatccaaggcttcggtaatgtcggttaccacacaggttattacgcgcatcaatccggcgcgaaagttgttgcggtttctactgttgacgttgccatctacaatgaaaatggcttggatatggaagccctgtttaaagagttccaagaaaaaggcttcatcaccaacgaagccagttacggcaaagaaattaccaacgccgaacttttggctttggatgtggacgtactcgccccttgcgcgttggaaaaccaactgacttccgaaaacgccggtaaagtccgcgcgaaaatcgtggtcgaaggcgcgaacggcccgactacgcccgaagccgacgttatcctgcgtcaaaacggcgtattggtcgtgcctgatattttggcgaactgcggcggcgtggtggtatcttattttgaatgggtacaaaatctgcaaggctactactgggagtttgacgaagttcaggaaaaagaaaccgtcgtcctgcgccgtgcgttccgcgatatatggaacttggcgcaagagtatgatgtcgatttgcgaaccgcgtcttacatgatgagtatccgccgtgttgaaaaagcgatgaaactgcgcggttggtattga

SEQ ID NO: 61538 - DNA, 996 bp, Neisseria meningitidis
atgaaaacatctatccgatacgcactgcttgccgcagccctgaccgccgcaacccccgcgctggcagacattaccgtgtacaacggccaacacaaagaagcggcacaagccgttgcagatgcctttacccgggctaccggcatcaaagtcaaactcaacagcgccaaaggcgaccagcttgccggtcaaatcaaagaagaaggcagccgaagccccgccgacgtattctattccgaacaaatcccggcactcgccaccctttccgcagccaacctcctagagcccctgcccgcctccaccatcaacgaaacacgcggcaagggcgtgccggttgccgccaaaaaagactgggtggcactgagcggacgttcgcgtgtcgtcgtttacgacacccgcaaactgtctgaaaaagatttggaaaaatccgtcctgaattacgccacgccgaaatggaaaaaccgcatcggttacgcccccacttccggcgcgttcttggaacaggttgtcgccatcgtcaaactgaaaggcgaagcggccgcattgaaatggctcaaaggtctgaaagaatacggcaagccttacgctaaaaactccgtcgcccttcaagcggttgaaaacggcgaaatcgatgccgccctcatcaacaactactactggcacgcttttgcgcgtgaaaaaggcgtacaaaatgtccacacccgcctgaatttcgtccgccacagagatcccggcgcactcgttacctattccggcgcagccgtgttaaaatcctcccaaaacaaggatgaggcgaaaaaattcgtcgccttcctcgccagcaaggaaggacagcgcgccctgaccgccgtccgtgccgaatatcctttgaatccgcacgtggtatccactttcaatttggaacccatcgccaagttggaagcaccccaagtgtccgccaccactgtttccgaaaaagaacacgccacccggctgcttgagcaagccggtatgaaataa

SEQ ID NO: 61539 - DNA, 3615 bp, Neisseria meningitidis
atgtctgcacccatccaagcatttgacccgctgaccgtccccattgccggcaccaacctgattgaggcctctgccggcaccggcaaaacctacggcatcgccgccctgtttacgcgcctgatcgtattggaacaaaaaaacgtcgagcgcgtattggtcgttaccttcaccaaagccgccaccgccgagttgaaaacacgcctgcgcgcacgtttggacgatgtgttgcaggttttagaaagtaaagaaattgccaaacttggagacgacacgctttcagacggcatcgccgcctactgcgccgaacaccacaaaggcgacaccttcctgcccgcactcttaaaacaggctttgcaaaaagagggccggacgcgtctgattgtccgcctcaaggccgccatcgggcaattcgacaacgccgccatctataccatccacggcttctgccaacgtatcctgcgcgactacgccttcttgtgccaagcaccgttcgatgtcgaactgaccgaagaagacggcgaccgcctgcttatcccggcgcaagatttttggcgggaacgcgtcagcaatgatccggtgcttgccgcattggcgtttaaacgcaaagctgtgccgcaaaccgtccttgcccaaatttcgcgctatctttcccgcccgtacctgaatttccgccgtccgcaggcggatttgaaacaggcgcagcgcaacgccgaaacctcatggcaaaccatctgccgcctgctgcccgagctggaagccggcttttggcgcatccatcccgacctcaacggcaacagttaccgcaaaaacagcttcggcaacctttttaaagaactggcacaaaaatccgccgccggacaactgccctttctggacaaagacacgcacgacagactcttgaaacttgcgtccgacaaactcgaagccgcccttaaaaaaggcaaaacgcccgatgcggcagcatttgccgaattgcagaaactggcagacttcgggcgcgatttgaacgcactcgaagaagcggaagaagcaacaatgatccggctgcaactggatttaatcggatacctcaaccgcagccttgccgagatgaaaaaatcgcgccgcgaacgcggtttcgacgacctgctgctcgatgtccacaccgcgctgaccgacaatccgcacgccgaaaccctcgcccgcgccgttgccgaaaactgggaaaccgcgctgatcgacgagttccaagacaccgacccgctgcaatatgaaatcttccaaaagattttcattgcccaaaaccgcccactgtttctcgtcggcgatcccaaacaggcgatttacagctttcgcggagcggacatttacgcctacctgcaagccgccggagacgcgcggcaccgctacacgctcgccaccaactaccgcagccacgccgcgcttatcggcagcataggcgcgctgttccgcctcaaagaacgcccgttcgttttggaaaacatcggctattcggaagtcggtgcggcgcgtgccgaaagcaggttgtcccccgaacgtcctgccgtacaggttcgttggctgcacgaaaacgacaatgaaaaagccaacaaagacgttttgcgccgccgtgccgccgactattgcgccgacgaaatcgcccacgcgctcaacgaagccgccggaggccgtctgaatttcaaaggctgcccgttgcagtcgggcgatattgccgtgctggtacgcacgcacaacgaggcggtgatggtttccgccgccctgaaaaaacggcaggtgcaaagcgtcctgctttcgcgcgaatctgtgttcgcctcgcccgaagccgccgccctgtccgcactcatcggcttctggctcgaaccgcgccgcgccggaacgctgcgctttgtcctgacaagcggcatattcggttatgacgcgcagcaattgcacgacttcaaccaaaacgaaagcgagattttgcattgggcggaatctgcccgaaccgcactcgacaactggaatcaatacggcattttcgccgctatgcagcaattttcccaaacacacggcatcgaaacgcgcctcttaagccggaacaacgggcgcagcctgaccaactatttccaactgctcgaactgcttgccgccgaagacgcgcaaaaccgcaacccagccgcgctgcacaaatggttgcgcgaccaaatcagcctggccggcaacaacagcggcgacaaccgcgccatccgtctggaaagcgacgaagatttggtcaaaatcgttaccatgcacgcctcgaaaggtttgcagtatccgctggtgtactgcccgtttgcgtgggacgcgcaagataccgggccgtccgactggcaaatcctccaccaaagcgcaaaccgaaccgaactgttggcaaaggcgcaactgtcggaagacgaacagaaacaatacgccgatgaagaaatggcggaacgcctgcgcctgctttatgtcgcactgacgcgtgccgaggaacagctcaacatctacgccgcgtactccaccaatactgccgacaaccccctcgcctacctgattgaaggctcgccccaagacagccgtgaaaccgtccgccgtgcctatgcgtgtgaaaaagacggcatcgcgatgctcaaacgcaactggcggcgcgtggcggacaacgccccttccggcacaaatttcgccttcaccgaaaatgcgccgccccctgccgcctatcgcagcaacgccggtcaaaccgccgaatttgccgcaaacagcattcccgaacgcggattccgatttgtccgccacactagctttaccgccttaagccgccatacccaaacgcccgacggcggcgaagaagatgcctgcccgtccttggatgccgccgaaacctcggtgccggcgatgccgtctgaaacgccgacggcttcagacggcatatcgatacacgattttccgaaaggcacgcaggcggggctgtgcctgcacgaaattcttgaagatttcaaattcggacaagcagccgccggacaggaaaccctcattgccgacaagctgaaaaaatacggttttgaagaaatatggctgcccgccgttgccgaaatggcggaagcctgccgcaaaacgccgctgacgggggcatacgacctgtccgacatctcacccgagtgccgctgtcccgaaatgggctttaccctccacaccgaagacttcagcctcaaacgcctgcgcgactggtttgcccgcgacgacatcaggctgcccgaagtctgccgtgccgctgccgaaacgctcgacttccacaccgtcaacggctttttaaacggctttgtcgatatggtctgccaagaccccgacggcaatatctgcgtcatcgactacaaatcaaaccacctcggtacggacgcatccgcctacacgcaacaggcaatggacgaagccgtcgcacaccaccactattaccttcaggcactgatttacgccgttgccgccgcacgctacttcaagctgcgcggacaaccgcccgccgccgtttccgtccgctacctgtttttgcgcggattggatggcaaaggcggcggcgtttggcgttgggacatagatgccgccgctttggaacagataaaataa

SEQ ID NO: 61540 - DNA, 483 bp, Neisseria meningitidis; identical to SEQ ID NO: 42582

SEQ ID NO: 61541 - DNA, 1197 bp, Neisseria meningitidis
atgcaaaactatctgacccccaatttcgcctttgccccgatgattcccgaacgcgcttcaggcagccgcgtttgggatacggaagggcgtgaatatattgatttttcaggcggtatcgccgtcaatgcgctgggacactgccaccctgcccttgccgatgctttaaacgcgcagatgcacaagctgtggcacatttccaatatctatacgacgcgtccggcgcaggaattggcgcaaaaattggttgcaaacagttttgccgacaaggtttttttctgcaactcgggcgcggaagcgaatgaggcggcgttgaagctggcaaggaaatatgcgcgcgaccgtttcggcggaggaaaaagcgaaatcgtcgcctgtatcaacagtttccacggacgcacgctgtttaccgtgtccgtcggcggtcagccgaaatacagcaaggattatgcaccgctgccgcaaggcattacgcacgttccgttcaacgatattgccgcgctggaagctgccgtcggcgaacagacctgcgcggtcatcatcgagccgatacagggcgaaagcggcatcctgcccgccactgcggaatatttgcaaaccgcgcgccgtctgtgcgaccggcacaatgcgttgttgattttggacgaagttcaaaccgggatggggcatacgggcaggctgtttgcctatgaacattacggcgttgttcccgatattttgagttcggcaaaagccttgggctgcggctttccgatcggcgcgatgctggcgacagaaaagattgccgccgccttccaaccgggcacgcacggctcgactttcggcggcaacccgatggcgtgtgcggtcggcagccgcgcattcgacatcatcaatacgcccgaaactttaaaccatgtccgtgaacaggggcagaaacttcagacggcattgctggatttgtgcaggaaaacgggcttgttctcacaagttcgcgggatggggctgctactcggctgcgtgttggacgaagcctatcgcggacgcgcatccgaaatcaccgccgccgccttgaaacacggcgtgatgattttggttgcgggtgcggacgtattgcgtttcgcgccttcgctactgttgaacgatgaggatatggcggaaggtttgcgacgtttggaacacgcgctgacggaatttgccgcgacatcagacaatccgtaa

SEQ ID NO: 61542 - DNA, 576 bp, Neisseria meningitidis
ttgctatgcactcaaacagatggggataacgcgcaaaaaaagaccaccacttacaaagaacaagacccggccaaagtaacgcattatttgacacagccggccgaattttctgactaccaacgcgtttatttggatgaaacaggatttgaccgccacctgttccgtccctatgcccgcagcctgaaagggcaaatagtgaaagcgcagataagtggaaaaagataccgacgcttatctctggtgtccgcacaagtcggcaaccggctgattgctccgatggtttatcaaaatacgatgaccggagtcttttttgaagcgtggtttcagcaatgcctactgcccgcattgactcaaaaatcggtgattattttagataatgcgcgatttcaccgtatgggtgtcttacgggaaatggcggaaaaattgggacataaggtattgcctcttgcaccttattcacctgagctcaacccgattgagaaagtgtgggcgaatattaagcggtatctgcgaaccgttttgtctgattacgcccgatttgacgatgcactactgtcctattttgattttaattga

SEQ ID NO: 61543 - DNA, 747 bp, Neisseria meningitidis
atgagcacacaagatttaagcggcaaaatcgctttggtaaccggcgcatcgcgcggtatcggtgcagcaattgccgacacactggcggcagccggtgccaaagtcatcggtacggcgaccagtgagagcggtgcggcggcgattagcgagcggttggcgcaatggggcggcgaaggccgcgtattaaattccgccgaacccgaaaccgtcgaaaacctgattgccgacatcgaaaaaacgttcggcaaactcgatattctggtcaacaacgccggcatcacccgcgacaacctcctgatgcgcatgaaagaagaagagtgggacgacatcatgcaggtcaacctcaaatccgtgttccgcgcttctaaagccgttttgcgcggtatgatgaaacaacgttccggccgcatcatcaacatcacatccgtcgtcggcgtgatgggcaatgccggtcaaaccaactatgccgcggcaaaagcaggcttaatcggtttctccaaatccatggtgcgcgaagtcggcagccggggcattaccgtcaactgcgtcgcccctggctttatcgataccgacatgacacgcgccctgccggaagaaacccgccaaacctttaccgcccaaaccgccttgggcagattcggcgacgcgcaagacatcgccgatgcggttctgttcctcgcttccgaccaagcaaaatacatcaccggccaaacgctgcacgtcaacggcggtatgctgatgccctga

SEQ ID NO: 61544 - DNA, 405 bp, Neisseria meningitidis; identical to SEQ ID NO: 38321

SEQ ID NO: 61545 - DNA, 2307 bp, Neisseria meningitidis; identical to SEQ ID NO: 55754

SEQ ID NO: 61546 - DNA, 846 bp, Neisseria meningitidis; identical to SEQ ID NO: 55616

SEQ ID NO: 61547 - DNA, 924 bp, Neisseria meningitidis
atgaaaacaatcgctccttcccatataaagccccttatgccagagttgaaccaatctcaacgcaataggattatatttattgatttctatctatgctttctaggaaagataaatagaaaagatttgatgcaggcatttcaaatttccccagctgttgctactagggattttgcgctatattgctctagtttttcgaaaaatctccgttttgataccaaaagtaaattttacctctctactgaagactttgaacctcaattcccccattcatttgaaaatgcaattaaaattcttaatggcagtttaatatttgatattgattcccaacatcaacctcttcttccgtttgatttacctcctgttttaataaatcctgatgtcttaatcttttctaaaatatcgaaagcattatccttaaaaaaacctctaaaaatctcatatcattcaatttcatctggattatctgagaaagttattgtgcctcttgctctagttaatgacggatttcgatggcatttacgggcattcgatagaacaaaaaaccgatttgcagattttgtcctaacacgaataattcaagcaaatattttattagctgaaaatattgaagaaaatgaaacgattaacaatgatattgattggaatagaattgttaaaatcgagttggttccccatcctaatcatgatgaagctaaaaaagtgattgaaatggactttggaatgacaaatggaaaattagaattggcgcttagagcttcaaatatcggatatgttttacagcaatggcgagtcgattgttcgtcagatcatcatatcgatgatcctgcttttagattatggctgttagataatttagttttatacggcatcaacaatgctgaacacttagcgcctgcctttgataaaaaacgtagcaagccgtag

SEQ ID NO: 61548 - DNA, 3684 bp, Neisseria meningitidis
atgacctaccccatccccaaaccccgtgaaaaatcccgttggctcaatctgtctcaaggctcgctacccttggctttggcgcgttatctgccgcataggcggctcaaagtcgtgctgacccaagatgcggaacaggcgctacgccttcagacggcgtggcggtttttccgtccgcacgatacggcggtgttcctgccggactgggaaacgctgccttacgagcgtttttcgccgcatcaggatttggtgtcggagcgtttgtcggcgttgtggcagattaaaagcggcgcggcggacgtgttgttcgtgccggttgccacggcgatgcagaagctgccgcccgtgccgtttctggcggggcgcacgttttggctgaaaacgggacagactttggatataggccgtctgaaaagcgatttggtggatgcaggttataaccatgtttcccacgttgtcgcggcaggcgagtttgccgtgcgcggcggcattgtggatttgttcccgatgggcagcgaaatgccgtaccgcatcgatttgttcgacgatgaaatcgacagcatcaaaacctttgacaccgagacgcagcgcaccatctcccccgtttccgaaatccgtctgctgccggcgcacgagttccccaccgacaacgaggcgcaaaaaatcttccgcagccgttttcgcgaggaagtcgatggcaatccgaacgatgccgctgtgtacaaagccgtcagcaacggtcatttcggcgcgggcgtggaatactacctgccgctgttttttgaaaacgagttggaaacgctgtttgactatatcggcgaagatgcgctgtttgtctctttaggcgatgttcatgccgaggcaaaccgtttttggagcgatgtcaaatcgcgttacgcgatggcgcagggcgacgaaacctatccgcctttgcttccacagtatttgtatctctctgccgatgtgttcgcaggccgtctgaaaaactacggacaggtgctgcccgatgtttccggcaaggaatacaccctgcccgaccttgccgtcaaccgccaagcagatgagccgttgcaggcattgaaggattttcagacggcgtttgacggacggattttgctgtgcgccgaaagtttgggacggcgcgaaactatgctcggtttcttgcagcaaaacggtttgaaagccaaacccgtgtccgactggcagggctttttatcggcacacgagccgctgatgattactgttgcgccgttggcatacgggttcaaactgggcgggctgcaatctccgagccaacagcaagctgctcccgcctccgaaggagaaggcgatgcgattaccgaccaaaccgaattttccgcatccgcaacaaaccctctccctagccctctcccacaggagagggaacaaagtaccgccgccatttcagacagtctgaaaaccaaaagcagcctgtaccccatcgaaaatagtctgcacgggcaaatccaacagcaacctgccccctcccccgtgggggagggttggggagagggcaaagcagttgccgctcaaagtgccatcgccgtcatcaccgaatccgatctctaccaatacgtcgcccgttcgcgcatccacaaccgccgcaagaaacacgccgccgtttcagacgacctgttgcgcgaccttgccgaaatcaacatcggcgaccccgtcgtgcacgaggaacacggcatcggccgatatatgggcttgataacaatgaacttgggcggcgaaaccaacgaaatgatgttgctcgaatatgcgggcgaagcgcagctttatgtgcctgtttcgcaactgcatttaatcagccgctactccggtcaggcgcatgaaaacattgccctgcacaagctcggcagtggcgcgtggaacaaggcgaagcgcaaagccgccgaaaaggcgcgcgataccgccgccgagttgcttaacctttacgcccgacgtgccgcccaatcgggacacaagtttgaaatcaacgagttggattatcaggcgtttgccgacggcttcggctacgaagaaaccgaagaccaggccgccgccatcgccgccgtgattaaagatttgacgcaggcgaagccgatggaccgcctcgtgtgcggcgatgtcggtttcggcaaaaccgaagtcgccctgcgcgccgcatttgtggcggtgatgggtggcaaacaggtcgccgtactcgccccgaccacgcttctggtcgagcagcacgcgcaaaactttgccgaccgtttcgccgatttccctgtgaaagtcgccagcctttcgcgtttcaacaacagcaaagccactaaagccgcgctggaaggcatggcggacggcacggtcgacatcgttatcggcacgcacaaactggtgcaggacgacatcaaattcaaaaacttaggtttagtgattatcgacgaagaacaccgcttcggtgtccgccaaaaagagcagctcaaacgcctgcgcgccaatgtggacatcctcaccatgaccgccacgccgattccgcgtactttaagtatggcgttggaaggactgcgcgacttctcgctgattaccaccgcgcccagccgccgcctcgccgtcaaaacctttgtcaaaccctttagcgaaggcagcgtgcgcgaagccgtgttgcgcgaactcaaacgcggaggacaggtatttttcctgcacaatgaagtagatacgattgaaaatatgcgcgagcggctggaaaccctgctgcccgaagcccgcatcggcgtggcgcacggacaactgcgcgagcgcgagctggaacaagtcatgcgcgactttttgcagcaacgatttaacgtgttgctctgctccaccatcatcgaaaccggcatcgacatccccaacgccaacaccatcatcatcaaccgcgccgacaaattcgggctggcgcaactgcaccagcttcgcgggcgcgtcggccgcagccaccatcaagcctacgcctacctgctcacgcccgaatacatcaccaaagacgcagaaaaacgcctcgacgccatcgcggcggcagacgaactcggcgcaggtttcaccctcgccatgcaggatttggaaatccgcggcgcaggcgaaatcctcggcgaagggcagtccggtgaaatgatgcaggtcggcttcacgctctacaccgaaatgctcaaacaggccgtgcgcgacctcaaaaaaggccgccaacccgacctcgatgcaccgttgggcattaccaccgaaatcaaactgcacagccccgccctgctgcccgaaagctactgccccgacatccacgaacggctcgtcctctacaaacgcctcgccgtctgcgaaaccgtacagcaaatcaatgccatacacgaagaactcgtcgaccgcttcggactgcccgagcaacccgtcaaaacccttatcgaaagccaccacttacggcttatggcaaaagaattgggtatcaatgccattgatgcggccggcgaagcggtaacggtaacctttggcaaaaacaacaatattgatccaaccgaaatcatcctgctgattcagaacgacaaaaaataccgccttgccggcgccgataagctgcggtttaccgcagagatggaaaatatcgaggtcagaatcaacaccgtaaaaaacgttttaaaaaccttgcaaaacagatgcctgcccaaataa

SEQ ID NO: 61549 - DNA, 666 bp, Neisseria meningitidis
atggacgcatggtttgaagatacggcgatggggcggtatgttgcaaaattggaacaggatttcttcgggcggaatctggattcataccgtttttcgggaatgtgtgcggttcaggtgggcggtccgtggctgagcctgtctgaagatgttgtctgtgtgccgcgagatatgtcgatgtcggcggagaatatggctgtggcggatgtttctgcggatatgctgctttttccgcatacgcttgaaggcggtgttccttcgcaaatcctgtcggaagcgcaccggatattgaaaccgtgcggacgcttgatgctgacaggtttcaatccgtattcgctttggggattcggccgttggtttgacggcgaacgcctgccggaaaaacggttttgtctgccgctgcccgagttgaaaaggcagcttgcggatgtcggtttcgatattgaatttgggaaatttatggtgtatctgccgcccgtttcgtcgatcgggcaaatacgcttttggcggtttatggaaaaggcgggcgaccgttggtggccgcagtgtgccgcagtgtacggtttggttttggtcaaaagggcggcgggcgtaacgcccctgcccgcgtgggacgggtatttgggcggcaaagcccttgcggcgggtgcggcaagggttgcggattag

SEQ ID NO: 61550 - DNA, 729 bp, Neisseria meningitidis; identical to SEQ ID NO: 39209

SEQ ID NO: 61551 - DNA, 747 bp, Neisseria meningitidis; identical to SEQ ID NO: 47877

SEQ ID NO: 61552 - DNA, 300 bp, Neisseria meningitidis; identical to SEQ ID NO: 55276

SEQ ID NO: 61553 - DNA, 276 bp, Neisseria meningitidis; identical to SEQ ID NO: 53164

SEQ ID NO: 61554 - DNA, 780 bp, Neisseria meningitidis; identical to SEQ ID NO: 54674

SEQ ID NO: 61555 - DNA, 342 bp, Neisseria meningitidis
atgccgtccgaacctcttaaaggcttgccggaacaaaacgtcgtccggctgaccggcaagcatcccaacgacttggaagccgtcgtcggcaaatgtatggaaaccgacggaaagggcgcgccttcgggctgggcggcaaacggcgtgtgccataccttgtttgccaaactggtgggcaatatcgccgaagacggcggcaaactgacggattacctgatttcgcattccgccctgcaaccctatcaggcaggcaaaagcggctatgccgccgtgcagaacggacgctatgtgctggaaatcgacagcgaaggggcgttttatttccgccgccgccattattga

SEQ ID NO: 61556 - DNA, 1125 bp, Neisseria meningitidis
atgaccgcaaccactgcgtcttcagccaaaccttatctcaaaatccaaggtttggtgaaaaagtttggtgacaattacgctgtcgataacatcgacttggacatttatcaacacgaaatcttcgcccttttgggcagttccggcagcggaaaatctacactgctgcgtatgctggcgggtatggaaagtcccaatcagggaaaaattatccttgatggtcaggatattaccaaacttgcaccctatgatcgccccatcaatatgatgttccaaagttacgcgctttttccgcatatgaccgtagaacaaaacattgccttcggtctgaaacaggacaaaatgcctaaaggcgaaatcgccgcgcgcgtcgaagaaatgctccgcctggttcagatgaccaaatttgctaaacgcaaaccgcaccaattgtccggcggtcagcagcagcgcattgctttggcacgcagtctggcaaaacgtccgaaaattctactgctggatgagcccctcggtgcattggacaaaaaactgcgccaacaaacccagcttgagttggtcaatacgctggaacaagtcggcgtaacctgtattatggttacgcacgaccaagaagaggcgatgacgatggcgacccgcatcgccattatgtctgacggtcagttgcagcaagtcggcacacccagcgacgtgtacgactatcccaacagccgcttcactgccgagtttatcggcgaaaccaacatctttgacggtgtggtgattgaagatcatgccgactatgccgttatcgaatgcgaaggtttggaaaaccacgtccgcatcgatcacggtttgggtggtccgagcgagcaggacctttgggttagtattcgaccagaggatattgatttatataaagaaaaacccgaatatttgggcgactacaactgggcgaaaggcacggtaaaagaaatcgcctatttgggcagctttgccatataccatatcaaactcgccaacgggcgcgtcgtcaaaagccaagttcctgcaccttactggtatgtacgcaacattacaccgccaacttgggacgaaaccgtgtatatcagctggccggaaaaccagcctacgccactgttccgttga

SEQ ID NO: 61557 - DNA, 1062 bp, Neisseria meningitidis
atgtccaaaaatgcacaaaaaaccctacttgccgtgtgcagtttcgaggtgcagccaaaagacgggcgaatccaactgctgccatatggcgaatttcgcgcagtagacggtcgtccgactgatgtccctgcgtggtatctgaccgaagaaaacggtcatgatgtcgcgttgttggccaacagctcgcgcaatcagttggttgtcgattatgaacaccagacgctctacaaagagaaaaacggacaacctgcacctgccgccggttggatgcgttggctggagttcacgcctaaaggcatgtttgccgaagtggagtggacggacaaggcggctgcggcaattgccgcaaaagagtatcgctacatctctgctgtgttttcctatgacacaaagggatatgtaagcaaaatttttcacgcagcgctgacaaatttccccgcgttggacggtatggacgaggtgctggcggcagcgtcggcgcaaattttaaaaccggaaacggagcaaaaccctatgaaagagttgttacagcaactgttcggtctgcctgatgcgggcgaagaagaactgaaggcggcattgtccgcgctcgtggaagccaagccggaaggtgcggctttgtccgccgatgtattcgcgcagctggcggaaaaagacagccgcattgcggctttgtcggcgcaaaacggcacgcccgacctgacgcgatacgcgccggtgtcgctggtgcgcgacctgcaaaaccaagttgccgccctgaccgccgagcgcgaagccgacaaaggcggcgaactgattaccgccgcactgtctgctggcaagctgctgcccgcacaaaaagaatgggcggaaggcgtgctgaaacagccgggtggctttgcctttttgagcggctttatcgaaaacgcccagccggtcgctgcactggcaggctcgcaaacgggcggcaaagcacccgacgaacgcgtcgccgcactgactgcggaagaggcagccgcagcaaaaatgctgggcatgtccggcgaagaatttgtaaaaatcaaagaaagcgaaggtaagtaa

SEQ ID NO: 61558 - DNA, 123 bp, Neisseria meningitidis; identical to SEQ ID NO: 50914

SEQ ID NO: 61559 - DNA, 966 bp, Neisseria meningitidis
atgagctacacgcaactgacccaaggcgaacgataccacatccaatacctgtcccgccactgcaccgtcaccgaaatcgccaaacagcttaaccgccacaaaagcaccatcagccgcgaaatcagacggcaccgcacccaagggcagcaatacagcgccgaaaaagcccagcggcaaagccagactatcaaacagcgtaagcgacaaccctataagctcgattcgcagctgattcagcacatcgacacccttatccgccgcaaactcagtcccgaacaagtatgcgcctacctgtgcaaacaccaccagatcacgctccaccacagcaccatttaccgctaccttcgccaagacaaaagcaacggcagcacgttgtggcaacatctcagaatatgcagcaaaccctaccgcaaacgctacggcagcacatggaccagaggcaaagtacccaaccgtgtcggcatagaaaaccgacccgctatcgtcgaccagaaatcccgtatcggcgattgggaagccgacaccattgtcggcaaaggacagaaaagcgcattattgaccttggtcgaacgcgttacccgctacaccatcatctgcaaattggatagcctcaaagccgaagacactgcccgggcagctgttagggcattaaaggcacataaagacagggtgcacaccattaccatggataacggcaaagagttctaccaacacaccaaaataaccaaagcattgaaagcggagacttatttttgtcgcccttaccattcttgggagaaagggctgaatgagaacaccaacggactcatccggcaatacttccccaaacaaaccgatttccgtaacatcagtgatcgggagatacgcagggttcaagatgagttgaaccaccgaccaagaaaaacacttggctacgaaacgccaagtgttttattcttgaatctgttccaaccactaatacactag

SEQ ID NO: 61560 - DNA, 1389 bp, Neisseria meningitidis; identical to SEQ ID NO: 55340

SEQ ID NO: 61561 - DNA, 792 bp, Neisseria meningitidis
atgtccgaacaccgagtcaaccacgaacctgtcttcctgttggcttcctcgccatggcgcgaaagcagcctgcgggtcgaagcgttcagccgccgttacgggcgtgtggcacttttggcaagaagcgcgcgcaagcggcagagcgaattgcgcggcgtgctggtttccttcgtgcccgtcagtgcgtcgtggtacggcagtcaggaactcaaaaccctgcaccgtgccgaatgggtcggcggatggcggcagccgcagggcagggcgttgttcagcggtctgtatgtgaacgaactggtgttgaaactgaccgcgcgcgaagacccgatgcccgaactgtacgacgcgttggcaaaagtgatggaggcggtgtgtcgtgaagccaaccacattgccgatttgcgccgcttcgagtggaagctgctcaatgccttgggcgttgcccccgatttgcacgccgacggcacgggcggcgatattttggcggataaaacctaccggctgatgcccgaagaggcggtcatgcccgtatgccgggacacggacgcgctttcgcacgaggccggcgcaattgtcgaagggcaaagcctgatcgatttgcgcgaaggcagtttccgcaccgccgaaagcctgcaacaggcattgaaaatcacacggctttttatccgccacctgttgcccgaggggctgaaatcgcggcaggtgttggaacagatacggcagtttgaccgcaaagaaaccgcccgggaaaccgtcccgacttcggacggcacggcttcaaatgccgtctga

SEQ ID NO: 61562 - DNA, 1170 bp, Neisseria meningitidis
atgagcaaaaaactccatccgcaaacgctcgccatacgcggcggcaaagaacaaaccgaataccgcgaacacaatcaggcattgtttctgaccagcagcttcatgtgggacaacgcccaacacgctgccgatttgttttcaaaaaaaatcaaagggttcacttatacccgtaccgccaacccgaccacagccgcctttgaaaaacgcatcgccgctttggaaggtgcggaacgcgcggtcgccacttcgacgggtatgtctgcgattcaggcggcgtttttcacctttttgcaggcgggcgaccacgtggtttccagccgcagcctgttcggcacgaccgtcggctttatcaataacatcgttaccaaattcggcatcgaagtgagccacgtgtcgccgactgatataaacgaatggaaagccgccgtcaaagccaacaccaaactgctgtttttggaaacgccgtccaatcccttgggcgaagtggccgacttggaagccttggcggaattggcgcacggcatcggcgcgattttggtggtggacaacagcctgctgtcgcccgtcggctcgcagcctttgaaacacggcgcggatatttccgtttcctccgcgaccaaagccatagacggacacggacgcgtgatgggcggcgtgttggcgggttcggaagaattgatggcgcaggccgccgtttactgcaactcttgcgggctggcgatgtcgccgtttaatgcgtggcagttgttgagcggcgtggaaaccctgtcgctgcgtatggaaaaacagttcgacaacgccctgaaaatcgcacaatggctgcaagcgcagccgcaggttcaagccgtgtactacaccggattgcccgaccatccgcaggcggcgcttatccgcaaacagcaaaacggcggcggcatcgtcatcggctttgaagtcgccgaccaagcagccgcgtggaaagtcgtggacggcgtggaactcttttcccgtaccgccaacctcggcgacgtgcgctcgaccatcacccatccgtggacaaccacgcacggcaggatgcagcccgaagaaaaactcgccgccaacatccgccccggattggtgcgcctgtcggtcggtttggaatatgttggcgatttgattgacgatttgaaacaggcactcgcacgctga

SEQ ID NO: 61563 - DNA, 468 bp, Neisseria meningitidis; identical to SEQ ID NO: 40006

SEQ ID NO: 61564 - DNA, 798 bp, Neisseria meningitidis
atgctgaaacaacgggtgataactgctatgtggctgctgccgctgatgctgggcatgctgttttacgcgccgcaatggttgtgggctgcattttgcggactgattgccctgattgccttgtgggaatatgcccgtatgagcggtttgtgcaaaattaaaaccaaccattacctcgccgcaaccttggttttcggcgtggttgcctatgcgggcggctggatgctgcctaatttggtttggtatgttgttttggcattttggctcgccatcatgcctttatggttgagattcaaatggaggctcaacggcggttggcaggtttatgccgtcggttggcttctggtcatgccgttttggttcgcgctcgtatccctgcgcccgcatcccgatgatgccctgccgctgctcgccgtgataggtctggtctgggttgccgacgtttgcgcgtatttcagcggcaaggcgttcggtaaacacaaaatcgcaccggcaatcagccctggcaaaagctgggaaggcgcaatcggcggcgcggtttgcgtggccgtgtacatgaccgccgtacgaagtgccggctggctggcattcgatacaggctggttcgataccgtgttaatcggtttggtgttgaccgttgtcagcgtatgcggcgaccttttggaaagctggctcaagcgcgcggcaggcatcaaagacagcagcaacctgctgcccggacacggcggcgtgttcgaccgtaccgacagcctgattgccgttatcagcgtctatgcggcgatgatgtcggttttaaattga

SEQ ID NO: 61565 - DNA, 888 bp, Neisseria meningitidis
atgtacacaggacgttttgcccccagcccgaccgggctgctccacatcggctcgctgctgaccgccgtcgcttcctatgccgatgcacgctcaaacggcggcaaatggctggtccgcatggaagacctcgatccgccgcgcgaaatgccgggggcggcaagccatatcctgcacacgcttgaggcattcggattcgagtgggacggagaagtcgcctatcagagccgccgttacgccctgtatgaagaaacactatgccgcctgaaaaccgccggactggtctatccctgccattgcagccgcaaagactggcagaccggggcaaggcggggcgcagacgggttcgtctataacggacgctgccgcaatccgcagcaacgccctgcactgcaaggcaaacagccggcgtggcgcatccgcgtccccgaccgcgacatcggcttttcagacggcatcgtcggcggttacgcccaaaacctcgcccgcgacatcggcgatttcgtcctgcttcgtgcagacggttactgggcataccaactcgccgtcgttgccgacgatgccgaacagggcgttacccacatcgtccgcggacaagacctgcttgtttctacgccgcgccaaatctatttgcagcagtgtttggacgttccgacaccgcaatatgcccacctgccgctgctgaccaacgcacaagggcagaaatggtcgaaacagacgctcgcacccgcattggatttaaaccgccgcgaacaactcctccgccaagtgttccgttacctcaacctgcccgaagcaccggaagccgaccgccctgccgaactgctcgactgggcggtggcacactgggatatgggcaaagtgccgaaacacgccattaccgccccctaa

SEQ ID NO: 61566 - DNA, 291 bp, Neisseria meningitidis; identical to SEQ ID NO: 60315

SEQ ID NO: 61567 - DNA, 1203 bp, Neisseria meningitidis; identical to SEQ ID NO: 55366

SEQ ID NO: 61568 - DNA, 432 bp, Neisseria meningitidis
atgggcagcaacgcatggctgttttgggcattggcatcggcaggcttcgcctcattgaccgctattttcgccaaaatgggcttgcagggcatagattcggatttcgctaccttcatccgcaccttggtcatcctcgccgctttgttattgtttttaacctacaccggcaaatggcagggcgtgaacggctttacggggcacaactggacattccttatcctatccggccttgctaccggcgcatcttggcttgcctacttcaaagccctgcaactgggtaacgcctcgcaagtcgcccccgtcgataaattcagcctggttctggtcgccctgatggcagtagtcttcctcaacgaacgccccagcacgcaggaatggataggcttggggctggtaacggcgggcgtgttggtgctggcgttgaaacgttaa

SEQ ID NO: 61569 - DNA, 600 bp, Neisseria meningitidis; identical to SEQ ID NO: 41967

SEQ ID NO: 61570 - DNA, 936 bp, Neisseria meningitidis
atgaacccgaaaaaactcgttatcgccagtcgcgaaagcctgcttgccatgtggcaggcaaagcatatccaaggccgtctgaaagccctgtatcccgattgcgaagtcgagattttgggcatgaccacgcgcggcgaccagattttggacaaaactttgtcaaaagtcggcggtaagggcttgtttgtcaaagagttggaacaggctttatatgacgggcgcgctgacttggccgtgcattcgattaaagatgtgccgatggatttgcctgaaggtttcgcgcttgcagccatcggcgaacgcgccaatccgtttgacgcgtttgtgtccaaccaatacgcgcgtttggaagaaatgcccaaaggcgtcgtcgtaggcacatccagcctgcgccgcgaagcccagttgcgtgcgcgctatccgcatttgcttatcaaacctttgcgcggcaatgtgcaaacccgtttgtctaaactcgataacggcgaatacgacgcaattatcttggctgccgccggtttgcagcgtctggaattggacggacgcatccgcatgattttgtcggaatccgacagcctgcctgccgccggacaaggcgcattgggtatcgaaattgccgcgcaccgcgaagatttgtatgaggttttaaaaccgctaaaccacgataccacacacgcctgcgttacggccgaacgcgctttggcgcgcgctttgggcggaagctgccaagtgcctttggccgcatattgcacggaagaaaacggcttgctgaccttgcgcggactggtcggacaccccgacggttcggtcattttgcaggcggacgcgcaagcccctgccgaatatgccgacgcgctcggacgcgctgtcgctaagaaattggcggacgacggtgcgcgggaattgattggagcagtattgaatacggaaaattga

SEQ ID NO: 61571 - DNA, 1356 bp, Neisseria meningitidis
atgaaagcacccgaactcttattgcccgccggcggattggaaagaatgcgcgccgcctacgattacggcgcagatgccgtttatgccggcagcccgcgttactccctgcgcgcccgcaacaacgaatttgccaaactcgacatcctcgagcaaggcattaaagaagcgcacgaacgcaacaaaaaattcttccttaccgtcaatacgctgccgcacaattccaaactcaaaacctttgtttccgatatggagcccttgattgcgatgaagcccgacgcgctgattatggcggatccgggtttgattatgaccgtgcgcgaaaaatggccggaaatgccgatccacttgtccgtacaggcaaacaccaccaactactggggcgtaaaattctggcaaaacatcggcgtcgaacgcattattctgtcacgcgaattgagtatggaagaaatcgccgaaatccgccaacaatgccccgacatcgaactcgaagtcttcatccacggcgcattgtgcatcgcctactccggccgctgcctgttgtcgggctatttcaaccaccgcgatcccaaccaaggcacctgcaccaactcctgccgttgggactacaaagtccacaacgctacggaaagcgatgcgggcgatgcccagcttctgcaaggtttcaactttgaaaaagcccaagaagaagccaaccaaaactttgaaggcatcaacggtcaaaaacgccatccctacgccgacaaggttttcctgattgaagaatccaaccgtccgggcgagatgatgccgattatggaagacgaacacggcacctacatcatgaactccaaagaccttcgtggcattgaagtggttgagaaactcgccaaaatcggcgtggacagcctcaaagtcgaaggccgcaccaagtcgctctattatgtcgcacgcgtcgcccaatcctaccgcaaagcgattgacgatgccgtcgcaggccgtccgtttgattacagcctgttgagcgaactcgaaggccttgccaaccgcggctacaccagcggcttcctcgaacgccaccacactcaggattatcaaaactacctgaccggccattccaccgccaaacaaagccaatacgtcggacacgttaccgaaatcgatgaaaacggctgggcaacagtggaagtcaaaaaccgctttgccgtcggcgattcgctcgaaatcatccacccgaacggcaaccaaaccatcaaattggaacaaatgacccgcaaaggccaacctgtcgatgtcgcacccggcaacggcattcaggtcaaaatccccgatatgcagggcaaagaaaaagccctcatcgcacgcgtattgaacccctga

SEQ ID NO: 61572 - DNA, 1008 bp, Neisseria meningitidis
atgagcaccttcttccagcaaacctcccaagccatgattgccaaacacatcgaccgcttccctctattgaagttggatcaagtgattgattggcagccaatcgaacaatacctgaaccgtcaaaaaacccgttaccttagagaccaccgcggccgtcccgcctatcccctgttgtccatgttcaaagccgtcctgctcggacaatggcacagcctctccgatcccgaactcgaacacagcctcatcacccgcatcgatttcaacctgttttgccgttttgacgaactgagcatccccgattacagcaccttatgccgctaccgcaactggttggcgcaagacaacaccctgtccgaattattggaactgatcaaccgccaactgaccgaaaaaggcttaaaagtagagaaagcatccgccgccgtcattgatgccaccattattcagactgccggcagcaaacagcgccaggccatagaagtcgacgaggaaggacaagtcagcggtcaaaccacactgagtaaggacaaaaatgcccgttggacaaagaaaaacggcctctacaaactcggttacaaacaacatacccgtaccgatgcggaaggctatatcgagaaactgcacatcacccccgccaatgcccatgagtgcaaacacctgtcgcctttgctggaaggactgcccaaaggtacgaccgtctatgccgacaaaggctacgacagtgcggaaaaccggcaacatctggaagaacatcagttgttagacggcattatgcgcaaagcctgccgcaaccggccgctgtcggaagtgcaaaccaaacgcaaccggtatttgtcgaagacccgttatgtggtcgaacaaagcttcggtacgctgcaccgtaaattccgctatgcgcgggcagcctatttcgggctgctcaaagtgagtgcgcaaagccacctgaaggcgatgtgtttgaacctgttgaaagccgccaacaggctaagtgcgcccgctgccgcctaa

SEQ ID NO: 61573 - DNA, 1503 bp, Neisseria meningitidis
atggcaaaagtactcatcgtacccgtatctgccggactggacgcctccgccgccgcacaagcctttgcaaaagcactggacgcacaaattttccaagccgttgacgcaaccgccgaaaccctgctcgcgcaaggcaaaagcgacgactggttcgacgcactggtcggcaaagttgccgcactcgatgccgccaacctcgtcatcgaaggcatcgcgcccgatgccgacaaaatctacctcgcaggcaaaaacgtcgaactggcattgtcccttgacgcggcagccgtcttcgccgtccgttccgacaacgccgatgccgacgaactggcaaatcggctgaaccttgccaaacagttcttcgccgccgcgccgggcgtattggaaggttttgtcgtggacggcgcggcagcctccgttgccgaagcggcagccgaaaaaaccggcctgaccttcttcggttcgagcgacgcgctgaaagacgtatccgtattggcaggccgcgaagcaaaacgcctgtcgccggcgcaattccgctacaacctgatcgacttcgcccgccaagccgacaaacgcatcgtcctgcctgagggcgcagaaccccgcaccgtccaagccgccgccatctgccacgaaaaaggcattgcccgctgcgtcctgcttgccaaacgcgaagaagtcgaagccgttgccaaagaacgcggcatcagcctgcccgactctttggaaatcatcgatcccgcctcattggtcgaacaatacgtcgagccgatgtgcgaactgcgcaaatccaaaggcctgacacccgaagacgcgcgcaagcaactgcaagacaccgtggtactcggtacgatgatgatggcgcaaaatgatgtggacggtttggtatccggtgcggttcacaccaccgccaacaccatccgccccgctttgcaactgattaaaaccgcaccgggcgcaagcctcgtgtccagcgtattctttatgctgctgcccaaccaagtcctcgtcttcggcgactgcgcggttaatccgaacccgaccgcgcaacagcttgccgacatcgccatccagtctgccgattccgcaaaagctttcggcatcgacccgaaagtggcgatgatttcctactccaccgtcaactccggcagcggccccgatgtcgataccgtcatcgaagcaaccaaacttgcccgggaaaaacgccccgacctcgccatcgacggcccgctgcaatatgatgcggcaaccgtgccgggtgtgggcaaatccaaagctccgggcagcccggtggcaggacaggcaaccgttttggtcttccccgacctgaacaccggcaactgcacctataaagccgtccaacgcaacgccaacgtcttaagcgtcggcccgctgctgcaaggcctgcgtaaaccggtcaacgacctctcccgcggcgcactggtagaagatatcgtgtttaccatcgccctgactgccgttcaggcaaaacaaatggaaggctga

SEQ ID NO: 61574 - DNA, 1539 bp, Neisseria meningitidis
atgaatatgctgggagctttggcaaaagtcggcagcctgacgatggtgtcgcgcgttttgggatttgtgcgcgatacggtcattgcgcgggcattcggcgcgggtatggcgacggatgcgttttttgtcgcgttcaaactgcccaacctgctgcgccgcgtgtttgcggagggggcgtttgcccaagcgtttgtgccgattttggcggaatataaggaaacgcgttctaaagaggcggcggaggcttttatccgccatgtggcggggatgctgtcgtttgtgctggtcatcgttaccgcgctgggcatactcgccgcgccttgggtgatttatgtttccgcacccggctttgcccaagacgcggacaagttccaactttccatcgatttgctgcggattacgtttccttatatcctattgatttcactttcctcttttgtcggctcggtactcaattcctatcataagttcggcattcccgcgtttacgcccacattcctgaacgtgtcgtttatcgtattcgcgctgtttttcgtgccgtatttcgatccgcccgttaccgctctggcatgggcggtttttgtcggcggtattttgcaactcggcttccaactgccctggctggcgaaactgggctttttgaaactgcccaaactgaatttcaaagatgcggcggtcaaccgcgtgatgaaacagatggcgccggcgattttgggcgtgagcgtggcgcaggtttctttggtgatcaacacgattttcgcgtcttatctgcaatcgggcagcgtttcatggatgtattacgccgaccgcatgatggaactgcccggcggcgtgctgggggcggcactcggtacgattttgctgccgactttgtccaaacactcggcaaaccaagatacggaacagttttccgccctgctcgactggggtttgcgcctgtgtatgctgctgacgctgccggcggcggtcggactggcggtgttgtcgttcccgctggtggcgacgctgtttatgtaccgcgaattcacgctgtttgacgcgcaaatgacgcaacacgcgctgattgcctattctttcggtttaatcggtttaatcatgattaaagtgttggcgcccggcttttatgcgcggcaaaacatcaaaacgcccgtcaaaatcgccatcttcacgctcatttgcacgcagttgatgaaccttgcctttatcggcccactgaaacacgtcggactttcgcttgccatcggtctgggcgcgtgtatcaatgccggattgttgttttacctgttgcgcaaacatggtatttaccggcccggcaagggttgggcggcgttcttggcaaaaatgctgctcgcgctcgccgtgatgggaggcggcctgtatgccgcccaaatctggctgccgttcgactggacacacaccggcggaatgcaaaaggccgcccggctcttcatcctgattgtcatcggaggctgcctgtatttcgcatcactggctgcactgggcttccgtccgcgccatttcaaacgggtggaaagctga

SEQ ID NO: 61575 - DNA, 390 bp, Neisseria meningitidis; identical to SEQ ID NO: 38387

SEQ ID NO: 61576 - DNA, 267 bp, Neisseria meningitidis; identical to SEQ ID NO: 43047

SEQ ID NO: 61577 - DNA, 1092 bp, Neisseria meningitidis; identical to SEQ ID NO: 55472

SEQ ID NO: 61578 - DNA, 465 bp, Neisseria meningitidis; identical to SEQ ID NO: 55136

SEQ ID NO: 61579 - DNA, 1479 bp, Neisseria meningitidis
atgttcagcaagttaacccctttggctgaaaccggcatcccgaccctgtcgtgtgcaaacgcggcagggcgtttgttgcattcagacagccgccaaatcaaacaaggcgatattttcgttgcctgtccgggcgaatatgccgacggacgcagttatatccccgccgccgttgccaacggtgcggcttttgttttttgggacgacgatggcaaattcgcgtggaatcccgaatggaaagtccccaatcaaggcatcaaagatttgaaacaccgtgccggcatattggcggcgcaagtttacggcaacgtttcagacggtctcaaagtctggggcgtaaccggaaccaacggcaaaacctccatcacgcaatggctggcgcaagctgccgatttgttgggcgaaaaaaccgccattgtcggcacggtcggcaacggcttttggggtgcattggaagaaaccacgcataccacacccgcccccgtcgatgtccaaaccctgctctaccgtttccgtcaacaaggcgcaacagtcgccgcgatggaagtctccagccacgggcttgaccagtcgcgcgtcaacggcgtgtcattccgcagcgcaatctttaccaacctcacccgcgaccacctcgactaccacggcacgatggaagcctacggtgccatcaagtcgcgcctgttttactggcacggcttgaaacacgccgttatcaatgtagatgacgaatacggcgcggaactcgcaggtcgtctgaaaaaagactgccccgatttggccgtttacagttacggcttcagcgaacacgccgacatccgcattaccgactttaccgcctcttcagacggcatagaagccgtattccaaaccccgtggggcgaagggaaatgccacacgcgcctgctcggacggttcaacgcgcaaaatctcgccgcctgtgtcgctttgctttgcgccaacggctatccgctggataaggtattggatgtactggaaaaaatccgtcctgcttcaggccgtatggattgtattatgaacagcggcaaacctttggttgttgtcgattatgcccacacgcccgacgcattggaaaaagcactcgccaccttgcaggaaatcaaaccgcagggtgcggctttgtggtgcgtattcggttgcggcggtaaccgcgatcgcggcaaacgcccgctgatgggcgcggcagccgtacagggcgcggataaagtcgtcgtcaccagcgacaacccgcgcttggaaaatccgcacgacatcatcaacgacatcctgcctgccgttcccgcgcccgaatgcgtcgaagccgaccgtgccgccgccatccgttatgcggttgaacaagccgccgcaaacgacatcatcctgattgccggcaaagggcatgaaaactatcaggatgtacaaggcgtgaagcaccgtttttccgatcttgaaatcgtcggacaggctttgttaactcgtaaataa

SEQ ID NO: 61580 - DNA, 936 bp, Neisseria meningitidis
atggggcacaatatgatgaccacccaaaaatggtatgaacatattactaatgtaatcataggcaatactgctaatttcaatagcggttgccccgaatctatagattatgtagatgaaaaaaaaggcgtgccgcttgcagcgatgaaatacattttaatgtacactgaagctgcggcttcccatgcctatctatttgaacatgatcttaagaaattcaagcaatatgcttatgttgcaggaaagttgggtattttgcagagtgtagatgatgaagaccccgaacccttcttctttccctgcgacatgctcaacattcaagatccgatgtttctgatgctgatgagcgacagcccgcagctgcgcgagtttttggtgcgcaatatcgacaacatcgccaacgatacagaagccttcgtaaaccgatacgacctcaaccgtcatatgatttacaatactctgctgatggtggagggtaagcagcttgatcggttgaaacaacgtagcgagaaagtcttggcgcatcccacccctagcaaatggctgcaaaagcggttgtacgattaccgcttcttcctcgctttcgccgaacaggatgccgaggcgatgaaggccgccttagagccgctttttgataaaaaaaccgcgcgtatggctgccaaagaaacattgtcctatttcgatttctacctgcagccgcaaatcgttacctacgccaaaatcgcatccatgcacggtttcgatttgggcatagaccacgaaatcgcgccgagggatttgactgtttacgatccgctgccggcagacgaatatcaagacatcttcgattttatgaaacagtatgacttgtcttacccgtatgaatatctgcaggattggatagattactatacgttcaaaaccgataagctggtatttggtaacgcgaagcgagagtga

SEQ ID NO: 61581 - DNA, 771 bp, Neisseria meningitidis; identical to SEQ ID NO: 55435

SEQ ID NO: 61582 - DNA, 2889 bp, Neisseria meningitidis
atgagtaacacaaccgtagaacaatttgccgccgagctgaaacgccccgtcgaagacctgttgaaacagttgaaagaagccggcgtcagcaaaaacagcggcagcgattccctgacgctggacgacaaacagcttctgaacgcctacctgaccaagaaaaacggcagcaacggcggcaccatcagcatccgccgcaccaaaaccgaagtcagcaccgttgacggcgtaaaagtcgaaacacgcaaacgcggacgcactgtcaacattccttctgccgaagaattggcagcacaggtaaaagccgcccaaacccaagccgcacctgtccggccggagcagacggcagaagacgcggcaaaagcccgagccgaagctgccgcacgtgcagaagcccgtgccaaggcagaagcggaagcggcaaaactgaaagcggcaaaagcaggcaacaaagccaaacctgccgcgcagaaacccaccgaagcaaaagccgaaaccgcacctgttgcggcggaaaccaaacccgccgaagaaagcaaagcggaaaaagcccaagccgacaaaatgccgtctaaaaaacccgccgagcccaaagaaaaagccgccaagccgaaacacgagcgaaacggcaaaggcaaagatgccaaaaaaccggcgaaacctgccgcacctgccgtgccgcaacccgtggtcagcgcagaagaacaggcgcaacgcgatgaagaagcacgccgtgccgccgcacttcgcgcccaccaggaagccctgttgaaagagaaacaggaacgtcaggcacgccgcgaagccatgaaacaacaggcagaacaacaggcaaaaaccgcacaggaagccaaaaccggcagacagcgtcccgccaaacctgccgagaaaccgcaggcagccgcgccggccgtcgaaaacaagcctgtcaatccggcaaaagcgaaaaaagaagaccgccgcaaccgcgatgacgaaggtcaaggccgcaacgccaaaggcaaaggcggaaaaggcgggcgcgaccgcaacaatgcacgcaacggcgacgacgagcgcgtacgcggcagcaaaaaaggcaaaaaactcaaactcgagccgaatcaacacgccttccaagcaccgaccgaacccgtcgttcatgaagttttggttcccgaaaccattaccgttgccgatttggcgcacaaaatggcggtcaaaggcgtggaagtggtcaaagccctgatgaagatgggcatgatggttaccatcaaccaatccatcgaccaagacaccgccctgattgtggtggaagaactcggccacatcggcaaacctgccgcagccgacgaccctgaagcattcttggacgagggcgcggaagcagtggaagccgaagcattgccgcgtccgcccgtcgttaccgtgatgggccacgtcgaccacggcaaaacctcgctgctggactacatccgccgtaccaaagtggtacagggcgaagcgggcggcattacgcagcacatcggcgcgtaccacgttgaaacccctcgcggcgtgattaccttcttggacaccccgggccacgaagcctttaccgctatgcgcgcacgcggtgcgaaagcaaccgacatcgtgattcttgtggtcgccgccgacgacggcgtgatgccgcaaaccatcgaagcgattgcccacgccaaagcggcaggcgtaccgatggtggttgccgtcaacaaaatcgataaagaagccgccaacccagagcgtatccgccaagagctgaccgcacacgaagtcgtgcctgacgaatggggcggcgatgtacagtttatcgacgtttccgctaaaaaaggcctgaacatcgatgcattgctcgaggcagtcttgctcgaagccgaagttttggaactgaccgcacctgtcgatgcgcccgccaaaggcatcatcgtcgaggcgcgcttggacaaaggccgcggcgcggttgccacattgctggttcaaagcggcacgctgaaaaaaggcgatatgctgctggccggtacggcattcggcaaaatccgcgcgatggtcgatgaaaacggcaaatccattaccgaagccggtccgtccatccccgtcgaaatcctcggcttgtccgacgtaccgaatgcgggtgaagacgcgatggtattggcggacgagaaaaaagcgcgcgaaatcgccctcttccgccaaggcaaataccgcgacgtgcgccttgccaaacagcaggcggcgaagctggaaaatatgttcaacaatatgggcgaaacccaggcccaatctttgtcggtcatcatcaaggcagacgtgcagggctcttacgaggctttggcgggcagcctgaaaaaactgtccacagacgaagtgaaagtgaacgtgttgcacagcggcgtgggcggcattaccgaatcggatgtcaacttggccatcgcttcgggcgcattcattatcggctttaacgtgcgtgcagatgcctcttcgcgcaaacttgccgaaaatgaaaacgtggaaatccgctactacaacatcatctacgatgccatcgacgacgtgaaggcggcgatgagcggcatgctttctccggaagagaaagaacagattaccggtacggtcgaaatccgtcaggtcatctccgtttccaaggtcggcaacattgcaggctgtatggttaccgacggtgtggtcaaacgcgattcccatgcccgcctcatccgcaacaacgtggttatccataccggcgagctgtcttctttgaaacgctacaaagacgatgttaaagaagtccgtatgggcttcgagtgcggcctgatgattaaaggcttcaatgaaattatggaaggcgaccaactggaatgcttcgacatcgtcgaagttgcacgcaccctgtga

SEQ ID NO: 61583 - DNA, 648 bp, Neisseria meningitidis; identical to SEQ ID NO: 38905

SEQ ID NO: 61584 - DNA, 1500 bp, Neisseria meningitidis
gtgttcaaaaaataccaatacctcgctttggcagcactgtgtgccgcctcgctggcaggctgcgacaaagccggcagctttttcggtgcggacaaaaaagaagcatctttcgtagaacgcatcgaacacaccaaagacgacggcagcgtcagtatgctgctgcccgactttgtccaactggttcaaagcgaaggcccggcagtcgtcaatattcaggcagcccccgccccgcgcacccaaaacggcagcggcaatgccgaaaccgattccgacccgcttgccgacagcgacccgttctacgaatttttcaaacgcctcgtcccgaatatgcccgaaatcccccaagaagaagcagatgacggcggattgaacttcggttcgggcttcatcatcagcaaagacggctatattctgaccaatacgcacgtcgttaccggcatgggcagtatcaaagtcctgctcaacgacaagcgcgaatataccgccaaactcatcggttcggatgtccaatccgatgtcgcccttctgaaaatcgacgcaacggaagagctgcccgtcgtcaaaatcggcaatcccaaagatttgaaaccgggcgaatgggtcgccgccatcggcgcgcccttcggcttcgacaacagcgtgaccgccggcatcgtgtccgccaaaggcagaagcctgcccaacgaaagctacacacccttcatccaaaccgacgttgccatcaatccgggcaactccggcggcccgctgttcaacctgaaaggacaggtcgtcggcatcaactcgcaaatatacagccgcagcggcggattcatgggcatttccttcgccatcccgattgacgttgccatgaatgtcgccgaacagctgaaaaacaccggcaaagtccaacgcggacaactgggcgtgattattcaagaagtatcctacggtttggcacaatcgttcggtttggacaaagccggcggcgcactgattgccaaaatcctgcccggcagccccgcagaacgtgccggcctgcaggcgggcgacatcgtcctcagcctcgacggcggagaaatacgttcttccggcgaccttcccgttatggtcggcgccattacgccgggaaaagaagtcagcctcggcgtatggcgcaaaggtaaggaaatcaccgttgccgtcaaactgggcaatgcttccgaacaaaccggttcctcgtccgagccggacaaagccccttatgccgaacaccaatccggtacgttctcggtcgaatccgcaggcattacccttcagacacataccgacagcagcggcggacggcttgtcgtcgtgcgggtttcgggggcggcagaacgcgcaggcttgaggcgcggcgacgaaatccttgccgtcgggcaagtccccgtcaatgacgaagacggtttccgcaaagctatggacaaggcaggcaaaaacgtccccctgctggtcatgcgccgtggcaacacgctgttcatcgcattaaacctgcaataa

SEQ ID NO: 61585 - DNA, 534 bp, Neisseria meningitidis
atggcagacttcaaccaaatcctgacccccggcgatgtggacggcggcatcatcaacgtcgtcaacgaaatccccgccggcagcaaccacaaaatcgagtggaaccgcaaactcgccgcattccaactcgaccgcgtcgaacccgccatcttcgccaaaccgaccaactacggcttcattccccaaactttggacgaagacggcgacgaattggacgtgctgctcgttaccgaacaacctttggcaaccggcgtattcttggaagcgcgcgttatcggcgtgatgaaattcgttgacgacggcgaagtggacgacaaaatcgtctgcgttcctgccgacgaccgcaacaacggcaacgcctacaaaactttgtccgatttgccgcaacagctgatcaaacaaatcgagttccacttcaaccattacaaagacctgaaaaaagcaggtacgaccaaagtcgaatcgtggggcgatgcggaagaagcgaaaaaagtcatcaaagaatccatcgaacgttggaacaaacaggcataa

SEQ ID NO: 61586 - DNA, 513 bp, Neisseria meningitidis; identical to SEQ ID NO: 44991

SEQ ID NO: 61587 - DNA, 1395 bp, Neisseria meningitidis
atgaacaaacaacccctttccctcgccgtcgtcgggcataccaacaccggcaaaacctcgctcctgcgtacccttttgcgcgacagcggtttcggcgaagtcagaaacgccccatcgaccacgcgtcatgtcgaagaagccgccatcagcgacggcgcagacacgctggttttcctgtacgacacgcccggactcgaagacgcgggcggcgtgctggaatggctggaaaaccatacggacaatcgttcagacggcatcgaacggctgcaacagtttctcggcagccacggcgcgcaccatgatttcaatcaggaagccaaagtcttacggcaagtcttgcaaagcgatatggcaatgtacgtcatcgacgcgcgcgaacccgttctcgacaaatatcgggatgaattgattatcctttcatggtgcgccaaaccggttatgcccgtgttcaactttaccggcggacagcctcccgaatcgtggacaaccatgctggcgaggagaaacctgcacgttttcgcagggttcgacaccgtcgcctttgattttgaaggcgaactacgcctgtgggaaaacctcgccaccatgttgcccgaacgcagcacacttgaccgcctgacagccatgcgccggcgcgaatggcagcggctggacggcgaagcgcgccgcgaaatcgccgatttcctgctcgatgccgccgccttcaggcaggaagtggacgaaaacgaggataccgccaccgtgctgcaaaccatgcaggcggaaatacgccaactcgaacggcagatgcagcagcggctgtttgccctctaccgtttctaccacagcgaaatcgacggcggcgactggatgccgcaagccttccgccaagacccgttcgacagcgaattgctcaaacaatacggcatccgcaccggcacgggcgcggcaaccggcgcactcatcggcttggggctggacatcgccacactcggcggctcgctcggattgggtacggcaatcggcggctttttgggcggcatcctgcccaatacccgcaccatttccgacaaactctccggccgccaaaccttgcacaccgaccctgaaaccctgaccctgctcgccgcccgcgccctcgatttgctccacgtcctgcaaacgcgcggacacgcggcacagtcggatatcgagctgcacagccgcaaagccccgtgggacgccaccagactcccgcccgaactcaacaaagcccgcagtcattggaaatggtcgtcgctcaatacgcaccgccccgaaaccagccgcgccgaacgcgccggatatgtggagaaacttcaaatccgcctgtcgggaaaatatagtgaattaaatttaaatcaggacaaggcggcgagccgcagacagtacaaatag

SEQ ID NO: 61588 - DNA, 552 bp, Neisseria meningitidis; identical to SEQ ID NO: 54657

SEQ ID NO: 61589 - DNA, 1446 bp, Neisseria meningitidis
atgaactggtctgatttgaatttaatgcccgccatgcccgaaatcgtgctgcttgcgctgctggtgttattgttgctggcggacttgtgggtcagtgatgacaaacgccggtggacgcattacggcgcgttggcaacggtggcggttacggctgtggtgcagttggcggtgtgggaacagggcagcacgtcttcgttcaacgggatgtatattgcagacggtatgtcgcgtttggcaaaaatggttttatatgccttgatgtttaccctgtttgtctatgccaagccctacaaccaagtgcgcggtattttcaaaggcgagttttacaccctgtcgctgtttgccctcttgggtatgggcgtgatggtgagcgcggggcattttttaactgcctatatcggtttggaactcttgtcgcttgccctttacgccctgattgccctgcgccgcgattccggctttgccgccgaagccgccttgaaatattttgttctgggtgcgctggcatccggcctgctgctctacggtatttctatggtttacggcgcaaccggttcgctggaatttgccggcgtgctcgcctcttccttcaatgaagaagcaaacgaatggctgttgaaactgggtctggtgtttatcgtcgtcgccgttgcgttcaaactcggcgcggtgccgttccatatgtgggtgcccgacgtgtatcacggcgcgcccacttctgttaccgccctggtcggcactgccccgaaaatcgccgccgttgttttcgctttccgcatcctcgttaccgggttgggaaccgtgcatcatgactggtctctgatgtttgccctgcttgccgccgcctcgctgctggtcggcaaccttgccgccatcatgcagaccaatatcaaacgtatgctcgcctattccaccgtatcgcatatggggtttatcctgctggcgtttatggcgggcgcggtcggctttgcggcgggtctctattacgccattacctacgcgctgatggcggcggcagggttcggtgtgttgatggtgttgtcggacggggacaacgagtgcgaaaacatcagcgatttggcagggttgaaccaacaccgcgtatggcttgcctttttgatgctgctggttatgttctctatggcgggcattccgccgctgatgggcttttacgccaaattcggcgtgattatggcactcttaaaacaaggctatgtttggttgtccgtatttgccgtcgtgatgtcgctgattggcgcgttctactacctgcgcgtggtcaaagtcatgtattttgacgaatccggccgcgcccgtcccgccgccggcggcaacaatgccgcaaaattcctcttaagcatcaacgcgctgctgttggtgctgtggggcattatgccgcaaaccgttatcgactggtgcgccaaggcgttggagaacacgctgtaa

SEQ ID NO: 61590 - DNA, 573 bp, Neisseria meningitidis
atgacttatgaaattcaagcttctgttcgtgaagcacaaggcactggtgcgagccgccgcctgcgtcgcgaaggccaaatccccggcattctgtacggtgaaggtcaagagcctgttgcaatcgctgtggatcacaaaaccgtattctacgcattggaaaaagaatctttccatactgcgttgattaagttgtctctgaacggtgaaaccaaagacgttatcgtccgcgatttccaaatgcacccgttccgccgcgaagttcaacacatcgacttccaagctgtgaaagccgatcaacttgtacgcatccgtgttcccctgcacatcgttaacgctgaaaattcccaagcggtcaaactgcaaggcggccgcgtatctctgttaaacacttctgttgaagtagttgctttgcctgccaacatccctgctttcttggatttggattgtgccgaagtggttgccggcgacattctgcacttgtcagacatcaaactgcctgaaggtgtagaaagcgtttccctgaaacgtaacgaaaatctggctgttgctaccgttaccggtaagaaacgctaa

SEQ ID NO: 61591 - DNA, 885 bp, Neisseria meningitidis
atgacttctattattttagaactccaaagcctagctgccaatccaaatagtgatgtagaagagttagtgagtaaaacattaatggttgcaagaaaattaaaaattaatgaattaactgaatggtgtaataatgaattacaaggttattcatcaaaaaatttaccaaaatatagaatattttatggagagttaaaagcttttaacccttatcgtggcgatgttccatttatgcttcccgatgaattgagagaacgagtaacaagagttgaatatacctcatcaattagcgaaataagaaacttactaaaaacaaaaaataataattttatacgaattctatctagtaaagaaaaacagtttttaatgaatttacaagatactccatttccacttgaacctaaaataattatttatccaattaacttaatgaatattcaatcaaaagtaagacaactaattttagcttgggcattacgactggaagaggaaggtattttaggagacggtatccaatttacaaaatcaaaacaggagaaagcaatgtcaaaccaattcaatattcagaatatgcaagggtttattggggatatttttggcggtaatgttcagcaaaatattcaagacggtattcatattgaaaaagaaaatttcaataaactggctaactttttagcaaaaaacgggattccatctgccgaattagaagatttacgaaatgcactgatagaagatggtcagcccacagataaaaaattcggctcaaaagtaagtgcatggattggcaatattattacaaaggcttctaccggtgcaattgatgtttcagtaggtactattgcaggaatattaactaatgcgatttcaaaatattatggcttaatgtaa

SEQ ID NO: 61592 - DNA, 564 bp, Neisseria meningitidis
atgcgccatttggaaaacaacggctatgcgaacgttgccggattggagcgcatcctcgccgtcaaaaccgacaattacaaagaaaaagaaaacctgctccatgaaattttcagcaaaagcaggataggcgataccgaattgttcgccgtggacgaaaaccttgtaaaacgtttgtttttatcgcttcgcggcgaaatcgtgttcccgaaaaacgaaacggcggaatcggaatttgaaaaaagcgtccacgaacgcaggcaggaagggaatgccgaatccggccgcaaacaactgcttgatttggtacggcgcggacaccgggaatacccttacgcgctgccccggcttttggcgggcgcggcatcctacaagccgaaaaaatcgaaaatccgcctttttaaagaagcatatttccgcaaaaacggcaggaggctgacggacgaaattgcagacggcatccatatttacacctgtttttcgcgggcggatttggaaaaagcctattccgaatatttggaacttttcaaatccgaatcggatgccgaaagcagaaaaccacggtaa

SEQ ID NO: 61593 - DNA, 1635 bp, Neisseria meningitidis; identical to SEQ ID NO: 38936

SEQ ID NO: 61594 - DNA, 639 bp, Neisseria meningitidis; identical to SEQ ID NO: 36502

SEQ ID NO: 61595 - DNA, 1866 bp, Neisseria meningitidis
atgatagaaaaactgactttcggactgtttaaaaaagaagacgcgcgcagctttatgcgcctgatggcatacgtccgcccctacaaaatccgcatcattgccgccctgattgccattttcggcgttgccgccaccgaaagctaccttgccgccttcatcgcccccctgattaaccacggcttttccgcacctgccgcgccgcccgagctgtctgccgccgccggcatcatttccaccctgcaaaactggcgcgaacagtttacctatatggtttgggggacggaaaacaaaatctggaccgtcccgctcttcctcatcatcctcgtcgtcatccgtggcatctgccgctttaccagcacctatctgatgacttgggtctccgtgatgaccatcagcaaaatccgcaaagatatgtttgccaaaatgctgaccctttcctcccgctaccatcaggaaacgccgtccggcaccgtactgatgaatatgctcaacctgaccgaacagtcggtcagcaacgccagcgacatcttcaccgtcctcacgcgcgacacgatgatcgttaccggcctgaccatcgtcctgctttacctcaactggcagctcagcctcatcgtcgtcctgatgttccccctgctctccctgctctcgcgctactaccgcgaccgtctgaaacacgtcatttccgactcgcaaaaaagcataggcacgatgaacaacgtgattgccgaaacccatcagggacaccgcgtcgtcaagctgttcaacgggcaggcgcaggcggcaaaccggttcgacgcggtcaaccgcaccatcgtccgcctcagcaaaaaaatcacgcaggcaacggcggcacattccccgttcagcgaactgatcgcctcgatcgccctcgccgtcgtcatcttcatcgccctgtggcaaagccaaaacggctacaccaccatcggcgaatttatggcattcatcgtcgcgatgctgcaaatgtacgcccccatcaaaagccttgccaacatcagcatccctatgcagacgatgttcctcgccgccgacggtgtatgtgcatttctcgacaccccgcccgaacaggacaaaggcacgctcgcgccgcagcgtgtcgaagggcgcatcagcttccgcaacgtcgatgtcgaataccgttcagacggcatcaaagccctcgacggcttcaacctcgacatcagacaaggcgaacgcgtcgccctggtcggacgttccggcagcggcaaatccaccgtcgtcaacctgctgccccgctttgtcgaaccgtctgccggcaacatctgcatagacagtatcgacatcgccgacatcaaactcgactgcctgcgcgcccaattcgccctcgtctcccaagacgtattcctgtttgacgataccctttttgaaaacgtccgatatagccgtcccgacgcaggcgaagccgaagtcctgttcgccctccaaaccgccaacctgcaaagcctgattgacagctccccgctcggactgcaccagcccatcggatcgaacggcagcaacttatccggcggacagcggcaacgcgtcgccattgcccgcgccattttgaaagacgcgccgatattattattggacgaagccaccagcgcattagacaacgaatccgaacgcctcgtccaacaagcgctcgaacgcctgatggaaaaccgcaccggcatcatcgtcgcccaccgcctgaccaccatcgaaggggccgaccgcatcatcgtgatggacgacggcaaaatcatcgaacaaggcacacacgaacaactgatgtcccaaaacggctactacacaatgttacgcaatatctcaaacaaagatgccgccgtccggacggcataa

SEQ ID NO: 61596 - DNA, 534 bp, Neisseria meningitidis; identical to SEQ ID NO: 45717

SEQ ID NO: 61597 - DNA, 1149 bp, Neisseria meningitidis
atgcccctccccctcccctctcccgaagcacggcaattctcgctcaaactgcaaaccctcattgccgaaaaaatcggcaaacacggcaactggattccattttcacgttttatggaattggttttatacgctccgcaatacggctactacaccggcggcagccataaaatcggcaataccggggattttattaccgcaccgaccctcacctctctgtttgcacagacactggcacgccaacttcaagaacttctatcccaaacggcgggcaatatctatgaattcggcgcgggaaccggacagcttgccgccgatttgttgggcagcatttcggacggcatcagccgttactatattattgaaatatcgccggagctggcagcacgtcagaaaaacctgattcaagcacgcgcaccggaagcatctcaaaaagttgtccacttgaccgcacttcccgaagcgtttgacggcatcatcatcggcaacgaagtactcgatgccatgcctgtcgaaatcgtccgtaaaaatgaaggcggctcattcgagcatgtcggcgtttgcctagataatgaccgttttacctattcggcacgaccgctgcacgacttacagctatctgccttggcttccctctattttcctcaaacagattatccctacaccagcgaactacatccgcaacaatatgcctttatccgcacccttgcctcaaggcttgaacgcggaggtatgatattcatcgactacggttttgatgcagcgcagtattaccaccctcaacgcaatcaaggtactctgatcggacactaccgacatcacgttatccacaatccttttgacttcatcgggttggccgacctgaccgcgcatgtcaactttaccgacattgcccaagccgggacggatgccggattagatttgataggttaccttccccaatcccatttcttattgaacctgggcattaccgagctattggcacagacggggaaaacggattcggcagcctatatccgtgaagctgctgccgttcagaaactgattgaccagcatgaaatgggcgaactgtttaaagtcatcgcattcggaaaaaatatcggcgtcgactgggcaggattccgcttcggcgacatctgccacaaactctaa

SEQ ID NO: 61598 - DNA, 300 bp, Neisseria meningitidis; identical to SEQ ID NO: 40325

SEQ ID NO: 61599 - DNA, 2016 bp, Neisseria meningitidis
atgatgaaactcaatccccaacagctcgaagccgtccgttacctcggcggccccctgctcgtccttgccggtgcaggcagcggcaaaaccggcgtaattactcaaaaaattaagcatttgattgtcaatgtcggctatctgccgcataccgtcgccgcaattacctttaccaacaaagccgctgcggaaatgcaggagcgcgtcgccgaaatgctgcccaagtcgcaaacgcgcgggctgacaatttgcacgttccattctttgggcatgaagattttgcgcgaagaggcgaaccatatcggttacaaaaaaaacttttccatcctcgattccaccgacagcgcgaaaatcatcggcgaacttttgggcggtacgggcaaagaagccgtattcaaggcgcagcaccagatttccttgtggaaaaacgatttaaaaacgcctgaagatgtcgttcagacggcctctaatgcgtgggaacaacaaaccgcacgcgtgtatgcgagctatcaggaaaccttacaaagctatcaggcagtggacttcgatgacttaatccgcctgcctgccgtgctgttgcagcaaaacagcgaagtgcgcaacaaatggcagcggcggctgcgttatctgctggttgacgaatgccaagatacgaatacctgccaatttgcgctgatgaaactcttgaccggtgcggaaggtatgtttaccgccgtcggcgacgacgaccagtccatctacgcgtggcgcggtgcgaatatggaaaacctgcgcaaaatgcaggaaaactatccgcagatgaaggtcgtcaaactggagcaaaactaccgctccaccgcgcggattcttaaaatcgccaacaaagtcatcgaaaacaaccccaagctgtttaccaaaaaactttggtcgcaattgggcgaaggcgagccggtcaaagtcgttgcctgccaaaacgagcaacacgaagccgactgggtcgtcagccaaatcatcaaacaaaaactcatcggcggcgacaaaacccaatacgccgatttcgccgtgttataccgcggaaagcatcaggcgaggattttcgaggaagcattgcgcggcgtgcgcatcccctaccggctctccggcggacaaagctttttcgacaaagccgaaatcaaagacgtgttgtcttatgtgcggctgcttgccaaccccaacgacgatcccgcctttctgcgcgccgtaaccacgcccaaacgcggcatcggcgatgtaacgctgggcaagctcaacgcctacgcgcacgaacacgaatgcagcctgtatgaagccgcgcaaaccgaagaagcccttgccacgctgaacaataccaaccgccaacacctgcaagcctttatggatatgttcggcagctaccgcgccaaagccgaaacaggcgaagcaggcgagttcatcaacagcctgctcgaagaaatcgactatgaaaaccacctgcttgccagtgaagaaggcaaagctggcgaaatcaaatggcgcaacgtcggcgatttggtatcatggtttgcgcgaaaaggcggggaagacggcaaaaacatcatcgaactcgcccaaaccgtcgccttgatgacgcttttggaaggaaaagacgaagaagaaaccgatgccgtctcgctatccacgctacacgccgccaaaggtttggagtatccctatgttttccttgtcggttgcgaagaaggtgttttgccgcacaacgacagcatcgaagaaggcaacgtcgaagaagaacgccgcctgatgtacgtcggcatcacccgcgccaaacgccagcttacgctgacccactgcgtcaaacgcaaaaaacaaggcatatggcagttccccgaacccagccgattcatagacgaaatgccgcaggaagatttgaaaatcctggggcgcaaaggcggcgaaccgattgtcagcaaagaagaaggcagacgcaaccttgccgatataatcggaaggctcgacagcatgaaaaaaggcggtccggaggattaa

SEQ ID NO: 61600 - DNA, 753 bp, Neisseria meningitidis; identical to SEQ ID NO: 38392

SEQ ID NO: 61601 - DNA, 1455 bp, Neisseria meningitidis
atgagcatcgaaccaacccctccgaaccttgaaaacgacggtatcgaaaacgatgtagaacgcgtttccgccgatttcgaccgtgtccactccctctgcgaaattctcgaacctgcttttgaacaaatcgaaaacggcacaccgcttgaagacgcgccgctgcgcgacaagctgaccgagctgaccgttctcttgagcgagctgcaccctgccgacgtggcggcggtattggaatcgctaccgccgcgcgaacgcaatatcgtctggattctggtcaaaccggaagacgacggcgaagtattgctggaagtatccgacgcggtgcgcgaaacgctgatcgagtcgatggacaaagacgaattgttggcagcggtcgatgatttggacgcggacgaattggcggaactggcagacgatttgccgcaccaagtggtttacgaagcgctacaaacccgcgatgaggaagaacgcgcccaagtcaaagcggcaatgtcctacgaagacaaccaagtcggtgcgattatggacttcgagttggtcagcatccgcgccgatgtcgcctgtgaagtggtgctgcgctatctgcgccgcttcgacagcctgcccgaccataccgacaagatttttgtggtcgatgaaaacgacgtactgcaaggcgtgctgcccatccgcaaacttttggtcgccgatcccgaagatttggtggaaaacgtgatggcgaaagatgtcgtgcgtttccgcgccgaagacgacgtggaagaagcggcgcaggcgtttgaacgctacgacttggtaactgcgccggttgtcgatgaaaacaaaaagctcatcggtaggattaccgttgacgagatggtggacgtcatccgtgaagaatccgaagcggatatgttgaacatggcaggtttgcaggaagaggaagacctgttcgcccccgtcttggattccgtcaaaaaccgctggatgtggctcgccgtcaacctctgcaccgccttcctcgccagccgcgtcatcggcgcgtttgaaggcagtatcgaaaaaatcgttgcactcgccgcgctgatgcccatcgtcgccggtatcggcggcaactcgggcaaccagacgattaccatgattgtccgcgccatggcgatggggcagttgacgggaatgcaggcggggcgcttgttgaaaaaagaagtcggcgttgccctagtcaacggcattatctggggaaccgtcatgggcgcggtttcatggctgctctacggcagcctcggcatcgggctggttatgattgccgcgatgacgctcaacctcctgctggcggcaaccgtcggcgtattaattcccgtggtaatggaaaagttcggacgcgatcccgcactgggcagctcggtgctgattaccgccgttaccgactccggcggcttcctgattttcttggggctcgccaccctattcctgctttaa

SEQ ID NO: 61602 - DNA, 885 bp, Neisseria meningitidis; identical to SEQ ID NO: 55986

SEQ ID NO: 61603 - DNA, 561 bp, Neisseria meningitidis; identical to SEQ ID NO: 37658

SEQ ID NO: 61604 - DNA, 450 bp, Neisseria meningitidis; identical to SEQ ID NO: 55218

SEQ ID NO: 61605 - DNA, 183 bp, Neisseria meningitidis; identical to SEQ ID NO: 44130

SEQ ID NO: 61606 - DNA, 678 bp, Neisseria meningitidis
atgagcatcaagcaatggccggaaggcgaaagacccagggaaaagctgttggaacgcggggcggcggcgttgagtgatgccgaacttttggcaatcctgctgcgcgtcggcacgcgcggaatgagtgcggtcgatttggcgcgttatttgctgcaggagttcggcagtttggggaggctgatgagcgcggaggtcggcaaactgtcggcatacaaagggatggggacggcaagtttcacacagtttgccgtggtcagggaaatcgggcggcggatattggcggaagaattgcaggagagcatcgtcctgtccgatccggatacggtggccgattatttacgctttcatttggggcaggaaaaagtcgaagtcagcgtcgcgctgctgctgaaccgccaaaaccaactgattgcggtcagagagctgtcgcgcggtacggttgcggaaaacacgatttacatccgcgaaatcgtcaaactggcattggacgaatatgccgacagcctgattattgcgcacaaccatccgggcggctcgcccgaaccttcgcaggaagacatcatgttcacaaggcggctggcacaggcaatgtcgctggtcgatgtgtcgctgctcgaccattttatcgttacctcgcaaagcgtctgttcgttcagacagctcgggttgatgccctga

SEQ ID NO: 61607 - DNA, 1881 bp, Neisseria meningitidis
atgaatattttttacgaagagtccggccaattcaaaatcgccgccatcatccaaaaaaacgatgccacctaccaagtcgataccccacacggcaaacgcaccaaagtgaaggcgaacaacgtctttgccgagtttgacggcgatatggcggcgtttttggaaaacgcgcaggcacaggcggcggacatcgacaccgatttattgtgggaagtatgcggcgaagaggaatttaccgccgaagccatcgccgaagaatattacggccatgcgccgaccaaaaccgagctggcggcaactttgattgcgctttacgccgcgccgatgtatttctacaaaaaagccaaaggcgtgttcaaagccgcgcccgaagaaaccttaaaacaagcgcttgccgccatcgaacgcaaaaaacagcaggacgcacaaatcgacgcttgggcagaagccttgaaacgcggcgagatgccgtctgaaatcgcggcggatttgaaaaccatcctgcacgcgcccgacaagcagtcgctgacctacaaagcctttaccaaagccgccgacgcgctgaaaacctctgcctacgaactggggaaaaaaacgggcggcattacgtccattccccaatacctgcaagacgggtttgaaatcaaatacttccccaaaggaacaggctttcccgaccttccccttcccgaaatgcccgacctgcccaaagccgatgttaccgccttttccattgacgacgaatcgaccaccgaagtggacgatgccttgagcctgaccgacttgggcaacggcacgaagcgcgtcggtatccacatcgccgcgccgtcgcttgccgttaaaccgagcgacaaaatggaaaaaaacatcatggaacgcttgagtacggtttatttccccggcggcaaaatcacgatgctgcccgaaaactggattgccgcgttcagccttgatgcaggcgcacaccgccctgccgtcagcatttatttcgatgtggacagcaaattcaacgtcggcgcgccgacctgcaaaatcgaagcggtcaacatctccgaaaacctgcgtatccaagccatcgaaccgcatttcaacgccgaagcgggcttggacgaagcgggcgaaatgatgttcgcccaccatcaagacctgatttggttttatcaattcgccatcaccctgcaaaaagcgcgcggcaaatacgagcccaaccgtgcgccgcaatacgattacagcatcgaattggataaagaagacaacgtatccgtcgtccgccgcgaacgcggctcacccatcgatacgctggtcagcgagatgatgattcttgccaacagcacttgggcacaaatgctccatgacaacgacctgcccggcctcttccgcgtccaacccaccggaaaagtacgcatgagcaccaaatccgagccgcatatcggcatgggcgtgcagcattacggctggtttacctcgccgctgcgccgcgccgccgactacatcaaccaaaagcagctgatcagcctgatagacgacactgccgagccgctgtatcaaaacagcgatgccgagcttttcgccgcactgcgcgactttgatgccgcctataccgcctacgccgatttccaacggcagatggaagcctactggagccttgtgtacctgcaacagcaaggtacaagcgagctgaccgcgaccatcctcaaagaagacctcgtccgcatcgaaggcctgccgctggtcacgcgcgcgaccggtattccgtttgacgcgctgcccaaatcacaggcattgttcaaaatcaccgaattagatgccgagaagcagtttgtctcgctcaactacatcaaggcagtcgcactcgcaggcaaaacggcaggcaatgccgtctga

SEQ ID NO: 61608 - DNA, 1458 bp, Neisseria meningitidis
atgaaaccaaccatcgcgcttgtcggccgccccaacgtcggcaaatctactttattcaaccgtttgacgcgcaccaaagacgcgctcgtacacgacctgcccggtctgacgcgcgaccgccattacggacacggcaaagtcggcagcaaaccttatttggtcatcgataccggaggtttcgagccggttgtggacagcggcattttgcacgaaatggcaaaacaaaccttgcaggctgtcgatgaagccgatgccgtcgtatttttggtggacggccgcaccggtctgaccccgcaagacaaaatcattgccgaccgtttgcgccaaagcccgcgccctgtttatctggcggtaaacaaaggcgaaggcggcaacagggccgtgcttgccgccgagttctacgaacttgctttgggcgacccttatgttatttccggtgcgcacggcgacggcgtgtattacctgattgaagaaattttagaaaacttccccgagccggaagtcgaagaagccgatgcaaaacatcccgtttttgccgtcatcggtcgtccgaacgtcggcaaatccacgctggtaaacgccattctcggcgaagagcgcgtgattgccttcgatatggccggcacgacgcgcgacagtatccatatcgatttcgagcgcgaaggcaaaccgtttaccatcatcgataccgcaggtgtgcgccgtcgcggcaaagtggatgaagcagtggaaaaattctccgttatcaaagcgatgcaggcggttgaagcggcaaacgtcgctgttttggtattggacgcgcagcaggacatcgccgaccaagatgcgacgattgcaggtttcgctttggaggcaggccgtgctttggtggtggcggtcaataaatgggacggcatcagcgaagaacgtcgcgagcaagtgaaacgcgatatcaaccgcaaactgtatttcctcgattttgccaagttccactttatttccgcattgaaagagcgcggtatagacggtttgtttgacagcattcaggctgcctacaacgcggcgatgattaagatgccgacgccgaaaatcacgcgcgtcctgcaaagcgcaatcgagcgtcagcaaccgccgcgtgccggcttggtgcgtccgaaaatgcgttatgcccaccaaggcggcatgaaccctcccgtaattgtggtacacggcaattcgctgcacgcgatttccgacagctatacgcgctacctgacccaaacattccgcaaagccttcaatctgcaaggcacgccgctcagaattcaatacaatgtttcagaaaacccctatgaaaatgcggaagacaaaccgaagaaaaaaccgctgcgccgtgtcagcctgagcaaccgtattgagaaacgcgaagaccgcaaagaagagaaaaaccgcttcaagaagaaaaccaaagtcagtgtgaaaaaacaattcagcaaataa

SEQ ID NO: 61609 - DNA, 780 bp, Neisseria meningitidis; identical to SEQ ID NO: 50668

SEQ ID NO: 61610 - DNA, 1113 bp, Neisseria meningitidis
atggatttaagtatcgtagttcccatttataatgtcgaaagttatttggaagcgtgtttaagttccatagaacctatattaagtaatgaaaatgtcgaacttatccttgtgaatgacgggtcaaaagacggaagtgaagatatatgttataaatatatagataaaacaacaaacaacaaacaacaaacaacaaacaacaaacaacaaacaacaaacaacaaacaacaaacaacaaacaacaaacaacaaacaacaaacaacaaacaacaaacaacaaacaacaaacaacaaacaacaaacaacaccagataccgaacaccaaacatcaaatatatatatcaggataaccaagggacggcagaagctaggaataccggaataaaaaattcaaacggaaaatatatagtctttattgattcagatgattttattaattgtcaggtcttgctggattttcttagtaaagatgatattgatatgccggatgtggtttttttaaatgcggttaaatatgataagggaagtgtttcacattttggcgaagattatcagcctgaaaaaatactcaatcaatccaaagtcgaagttttgaaaggattatgccgatttagaaaatttccgggttcggcgtgtaataagattataaaaagggaattgattatcaaagaaaaactgttttttgaaaaagaggtttatgccgaagatatcgaatggtcaatgagattatttaatgcggcaacaactttttcttatttggacggttgttattactattatcggcagggaagaaaagattctaaaacaggaactgtttcggaaaaaagtataaagtcattattatatattttggagaaaaatgcggaaatggaatttgatagggatatatcaagttatctttattcttttctttcctacgaatatctcgttttgctttttatcatgacgagtaaaaatatagagtgtgatgctgatataaaaagaagggcgtatcatttaaggtttatgctgttaaagtccaataaattgatatataagctgatattcccgataatcacattattcggggtcgatattacaggcaggattttaaaagcaatcagggggaatatttaa

SEQ ID NO: 61611 - DNA, 1059 bp, Neisseria meningitidis
atgaaaaataaactgactttacgttatttcaaaataactcgttgcggttattggtctggttcttcaaaagaacctaatcattatgaggacttattaaaaactttaactcatttagagacatatgttaaaggtaaaactattgaagagactggaattagtcgtgatgataaagagccaagcactttcttgctcgatatctgcaaaaaaaatggtctgtggttgcttgctttttggaatcctgccgcagaaagctcttcagatgaaattgtttctttaaacatgaaaagtaaactaggtcaagttgattctagcccagtaacagcaggaaatgggaaaacttttggcttcgttagttattttcttatttggccagaacataatttttactcaacgattctttctcctaatgcaactttagctggacgaacagagtttgaagagtacatgcttaatttcttgtggattgatcctaattttatagaaaagactacctacgaagaaacttcaacagacggaataattcataccatggagcgaactaattttaaattgcctcttaaaattaatggaactcctgtgccacgttttgcggggaaactagctaaatctccttcagaaaaagagtatgtcattagtaattatgaccaagtaacccaagtgcataatcaatgcacggtaaaggttacctctggacaaagttcaagtggaattttgaagaaaatgttaccaagcttttttggttcaacagaattgtttgctccattaaaaaccattcgtgtaaatcattctgtttctgctgcatttgaaaacaaatcaaatcttaaggattggattgaagactgggaaaaaaattcttttgatttagataaagatgattgtggctttaagttaaaaaacgatgacaagatttattggattcgaggaaatgtcatcaaatgtgaattagacgtcaaccttcataaggaaaatgggatttatccagctgctaaaattctagatataatagaccaaaggaaagattacgttttaaacgaattcaaattaagtgatgattcttag

SEQ ID NO: 61612 - DNA, 2256 bp, Neisseria meningitidis
atgaagacagacattcaaaccgaattaacccaagccctactaccacacgaaaaagtatgggcgaacgaagaaaaaaccattttagccaaaaacattctgttggatttggtggaaaaaaccgacccgaccattatcggtttgttattgaataatgatgagttaaaacgccatttctttgtggaagtgaatggtgttttggtgtttaaattgcaggatttacgttttttcttggacaaacacagcgtcaataattcctacacaaaatacgccaaccgcattggtttgacggacggcaaccgctttttgaaagacaattcggatattgtgttggattttccgtttaaagattgcgtattgaatggcggacaaagcaccgaagaaggcgaagagatttattttaaacgcagtaatagccagccagccagccagccagccagccagccagccagccagccagccagccagccagccagccagccagccagccagccagccagccagccagccagccagccagccagccagccagccagccagccagccagccaattatacactaaattaacccgaaaaagacaagaaatcttttttaatcaaacgcttgcttttgatgaaatcgatcggctttttgacgcaaaagcattctcaaaattctctcgctataccgcagacggcaaacaagcggttggcgaaatcaaacgtcattcagacggcacacccgccgaaaatctcattatcaaaggcaataatctgatagccctacattcgcttgccaaacagtttaaaggcaaagtgaagttgatttatattgatccgccttattattttgttaaaaagaaacaacaagatagttttggttataacactaactttaaattatctacttggcttacatttatgaaaaatcgtttatcaattgccaaagaattattaactgatgatgggattattgttatttccattgatgatgacggaaatgcttatttaaagattttgttagatgaaatttttggatttgaaaattttatcggaaatttacccactattatgaatttaaaaggtaataatgatgaatatgcttttgcaggcactcacgaatacacactagtctttgctaaaaataaagataaatctactttttatgaatttccaatagatgaagataattttttagagaaatgggaagaagatgaaattgggttttataaaaaaggagctccaatgcgagcaacaggaaccgaagataaaagagaagatagacctgaaatgttctatccttttttggtaaaaaataacacagttagtacaattacagatgaagaattttctcaaatctataataaagatttagaagtattcaatgatgattttattcaaaaactaaaagagaaatacgaaaatcttggatacaattttattttacctattgctgataaacaatgggggcgttggcgttgggggtattcaataaagaataaggcaaggctgcagacggatattattgttagccaatctaaaaatggaatttccttgtataaaaaacaaagacctgaattagatgatttacctacaaaaaaacctaaaactattttttataaacctgaatacagtagtggtaatggaactgaacagatgaaaaatctttttggtgaaaaggcatttaaaaatcctaaaccagaagaacttatccaagattttattaccatcacaaccaacgaatccgacatcgtcttagactaccatcttggtagtggcacaaccgccgccgttgcccacaaaatgaaccgacaatatatcggtattgaacaaatggattatattgaaacgcttgccgttgaacgcttgaaaaaagtgattgatggcgagcaaggcggtatttccaaagccgtgaattggcaaggtggtggcgagtttgtttatgccgaacttgccccatttaacgaaaccgcaaaacaacaaattttggcttgcgaagattcagacggcatcaaaacgctgtttgaaggtttatgcgaacgctatttcttgaaatacaacgtcagcgtaaatgaatttagtcaaatcattcaagagcctgaatttcaatctttgccattagacgaacaaaaacaaatggtgcttgaaatgttagatttaaatcaaatgtatgtttcattatccgaaatggacgacgagcaatttgcagattgcctgaacgatgacgataaagcggtaagccgtgcgttctatcaagcggagaaaaaaaatggcgaataa

SEQ ID NO: 61613 - DNA, 2277 bp, Neisseria meningitidis
atgacaacattacatttctcaggcttcccgcgtgtcggcgccttccgcgaattgaaattcgcacaagaaaaatactggcgcaaagaaatcagcgagcaagaattgctggctgttgctaaagacttgcgcgagaaaaactggaaacaccaggtcgctgccaacgccgatttcgttgccgtaggcgatttcactttctacgaccacatcctcgacctgcaagtcgccaccggcgcgattcccgcccgcttcggcttcgacagccaaaacctgtctttggaacaattcttccaactggcgcgcggtaacaaagaccaattcgctatcgaaatgaccaaatggttcgacaccaactaccactacttggtgcctgaattccacgccgataccgaattcaaagccaatgccaaacactatgttcaacaactgcaagaagcccaagccctcggtctgaaagccaaaccgaccgttgtaggtccgttgactttcctgtgggtgggtaaagaaaaaggcgccgtcgaattcgaccgtctgagcctgttgcctaaactgttgcctgtttacgttgaaatcctgactgctttggttgaagccggtgccgagtggattcaaatcgacgagcctgctttggctgtcgatttgcctaaagaatgggtggaagcctacaaagacgtttacgctactttgagcaaagtaagtgccaaaatcctgttgagcacttacttcggttctgttgccgaacacgccgcattgttgaaagccctgcctgttgacggtctgcacatcgacttggtacgcgcccccgagcaactggacgcgttcgccgactacgacaaagtcctgtctgccggcgtgattgacggccgcaacatttggcgcgccaacctgaacaaagttttggaaactgtcgagcctctgcaagccaaactgggtgaccgtttgtggatttccagctcttgctcgctgctgcacactccatttgacttgtcagttgaagaaaaactgaaagccaacaaacccgacctgtactcttggttggcattcaccctgcaaaaaacccaagaattgcgcgttctgaaagctgcattgaacgaaggccgtgattctgttgccgaagaactcgccgccagccaagctgctgccgactcccgtgccaacagcagcgaaatccatcgtgcagacgttgccaaacgcctggccgatttgcctgccaacgcagaccaacgcaaatctccatttgccgaccgtatcaaagcgcaacaagcatggttgaacctacctctgctaccgactaccaacatcggttctttcccgcaaaccaccgaaatccgccaggcacgctcagccttcaaaaaaggcgaactgtctgccgccgattacgaagccgcgatgaaaaaagaaatcgccttggtggttgaagagcaagaaaaactggacttggacgtactggtacacggcgaagccgagcgtaacgacatggttgaatacttcggcgaattgttgagcggttttgcattcactcaatacggctgggtacaaagctacggctcacgctgcgtgaaaccaccgattatctttggcgacgtaagccgtcctgaagccatgaccgtggcttggtctacttacgcacaaagcctgaccaaacgcccgatgaaaggtatgttgaccggccctgtaaccattctgcaatggtctttcgtccgcaacgacattcctcgctctaccgtgtgcaaacaaatcgcactggctctgaacgacgaagtattggatctggaaaaagccggcatcaaagtcatccaaattgacgaacctgccatccgcgaaggcttgccgctgaaacgcgccgattgggatgcctacctgaactgggcgggcgaatccttccgcctgtcctctgccggttgcgaagacagcacccaaatccacactcatatgtgttactccgagttcaacgatatcctgcctgcgattgctgcaatggatgcggacgtgatcaccatcgagacttcacgttccgacatggaactcttgaccgcgttcggcgaattccaatacccgaacgacatcggcccgggggtttacgacatccacagcccgcgcgtaccgacagaagccgaagtggagcacctgttgcgcaaagccatcgaggttgtaccggttgaacgtctgtgggttaacccagactgcggcctgaaaacacgcggttggaaagaaactctggaacaactccaagtgatgatgaacgtaacccacaaactgcgtgccgaactggctaaataa

SEQ ID NO: 61614 - DNA, 900 bp, Neisseria meningitidis; identical to SEQ ID NO: 36345

SEQ ID NO: 61615 - DNA, 594 bp, Neisseria meningitidis; identical to SEQ ID NO: 55723

SEQ ID NO: 61616 - DNA, 696 bp, Neisseria meningitidis; identical to SEQ ID NO: 46815

SEQ ID NO: 61617 - DNA, 558 bp, Neisseria meningitidis; identical to SEQ ID NO: 45261

SEQ ID NO: 61618 - DNA, 1527 bp, Neisseria meningitidis
atgaatcccatgtacattacttttgcaatctatctggttgcagtccttctcatcgggcttgccgcctatttttctacgcgcaatttcgacgattatattttgggcgggcgcagcctaggcccgtttgttaccgcgatgtcggcaggcgcgtccgatatgtccggctggctgctgatgggtctgccgggcgcgatttatttgagcggtttgaatgaggcttggattgccatcggcctcttggtcggcgcgtatttcaactggctcttggtggcgggccgcctgcgcgtgcataccgaatacgccaacaatgcgctgacgctgccggattatttcttccaccgcttcggcgcgggcggacacttgatgaaagtggtttccgcactgattatcctgttcttcttcacgatttattgcgcctcgggcattgtggcgggcgcaaccctgttccaaagcctgtttgaaggtatgacttacaatcaggcaatgtggctgggcgcgggcgcgaccatcgcctataccttcttgggcggcttcttggcggtcagctggacggatacgttgcaggcttctttgatgattttcgcgctgattttaacgccggtaatggtctatctgggcttgggcggcgcggaacagatgtctgccgcgattcaaagcgtcgccgcaggcacgggcaaagaatacggcagcctgtttgccggtacgaccgtcatcggcatcatttccaccgccgcatggggcttgggctatttcggacagccgcacattttggcgcgctttatggcggccgaaagcgcgaaatcgctggtatccgcacgccgcatcggcatgacttggatggcgttgtgccttgcgggcgcggtggcggtcggttatttcggcattgcgtatttcggtgcaaatcccgacaaagtttcttctatgagcggcaaccacgaacgcatcttcatcgcgctttccaccctgctgttcaacccttggatcgccggcatcattttgagcgcgattttggcggcggtgatgtccaccctgtcctgccagcttttggtttgctccagcgcgattaccgaagacttctacaaaggctttttgcgtaaaaacgcgcaacagtcggaactggtatgggtcggccgcctgatggtcttggcgattgccgtgatttccatcctgattgcttccgatccgaacagcaaagtattgggactggtgtcttatgcgtgggcaggtttcggtgcggcgttcggcccgattgtgattctgtccgtattgtggaaacgcatcactgcctacggcgcgttgtcgggtatggttgcaggtgccttaaccgtagtcgtatgggcggaatggataaaaaaaccggctcaagcagcaggcgaaagcggcttgttgacgatgtacgaaatcgtcccgggctttattgtttgcttaatcattgccgtgttggtttccctgttcaacaaagaaccttcgcgcgaaatccaaaaacgctttgaaaaagccgacgcagattaccgcgccgcccgataa

SEQ ID NO: 61619 - DNA, 1116 bp, Neisseria meningitidis
atgcgcttgtttaaaagcttgaaaaaccctaaaaaaacagatgccaagctccctaaaaaatcttcgggactcaataaccgcgcggcaatcggcatcgatatcgaccagcattccatcaaaatggtccaattgtcaggacgtagtttaaaccaaattcaattggaaaaatacgtcattgccaaattaccaaagaatatcattcaaggcaataaagtccaaaattacgatcaacttgttacatatttgcaacaagcctatgccaaactgggtacttcgtgcaaaaacatcatcgcgtccgtcccgcaaaatctggcaaccatcgaacaattgacctacacagacaaagatgcagaattagacctgcaggggttcgtggagtcctccatctccgaagtcagctcgatatcgctcgaagaagccaattacgactatcaggtcttgtcccaatcggccgccggcgaagctgtgttggccgtcgcatcgagaaaggatgaaatcgaacccctgattgacgcattcaacgccgccggtatgaaattatccgcgcttgatgtggacattttcggacaatacaacgcctacgcgctatggataaaccatttcgcccccgagcttgcagccgaaaaagtcgccattttcggcgtatatgccgcacagacctacgccttggtcatccaagacggaaaaatcctatacaaacaggaaacctccgtcagcgaagaacagctcaaccaactcatccagcgcacctatcaggtaacagaagaaaaagcggaagaaatcatcaactccccgcaaaaaccttccgattaccaagaaagcgtggcaaactatttcaaccagcagattacccaagaaatacaaagggtcttgcagttttattacaccacgcagaccgcagacgatatgaccgacatcaagcatatcctgctgaccggggaagcggcgcgccaggaaggtatcgcccaaaccgtcgcctcacaaaccaatgcagatgtacaatgcgtccatcccgcgcgttattttgcggacaacctcaaaacagacaaacaacaattcgaacttgatgcgccgacactgaccagggcgttcggtttggcggtacggggattataa

SEQ ID NO: 61620 - DNA, 318 bp, Neisseria meningitidis; identical to SEQ ID NO: 54811

SEQ ID NO: 61621 - DNA, 1452 bp, Neisseria meningitidis; identical to SEQ ID NO: 55568

SEQ ID NO: 61622 - DNA, 492 bp, Neisseria meningitidis
atggcggggccgatttttgtcgtcatcgccagcgtcgctatgttttttgtcgcacagcagcacgcgacagatttggttacggacgattattataaagacggcaaacatatcgacatccagcttcatcgggatgaagaagccgtcagacggcatatcggggtgcaggttctcatttcccccgatatgaatgcggcaaaagtgtttgtcggcggcgagtttgacggcaaacagcctttgaacctgctgctgatgcacccgacccgcaaggcggacgatcaaaccgtcgccctcaagcccgtcggcagcgcgcagaacggcagggcggaatatgaggcggtgttcaaaaccctttcgccgaccaaccactggtatgtgcgcgtggaggacgcggcaggcgtgtggcgcgtcgagaacaaatggattaccagccaaggcaatgcggtggatctgaccccgatggataaacttttcaataatgccggaagcaaataa

SEQ ID NO: 61623 - DNA, 201 bp, Neisseria meningitidis
ttgaagtacagcgcaatattgccgcaaaaggcagcagccgtaaaaaagtcggggaattattggcaatttatgcgtaatttcgacaaattggctgaagaagctgccgaacacgccgctgaaggcgcggtgaaattcatagacggcaagcctgccaagaaaatcatcgccgtaccgggcagactggcgaacatcgtggtgtaa

SEQ ID NO: 61624 - DNA, 1779 bp, Neisseria meningitidis
atgacggttttgaagccttcgcactggcgggtgttggcggagcttgccgacggtttgccgcaacacgtctcgcaactggcgcgtatggcggatatgaagccgcagcagctcaacggtttttggcagcagatgccggcgcacatacgcgggctgttgcgccaacacgacggctattggcggctggtgcgcccattggcggttttcgatgccgaaggtttgcgcgcgttgggggaaaggtcgggttttcagacggcattgaagcacgagtgcgcgtccagcaacgacgagatactggaattggcgcggattgcgccggacaaggcgcacaaaaccatatgtgtgacccacctgcaaagtaagggcagggggcggcaggggcggaagtggtcgcaccgtttgggcgagtgtctgatgttcagttttggctgggtgtttgaccggccgcagtatgagttgggttcgctgtcgcctgttgcggcagtggcgtgccggcgcgccttgtcgcgtttaggtttggatgtgcagattaagtggcccaatgatttggttgtcggacgcgacaaattgggcggcattctgattgaaacggtcaggacgggcggcaaaacggttgccgtggtcggtatcggcatcaattttgtcctgcccaaggaagtagaaaatgccgcttccgtgcaatcgctgtttcagacggcatcgcggcggggcaatgccgatgccgccgtgctgctggaaacgctgttggtggaactggacgcggtgttgttgcaatatgcgcgggacggatttgcgccttttgtggcggaatatcaggctgccaaccgcgaccacggcaaggcggtattgctgttgcgcgacggcgaaaccgtgttcgaaggcacggttaaaggcgtggacggacaaggcgttttgcacttggaaacggcagagggcaaacagacggtcgtcagcggcgaaatcagcctgcggtccgacgacaggccggtttccgtgccgaagcggcgggattcggaacgttttctgctgttggacggcggcaacagccggctcaagtgggcgtgggtggaaaacggcacgttcgcaaccgtcggtagcgcgccgtaccgcgatttgtcgcctttgggcgcggagtgggcggaaaaggcggatggaaatgtccgcatcgtcggttgcgccgtgtgcggagaattcaaaaaggcacaagtgcaggaacagctcgcccgaaaaatcgagtggctgccgtcttccgcacaggctttgggcatacgcaaccactaccgccaccccgaagaacacggttccgatcgctggttcaacgccttgggcagccgccgcttcagccgcaacgcctgcgtcgtcgtcagttgcggcacggcggtaacggttgacgcgctcaccgatgacggacattatctcgggggaaccatcatgcccggtttccacctgatgaaagaatcgctcgccgtccgaaccgccaacctcaaccggcacgccggtaagcgttatcctttcccgaccacaacgggcaatgccgtcgccagcggcatgatggatgcggtttgcggctcggttatgatgatgcacgggcgtttgaaagaaaaaaccggggcgggcaagcctgtcgatgtcatcattaccggcggcggcgcggcaaaagttgccgaagccctgccgcctgcatttttggcggaaaataccgtgcgcgtggcggacaacctcgtcattcacgggctgctgaacctgattgccgccgaaggcggggaatcggaacatacttaa

SEQ ID NO: 61625 - DNA, 1155 bp, Neisseria meningitidis; identical to SEQ ID NO: 55455

SEQ ID NO: 61626 - DNA, 846 bp, Neisseria meningitidis; identical to SEQ ID NO: 36227

SEQ ID NO: 61627 - DNA, 939 bp, Neisseria meningitidis; identical to SEQ ID NO: 37748

SEQ ID NO: 61628 - DNA, 246 bp, Neisseria meningitidis; identical to SEQ ID NO: 39751

SEQ ID NO: 61629 - DNA, 870 bp, Neisseria meningitidis
atgaagcgcatctttttgcccgccttgcccgccatcctgcctttatccgcttatgccgacctgcccttgacgattgaagacataatgactgacaagggcaaatggaaactggaaacttcccttacctacctgaatagcgaaaacaaccgcgccgaacttgccgcactggtttacatccaaaccggcgcaacctcgtttatccccattccgaccgaaatccaagaaaacggcagcaataccgatatgctcgttggcacgctcggtttgcgctacggactgaccgggaataccgacatttacggcagcggcagctatctgtggcacgaagaacgcaaactcgacggcaacagcaaaacccgcaacaaacggatgtccgacgtatccctcggcatcagccacaccttccttaaagacgacaaaaaccccgccctaatcagctttcttgaaagcacggtttacgaaaaatcgcgcaacaaagcctcgtcgggaaaatcgtggctcatcggcgccaccacctacaaagccatagatccgattgtcctttccctcaccgccgcctaccgcatcaacggcagcaaaaccctttcagacggcatccgctacaaatcgggcaactacctgctgctcaaccccaacatctcatttgccgccaacgacagaatcagcctgaccggaggcatccaatggctgggcaaacagcccgaccgcatagacggcaaaaaagaatccgcaagaaacacatccacctacgcccatttcggcgcaggtttcggtttcaccaaaaccacggctttaaacgcatccgcacgtttcaacgtttcagggcaaagcagttccgaactgaaattgggcgtacagcatacattttaa

SEQ ID NO: 61630 - DNA, 432 bp, Neisseria meningitidis
atgaaaaccttttcagcgaaaccccacgaggtgaagcgcgaatggttcgtcatcgatgcccaagacaaagtcttgggtcgcgttgcggccgaagtcgccagccgtctgcgtggcaaacacaaacctgaatacaccccccacgtcgataccggcgattacatcattgttatcaatgcggacaaactgcgtgtaaccggtgccaaattcgaagataaaaaatacttccgccattccggttttccaggcggtatctacgaacgcactttccgcgaaatgcaagagcaattcccgggccgcgctttggaacaagctgtaaaaggtatgctgcccaaaggtcctttgggttacgccatgattaaaaaactgaaagtgtatgcgggtgcggaacacgcccatgctgcgcaacaacccaaagttttggaactgaaataa

SEQ ID NO: 61631 - DNA, 381 bp, Neisseria meningitidis
ttggctgaaggtcaaaaatcagccgtcaccgagtattacctgaatcacggcatatggcccggcggcaacagtgatgccggcgtggcatcttcttcaacaatcaaaggcaaatatgttcagaaagttgaagtcaaaaacggcgtcgttaccgccacaatgctttcaagcggcgtaaacaaagaaatcaaaggcaaaaaactctccctgtgggccaagcgtcaaaacggttcggtaaaatggttctgcggactgccggttgagcgcaccgcccccaccaccaccaacgacgacgtcaaagccgacaccgccgccaacggcaagcagatcgacaccaaacacctgccgtcaacagcatcgacaagaaaatcgacaccaaactag

SEQ ID NO: 61632 - DNA, 684 bp, Neisseria meningitidis
atgtttgcccttttggaagccttttttgtcgaatacggctacgcggccgtgtttttcgttttggtcatctgcggtttcggcgtgccgattcccgaggatttgaccttggtaacaggcggcgtgatttcgggtatgggttataccaatccgcatattatgtttgcagtcggtatgctcggcgtattggtcggggacggcatcatgttcgccgccggacgcatctgggggcagaaaatcctcaagttcaaaccgattgcgcgcatcatgacgccgaaacgttacgcacaggttcaggaaaaattcgacaaatacggcaactgggttctgtttgtcgcccgcttcctgccgggtttgcggactgccgttttcgttaccgccggcatcagccgcaaagtatcgtatctgcgctttctgattatggacgggcttgccgcgctgatttccgtgcccgtttggatttacttgggcgagtacggcgcgcacaacatcgattggctgatggcgaaaatgcacagcctgcaatccggcatcttcatcgcattgggcgtgctggcggcggcgctggcgtggttctggtggcgcaaacgccgacattatcagctttaccgcgcacaattgagcgaaaaacgcgccaaacgcaaggcggaaaaggcagcgaaaaaagcggcacagaagcagcagtaa

SEQ ID NO: 61633 - DNA, 3435 bp, Neisseria meningitidis
atgaccgagccgacctacatccccttgcgcctgcataccgagttctcaattaccgacggtatggtgcggattaaaaaactggttgccaaagcgcaggaatacggtttgcctgctttgggcatcagcgatttgatgaacgaattcggcttggtgaaattctataaagcctgccgcggcgcagggattaaacccatcggcgcggcggacgtgtggataggcaatccgaatgcgcccgacaagccgtttcgcgccatgctgattatccgcaacgatgcgggctatctgcgcttgagcgagcttctgacggcggcttatgtcggcaaagaccgcaatatccatcatgcggaactcaatcccgaatggctggaaaacggcgacaacagcggcttgatttgtttgagcggcgcacattacggcgaagtgggcgtgaatctgttgaacggcaatgaagacgcggcgcgtgcggcggcgttgaaatatgcggcatggtttcccgatgcgttttatttagagctgcaacgcctgcccgaacgccccgaatgggaggcttgcgtttccggcagcgtgaagctggcggaggaactgggtttgccggtggtggcgacccacccgacgcagtttatgagcagcgatgatttcaacgcgcacgaggcacgggtgtgtattgcgggcggctgggtgctgacggacaaaaaacgtccgcgcgatttcacaccgggccagtttttcattccgccggaaacgatgctggagcgtttcgccgatttgcccgaggccttggaaaacacggtagaaattgccaaacgctgcaatctgcacatcacattgggcaaaaacttcctgccccttttccccacgcccgacggtttatcgcgcgatgactatctcatcaaactctcaaacaagggcttgcaggaacgcatggttcagctttatcccgacgaggcggagcgtgcggcaaaaatgccggaatatcaggaacgtttggattttgagctgaacatcatcatccagatgaaattccccggctatttccttatcgtacaagactttatcaactgggcgaaaacgcacggctgtccggtcgggccgggacgcggttcgggcgcgggttcgctggtggcgtattcgctgaaaattaccgacctcgacccgctgaaatacgcgctgctgtttgaacgtttcttaaaccccgaacgcgtctccatgcccgacttcgacgttgacttctgtcaggcaaaccgcggccgcgtgatcgaatatgtgcgcgataaatacggcgctcaggcggtcagccagattgttaccttcggcacgatgtcgtccaaagcggtcatccgcgacgtggggcgcgtgttggagctgccgtttatgctgtgcgacaaactgtccaagctgattccgttggaagccaacaaacctctgggtttggacgacgcgatgaaggcggagccgcagattcaggaattaatcgaagcggaagaagcggacgaactgattacgctggcgaaaaagctggaagacctgacgcgcggtttgggtatgcacgcaggcggcgtgttgattgcgccgggcaagatttccgattacagccccgtgtatcaggcggatgaatccgcctctcccgtatccatgtacgacaagggcgacgtggaagacgtgggtttggtgaaattcgactttttaggtctgcgtaacctgaccattatcgaaatggcgcagaacaacatcaaaaacaccaccggcgacatcatcgatgtcggcaaaattccgctcgacgaccaagccgcctaccaaatcttccgagatgcgaacaccaccgccgtgttccagttcgagtcgaccggcatgaaaaaaatgctgaaaacggcgcacacgaccaagtttgaagaactgattgccttcgtatcgctctaccgccccggcccgatggacaacatccccgacttcgtcgcgcgcatgaaaggccaggaattccaatacatccatccgctgctcgaaggcatcctcgcgccgacctacgggattatggtgtatcaggaacaagtgatgcaggcggcgcaaattatcggcggctactcgctcggcggcgcggacctgctgcgccgcgcgatgggtaagaaaaagcccgaagaaatggtgaaacaccgcgaaatctttgccgaaggcgcggcaaaacaaggcatttcgcgcgaaaaatccgacgaaatcttcaactacatggaaaaattcgccggctacggtttcaacaaatcccacgccgccgcctacgccctgatttcctaccagaccgcatggcttaaagcccactatcccgccgaatttatggcggcgaccatgtcgtccgaattggacaacaccgaccagctcaagcatttctacgacgactgccgcgccaacggcatcgagttcctgccgcccgacatcaacgaatccgactaccgcttcacgccgtatccggacatgaaaatccgctacgcgctcggcgcgattaaaggcacgggcgaagccgccgtcgaatccatcatcgccgcgcggcaaagcggcggcaagtttaccggcctcttggacttctgcgagcgcgtcggcaaagaacacatgaaccgccgcacccttgaagccctgatacgcggtggcgcgttcgacagcatcgaacccaaccgcgccatgctcttggcgaacatcgacctcgctatggacaacgccgaccaaaaagccgccaacgccaatcagggcgggcttttcgacatgatggaagacgccatcgaaccggtgcggctcatcgacgcgccgatgtggagcgaatcggaaaaactcgccgaagaaaaaaccgtcatcggcttttacctgtccggccacccgttcggcccgtatgcccaagaagtccgccaaatcgccccgcagaaactgtcgaaactcaaaccgcaagacagcgtgcgcctcgccggattcgttaccgccgtacgcaccatgatgggcaagcgcggcaaaatcgccttcgtcagccttgaagatttgagcggacaggttgaaatcatggtcggcggtcagacgttggaaaactgcgccgactgcctcaaagccgaccaagtgctgattatcgaatccaaagtcagccgcgacgactacggcggcggcgacgggctgcgtattctggcaaaccaagtcatgaccctgcaaatggcgcgcgaacgctacgcccgaagcctcagcctcgccctcgccccgcatcacgacatcggcaaactggtacaactgctcgccgcccaccaactgcccgacacgccgcgcatcccgctgcaactgtcgtatgccaacgaaaaagcgtcgggcaggcttcaagtgccgccgaaatggacggttacgccgagttccgcattgttcggcgaactggaaacattgctcggcagccggtcggtgcgcgtcaactggtaa

SEQ ID NO: 61634 - DNA, 450 bp, Neisseria meningitidis
atgcccgcctgtttctgcccccactgcaaaacccgtctctgggtcaaagaaacccaactcaatgtcgcccaaggcttcgtcgtctgccaaaaatgcgaaggactgtttaaagccaaagaccatctggcaagcacgaaagaacccatattcaacgatttgcccgaggctgtttcggatgtcaaactcgttcaccgcatcggcacgcgcgccattggcaagaaacagatttcccgcgacgaaatcgccggcatcctcaacggcggtacaaccctgcacgatacgccgcccgcaaccgccgccacccctgccgccgccacccctgccgccgcaccgcaggttgccgtaccgcccgccgcgcctgcccgtcaggaagggttcaactggacgattgcaaccctgtttgcccttatcgtcctcattatgcagctttcctacctcgtcatcctatga

SEQ ID NO: 61635 - DNA, 687 bp, Neisseria meningitidis; identical to SEQ ID NO: 42016

SEQ ID NO: 61636 - DNA, 3486 bp, Neisseria meningitidis
atgcgcctgacccacatcaaactctccggcttcaaatcttttaccgacccgaccacgattcatgttccggggcagcttgttgcggttatcgggccgaacggctgcggcaagtcgaatgtgattgacgcggtgcgctgggtgttgggcgaggcttcggcgaagcagcttcgtggcgagagtatgcaggacgtgatttttaacggtgcggcgacgcgccgtcctgcgccgagggcttcggtggagctggtgtttgacaacagcgaccacagtttgcagggggcgtgggggcagtatgccgaggtgagtatcaagcggcagctgacgcgtcagggcgaatcgacttatttcatcaataatcagaccgtgcgccgccgcgacattaccgatttatttttgggtacgggcgtgggcgcgcgcggttatgccgttatcgagcaggggatgatttcgcgcatcatcgaagcgcggccggaggaattgcgcgcctatatcgaggaggcggcaggtgtgtccaaatataaggaacgccgcaaggagacggaaggccgtctgaaagacacgcgcgagcatttgcagcgtttgggcgatttgcagaacgaattggcgcgtcaggtggaaaagctggagaaacaggcggaaaccgccgaacgctacaaatccctgaccgcgcagttgaaccggcaacaggatttgctcgattacgcccaatggcagcaatcgcttgccgccgccgacaaggcgaccgagcagcatcagtctttgcaggcgcagcaggacgaaaccgccgcgcaggttcaggcgttaaacgacgaagtacacgccttgcagaccgccgaacagtcgcagcaacaggcggtgcatgaattgagcaacaaacgcggcgtgttgcgcgagcagattgcccgtttggaagaacaaatccgccatcagcaaaacctgcaccaacgcatcgaacgcgacaagcaggcggcgcaggcgcagttgcagcgtattcatcaagagcagcagcaaatccgcgtgcagcttgaagaaaacgagttatacgtcgaagaaaagcaaaccgagctggcggagtgggcgatgcaggttgccgaacacgaagagcgtctgcccgaattggaagaaacccaaaccgcgctcaatgccgccttccaaacccagcaggacgaggcaaaccgcatccgccgcgaactggcgttgaagcagcagcagcttgcccatgccgaacaaaccgttgccaagcacgaagagcgcaaaggccgtctgaaacaggagaaccaagccctgaacctgcccgacgaagcggaaaccgccgccgcgcaggaggccgctgccttgttgcaaagccggcaagagcattacgaagaacaaatcatcgccgccgaagaagccttacacgccgcccgcgaggcgtttcagacggcctcaaaccgcttccaaagcctgaagcagcaacacatcaccttgcaggcgcagcagcaggcgttgtcgcaaatcctgtcgcaacagcaggaagcagccgatttctggcaggcaaccggccacgccgccgcgccgcaactgtggcaacacattaccgcgcctgctgagtggcagcacgccctgtccgtcatccttgccgaacgcctgcacgcccgcgacgtgccgcaaggtttcgtaccgcccgaacctttgccgcaggggcaggcggcgtggctttcagacggtctctccggcggcatcaaaaaatccctgcccgtacaggcattgctgaaccaaatccaagcgcagccgccgtttcagacggcattgcaccactggctcgacggcgtattgtgtgcgcctgatttgagttacgccctcgcgcatcaaaacgatttgggcgcacatcaaatctggctcacgcccgaaggccatcaggtcgataaggtcagcgtcctgctctatgccaaacccgcgcaggaaagcctgattgcccaaaaagcgcgcctcgacggcatcgcgtccgaactggaaaacctctcccccgaactttctgccgccgaagccgcgttcaaacaggcggaagccgccgtgcgctcgtccgaagtgcagcataaaaacctgatgcagcagcaacagcagcacacgcgccaatacagccaagcgcagcaacgcgccgccgaacttctggcgcgtaccaaccaagggcaaatccgccgcgaacacatcgagcgcgaactggcgcagttggcggaagagcagaccgtgttgcaacacgcgtccgacgggctttcagacgacattgctactttgcaggaagccgccgccgaactcgaacaccagcagcaaaccgccgcacacagccgccaagagcagcaaggccgtctgaaacaggcgcagcttgccctgctggaagccaaccgccaatatgggcttgccgaagtcgccgtccacaaactcaaccagcaaaaacaaaactaccagcagcaaatcgcccgactcgaacagcaaaccctagactggcaggaacgccagcaagagcttgtcctcgcctatgaaaccgagttccaaaacgacgagcagcacatcaagctcgacgagctgaccgaatccgtacacacgctggacgaagaatacatcgccgtgcaggaaaaactcacgcagattcaggagcagggtagggaacaatacgcccgcgtacaaaccctgcaaacccagttgccacagcttcaggccgccacccaaaccgccctgttgcaacaacaggaagccctgatcaacgccaaacgctaccatcaaaacctgaccgaacgcgccgccgatttggatgcgctcgaagcgttggcgaaagaatcgccgaaagtattgaacagcagcatcggcagcctctcgcaacaaatcgaagccctcggcgcggtcaacctcgccgccctgcaagaactcgaagaagcgcgcgaacgcgacggctactaccgcagccaaagcgaagacgtgcagaccgccatcacccttttggaagaagccatcgcccaaatcgacgacaaaaccaaagcgcgtttcaaagaaaccttcgacgccgtcaacggcaaagtccaaaccttcttcccgaccctgttcggcggcggcgaagccaccctcaaaatgataggcgacgaccttttgaccgccggcgtgtctatcatggtgcgcccgcccggcaagaaaaacagcaccatccacctcctttccggcggcgaaaaagcccttaccgcgatgagcctcgtgttcgccctgttcagcctcaaccccgctccgttctgtcttttggacgaagtcgacgctccgctagacgatgccaacacttcgcgtttctgcaacctggtcaaagaaatgtcggcgcaaacccagtttctctacatctcccacaaccgcctgaccatggaaatggcggaacagctggtcggtgtaaccatgcaggaaaaaggcgtatcgcgcgtcgtcgccgtggacatcaaacaggcgttggaaatggcggaatccgtttga

SEQ ID NO: 61637 - DNA, 222 bp, Neisseria meningitidis
atgggcggcaaagtgcagcacaataaaggcaaaatacgcgacaatgctttaaaagccttagtgaaatccgatttgttccggcacaaggtggaacggaaaaggaaaggcaaaggcagctacaacaggcaggaagcgaaaaaatggcgggacggttttgatacggtcccgccgtttttatgccttaaacgtggaagctttcgccgcagccgcaggagtctttga

SEQ ID NO: 61638 - DNA, 2604 bp, Neisseria meningitidis
atgagcaaaaccgtccgttatctgaaagattaccaaacgcctgcctaccgcatccttgaaaccgacctgcattttgacattgccgaaccgcaaaccgtcgtgaaatcacgtttgacggtcgagccgcagagggtaggagagccgctggtgttggacggttcggcgaaactcttgttcgtcaaaatcaatggggcggcagcggattatgtgttggaaggcgagatgctgacgattgcaggcgtgccgtccgaacgcttcaccgtcgaagtggaaaccgagatcctgccggcggaaaacaaatcgctgatggggctgtatgcttccggtggcaatctgtttacccaatgcgagccggagggcttccgcaaaatcacgttctacatcgaccgtccggatgtgatgtccaaattcacgaccaccatcgttgcggacaaaaaacgctatcccgttttgctctccaacggcaacaaaatcgacggcggcgagtgttcagacggccgccattgggtgaaatgggaagacccgtttgccaaaccgagctatttgtttgctttggtcgcgggcgatttggcggtaacggaagaccgtttcaccaccatgagcggcagaaacgtcaaaatcgagttttacaccaccgaagcggacaagcccaaggtcggctttgccgtggaatccttgaaaaacgcgatgaagtgggacgaaacgcgcttcggcttggaatacgacttggatattttcatggtcgtcgccgtaggcgatttcaatatgggtgcgatggaaaacaagggtttgaacatctttaacaccaagttcgtccttgccgacagccgaaccgccaccgataccgattttgaaggcatcgaatccgtgatcggacacgaatatttccacaactggacgggcaaccgcgttacctgccgcgactggttccagctttcactgaaggaagggctgaccgtgttccgcgaccaagaattttccggcgaccgcgccagccgcgccgtgcgccgcatcgagaacatccgcctgctgcgccagcaccagttccccgaagacgcaggcccgaccgcccatccggtgcgccccgccagctatgaggagatgaacaatttctacaccatgaccgtttatgaaaaaggcgcggaagtggtgcggatgtatcacaccctgctcggcgaagagggcttccaaaaaggcatgaagctctatttccaacgccacgacgggcaagccgtgacctgcgacgatttccgcgcgacaatggcggacgcgaacggcattaatctcgaccagttcgccttgtggtacagccaggcgggcacgcccgttttggaagcggaaggtcgtctgaaaaacaatgttttcgagttgaccattaaacaaaccgtgccgcccacgcccgatatggcggacaagcagccgatgatgattcccgtcaaaatcgggctgctgaaccgcaacggcgaagcggtggcatttgattatcagggcaaacgcgcgaccgaagccgtgttgctgctggccgaagccgaacagaccttcccgctcgaaggcgtaaccgaagccgtcgttccctcgctgctgcgcgggttcagtgcgccagtgcatctgaactatccgtacagcgacgatgacctgctgctcctgcttgcccacgacagcgacgccttcacgcgctgggaagccgcgcaaacgctctaccgccgcgccgtcgccgccaaccttgccgcgctttcagacggcgtcgagttgccgaaacatgaaaaactgcttgccgccgtcgaaaaagtcatttcagacgacctcttggacaacgccttcaaagccctgcttttgggcgttccgtctgaagccgaactgtgggacggcgcagaaaacatcgacccgctgcgctaccatcaggcgcgcgaagccttgttggatacgcttgccgtccgcttcctgccgaaatggcacgaattgaaccgtcaggcggcgaagcaggaaaaccaaagctacgagtacagccccgaagctgccggctggcgcacgctgcgcaacgtctgccgcgccttcgtcctgtgcgccgaccccgcgcacatcgaaaccgttgccgaaaaatacggcgaaatggcgcaaaacatgacccacgaatggggcatcctgtccgccgttaacggcaacgaaagcgatacgcgcaaccgcctgctggctcagtttgccgacaagttttcagacgacgcgctggtgatggacaaatatttcgccctcgtcggctcaagccgccgcagcgacaccctgcaacaggttcaaaccgccttgcagcatccgaagttcagcctcgaaaatcccaacaaagcccgctcgctcatcggcagcttcagccgcaacgtcccgcatttccacgcagaagacggcagcggctaccgcttcatcgccgacaaagtcatcgaaatcgaccgctttaacccgcaggtcgccgcccgcctggtgcaggcgttcaacctctgcaacaagctcgagccgcaccgcaaaaacttggtgaaacaagcattgcagcgcattcgggcgcaggaaggattgtcgaaagacgtgggcgaaatcgtcggcaaaattttggattga

SEQ ID NO: 61639 - DNA, 1041 bp, Neisseria meningitidis
atgcaggcagttgttgtgaataaaaatgtagcgggcgatgtggaaatagtcgaacgcgaggttcgcccgttggaatacggcgaggcgttggtcgaagtcgaatattgcggcgtgtgccacaccgacctgcacgttgcggcaggcgactacggcgaaaaaccgggccgcgtgctgggacacgagggcatcggtttggttaaagaagttgccgacggtgtgaaaaatctgaaagtcggcgaccgcgtcagcatcgcctggctgttccaaagctgcggctcttgcgaatactgcaataccggccgcgaaaccctgtgccgctctgtattgaacgcgggctacaccgccgacggcggtatggcgacccactgcatcgtcaatgcggattatgcggtcaaagtccccgacggtctcgaccccgcccaagcgtccagcatcacttgtgccggcgtgaccacttataaagccattaaagtttccagtgttcgtccgggacagtggattgccatctacggcgcgggcggtttgggcaacttgggggtccaatacgcgaaaaaagtattcggcgcgcacgttgtcgccatcgacatcaacgacgacaaactggcgtttgccaaagaaagcggcgcggatttggttgtcaacgccgccaaagaagacgctgccaaagtgattcaggaaaaaacaggcggcgcacacgctgcggtcgtaaccgccgtatctgctgccgcattcaactctgccgtgaattgcgtccgcgcgggcggacgtgtggttgccatcggactgccgccggaatcgatggatttgtccatcccgcgtttggttttggacggcatcgaagtggtcggctctttggtcggcacgcgcaaagatttggaagaagccttccaattcggcgcggaaggtttggttgtgccgaaagtccaactgcgtgctttggatgaagcacccgccattttccaagaaatgcgcgaaggcaaaatcaccggtcgtatggtaatcgatatgaaaaaagaatgcggctgcggccaccaccactga

SEQ ID NO: 61640 - DNA, 684 bp, Neisseria meningitidis
gtgcaggcggatttagcctacgccgccgaacgcattacccacgattatccgcaagcaaccggtgcaaacaacacaagcacagtaagcgattatttcagaaacatccgtgcgcattccatccacccccgggtgtcggtcggctacgactttggcggctggagaatagcggcagattatgcccgttacagaaaatggaacaacaataaatattccgtcaacacaaaaaatgtgcaaaaaaacgacaatggcaacaggcaagacctgaagacggaaaatcaggaaaacggtacattccacgccgtttcttctctcggcttatccgccatttacgatttcaaactcaacgataaattcgataaattcaaaccctatatcggtgtgcgcgtcgcctacggacacgtcagacacagcatcgattcgaccaaaaaaacaacaaatgttgttaccgtcgccggtgctgctaacacagcacctacgatttattatgcaccagagacgcaaaacgcctatcacgaaagccacagcatccgccgcttgggtcttggtgtcatcgccggtgtcggtttcgacatcacgcccaagctgaccctggacaccggataccgttaccacaactggggacgcttggaaaacacccgcttcaaaacccacgaagtctcattgggcatgcgctaccgcttctga

SEQ ID NO: 61641 - DNA, 621 bp, Neisseria meningitidis; identical to SEQ ID NO: 55589

SEQ ID NO: 61642 - DNA, 1287 bp, Neisseria meningitidis; identical to SEQ ID NO: 54876

SEQ ID NO: 61643 - DNA, 501 bp, Neisseria meningitidis; identical to SEQ ID NO: 41232

SEQ ID NO: 61644 - DNA, 1680 bp, Neisseria meningitidis
atggaaaattttgctcagctgttggaagaaagctttaccctgcaagaaatgaacccgggtgaggtgattaccgctgaagtagtggcaatcgaccaaaacttcgttaccgtaaacgcaggtctgaaatcagaatccctgattgatgtagctgaattcaaaaacgctcaaggcgaaattgaagttaaagtcggcgacttcgttaccgttaccatcgaatccgtcgaaaacggcttcggcgaaaccaaactgtcccgcgaaaaagccaaacgcgctgccgattggattgccctggaagaagccatggaaaacggcgacatcctgtccggcatcatcaacggaaaagtcaaaggcggcctgaccgttatgattagcagcatccgcgcattcctgccgggttctttggtcgacgtacgtcctgtaaaagacacttctcacttcgaaggcaaagagatcgaattcaaagtgatcaaactggacaaaaaacgcaacaacgtcgttgtttcccgccgcgccgttctggaagccactttgggtgaagaacgcaaagccctgctggaaaacctgcaagaaggctccgtcatcaaaggcatcgttaaaaacattaccgattacggtgcattcgttgacttgggcggcatcgacggtctgttgcacatcaccgatttggcatggcggcgcgtgaaacacccgagtgaagtcttggaagtcggtcaggaagttgaagccaaagtattgaaattcgaccaagaaaaacaacgcgtttccttgggtatgaaacaactgggcgaagatccttggagcggtctgacccgccgttatcctcaaggcacccgcctgttcggcaaagtatccaacctgaccgactacggcgcattcgtcgaaatcgaacaaggcatcgaaggtttggtacacgtctccgaaatggactggaccaacaaaaacgtacacccgagcaaagtcgtacaactgggcgacgaagtcgaagtcatgattttggaaatcgacgaaggccgccgccgtatctctttgggtatgaaacaatgccaagccaatccttgggaagaatttgccgccaaccacaacaaaggcgacaaaatctccggcgcggttaaatccattaccgatttcggcgtattcgtcggcctgcccggcggcatcgacggtttggttcacctgtccgacctgtcctggaccgaatccggcgaagaagccgtacgcaaatacaaaaaaggcgaagaagtcgaagccgtcgtattggcaatcgacgtggaaaaagaacgcatctccttgggtatcaaacaactggaaggcgatccgttcggcaacttcatcagcgtgaacgacaaaggttctttggttaaaggttccgtgaaatctgttgacgccaaaggtgctgttatcgccctgtctgacgaagtagaaggctacctgcctgcttccgaatttgcagccgaccgcgttgaagatttgaccaccaaactgaaagaaggcgacgaagttgaagccgtcatcgttaccgttgaccgcaaaaaccgcagcatcaaactttccgttaaagccaaagatgccaaagaaagccgcgaagcactgaactccgtcaatgccgccgccaatgcgaatgccggcaccaccagcttgggcgacctgctgaaagccaaactctccggcgaacaagaataa

SEQ ID NO: 61645 - DNA, 324 bp, Neisseria meningitidis; identical to SEQ ID NO: 37053

SEQ ID NO: 61646 - DNA, 825 bp, Neisseria meningitidis
atgaactgcaatacgccgaccgatattatgttttcctttgaaggcttccgccggcgcggcggcattaccgaccatcatgccgacggtttcggcatcggctttttcgaaggcaaaggcgtgcgcctgttccatgacgacaaacccagtgccaattcgcccgtcgccgacctcgtgcgcgcctaccagattaaatcggaaaacgtcgtcgcccatatccgcaaagcatcgcaaggacaaacctcgctggcgaacacccatccctttatgcgcgaaatgtggggtggctactggctgtttgcccacaacgggcatttgattgattttttccccgaacagggcgaatttttccaccccgtcggcacaaccgattccgaacgcgcgttctgccacatcctcaaccgcctgcgcacccgctttgccgcccgtcccgacgacgacacgctgtttgacgcgattgcggggctgacgcacgaaatccgcaagttcgggctgtttaactttatgctttcagacggcattgccctgtttgcccacgccagcacactgctgcactacatcgtccgccaagccccgttcggcaaggcgcgcctgctcgacgacgacgtgatggtcgattttgccgaagtaaccacgccctccgaccgcgtcgccgttatcgccaccctgccgctgacccgcgacgaatcatggtcccaacttgccgtggacgaactggtcatgttccgcgaaggcaacatcgtccgacacgaccgtcccgaaaaccccgtttatatgagtgtcgaagaaggtttggaaaccgcgcgcgccgccggcgtcgccgtctga

SEQ ID NO: 61647 - DNA, 504 bp, Neisseria meningitidis
atgtccaccaaattcaaccaattcatcaaccgcgttctctcccacgagggcggttacgtcagccatcccaaagaccccggcggcgaaaccaattggggcatcactaagcgcaccgcccaggcaaacggctacaacggctccatgcgtgccatgacgcgtgaacaggctatcggcatttaccgaaaggcgttttgggagcgttaccgcgccgaccaaatgccggaagcggtcgcgttccaattttttgatgcctgcgtcaaccacggttacggcaatgccgtccgtatgctgcaacgcgccgcaggcgtggcggacgatggaatcatcggcgaaatcagcctcaaagccatcaattccctccccgaaaacgaccttttattgcggttcaacgccgagcgtctggtcttttataccaagctcagtacgttcacctctttcggcaagggctgggtacgccgtgtggcgcaaaacctgattcacgcgtctgcagataacactgattaa

SEQ ID NO: 61648 - DNA, 1035 bp, Neisseria meningitidis
atgcaaaccctgaccattatccgccccgacgatatgcacctgcacctgcgcgacggcgacgcgctcaaagccgttgtgccttataccgccagacagatggggcgcgccgtgattatgcccaatctcaaaccgcctgtcgtcagcgttgccgacgcgcttgcctacaaagcgcgcattatggcggcgttgcccgaaggcagcgcgtttgagccgttgatgacgctttatttgactgataacgccacgtccgaacttgtacgcgaagccaaagctgccggcatcgttgccttcaaactctaccccgccggcgcgaccaccaattccgattccggcgtaaccgacctgttcaaacttatccccgttttggaagaaatggcgaaacagggcatcctgttccttgttcacggcgaagtaactgaccccgaaatcgacatcttcgaccgtgaagccgcctttatcgggcgcgtgatgaaacccgttttggcgcaagtaccaaatcttaaagtcgtgttcgaacacatcaccaccgccgaagccgcccgcctcgttttggaagcaggcgacaacgttgccgccactgttaccccgcaacacctcttgctcaaccgcaacgacctcttggtcggcggcgtgcgcccccatcatttctgcctgcccgtactcaaacgcgaaacccaccgtcaggcattggttgccgccgttaccggcgagaaggcgcacaaattcttcctcggcacagattccgcgccgcacgccaaatccgctaaagaaaacgcctgcggttgcgccggtatgttcagcgcgatgaccgccatcgagctttacgccgaagtgtttgaaaaagcaggcgcgttggacaaactcgaagcctttacctcgaaaaacggcgcaaggttttacggcattccggaaaacgccggcacgatcaccctcgtcaaacaaagccaaaccgtccccgcaagtgttccctacggcgacggcgaacttgtcccgatgcgcgcgggcggcgaaatcggctggacggtacagtattga

SEQ ID NO: 61649 - DNA, 1815 bp, Neisseria meningitidis
atgcccgctgaaacgaccgtatccggcgcgcaccccgccgccaaactgccgatttacatcctgccctgcttcctttggataggcatcatcccctttaccttcgcgctcaggcagcaaccgtcgcccgacttttaccacgatgccgccgccgcagccggcctgattgtcctgttgttcctcacggcaggaaaaaaactgtttgatgtcaaaatccccgccatcagcttccttctgtttgcaatggcggcgttttggtatcttcaggcacgcctgatgaacctgatttaccccggtatgaacgacatcgtctcttggattttcatcttgctcgccgtcagcgcgtgggcctgccggagcttggtcgcacacttcggacaagaacgcatcgtgaccctgtttgcctggtcgctgcttatcggctccctgcttcaatcctgcatcgtcgtcatccagtttgccggctgggaagacacccctctgtttcaaaacatcatcgtttacagcgggcaaggcgtaatcggacacatcgggcagcgcaacaacctcggacactacctcatgtggggcatactcgcctccgcctacctcaacggacaacgaaaaatccccgccgccctcggcgtaatctgcctgattatgcagaccgccgttttaggtttggtcaactcgcgcaccatcttgacctacatagccgccatcgccctcatccttcccttctggtatttccgttcggacaaatccaacaggcggacgatgctcggcatagccgcagccgtattccttaccgcgctgttccaattttccatgaacaccattctggaaacctttactggcatccgctacgaaactgccgtcgaacgcgtcgccaacggcggtttcacagacttgccgcgccaaatcgaatggaataaagcccttgccgccttccagtccgccccgatattcgggcacggctggaacagttttgcccaacaaaccttcctcatcaatgccgaacagcacaacatatacgacaacctcctcagcaacttgttcacccattcccacaacatcgtcctccaactccttgcagagatgggaatcagcggcacgcttctggttgccgcaaccctgctgacgggcattgccgggctgcttaaacgccccctgacccccgcatcgcttttcctaatctgcacgcttgccgtcagtatgtgccacagtatgctcgaatatcctttgtggtatgtctatttcctcatccctttcggactgatgctcttcctgtcccccgcagaggcttcagacggcatcgccttcaaaaaagccgccaatctcggcatactgaccgcctccgccgccatattcgcaggattgctgcacttggactggacatacacccggctggttaacgccttttcccccgccactgacgacagtgccaaaaccctcaaccggaaaatcaacgagttgcgctatatttccgcaaacagtccgatgctgtccttttatgccgacttctccctcgtaaacttcgccctgccggaataccccgaaacccagacttgggcggaagaagcaaccctcaaatcactaaaataccgcccccactccgccacctaccgcatcgccctctacctgatgcggcaaggcaaagttgcagaagcaaaacaatggatgcgggcgacacagtcctattacccctacctgatgccccgatacgccgacgaaatccgcaaactgcccgtatgggcaccgctgctacccgaactgctcaaagactgcaaagccttcgccgccgcgcccggtcatccggaagcaaaaccctgcaaatga

SEQ ID NO: 61650 - DNA, 303 bp, Neisseria meningitidis; identical to SEQ ID NO: 43912

SEQ ID NO: 61651 - DNA, 645 bp, Neisseria meningitidis
atgaagctcaaacatctgttgccgctgctgctgtcggcagcgttgtccgcgcaggcatatgccctgacggaaggggaagactatcttgtgttggataaacccattcctcaagaacagtcgggtaaaattgaggttttggaatttttcggctatttctgcgtacattgccatcatttcgatcctttgttattgaaactgggcaaggcattgccgtctgatgcctatttgaggacggagcacgtggtctggcagcctgaaatgctcggtctggccaggatggcggctgccgtcaatttgtcgggtttgaaatatcaggcaaaccctgccgtgtttaaagcagtttacgaacaaaaaatccgcttggaaaacagggctgttgccggaaaatgggctttgtctcaaaaaggctttgacggcaaaaaactgatgcgcgcctatgattcccccgaagctgccgccgccgcattaaaaatgcagaaactgacggaacaataccgcatcgacagcacgccgaccgttattgtcggcggaaaataccgcgttatcttcaataacggctttgacggcggcgttcatacgattaaagaattggttgccaaagtcagggaagaacgcaagcgtcagacccctgctgtacagaaatag

SEQ ID NO: 61652 - DNA, 1065 bp, Neisseria meningitidis; identical to SEQ ID NO: 55454

SEQ ID NO: 61653 - DNA, 294 bp, Neisseria meningitidis; identical to SEQ ID NO: 40485

SEQ ID NO: 61654 - DNA, 651 bp, Neisseria meningitidis; identical to SEQ ID NO: 55294

SEQ ID NO: 61655 - DNA, 1218 bp, Neisseria meningitidis
atggagattattttaggtatcgtgatgtttaccgtcatcgttttggttttggcactgatgattctgtttgccaaatccaaactggtcagcgaaggcgacatcaccatcaaagtcaacggcgaaaaagagctgacgatgcccgccggcggcaaactcttgggcgcgcttgccaacgaaggcatctttatcccctccgcctgcggcgggggcggttcgtgcggacaatgccgcgtcgtcgtaaaaagcggcggcggcgacatcctgccgaccgagctgtcccacatcagcaaacgcgaagcacgcgaaggctgccgtctgtcttgtcaggtcaacgtcaaaaccgacatggacatcgaagtccccgaagaagtgttcggcgtgaaaaaatgggaatgcaccgtcatctccaacgacaacaaagccacgttcattaaagaactcaagcttgccattcctgaaggcgaagaagttcctttccgcgccggcggctacattcaaattgaagccccttctcacactgttgcctacaaagacttcgacattcctaaggaataccacgaagactgggacaaatacaatctgtggcaatacgtttccaaagtggatgagccgattttgcgcgcctactctatggcttcgtatcctgaagaaaaaggcatcattatgctgaacgtgcgtatcgccacgccgcccccgcgcgtacccgatgcgcctccgggacaaatgtcttcctacatctggtcgctcaaacccggcgacaaagttacgatttccggcccgttcggcgaatttttcgccaaagacaccgatgccgaaatggtatttatcggcggtggtgcgggtatggctccgatgcgttcccacattttcgaccagttgaaacgtttgaactccaaacgcaaaattaccttctggtatggcgcacgttccaaacgcgagatgttctatgtcgaagactttgaccaactcgcagcagaattcccgaacttcacgtggcacgtcgccctgtccgatccactgccggaagacaactgggacggctacacaggcttcattcacaacgtggtttacgaaaaccatctgaaaaaccacgaagcgccggaagactgcgaattttatatgtgcggcccgccgattatgaaccagtccgtcatcaaaatgctcaaagacttgggtgtggaagacgaaaacatcctcttggacgatttcggcggttaa

SEQ ID NO: 61656 - DNA, 1854 bp, Neisseria meningitidis
atgaaccgttatcctttatggaaatatctgctgattgtgttcacgattgcggttgccgcagtgtattcgctgcccaacctattcggcgaaacacccgccgtgcaggtatcgaccaaccgacaagccatcatcatcaacgaacagactcaatccaaagtggatgccgcgctgcaaaacgcgggtattcagaccgacgggatgtttgttgtggacaattcactgaaagtgcgtttcaaagacaccgaaacgcagcttaaagcgcgcgacgtcatcgaaaatactttgggcgaagggtatattaccgcactcaaccttttggcagacagtcctgagtggatggcgaaaatcaaagccaatccgatgtttttgggtctggacttgcgcggcggtgtgcatttcaccatgcaggtggacatgaaagcggcgatgcagaaaacgtttgaacgttattcgggcgacatccgccgcgaactgcgccgcgaaaaaatccgcagcggcacggtgcgtcaggctggaaacagcctgaccgtccctttgcaggatgcaggtgatgtgcaaaaggcactgccgcagttacgcaagctgtttcctgaagcaacgctgaattcagacggcagcaatatcgtcttgacactttcggaagaggcggtcaataaagtgcgttccgatgcggtcaaacagaacatcactaccctgcacaaccgtgtgaacgagttgggcgtggccgaacccgtcatccagcagtccggtgccgaccgtatcgtcgtgcagcttccgggcgttcaggatactgccaaggcaaaagacatcatcggccgtaccgcgactttggaattgcgtatggtggaggacgatcctgccaagttgcgcgaggcattggaaggcaacgtgccgagcggttatgagctgctttcaagcggcggagatcgtcccgaaactctgctaatcagcaaacaggtcgagctgacgggcgacaacatcaacgatgcgcaaccgagtttcgaccaaatgggcgcacctgccgtcagtctgagcttggacagcgcgggtggcagcatttttggcgaactgactgccgcaaatgtcggcaaacgcatggcgatggttttgatcgaccaaggaaaatccgaggttgtaaccgcgccggttatccgtactgccattaccggcggacgcgtggaaatttccggaagcatgacgacagccgaagccaatgatacgtctttgctgttgcgtgccggttctcttgccgcgccgatgcagattgtcgaagaacgtaccatcggtccgtctttgggtaaggagaacatcgaaaaaggcttccattcgactttatggggttttgccatcgttgctgcattcatggtggtttactatcgtctgatgggtttcttttctaccattgcattgagtgccaacatactgttcctaatcggtattttgtctgccatgcaggcaacgttgacgttaccgggtatggccgcgctggcgttgactttgggtatggcaatcgactccaacgtcttgattaacgaacgtatccgcgaagaattgcgtgccggcgtgccgccgcagcaggcaatcaatctcggtttccaacacgcatgggcgaccattgtcgattccaacctgacttcgctgattgccggtatcgcgcttttggtattcggttccggcccggtacgcggttttgcggtcgtacactgtttgggtattctgacttcgatgtattcctccgtcgtcgtattccgtgcgttggtcaatctgtggtacggacgcagacgcaaattgcagaatatttccatcggtgcggtatggaaacctgaagccgaaactgcggcaggtaaggagtaa

SEQ ID NO: 61657 - DNA, 1155 bp, Neisseria meningitidis; identical to SEQ ID NO: 55962

SEQ ID NO: 61658 - DNA, 180 bp, Neisseria meningitidis; identical to SEQ ID NO: 42055

SEQ ID NO: 61659 - DNA, 1167 bp, Neisseria meningitidis
atgattattgatgtaaaagtacctatgctgtctgaaagcgtatctgaaggcacgctcttggaatggaagaaaaaagttggcgaagcagttgcccgtgacgaaatcctgatcgatatcgaaacggacaaagtggttttggaagtcccttccccacaagccggcgtattggttgaaatcgtagcgcaagacggtgaaaccgttgttgccgaccaagttttggcacgcatcgatacagctgctactgccgctgccgaagcacccgtagccgctcctgccgaagccgccccggctgccgctcctgctgccgcacaaaacaacgccgctatgcctgccgccgccaaactggctgcggagaccggtgttgacgtgaacgcattgcaaggttccggccgtgacggtcgcgtattgaaagaagacgtacaaaatgccgctgccaaacctgccgcagccgcagcccctgccggcgcacgtcctgaagaacgcgtaccaatgagccgcctgcgtgcccgtgttgcagaacgcctcttggcttctcaacaagaaaacgccattctgactacattcaacgaagtcaacatgaaaccaatcatggacttgcgtgcgaagtacaaagaaaaattcgagaaagaacacggcgtgaaattgggctttatgtccttcttcgttaaagccgctgtcgccgccctgaaaaaatacccggttgtgaatgcttctgttgacggcaaagacatcgtgtaccacggctacttcgacatcggtatcgcgattggcagcccacgcggtttggttgtgccaatcctgcgcgatgccgaccaaatgagcattgccgacatcgaacaagcaattgttgattacgcgaaaaaagccaaagatggcaaaatcgctatcgaagatctgaccggcggtacattcagtattaccaacggcggtactttcggttctatgatgtctaccccgatcatcaacccgcctcaatctgcgattttgggtatgcatgccactaaagagcgcgctgtggttgaaaacggtcaagttgttgtccgtccaatgatgtatctggctctgtcttacgaccaccgtatcatcgacggtcgcgaagctgtattgactttggtagccattaaagacgcgttggaagacccagcccgcctgttgttggatctgtaa

SEQ ID NO: 61660 - DNA, 405 bp, Neisseria meningitidis; identical to SEQ ID NO: 54850

SEQ ID NO: 61661 - DNA, 795 bp, Neisseria meningitidis
atgaaggcctatttggacttgatgcgccacgtcctcgacaacggtacggacaaatcagaccgcaccggtacgggcacgcgctccgtattcggttatcagatgcgttttgacttgggcaaaggttttccgctgctgacgaccaaaaagctgcatttgcgctcgattatccacgagctgctttggtttctcaaaggcgataccaatatcaaatacctaaaggacaacaatgtttccatttgggacgagtgggcggacgaaaacggcgacttaggcccggtttacggctaccagtggcgtaactggcccgcgcccgacggcaggcatatcgaccaaatcgccaatgtggtggaacaaattaagaaaaaccccgactcgcgccgcctgattgtatcggcgtggaatccggctttggtcgatgaaatggcattgccgccctgccacgcgctgtttcagttttacgttgccgacggcaaactgtcctgccagctttaccagcgcagcgcggatattttccttggtgtgccgtttaatattgccagctacgcgctgttgaccatgatgatggcgcaagtgtgcggattggaggcgggcgagtttgtccatacgtttggcgacgcgcacctgtaccgcaaccatttcgagcaggccgcattgcagttggaacgcgaaccgcgcgccttgcctgtgatgaaaatcaatcctgaagtcaaagatttgtttgccttcaaatttgaagattttgagttggaaggctacgatccgcatccgcacatcaaggcggcagtgtcggtttag

SEQ ID NO: 61662 - DNA, 1386 bp, Neisseria meningitidis
atggacggctggacacagacgctgtccgcgcaaaccctgttgggcatttcggcggcggcaatcatcctcattctgattttaatcgtcaaattccgcatccacgcgctgctgacactggtcatcgtcagcctgctgacggctttggcaaccggtttgcccacaggcagcattgtcaacgacgtactggtcaaaaacttcggcggcacgctcggcggcgtggcgcttctggtcggcctgggcgcgatgctcggacgtttggtcgaaacatccggcggcgcacagtcgctggcggacgcgctgatccggatgttcggcgaaaaacgcgcaccgttcgcgctgggcgttgcctcgctgattttcggcttcccgattttcttcgatgccggactaatcgtcatgctgcccatcgtgttcgccaccgcacggcgcatgaaacaggacgtactgcccttcgcgcttgcctccatcggcgcattttccgtcatgcacgtcttcctgccgccccatccgggcccgattgccgcttccgaattttacggcgcgaacatcggccaagttttgattttgggtctgccgaccgccttcatcacatggtatttcagcggctatatgctcggcaaagtgttggggcgcaccatccatgttcccgttcccgaactgctcagcggcggcacgcaagacaacgacctgccgaaagaacctgccaaagcaggaacggtcgtcgccatcatgctgattcccatgctgctgattttcctgaataccggcgtatcggccctcatcagcgaaaaactcgtaagtgcggacgaaacctgggttcagacggcaaaaacaatcggttcgacaccgatcgcccttctgatttccgtattggtcgcactgtttgtcttgggacgcaaacgcggcgaaagcggcagcgcgttggaaaaaaccgtggacggcgcactcgcccccgtctgttccgtgattctgattaccggcgcgggcggtatgttcggcggcgttttgcgcgcttccggcatcggcaaggcactcgccgacagcatggcggatttgggcattcccgtccttttgggctgtttccttgtcgccttggcactgcgtatcgcgcaaggttcggcaaccgtcgccctgaccaccgccgccgcgctgatggctcctgccgttgccgccgccggctttaccgactggcagctcgcctgtatcgtattggcaacggcagcaggttcggtcggttgcagccacttcaacgactccggcttctggctggtcggccgcctcttggacatggacgtaccgaccacgctgaaaacctggacggtcaaccaaaccctcatcgcactcatcggctttgccttgtccgcactgctgttcgccatcgtctga

SEQ ID NO: 61663 - DNA, 354 bp, Neisseria meningitidis
atgaagcagattatcatcctacaatccgccgtattgtccatatgcgccgcagttgcctttgctgtatggggttttgccggattcctttcggcggtcggtggcggtttgtcctacctgcttcccacgtttgttgcagttttacttttaaaacttttcaggggaaaccctttcctgcaaagcaggatgttcgtcttcggagagattttaaaagtagtgctgtcgctgttgtccatgctcgccgtatttgctgtatggcatcaatcgttggtgttcgccccgtttctgatggggctgctcggtgtcagccatttggtttttttagtattgttgagagtgaaagattatggcaggtga

SEQ ID NO: 61664 - DNA, 477 bp, Neisseria meningitidis; identical to SEQ ID NO: 55204

SEQ ID NO: 61665 - DNA, 495 bp, Neisseria meningitidis; identical to SEQ ID NO: 45300

SEQ ID NO: 61666 - DNA, 456 bp, Neisseria meningitidis; identical to SEQ ID NO: 45576

SEQ ID NO: 61667 - DNA, 1167 bp, Neisseria meningitidis; identical to SEQ ID NO: 58303

SEQ ID NO: 61668 - DNA, 177 bp, Neisseria meningitidis; identical to SEQ ID NO: 38352

SEQ ID NO: 61669 - DNA, 1563 bp, Neisseria meningitidis
ttgtttgaagtgatgaaaaaacctttgatttcggttgcggcagcattgctcggcgttgctttgggcacgccttattatttgggtgtcaaagccgaagaaagcttgacgcagcagcaaaaaatattgcaggaaacgggcttcttgaccgtcgaatcgcaccaatatgagcgcggctggtttacctctatggaaacgacggtcatccgtctgaaacccgagttgctgaataatgcccaaaaatacctgccggataacctgaaaacagtgttggaacagccggttacgctggttaaccatatcacgcacggcccttttgccggcggatttggcacgcaggcgcacattgaaaccgagttcaaatacgcgcctgaaacggaaaaagttttggaacgcttttttgggaaacaagctccggtttcccttgccaataccgtttattttaacggcagcggtaaaatggaagtcagtgttcccgccttcgattatgaagagctgtcgggcatcaggctgcattgggaaggattgacgggaaaaacggtttatcaaaaaggtttcaaaagctaccgcaacagctatgatgcgcccttgttcaaaatcaagctggcagacaaaggcgatgccgcgtttgaaaaagcgcatttcgattcggaaacttcagacggcatcaatccgcttgctttgggcagcagcaatctgaccttggaaaaattctccctagaatggaaagagggtgtcgattacaacgtcaagttaaacgaactggtcaatcttgttaccgatttgcagattggcgcgtttatcaatcccaacggcagcatcgcaccttccaaaatcgaagtcggcaaactggctttttcaaccaagaccggggaatcaggctcatttatcaacagtgaagggcagttccgttttgacacgctggtgtacggcaatgaaaaatacggcccgctggacatccatatcgccgccgaacatctcgatgcttctgccttaaccgtattgaaacgtaagtttgcacaaatttccgccaaaaaaatgaccgaggaacaaatccgcaatgatttgattgccgccgtcaaaggcgaggcttccggactgttcaccaacaatcccgtattggacattaaaacttttcgtttcacacagccgtcgggaaaaatcgatgtgggtggaaaaatcatgtttaaagacatgaagaaggaagatttgaaccaattgggtttgatgctgaagaaaaccgaagccgacatcagaatgagtattccccaaaaaatgctggaagacttggcggtcagtcaggcaggcaatattttcagcgtcaatgccgaagatgaggcggaaggcagggcaagtcttgacgacatcaacgagaccttgcgcctgatggtggacagtacggttcagagtatggcaagggaaaaatatctgactttgaacggcgaccagattgatactgccatttctctgaaaaacaatcagttgaaattgaacggtaaaacgttgcaaaacgaaccggagccggattttgatgaaggcggtatggtttcagagccgcagcagtaa

SEQ ID NO: 61670 - DNA, 540 bp, Neisseria meningitidis; identical to SEQ ID NO: 61313

SEQ ID NO: 61671 - DNA, 924 bp, Neisseria meningitidis; identical to SEQ ID NO: 55838

SEQ ID NO: 61672 - DNA, 348 bp, Neisseria meningitidis; identical to SEQ ID NO: 54695

SEQ ID NO: 61673 - DNA, 546 bp, Neisseria meningitidis; identical to SEQ ID NO: 56103

SEQ ID NO: 61674 - DNA, 1134 bp, Neisseria meningitidis
atgtttaaaaaattcaaaccggtattgttgtcattttttgcacttgtatttgccttttggctgggaacgggtattgcctatgagattaatccgcgttggtttttgagcgatacggcaactgaaatacctgaaaatccgaatgcttttgtggcgaaacttgcccgcctgttccgaaatgccgacagggcggttgtcatcgtgaaggaatcgataaggacggaggaaaatcttgccgaaactgtggatgacggtccgttgcagtcggagaaggattatcttgcactcgctatccggctcagtcgtttgaaagaaaaggcgaaatggtttcacgtaacggagcaggaacatggggaagaggtttggctggattaccatatcggcgagggcggtttggttgcggtttcgcttttgcaacgctcgccggaagcgtttgttaatgccgaatatctgtatcggaacgatcgtccgttttctgtaaatgtgtacggcggaacggctcacggagaaaattatgaaacgacaggagaatatcgggttgtttggcaaccggacggttcggtatttgatgcgtcggggcgcgggaaaatcggggaagatgtttatgagcattgtctcgggtgttatcagatggcccaggtatatttggcgaaatatcgggatgtcgcgaatgatgagcagaaggtttgggacttccgcgaagagagcaaccggattgcgtcggactcgcgcgattctgtgttttatcagaatatgcgggaattgatgccccgggggatgaaggcgaacagtcttgtggtcggctatgatgcggacggtctgccgcaaaaagtctattggagtttcgacaatggaaaaaaacgccagagtttcgaatattatttgaaaaacggaaatctttttattgcacaatcttcgacggtagcattgaaagcggatggcgtaacggcggatatgcagacctatcatgcgcaacagacgtggtatttggatggcgggcggattatccgcgaagagaaacagggagacagactgcctgattttcctttgaacttggaagatttggaaaaagaggtgagccgttatgcagaggctgcggcgagacgttcgggcggcaggcgcgacctttctcactga

SEQ ID NO: 61675 - DNA, 1113 bp, Neisseria meningitidis
atgaccgcaaaggaagaactgttcgcatggctgcgccatatgaacaaaaacaaaggttccgacctgtttgtgacgacccatttcccgcccgcaatgaagctggacggcaaaatcacccgcatcacggacgaaccgctgacggcggaaaaatgtatggaaatcgccttttcgattatgagtgcgaagcaggcggaagaattttcatcgaccaacgagtgcaacttcgccatcagcctgccggacaccagccgcttccgcgtcaatgcgatgatacagcgcggcgcgacggcgttggtattccgtgcgattaccagcaagattcccaagtttgaaagcctgaacctgccgccggtcttgaaggatgtcgcgctgaaaaaacgcgggctggttatttttgtcggcggcaccggctcgggcaaatcgacttcgcttgcctcgcttatcgattaccgcaatgaaaattcgttcggacatatcatcaccatcgaagacccgatcgagtttgtccacgaacacaaaaactgcatcatcacccagcgcgaggtcggcgtggatacggaaaactggatggcggcgttgaaaaacacgctgcgtcaggcgccggatgtcatccttatcggcgaaatccgcgaccgcgaaacgatggactacgccattgcctttgccgaaacggggcatttgtgtatggcgacgctgcacgccaacagcaccaatcaggcactcgaccgcatcatcaactttttccccgaggagcggcgcgaacaattgctgacggatttgtcgctcaaccttcaggcgtttatttcgcaacgcctcgttccgcgagacggcggcaagggcagggtggcggcagtcgaggtgctgctcaattcgcccctgatttcggagttgattcacaacggcaacatccatgaaatcaaagaagtgatgaaaaaatccactaccctgggtatgcagaccttcgatcaacacctttaccaattgtatgaaaaaggcgatatttccctgcaagaagcattgaaaaatgccgattccgcacacgatttgcgtttggcggtacagttgcgcagccgccgcgcgcaaagttccagccccgatttggaactgctctga

SEQ ID NO: 61676 - DNA, 729 bp, Neisseria meningitidis
atgaccaaacagctgaaattaagcgcattattcgttgcattgctcgcttccggcactgctgttgcgggcgaggtgtccgttcagggttacaccgtaagcggccagtcgaacgaaatcgtacgcaacaactatggcgaatgctggaaaaacgcctactttgataaagcaagccaaggtcgcgtagaatgcggcgatgcggttgctgcccccgaacccgagccagaacccgaacccgcacccgctcctgtcgtcgttgtggagcaggctccgcaatatgttgatgaaaccatttccctgtctgccaaaaccctgttcggtttcgataaggattcattgcgcgccgaagctcaagacaacctgaaagtattggcgcaacgcctgggtcaaaccaatatccaatctgtccgcgtcgaaggccataccgactttatgggttctgacaaatacaatcaggccctgtccgaacgccgcgcatacgtagtggcaaacaacctggtcagcaacggcgtacctgtttctagaatttctgctgtcggcttgggcgaatctcaagcgcaaatgactcaagtttgtgaagccgaagttgccaaactgggtgcgaaagtctctaaagccaaaaaacgtgaggctctgattgcatgtatcgaacctgaccgccgtgtggatgtgaaaatccgcagcatcgtaacccgtcaggttgtgccggcacacaatcatcaccaacactaa

SEQ ID NO: 61677 - DNA, 1674 bp, Neisseria meningitidis
atgcttctaacactttctttgcgtgattttgtcattgttgaaaatctgaatctggattttcaaagcggctttaccgtattgaccggagaaaccggcgcgggcaagtccattactttggatgcgattggtctgctgttgggcgacaaagccgattacagccaagtccgcagcggtgcaaaagaagcgcagttgtcggcattgttcgatatttcccatttgcctgttttaaaagcagaattgtatgaacaggggcttttaaacgacggagaagaagaactcagtatccgccgcattatcgatgccaaaggcaaaagccgcagctttatcaacaatcaggccgctaccttggcgcaactcaaatccgtcggtagccagcttatcgacatccacgggcaaaacgcccatcattcgcttaatcaggaagccgcccagcgcgaattgttggacgcatttgcgggtagcagggagcaggcggaaaccgtcaggcagctttatcaaaattgggccaatgcgaaaaaagccctccaagaggcgcaggaacacgccgatgccgtcattatcgagcgggagcgtctggaatggcagtttaacgaactgaatcagttggacattaaacaaggcgaatgggaagccctcagccaaagccacgacagccttgcccattctgccgagctgttgcaggctgccgaagaagtcggaagcaagattgacggcgacaacggcatccaacgccatatctatcaatgtcaaaaactattggccaatctgcaaaacatcgagccgcgctttgccgagagcctgaatatgttggcaagcatcgaagccgaattgggcgaaatcagtgccaatatgcgcgatgtggcaggtcgcagcgacatcaatcccaatgaattggcggcacaggaacagcgcatgggcgaactgatggggatggcgcggaaataccggatcgagcctgaagagttgcctgccaagttggcagaaatcgaagaacgcctgcaaagcctgcaagctgccgccgatttggacgcgctcgagcataatgttgcccacaattttgccgaatatcaggaagctgcccacatcctttctgccatgcgccatcaggcggcagagcgtttgagcggcgaaacgaccgagcatatgcaacaccttgccatgaaaggtgcacgtttcgacatcgtcctgttgccctcgtcgccgacggcacatggtttggagcaggttcaatttcaagttgccgccaacaaaggcaatccgccccgtccgctgaataaagttgcctccggcggcgaattggcgcgtatcagccttgccttacaggttgttgccagccaatatacccaagttcccaccctgatttttgatgaggtcgataccggtattggagggggagtggctgaaatggtcggcaaggcattacgttcgttgggcagaaaacatcaggtgcttgccgttacccatcttccgcaagtcgcatcctgcggcgaaaaccactggcgggtgcgcaagcacagcgagggagagcaaaccgtcagcgaaatcagtatattggataaaatccaacgggtcgaagaggttgcccgtatgttgggcggagaagtcattaccgatacgacgcggcaacatgcggcagaattgctgcaacttgcgtcgaaaaatagtttattttaa

SEQ ID NO: 61678 - DNA, 258 bp, Neisseria meningitidis; identical to SEQ ID NO: 55886

SEQ ID NO: 61679 - DNA, 474 bp, Neisseria meningitidis; identical to SEQ ID NO: 39290

SEQ ID NO: 61680 - DNA, 924 bp, Neisseria meningitidis
atgctgcaaagaactttggcgaaatccatcagcgttaccggagtcgggttgcattcaggcgaacgcgtcgcgctgaccctgcaccccgcgcctgaaaacagcgggatttccttccgacgcaccgatttggacggcgagatgggcgaacaaatcaaactgaccccttatttgatcaacgatacccgcctttcctccaccatcgttaccgacaaaggcgtgcgcgtcggcacaatcgaacacattatgtccgcgctgtccgcctacggtatcgacaacgcgctgattgagctgaacgcgcccgaaatcccgattatggacggctccagcctgccgtttatttaccttttgcaagatgcgggcgtggtcgatcaaaaggcgcaaaagcgttttttgaaaatcctcaagcctgtcgaaatcaaagaagcgggcaaatgggtgcgctttacgccgtatgacggctttaaggtaacgctgaccatcgaattcgaccatccggttttcaaccgcagctcgcccacttttgaaattgatttcgccggcaaatcctacatcgacgaaatcgcgcgcgcgcgcactttcggctttatgcacgaagtggaaatgatgcgcgcccacaatctgggtttgggcggcaatttgaacaacgccatcgtgattgacgacacggatgtcctgaatcctgaaggcttgcgctatcccgatgagtttgtgcgccacaaaatccttgatgccatcggtgatttgtatatcgtcggacatccgattgtcggcgcgtttgaaggctacaaatcgggacacgccatcaacaacgcactcttgcgcgcggttttggcagacgaaacggcttacgaccgggtggaatttgccgacagcgatgatttgcccgacgcatttcacgagctgaacatcagaacttgtggataa

SEQ ID NO: 61681 - DNA, 249 bp, Neisseria meningitidis; identical to SEQ ID NO: 38918

SEQ ID NO: 61682 - DNA, 621 bp, Neisseria meningitidis; identical to SEQ ID NO: 48243

SEQ ID NO: 61683 - DNA, 678 bp, Neisseria meningitidis
atgcaagccgatttcaaccgccccgtcctcgccgtcgataccggaacttcctatttgtcgctcgcgctgcgcgccgacggcgaaacccgtctgttccatcaggaagtcggcagccgccagtccgcactgatcctgccggaaatccgcaccctattccgaaatgcaggcattaccgccgccgatttgggggcgattgtttatgcgaaaggccccggcgcgtttacgggactgcgtatcggtatcggcgtggcgcaaggtttggcaacgccgtttgatacgcctttaatcggcatccccacgctcgatgccgccgcctcgctgccgccgccgcaaagctgcatactcgccgctgcggacgcgcgtatgggcgaagtgttttatgcgtggttcgacacgctgaaccgccgccgtttgagcgattatcaggtcgggcgggcggcagacatccggctgccggagggatgtgccttttcagacggcataggcagcgcgttcgcgttggaagaaacgccgccgttttcaggcaaacccgatatgccgaccgccgccgacttcctcaatctggcggctgaaggcggttttcccgccgtcgctgcggcacacgccgagctgctctacgtccgcaacaaaatcgccctgactgccaaagaacaggcggaacggagggcgcgcctgtga

SEQ ID NO: 61684 - DNA, 1887 bp, Neisseria meningitidis; identical to SEQ ID NO: 56077

SEQ ID NO: 61685 - DNA, 693 bp, Neisseria meningitidis; identical to SEQ ID NO: 42313

SEQ ID NO: 61686 - DNA, 783 bp, Neisseria meningitidis
atggaatcactgactgccataaataaatcgcgcattcggcaggctttccaaaaagcattaaacgattatgaccggcacgccttaatccaacaaaaaatgacgattaatttaatggcgcatttgcaagattatttgccggatatgccattggaaaacgtgttggaattgggctgtggctcaggaatgttgagtgccttgctgcaaaaacagatttcagcgaattattggttatttaatgatttgtgcgatgtgcagccccaactggctgaaaaactgccgcaatcctttgatttttattgcggcgatgcggaaaactttccttttcaacgacaatttgacttaatcgcaagcgcatctgccgtgcaatggtttcatcaacccgacgcttttatcacccattgcaaaacaggcttgaaagcaaacggattattggcggttgcaacctttggcaaagacaatttaaaagaagtccgccaaattacaaatataggcttaaattacccgactttatcccaatggcagacttggttagccaaagattttgagcttttatggtgtgaggattttaaggtaatactagactttgatacgccgttagatgtactcaaacaccttaaatatacaggcgttaccgccacgaaccaaaaaaattggacaagaaaaaatctcaatggatttattggcgattacttgtcggcgttcagtatgccgtcgggcaaagtgcgcctgacttatcatccgttattttttatcgcgcgctactctgcggagggcaggcaataa

SEQ ID NO: 61687 - DNA, 1158 bp, Neisseria meningitidis
atgaaattcgccacgaaagccattcattccagctacgattgcgacgaacacaaccgcgcgctgatgccgccgatttatcaaaacagtatgttcgcgttgcacgagattggcgaaaatgtgccttaccgctactcgcgcctgagcaacccgacccgtcagattttagaagacaccgttgccgatttggaacacggtgcggcaggttttgcgttttccagcggtatggcggggattgatgccgtgtggcgtaccttcctacaaccgggcgataccatcgtcgcggtcgccgatatttacggcggcgcgtatgatttattggtcgatgtttatcaaaaatggggggtgaacgttgtttttgccgatttgggcaatccggataatttggacgaattgctcaaagcgcacaaggtcaaactggtttggctggaaacgccgtccaatccgcttttgcgcttggtagacatcaaagcgcttgccgcgaaagccaaagcggccggcgcactggtcggtatcgacaacacctttgccacgccgtatctgcaacagcccttggatatgggttgcgattttgtgttccattccgctaccaaatatttgtgcggccattccgacgtgttgatgggcatcgtcgttgccaaaaccaaagagctggcgcagcctttgcacgatatgatggtgcataccggcgcggttgccggcccgatggactgctggctggtgttgcgcggcatcaaaacactggctctgcgcatgaacgcccattaccaaaacgcactcgaaatcgcgcgccgtttggaagcccatcctgccattgaaaaagtgttccatcccggcctgccgtctcacgaacattacgaactggcgaaaacacaaatgcccaaaggcataggcggcgtggttacggtttatctcaaaaacgacacgcgtgaagcggcaaacagcgtgattaaaaacatgaaactggtcaaaatggcttccagcctcggcggcgtggaaagtttggtcaaccattgctattcccagtcccacagcggcgtgccgcataatgtgaaaatggaaatgggcatcagggtcggcctgctgcgtttctctgtcggtatcgaagatgtagatgatatttggaatgatatttccgccgcactggatacgactttgtaa

SEQ ID NO: 61688 - DNA, 582 bp, Neisseria meningitidis; identical to SEQ ID NO: 37500

SEQ ID NO: 61689 - DNA, 891 bp, Neisseria meningitidis
gtgtctgaaattcatcaaatttattgggaggaatcgggcaatcccgacggtgtgccggttatttttttacatggcgggccgggcgcgggggcttcgcctgaatgtcggggttttttcaatcccgatgtgttccgcatcgtcatcatcgaccagcgcggttgcggacgttcgcgcccgtatgcttgtgcggaagacaatacgacttgggatttggtggcggatattgaaaaagtccgtgaaatgctgggtatcaggaaatggctggtgttcggcggttcgtggggcagcactttgtcgctggcttatgcccaaacccatcctgaacgggtaaagggattggtattgcgcgggatatttttgtgcaggccgtctgaaacggcgtggctgaacgaggcgggcggtgtgagccggatttatccggaacaatggcaaaaatttgtcgcgccgattgctgaaaatcgacggaaccggctgattgaggcgtatcacgggttgctgtttcatcaagatgaagaagtgtgcctgtctgccgcaaaggcttgggcggattgggaaagctatctgatccgtttcgagccggaggaagtggatgaagatgcttatgcctcgctggcaatcgcgcgtttggaaaaccattattttgtcaacggcggctggttgcagggcgatagggcgattttgaacaatatcggcaaaatacggaatatcccgaccattatcgtgcaggggcggtatgatttgtgtacgccgatgcagagtgcgtgggcgctgtcgaaagcctttccggaagcggaattgagggtggttcaggcagggcatcgtgcgttcgatccgcctttggcggatgcgctggttcaggcggttgaggatattttgccccgtttgttgtaa

SEQ ID NO: 61690 - DNA, 936 bp, Neisseria meningitidis; identical to SEQ ID NO: 54416

SEQ ID NO: 61691 - DNA, 633 bp, Neisseria meningitidis; identical to SEQ ID NO: 54940

SEQ ID NO: 61692 - DNA, 1290 bp, Neisseria meningitidis
atgatgaagtctatcctcaccgtatccggaaatcgtatgcgtaaacccagaatcacccatttggatgtttgggcaaacgatgaaagaatcggtactttggaaaagggggcaatgtaccgtttcacatatgacaaccccggttctccattgttgggtttgcactatcaggataggggtaaagtatatatcagcaacaacatgccgcatatctttgcacagtattttccggaaggctttttggatgcacacatcacaagcaaatatgcttttcatgatgcgccttttgaagacaatgagatgctgcgcttggcaattctgggcagagagactttgggtcggatacatgtgcgctgtaatgacccgctttttaatgaatggattgacgggttggagatgaaaaatccaagaatattgactgaacgggatttgctgggcataaatgcccgacaggtttttcagcaatatatggcagaaatcttccatcacggtcgtttcgtcagtgtatccgggatacagcagaagatgtccttagatgccatcagcagaaataccaagcaaactgcctcatatattgccaaaggttttgatgcatccgaatatccttgcttggctgccaatgaatttttatgcatgcagaccatcaaacaagcaggtattccggttgcacaaaccagcctgtcggaagattcatcagtcttattggtacgtcggtttgatgtcagtgaacaggagtatttcttaggcatggaagactttaccagtctgcgtcagtattcagcagaagataaatataaaggcagttatgcggctattgcacagattatccgacagatatccggcaggcccgatgaagatttaatccatttttttaaccagcttgccgccagttgcatattgaaaaacggggatgcacaccttaaaaatttttcagtactctatcatgacgaatacgatgtacgtcttgcacctacctatgatgtattggatacatcaatatacagggttggaacacaaggaatttttgatgcttatgacgatacgctggcattaaacctgactaaccacggtaagaaaacatatccttccaagaatacattgttggattttgctgagaaatattgcgatttgggaagagaagatgcatcctttatgatagatacaatcgttcaagctaaagaacaggttcttgttaaatactcggatgtattgcgtgagaatgaatggttggcgcagaagtggcattttatcccggatgaaaatgaagaaggtctaccgtttacattccggtag

SEQ ID NO: 61693 - DNA, 324 bp, Neisseria meningitidis; identical to SEQ ID NO: 55651

SEQ ID NO: 61694 - DNA, 966 bp, Neisseria meningitidis; identical to SEQ ID NO: 60806

SEQ ID NO: 61695 - DNA, 348 bp, Neisseria meningitidis; identical to SEQ ID NO: 38212

SEQ ID NO: 61696 - DNA, 294 bp, Neisseria meningitidis
atgaactttcaggaagaaaacgagaacatcaagaatgacatagagattaatctcttgcattccgctgaagccgacagcgtggaggcaatgatggacttggcggtttacgggctggcggcgatggttgccaaacacaacaaaacgcgcggcgagcagcttgtgttacaggcgattgccggtcatatgcggaagcttttggtcgcgcttcccgaaaccgagtcattggtgcagaccgggaaggtttaccgccgacttgaagatttgatttttaaaacgtatttgccggagcagtaa

SEQ ID NO: 61697 - DNA, 585 bp, Neisseria meningitidis; identical to SEQ ID NO: 45789

SEQ ID NO: 61698 - DNA, 876 bp, Neisseria meningitidis; identical to SEQ ID NO: 40452

SEQ ID NO: 61699 - DNA, 1311 bp, Neisseria meningitidis; identical to SEQ ID NO: 55587

SEQ ID NO: 61700 - DNA, 1215 bp, Neisseria meningitidis
atgaccgtcaaaacccccgtttacctcgactacgccgccaccaccaccgttgacaaacgcgttgccgaaaaaatgattccctatctgaccgaaaccttcggcaaccccgcctccaacagccacgcattcggctgggaagcagaagaggccgtcgaaaaagcccgcgccgacatcgctgccctgattaatgccgaccccaaagaaatcgtcttcaccagcggcgcgaccgagtccgacaacctcgccatcaaaggcgcggcaaacttctacaaaaccaaaggcaaacacctcattaccgtcaaaaccgaacataaagccgttttagatacaatgcgcgaactcgaacgccaaggttttgaagtaacctacctcggcgttcaagaaaacggtttgattgatttggaagaactcaaagccgccatccgcgacgacaccatcctcgtttccgtaatgtgggcaaacaacgaaatcggcgtggtgcaagacattcccgccatcggcgaaatctgccgcgaacgcaaaatcgtcttccacgtcgatgccgcccaagcctgcggcaaagtgcctgtcgatgtcgaagccgccaaaatcgacctgctctcgatgtccgcgcacaaagtgtacggccccaaaggcatcggcgcgctgtacgtccgccgcaaaccccgcgtccgcctcgaagcccaaatgcacggcggcggccacgaacgcggcttccgcagcggcacattgccgacccaccaaatcgtcggtatgggcgaagccttccgcattgccaaagaagaattggcacaagacactgcgcactacctgaaactgcgcgatatcttcctcaaaggcatcgaaggcatcgaagaagtctacatcaacggcgacctcggacaccgcgccccgaacaacctgaacgtcagcttcaacttcgtcgaaggcgaaagcctgattatggcggtgaaagaactcgccgtatccagcggctccgcctgcacctccgcctcgctcgaacccagctacgtcctgcgcgcgctcggccgcaacgacgaactggcgcactcatccctgcgtatcaccttcggtcgcatgaccaccgaagaagaagtgcaattcgccgccgaactgattaaatccaaaatcggcaaactgcgcgaactgtcgccgctgtgggaaatgttcaaagacgggattgatttgaactcgattgaatgggcggcgcattaa

SEQ ID NO: 61701 - DNA, 441 bp, Neisseria meningitidis
atgccgaaagccaccttttacacgcacgttgcccaagttccgattttcacctgccgcctgattgcccgtgcgattcgggacggcggcaggatactggtgtggtccgattcgttcgggcagcttcaggaattggacaaaatgctttggcaatacgaggccgagagttttattccgcacgaaatttgggaaatggaagaagccatgccgtctgaaacatccgtcctgcttgcttgcggcggcaatccgccccgaattcccgaaggcatgactgttttgaacctgtccgacggtttttggaacaccgctccggtcttgcccgcgcgcgttttggaaatcgtcggcaacagcttggaagatctcgccgacgcgcgcgaacgctttaccgcctaccgccgaagcggttttgccatcgaacatcacggcatggagggcaaggcataa

SEQ ID NO: 61702 - DNA, 417 bp, Neisseria meningitidis; identical to SEQ ID NO: 51640

SEQ ID NO: 61703 - DNA, 612 bp, Neisseria meningitidis; identical to SEQ ID NO: 55369

SEQ ID NO: 61704 - DNA, 642 bp, Neisseria meningitidis; identical to SEQ ID NO: 54738

SEQ ID NO: 61705 - DNA, 387 bp, Neisseria meningitidis; identical to SEQ ID NO: 55808

SEQ ID NO: 61706 - DNA, 1566 bp, Neisseria meningitidis
atgacccaagacaaaatcctcatcctcgacttcggttctcaagttacccagctgattgcccgccgcgtgcgcgaagcccacgtttactgcgaactgcattccttcgatatgcctttggacgaaatcaaagccttcaaccccaaaggcatcatcctctctggcggccccaattccgtttacgaatccgactatcaagccgataccggtatttttgatttgggcattccggttttgggcatctgttacggcatgcagtttatggcgcaccacttgggcggcgaagtgcagcccggcaaccagcgcgaattcggttatgcgcaagttaaaaccatagacagcgagctgacacgcggcattcaagatggtgagccaaacacactcgacgtatggatgagccacggcgacaaagtgtccaaactgcccgacggtttcgccgtcatcggcgacacgccgtcctgcccgattgccatgatggaaaacgccgaaaaacaattctacggcatccaattccaccccgaagttacccacaccaaacaaggccgcgccctgttgaaccgctttgtcttggatatttgcggcgcgcaacctagctggacgatgccgaactacatcgaagaagccgttgccaaaatccgcgaacaggtcggcagcgacgaagtgattttgggtttgtccggcggcgtggactcttccgtagccgccgcgctgattcaccgcgccatcggcgaccaactgacctgcgtgttcgtcgatcacggtttgttgcgcctgaacgaaggcaaaatggtgatggatatgttcgcccgcaacttgggtgtgaaagtgattcacgtcgatgccgaagggcagtttatggcgaaactcgccggcgtgaccgatccggagaaaaaacgcaaaataatcggcgcggaatttatcgaagtatttgatgccgaagagaaaaaactcaccaacgccaaatggctggcgcaaggcacgatttaccctgacgtaatcgaatccgcaggcgcgaaaaccaaaaaagcccacgccatcaaatcgcaccacaacgtcggcggcctgcctgaaaacatgaagctcaagctgcttgagccgttgcgcgacttattcaaagacgaagtgcgcgaactcggcgtcgctttgggcttgccgcgcgaaatggtgtaccgccatccgttccccggtcccggtttgggcgtgcgcatcttgggcgaagtgaaaaaagaatacgccgacttattgcgtcaagcagacgatattttcatccaagaattacgcaatactaccgacgaaaacggcacatcttggtacgacctgaccagccaagccttcgccgtcttcctgcccgtaaaatccgtcggcgtaatgggcgacggacgcacttacgactacgtcgtcgcactgcgcgcagtcatcaccagcgacttcatgaccgcacactgggcagaactgccttactcactgctcggacgcgtgtccaaccgcatcatcaacgaagtcaaaggcatcaaccgcgtggtgtacgatgtcagcggcaaaccgcctgccaccatcgagtgggaataa

SEQ ID NO: 61707 - DNA, 693 bp, Neisseria meningitidis
gtgcaggcggatttagcctatgccgccgaacgcattacccacgattatccgcaagcaaccggtgcaaacaacacaagcacagtaagcgattatttcagaaacatccgtgcgcattccatccacccccgggtgtcggtcggctacgatttcggcggctggaggatagcggcagattatgccagttacagaaaatggagcaacaataaatattccgtaaacacaaaagaggtgcaaagaaacaataacgctggcaactggcaagaactgaagacggaaaatcaggaaaacggcagcttccacgccgtctcttctctcggcttatccgccatttacgatttcaaactcaacgataaattcgataaattcaaaccctatatcggtgcgcgcgtcgcctacggacacgttaaacatcaggttcattcggtgagaaaagaaaccacgactactttcagtaaagcaggggcaggtgctacagagccaggcaaaattatatcaggtccgatctccaaacctgcctatcacgaaagccacagtatcagcagcttgggtcttggtgtcatcgccggtgtcggtttcgacatcacgcccaagctgaccttggacaccggataccgttaccacaactggggacgcttggaaaacacccgattcaaaacccacgaagtctcattgggcatgcgctaccacttctga

SEQ ID NO: 61708 - DNA, 861 bp, Neisseria meningitidis; identical to SEQ ID NO: 55980

SEQ ID NO: 61709 - DNA, 933 bp, Neisseria meningitidis
atggacatcgtatttgcggcagacgacaactatgccgcctatctttgcgttgcggcaaaaagcgtggaagcggcccatcccgatacggaaatcaggttccacgtcctcgatgccggcatcagtgaggcaaaccgggcggcggttgccgccaatttgcggggggggggtaatatccgctttatagacgtaaaccccgaagatttcgccggcttccccttaaacatcaggcacatttccattacgacttatgcccgcctgaaattgggcgaatacattgccgattgcgataaagtcctgtatctggatatagacgtattggtcagggacagcctgacgcccttatgggataccgatttgggcgataactggcttggcgcgtgcattgatttgtttgtcgaaaggcaggaaggctacaaacaaaaaatcggtatggcggacggcgaatattatttcaatgccggcgtattgctgatcaacctgaaaaagtggcggcggcacgatattttcaaaatgtcctgcgaatgggtggaacaatacaaggacgtgatgcaatatcaggatcaggacattttgaacgggctgtttaaaggcggggtgtgttatgcgaacagccgtttcaactttatgccgaccaattatgcctttatggcgaacaggtttgcgtcccgccataccgacccgctttaccgcgaccgtaccaatacggtgatgcccgtcgccgtcagccattattgcggcccggcaaagccgtggcacagggactgcaccgcgtggggtgcggaacgtttcacagagttggcgggcagcctgacgaccgttcccgaagaatggcgcggcaaacttgccgtcccgcaccgtatgttttcgacaaagcgtatgcttcaaagatggcgcagaaagctgtctgccagattcttacgcaagatttattga

SEQ ID NO: 61710 - DNA, 2397 bp, Neisseria meningitidis
atgattaaaaagattttaacgacttgttttggtttggtttttgggttttgtgtatttggagtgggtttggttgccattgctattttggtaacgtatccgaaactaccgtctttggattctttgcagcattaccagcctaaaatgccgttgactatttattcggcggatggggaagtcatcggtatgtatggggagcagcggcgcgaatttacaaaaatcggcgatttcccagaggtgttgcggaatgcggttatcgccgccgaggataaacgcttttaccggcattggggggtggatgtttggggtgttgcccgcgctgccgtcggcaatgtcgtgtccggcagcgtgcagtcgggtgcgagtacgattacgcagcaggtggcgaaaaatttttatttgagcagtgaaaaaacgttcacacgcaaattcaatgaggtgttgcttgcctataaaatcgagcagtctttaagcaaagacaaaatcctcgagttgtatttcaatcagatttacctcggtcagcgcgcctatggttttgcatctgccgcgcaaatctatttcaataagaatgtccgagatttgactttggcggaagccgccatgcttgcgggactgcccaaggctccgtctgcctataatccgattgttaatccggaacgtgccaagttgcgccagaagtatattttgaacaatatgctcgaggagaagatgattaccgtgcaacagcgcgatcaggcgttgaatgaggaactgcattacgagcggtttgttcggaaaatcgatcagagtgctttatatgtggcggaaatggtgcgtcaggaactgtatgagaaatacggtgaagatgcctatacgcagggttttaaggtttataccacggtccgcgccgatcatcagaaggtggcaaccgaggcattgcgcaaggctctacggaatttcgatcgcggcagcagctaccgcggtgcggaaaactatatcgatttgagtaagagtgaagatgtcgaggagactgtcagccagtatctgtcgggactctataccgtcgataaaatggttcccgccgttgtgttggatgtgactaaaaagaaaaatgtcgtcatacagctgcccggcggcaggcgggttacgcttgacaggcgcgccttgggttttgcggcccgcgcggtcaataatgaaaaaatgggggaggaccgtatccgcaggggcgcggtcatccgtgtcaaaaacaacggcgggcgttgggcggtggttcaagagccgttgctgcagggggctttggtttcgctggatgcaaaaaccggagctgtgcgcgcgctggtcggcggttatgattttcacagcaaaacattcaatcgtgccgttcaggcaatgcggcagccgggttcgacctttaagccgtttgtctattcggcggcattatctaaggggatgaccgcgtccacagtggttaacgatgcgccgatttccctgccggggaaagggccgaacggttcggtttggacacctaaaaattcagacggcagatattccggctacattactttgagacaggctctgacggcttccaagaatatggtttccatccgtattttgatgtctatcggtgtcggttacgcgcaacagtatatccggcgtttcggcttcaggtcgtccgagctgccggcaagcctgtctatggctttaggtacgggcgagacaacgccgttgaaagtggcggaggcatatagcgtatttgcgaacggcggatatagggtttcttcgcacgtaatcgataagatttatgacagagacggcaggttgcgcgcccaaatgcaacctttggtggccgggcaaaatgcgcctcaggcaatcgatccgcgcaatgcctatattatgtataagattatgcaggatgtggtccgtgttggtacggcaaggggggcagctgcgttgggaagaacggatattgccggtaaaacgggtacgaccaatgacaataaggatgcgtggtttgtcggttttaaccctgatgtggttactgccgtatatatcggcttcgacaaacctaagagtatggggcgtgtcggctacggcggtacgattgcggtgccggtttgggtggactatatgcgttttgcgttgaaaggaaagcagggcaaggggatgaaaatgcctgaaggtgtggtcagcagcaatggcgaatactatatgaaggaacgtatggtaaccgatccgggcttgacgctggacaacagcggtattgcgccgcaaccttcccgacgggcaaaagaagatgacgggggcgcggcagaaggcggacggcaggcggcggatgacgaagtccgccaagatatgcaggaaacgccggtgcttccgagtaatactggttccaaacagcagcagttggattctctgttttaa

SEQ ID NO: 61711 - DNA, 798 bp, Neisseria meningitidis; identical to SEQ ID NO: 38316

SEQ ID NO: 61712 - DNA, 399 bp, Neisseria meningitidis
atgttggggcttacacggaacaattgtgatgatttgggatttgctatattgtgttatgagcgcaatgcagccgacaaaaaagaattcttggattggttatatgaaattgtcaggactgtccctgccgaaagttttccaaggtatctgattgatttaatagattgtttggaatcagatgattgttccataaatatatataatattattggctttgttccaactaccggtatgacgaaaaaggaaaaagatgccgtatatggcattacctatatacggaatcaagagttttacgatattccgattactagggagaaggcgttaaaagccttaaaaaaacatcctgaaatttatcagaagtttcggcatttctttccgtttgtagaactgcccccgctttaa

SEQ ID NO: 61713 - DNA, 1713 bp, Neisseria meningitidis
atgaaagccagccaattctttatctctactttaaaagaagcccctgccgaagccgcgcttgccagccacaagctgatgattcgcgccggtctgattaaagccaacgcgtccggcctttatacttggatgccgatggggctgcgcgtgttacgcaaagtcgaaaacgtcgtgcgcgaggaaatggcgcgtgcgggcagcgtggagttgctgatgccggtggtgcagcctgccgagctgtggcaggaatccggccgctgggagttttacggtaaagagttgctgcgcctgaaagaccgccacgaccgcgatttctgcatgggtccgacctgtgaagaagtcatcgccgacatcgtgcgcaaagaaatcaacagctacaaacagctgccgaaaaacttttaccacatccaaaccaaattccgcgacgaagtgcgcccgcgtttcggcgtgatgcgcgcgcgcgagttcgtcatgaaagacgcttattccttccatgccgactacgcctcgcttcagacgacctatgatgccatgtatgacgcttactgccgcatcttcacccgtctgggcttggcattccgccccgtcgccgcagacaccggcagcatcggcggtacgggttcgcacgagtttcaagtgttggcggaaagcggcgaagatgtgattgcgtacagcgacacttccgattacgccgccaatatcgagttggcaccgaccttgccgcttaaaggcgaacgcaccgctgctcaggccgagttgaccaaagtacatacaccaaacgtcaaaaccattgagtctttggttgaattcctgaatattccggttgaacaaaccctcaaatccatcgtggttgaaggcgaaaacgaaggcgaaatcgtcttattactgttgcgcggcgaccatgagttcaacgacatcaaggcagaaaaactcgcaggcgtgagatcgccattgacgatggcaagtcctgccgcgattgtcgaacagttcggcgcaaacggcggctcgctgggtccggtcagctttgcaggtaaagtttatgccgattttgctactgaaaaaggagcggactgggtcatcggtgcgaacgaagacggctaccactacaccagcttcaacttcgggcgcgatgccgccgagcctgaattcgtcgatttgcgtaatgtggtcgaaggcgacgaaagccccgacgggcaaggccgtctgaaactcgcgcgcggcattgaagtcggacacgtcttccagttgcgcgacaaatacacccaagccatgaacgtaagcttccttgacaacaacggcaaatcgcaaattatggaaatgggctgctacggcatcggcatcacccgcgtcgttgccgccgccatcgagcagaataacgacgaaaaaggcatcatctggaccaaagcaatggcgccgtttgaagtcgttatcgtgccgatgaactacaaaaaatcagacaccgtacgcgaagccgccgacaaaatctatgccgaattgctggcggcaggcgcggatgtgctgctggatgaccgcgacgaacgcgcaggcgtattgctgaacgattccgagctgttgggtattccgcaccgcatcgtcatcggcgaccgcgctttgaaagaaggcaatgtcgaatacgccgaacgccgcaacaacgaagcgcaggcagttgcaatcggagaaattgttgcgcgtgtaacagctttattaaatgggtaa

SEQ ID NO: 61714 - DNA, 270 bp, Neisseria meningitidis; identical to SEQ ID NO: 37545

SEQ ID NO: 61715 - DNA, 639 bp, Neisseria meningitidis
ttgaccatcgccttatccaaggggcgcatttttgaggagacgctgccgctgcttgccgctgccggcattgttccgactgaagagcctgaaaaatcgcgcaagctgattatcgggacgaaccatgaaaacatccgccttgtcattgtccgcgcaaccgatgtgccgacttatgtccgctacggcgcggcggacttcggcattgcgggcaaagacgtgctgatcgaacacggcggcacggggctttaccggcctttggatttggagattgccaagtgccgcatgatggttgctgtgcgtaaagggtttgattacgaagcagcttcgcaacccggatgccgtctgaagattgccacgaagtatcctgaaatcgcggcatctcattttgccggcaagggtgtccatgtggacattatcaaactgtacggctcgatggaacttgcgccgctggtcggcttgagcgatgcgattgtggacttggtttcgacgggcaacaccttgaaggcaaacggcttggaagcagtcgaacacatcgtcgacatttccagccgcctggtggtcaacaaggctgctttgaaaacgaaatacgcgctgctggagccgattattcaggcgttcggcggcgcagtgaaggcgaagtaa

SEQ ID NO: 61716 - DNA, 687 bp, Neisseria meningitidis
atgtttgatttcggtttgggcgagctggtttttgtcggcattatcgccctgattgtcctcggccccgaacgcctgcccgaggccgcccgcaccgccggacggctcatcggcaggctgcaacgctttgtcggcagcgtcaaacaggaatttgacactcaaatcgaactggaagaactaaggaaggcaaagcaggaatttgaagctgccgccgctcaggttcgagacagcctcaaagaaaccggtacggatatgcagaacagtctgcacgacatttccgacggtctgaagccttgggaaaaactgcccgaacagcgtacgcctgctgatttcggtgtcgatgaaaacggcaatccctttcccgatgcggcaaacaccctatcagacggcatttccgacgttatgccgtccgaacgttcctacacttccgccgaaatccttggggacagcgggcaaaccggcagtacagccgaacccgcggaaaccgaccaagaccgcgcatggcgggaatacctgactgcttctgccgccgcacccgtcgtacagaccgtcgaagtcagctatatcgataccgctgttgaaacccctgttccgcataccacttcgctgcgtaaacaggcaataagccgcaaacgcgatttgcgtcccaaatcccgcgccaaacctaaattgcgcgtccgtaaatcataa

SEQ ID NO: 61717 - DNA, 588 bp, Neisseria meningitidis
atggaacataagctgccgcaactgccttatgaaccggacgcattgtccccgcatctgagcaaagagactttggaattccactacggcaaacaccatcaaacctacatcaccaacctgaacaatcaaatcaaaggcaccgaatttgaaaacctgcctttggaagagattgtgaaaaaatcttcgggcggcgtgttcaacaacgcggcacaaacttggaaccacaccttctactggctgggtttcacgcccaaaggtcaaggcaaaccttccggcgaactggccgccgccatcgacgcgaaatggggcagcttcgagaaattccaagaagcgttcaatgcctgcgcggccggtactttcggctccggttgggcatggctggtgaaaacccctgccggcggattggatttggtttccacttccaacgccgctacgccgctgaccactgaaaacacgccgctgctgacctgcgacgtgtgggaacacgcctactacatcgactaccgcaacagccgccccaactacctgaaaggtttctgggaaatcgtcaactgggacgaagtcgccaaacgcttcgccgccttgtcctga

SEQ ID NO: 61718 - DNA, 723 bp, Neisseria meningitidis; identical to SEQ ID NO: 54233

SEQ ID NO: 61719 - DNA, 966 bp, Neisseria meningitidis; identical to SEQ ID NO: 60806

SEQ ID NO: 61720 - DNA, 357 bp, Neisseria meningitidis; identical to SEQ ID NO: 36545

SEQ ID NO: 61721 - DNA, 1233 bp, Neisseria meningitidis; identical to SEQ ID NO: 47112

SEQ ID NO: 61722 - DNA, 309 bp, Neisseria meningitidis; identical to SEQ ID NO: 55176

SEQ ID NO: 61723 - DNA, 1305 bp, Neisseria meningitidis; identical to SEQ ID NO: 55889

SEQ ID NO: 61724 - DNA, 1506 bp, Neisseria meningitidis; identical to SEQ ID NO: 52718

SEQ ID NO: 61725 - DNA, 774 bp, Neisseria meningitidis
atgagtgcgaacatccttgccatcgccaatcagaagggcggtgtgggcaaaacgacgacgacggtaaatttggcggcttcgctggcatcgcgcggcaaacgcgtgctggtggtcgatttggatccgcagggcaatgcgacgacaggcagcggcatcgacaaggcgggtttgcagtccggcgtttatcaggtcttattgggcgatgcggacgtgaaatcggcggcggtacgcagcaaagagggcggatacgctgtgttgggtgcgaaccgcgcgctggccggcgcggaaatcgagctggtgcaggaaatcgcccgggaagtgcgtttgaaaaacgcgctcaaggcagtggcggaagattacgactttatcctgatcgactgtccgccttcgctgacgctgttgacgcttaacggcttggtggcggcgggcggcgtgattgtgccgatgttgtgcgaatattacgcgctggaagggatttccgatttgattgcgaccgtgcgcaaaatccgtcaggcggtcaatcccgatttggacatcacgggcatcgtgcgcacgatgtacgacagccgcagcaggctggttgccgaagtcagcgaacagttgcgcagccatttcggggatttgctttttgaaaccgccatcccgcgcaatatccgccttgcagaagcgccgagccacggtatgccggttatggcttatgatgcgcaggcaaagggtgccaaggcgtatcttgccttggcggacgagctggcggcgagggtgtcggggaaatag

SEQ ID NO: 61726 - DNA, 213 bp, Neisseria meningitidis; identical to SEQ ID NO: 36410

SEQ ID NO: 61727 - DNA, 924 bp, Neisseria meningitidis
atgaagggttttaccattattgaatttttggttgcgggcatgctcagtatgattgtcctgatggcggtcggatcgagttacttcacgtcccggaaattaaatgatgcggcaaacgagcgtcttgctattcaacaggatttgcggaatgcggcaacattaattgtccgcgatgcaagaatggcggggagcttcggttgtttcaatatgtctgagcataccgaaaaggatgttgtttccgatgtgccgcaaaaaaaccgtcttttttccttaaaagggagcagtgcaaataaacttatccccaacggtacagataataaacttatccccataacggaatctttagatatcaattatcagaattttttccaggttggtagcgcattgatttttcaatacggaatcgatgatgttaatgcaagcgccgcgactaccgtcgtcagcagctgtgccgcaatatcgaaaccgggcaagcaaatccttactttagaaaatgtaaaaaaagaattgaagatttcggatcaggataaggagcaaaatggcaatatagcgcgtcaaaggcatgtggtcaatgcctatgcggtcggcaggattgccggtgaggaaggtttgttccgcttccaattggatgataagggcaagtggggtaatcctcagttgctcgcgaaaaagattagatatatgaaagtgcggtatatctatgtttccgactgtcctgaagatgacgatgccggcaaagaggaaacattcagatatacggataaattcaacagcgcccaagatgctgttacgcccgccggggtggaggttttattgagtagcggtactgataccaagattgccgcttcttcagacaatcatatttatgcttaccgtatcgatgcgacaatacgcgggggaaatgtatgcgcaaacagaacactttga

SEQ ID NO: 61728 - DNA, 1977 bp, Neisseria meningitidis; identical to SEQ ID NO: 56079

SEQ ID NO: 61729 - DNA, 1326 bp, Neisseria meningitidis; identical to SEQ ID NO: 43956

SEQ ID NO: 61730 - DNA, 1893 bp, Neisseria meningitidis
atgcggttctcaaggtttgagcccaaaggtcgtctgaaacaacaaatacggtttcagacgacctttctttcaacaagccaccacggcaatcagacaaaagcagcacatcgccacatccatgtcggcagtacggccggcacaaccaccatccgcagcggcggggataccaccctcaaaggtgcgcagctcatcggcaaaggcatacaggcagatacgcgcaacctgcatatagaaagtgttcaagatactgaaacctatcaaagcaaacaacaaaacgccagtgcacaagtgaccgtaggttatggcttcagtgccagtggcgattacagccaaagcaaaatccgagccgaccatgcttcggtaaccgagcaaagcggtatttatgccggagaagacggctatcaaatcaaggtcggaaaccatacagacctcaaaggcggcatcatcaccagcagccaaagcgcagaagacaagggtaaaaaccgctttcagacggccacccttactgccagcgacattcaaaaccacagccaatacaaaggcgaaagttttggattgggcgcaagtgcgtccataagcggcaaaacactgggacagggcgcacaaaataagcctcaaaacaaacacctgacaagcgtggccgataaaaacggcgcaagttcatcagtgggttatggcagcgacagcgacagtcaaagcagcatcacgaaaagcggcatcaacacccgcaacatacacatcaccgacgaagcgggacaacttgcccgaacaggcaggactgccaaagaaaccgaagcgcgtatctacaccggcatcgacaccgaaactgcggatcaacacacaggccgtctgaaaaacagcttcgacaaagacgcggtcgccaaagagatcaacctgcaaagggaagtaacgaaggagttcggcagaaacgccgcccaagccgtagcggccgttgccgacaaactcggcaatacccaaagttacgaacggtatcaggaagcccgaaccctgctggaggccgaactgcaaaacacggacagcgaagccgaaaaagccgccatccgcgcatccctcggccaagtaaacgcctaccttgccgaaaaccaaagccgctacgacacctggaaagaaggcggcataggcaggagcatactgcacggggcggcaggcggactgacgaccggcagtctcggcggcatactggccggcagcggcacttcccttgctgcaccgtatttggacaaagcggcggaaaacctcggtccggcgggcaaagcggcggtcaacgcactgggcggtgcggccatcggctatgcaactggtggtagtggtggtgctgtggtgggtgcgaatgtagattggaacaataggcagctgcatccgagtgaatataaattagcagaacaatatgcagatatagtggcttctcgtctaaacatttcaaaagaagaagcacttgggcgaattattcggcatatgcaacgaaccgtagattacgcaacggctaaagcggataatttccgtactgatgacgccattatttcaattttaggagcaaacaatttacccaagcaagatcaacattacactaatccgaactacaacaaacaatacattcaaaattatgttcgtgatttcaatttagccaataaatacaattattttgggaaaactcctactcaatcaagggattataaagttggagttgttacagatattggtaaggctgcattaaatagcggtataggtatatttgaatcggctgcgaatttagcgacaggggagatagatccgaactcatgggcttatgtacacatggggcgtataggttatacacatcctgaatatggaaatgcttggattcggatttcaagtgcaacactagtgtattaa

SEQ ID NO: 61731 - DNA, 1497 bp, Neisseria meningitidis
atgttttccaactacctactcagcttggcaatatggatacccatcgccgcaggtgtgctggttttgtcgaccggtaaggacagccgtgcgccgctggcgcgtgtgcttgcctttatgggtgcgcttgccggtttcttggtaacgctgcccctgtttaccggtttcgaccgtttgagcggcggctatcaatttaccgagttccacgagtggattccgcttctgaaaatcaactacgcattgggcgtggacggtatttcagtgctctttatcatcttgaatgcgtttattacgctgctggtggtattggccggttgggaagttattcagaaacgcccggcgcagtatatggcggcattcctgatgatgtcgggtttgattaacggtgcgtttgccgcgcaggatgcgattctgttttatgtgttcttcgagggtatgctgattccgctgtacctgattatcggtgtatggggcggcccgcgccgcgtctatgcgtcggtcaagctgttcctctatacgctgatgggttcgctcctgatgctggttgctatggtttacctgtactatcaaacaggcagcttctctattgtcgatttccaaaacatcaaacagattccgttgggcgtacaacagcttttatttgcagcgttcttcctgtcatttgccgtaaaagtgccgatgttccctgtgcacacttggttgccggatgcccacgttgaagcgccgaccggcggttcgatggtgttggcggcgattacgctgaagctgggtgcgtatggtttcttgcgctttatcctgccgattatgccggatgcggcacgctattttgcccctgtgatcattgtattgagcctgattgccgtgatttacatcggtatggtggctttggtgcaaaccgatatgaaaaaactggtggcgtattcgtccatcagccatatgggttttgtcactttgggtatgttcctgtttgtgaacggccaattgaatgattgggcattgaaaggcgcaatcattcaaatgatttcccacggttttgtgtctgccgcgatgtttatgtgtatcggcgtgatgtacgaccgcctgcatacccgcaatattgccgattatggcggcgtggtcaatgtgatgcctaagtttgcggcgtttatgatgttgttcggtatggccaatgccggtctgccggcgacttctggcttcgtgggcgagtttatggtgattatgggcgcggttaaagtgaatttctgggtgggcgcgttggcggctatgacgctgatttacggtgcgtcttataccctgtggatgtacaagcgcgtgattttcggcgcgattcacaatccgcacgttgccgaaatgaaagacatcaactgtcgcgagtttacgattctggcggttttggcggttgcggtattgggtatgggcctgtatccgaacgcatttatcgaagtggtgcatcaggcggcaaacgatttgattgcccatgtggcacaaagcaagatttga

SEQ ID NO: 61732 - DNA, 729 bp, Neisseria meningitidis; identical to SEQ ID NO: 55291

SEQ ID NO: 61733 - DNA, 1977 bp, Neisseria meningitidis
atgccacgcattgccgccctgcccgaccatcttgtcaaccaaatcgccgccggcgaagtggtcgaacgccccgccaacgccttaaaagaaatcgttgaaaacagcatagacgcaggcgcgacggcgattgatgtcgaactggcgggcggcggcatccgtctcatccgcgtcagcgacaacggcagcggtatccatccagacgacatcgggcttgcgctccaccgccacgccaccagcaaaatcaaaactctaaacgatttggaacacgttgccagcatgggctttcgcggcgaaggtttggccagtatcgcctcagtcagccgcctaaccctgaccagccgtcaagaagacagttcgcacgcgacccaagtcaaagcagaagacggaaaactcagcagccctacggcagccgcccaccccgtcggcaccaccatcgaagccgccgaactcttcttcaatacccctgcgcggcgcaagttcctcaaatccgaaaacaccgaatacgcccactgcaccaccatgctcgaacgccttgcactggcgcatcctcacattgccttctcactcaaacgcgacggcaaacaagtattcaaactcccaacccaaagcttgcctgaacggattgccgccattgtcggcgatgattttcagacggcttcattggaaattgacagcggcaatggcgcattgcggctctatggcgcaattgccaagccgacttttgccaaaggcaaaactgacaaacaatactgcttcgtcaaccatcgttttgtccgcgacaaagtgatgctccacgccgtcaaacaggcataccgcgacgtattgcacaacgcccttacccctgctttcgtcctctttctcgacctgccgcccgaagccgtggatgtcaacgtccacccgaccaaaaccgaaatccgcttccgcgacagccggcaggtgcaccaactcgtgttccacacgctcaacaaagcccttgccgacacacgcgccgacttgaccgaaagcgtcagcaacgcaggcgaagtgttgcatgacattaccggcgttacgcctgccccaatgccgtctgaaaacgacagcgaaaatctgtttgatagcgcatccgactacccgacaggcaacaaacccgatacacgcaatgcctttggtgcatcaggcaaaaccgcgcccatgccttaccaagccgcgcgtgcgccgcaacaacacagcctgtccctgcgcgaaagccgcgcggccatgaatacttacgccgagctttacaaaaaaactgacgacatcgaccttgagttgagccgattagagcaggcacgtttcggcaatatgccgtctgaaacgcctgctccccaaacagatacgccgctttcagacggcatcccatcccaatccgaactaccgccgctcggttttgccattgcccaattactaggcatctacattcttgcccaagccgaagacagcctgttgctcatcgatatgcacgccgccgccgaacgcgtcaactacgaaaaaatgaaacgccaacgtcaggaaaacggcaaactacaaagccaacgcctgcttattcccgtaaccttcgccacgtcccacgaagaatgcgccgccctctccgaccatgccgatgcactggcaggcttcggcttggaattgtccgacatgggcggcaatacccttgccgtccgcgcagttcccgccatgctaggtaaagccgacgtcgtttcactggccaaagatgtattgagcgaacttgcccaagtcggcagcagccaaaccatcgaagaacacgaaaaccgcatcctcgccactatgtcctgccacggctcgatccgcgccggccgccggctcaccctgcccgaaatgaacgcccttctgcgcgatatggaaaatacgccgcgcagcaaccagtgcaaccacggcaggccgacttgggtcaaactgactttgaaagaattggacgcactgttcttgcgcggacagtaa

SEQ ID NO: 61734 - DNA, 621 bp, Neisseria meningitidis; identical to SEQ ID NO: 54208

SEQ ID NO: 61735 - DNA, 825 bp, Neisseria meningitidis
atgattaagaagacaatcggcggcatcataccgatttttacggcggttttcatccctgcatcagcaggcgcggcggatttgatgctggcgcaggaatacaaagaccaagagattgcaggctgggcaatgagcgagaaactcgacggcgtgcgcgcctattgggacggaaagcacctgataagccgtcagggctacgcgtttacgccccccaaaggctttaccgcgcagtttccgccttatcctttggacggcgaattgtatagcggacgcggtcagttcgagcagatttccgctaccgtgcgttctgtttcttcagactggcgcggcatccgcctgcacgttttcgatgtacccaaggcgcagggcaatctctaccaacgtttggcagtcgcaacgcagtggctgaaaacgcatccgaacgcgccgattaccatcatcccgcaaaccaaagtgcgcgaccggcagcacgcgatggactttttaaaacaaatcgaagcgcagggcggcgaaggcgtgatgctgcgtcagcccgaatcccgttatagcggcggcaggagcagccaattattgaagctgaaaagccaatacgacgacgaatgcacggtaacacggcactatgagggcaaagggcgaaacgccggacggctgggcgcggtcggctgcaaaaaccgacacggcgaattccgcatcggcagcggtttcaaagacaaagaccgcgacaacccgcccaaaatcggcacactgattacctaccgctaccgtggttttacgcggaaaggcacgccgaaatttgccacatttgtgcgcgtgcgtaccgaccgctga

SEQ ID NO: 61736 - DNA, 291 bp, Neisseria meningitidis; identical to SEQ ID NO: 55020

SEQ ID NO: 61737 - DNA, 1809 bp, Neisseria meningitidis
atgcgtaccaactattgcggcctgattagcgagcaatacttagaccaaaccgttaccgtcaaaggctgggtacaccgtcgacgcgaccatggcggtgtgatttttatcgacctgcgcgaccgcgaaggcatcgtccaagtcgtgatcgatcccgacacgcccgaagcgtttgccgctgccgattcctcccgcaacgaatacgttttgagcattaccggccgcgtacgcaaccgtcccgaaggcacgaccaacgacaaaatgatttccggcaaaatcgaaatccttgccaaagaaatcgaagtgttgaacgctgccgctacgcctccgttccaaatcgacgacgaaaacatcagcgaaaacgttcgcctgaccaaccgcgttatcgacctgcgccgtccggtgatgcagcgcaacctgcgcctgcgttaccaagtcgctatgggcgttcgccgctacttggacgcgcaaggtttcatcgacattgaaaccccgatgctgacccgctccacgcccgaaggcgcgcgcgactacctcgtgccgagccgcgttcatccgggcgagttcttcgcgctgccgcaatcgccgcaattgttcaaacaactgttgatggtggcgggtttcgaccgttactaccaaatcaccaagtgcttccgcgacgaagacttgcgtgccgaccgtcagcctgaattcacgcaaatcgacttggaaacctcgttcttaaacgaggatgaaatcatggacatcaccgaaggtatggcgaaacaagtcttcaaagacgcgctgggcgtggacttgggcgacttcccacgcatgccttactctgaagccatgttctactacggctctgacaaaccggacatgcgtatcaacttgaaattcaccgagttgaccgacctgatgaaaacggaagaattcaaagtcttccgtggcgcagccgacatgaaaggcggccgcgtggttgccctgcgtgtgccgaacggtacgaaattcagccgcaaagaaatcgacgaatacactaaatttgtcggcatctacggtgcgaaaggtctggcatacatcaaagtaaatgatgtgggcaacctctccaacggcgaagacagcggcctgcaatctccaatcgtaaaattcctgtctgagaatgccctgaaggaaatcatcgcgcgtaccggcgcacaaaacggcgatattatcttcttcggtgcagacaaaaccaaagttgtgaacgaagccatcggcgcattgcgtatcaaagtcggcttggaacacggcaaagataacggctacttcacagacgaatggaaacctttgtgggttgtcgatttcccaatgttcgaatacgacgaagaagccgaccgctacgttgccgtacaccatccgtttaccgcgcctaaagaaggtcatgaagacctgatggtttccgaccctgcaaactgcctggcccgtgcctacgacatggtattgaacggctgggaaatcggcggcggctctatccgtatccaccgtgcagacgtacaagagaaagtgtttgccgcgctgaaaatcagccctgaagagcaacaagagaaattcggcttcctcttggacaacctgaaattcggtgcgcctcctcacggcggccttgcattcggcctcgaccgtttggttaccctgatgaccggcgccgaatctatccgcgacgtgattgccttcccgaaaacacaacgcgcccaatgcctgctgaccaacgcgcccaacagcgtggacgacaagcagttgcgcgaattgagtttgcgcctgcgtcaaaaggcggctgaaaccaaagaagcataa

SEQ ID NO: 61738 - DNA, 1143 bp, Neisseria meningitidis
atgaaaaaatccgtattagccgttttggccgcgctgtctctggcagcctgcggcggcagcgaaaaaaacgccgtgcaacctcaagcagacgctgcgtctgctgccaatgccgaagccgctgccaccgatactctgaacatctacaactggtcgaactatgttgacgagagtacggtcgaagactttaaaaaagccaacaatctgaagctgacttacgacttgtacgaaaacaatgaaacgctggaagccaaaatgctgaccggcaaatccggttacgatttggttgtgccgggcatcgccttcctgccgcgccaaatcgaggcgggcgcgtatcaaaaagtcaacaaagacctgattcccaactataaaaacatcgatcccgaactcttgaaaatgctggaaaccgccgacccgggcaaccagtatgccgtcccctatttctccggcgtgaacacgattgcgattacggcgaagggcaaagagcttttgggcggcaagctgcccgaaaacggctgggatttgctgttcaaacccgaatacacccacaagctgaaatcctgcggcatcgccctgtgggacaccccgagcgaaatgttcccgattttgctgaactacttgggcaaagaccccaaaggttcgaatcctgaagatttgaaggcggcggcggaagtattgaagtctatccgtccggatgtcaaacgtttcagcccgtccatcatcgacgagctggcgcgcggcgacgtctgcctggcggcaggcaacggcggcgatttgaacttggcgaaagcacgttccgaagaagtgaaaaacaacgtcggcatcgaagtgctgaatccgaaaggcatgggcttctggattgagtcttggctgattcccgccgatgcgaaaaacgtcgccaatgcccacaaatacatcaactacacgctcgaccccgaaatcgcggcgaaaaacggcatcgccgtaacctttgcccccgccagcaaaccggcgcgcgaaaaaatgcctgccgagctggtaaacacccgttccatcttcccgaacgagcaggatatgaaagacggtttcgtgatgccgcaaatgagcacggatgcgaaaaaactgtctgtcagcctgtggcagaaaatcaaagtcggcaccaactga

SEQ ID NO: 61739 - DNA, 318 bp, Neisseria meningitidis; identical to SEQ ID NO: 54811

SEQ ID NO: 61740 - DNA, 177 bp, Neisseria meningitidis
atgtttatattggtgcccatcagcattattttggcgtttgtcatcggctggtttttttggtggtcgggcaaaaacgggcagtttgacgacttggaagggccggcgcaccgcatcctgatggatgatgattcgacaagtaaactgattgaaaaagagagggaaaacgatgtacgctaa

SEQ ID NO: 61741 - DNA, 1449 bp, Neisseria meningitidis
atgaaaggcgatattggcgtaatcggtttggcggttatggggcaaaacctgattttgaatatgaacgattgcggatttaaggttgtcgcctacaaccgaacaatcggtaaggtggacgaatttttaaacggcgcggctaagggaacggatattgtcggcgcgtattccctgcaagacttggtcgataagctggcaaaaccgagaaaaatcatgatgatggttcgcgcaggttcggtcgtcgacgactttatcgaacaactgctgcccctgttggacgaggaagacatcattatcgacggcggcaatgccaattaccccgacacgacacggcggacacattaccttgccgaaaaagggattttgtttgtcggggcgggcgtatccggcggcgaagaaggcgcgcggcacggcccgtccattatgccgggcggggataagcgcgcttgggaagccgtcaaaccgatttttcaggcgattgccgccaaaacgccgctgggcgaaccgtgttgcgactgggtcggcagggacggcgcgggacattttgtcaaaatggtgcataacggcatcgaatatggcgatatgcagttgatttgcgaagcgtaccagtttatgaaagacggtttgggactgtcctacgacgaaatgcaccgcgtgtttgccgagtggaacaaaaccgagctggattcttatctgattgaaatcacagcggcaattttgggctataaggacgaaggcggcgaaccgctggtcgagaaaatcctcgatacggcagggcaaaaaggcacgggcaaatggacgggcatcaatgctttggatttgggtattccgttgacgctgatttccgaagcggtattcgcccgctgcgtttcgtcgttcaaagaacagcgcgtgcagaccggcaagctgttcgcccgaaccgttacgcccgtcgaaggcggcaaacaagaatgggttgaggcgttgagacaggccctgcttgcatccaaaatcatttcctacgcacaaggctttatgctgatccgcgaagcgggcgaaagctacggctgggatttggactacggcaacactgcgctgctgtggcgcgaggggtgcatcattcgcagcgcattcttaagcaatatccgcgacgcgtatgaaaacaatcccgatttggtgttcttgggtgcggatccgtatttcaaaaatattttggaaaactgcctgccggcgtggcgcaaggtggttgccaaggcggtcgaatgcggcatccctatgccctgcatggcttcggcgattacgttcttggacggctacacgaccgaacgtctgcctgccaacctcttgcaggcacagcgcgactacttcggcgcgcatacttacgagcgcaccgacaaaccgcgcggcgagtttttccataccaactggacgggcaagggcggagataccgcttcgacaacctacgatatttga

SEQ ID NO: 61742 - DNA, 339 bp, Neisseria meningitidis; identical to SEQ ID NO: 42934

SEQ ID NO: 61743 - DNA, 1305 bp, Neisseria meningitidis; identical to SEQ ID NO: 54730

SEQ ID NO: 61744 - DNA, 1212 bp, Neisseria meningitidis
atgaaccaactgaaacttgccgtttccggtgcacagattttatttgtggcattcggcgcaatggtgctggttcccctgctgaccggtctgaatccggctcttgcgcttttgggcgcaggcttgggaacgctgctgttccaaattacaaccaaacgtaaagtgccgatttttctcggttcttcgtttgcctttatcgcaccgattatctactccatcggagaatgggggctgccttccaccatgttcggactgtttgccgccggctttatgtattttgtgtttgccgtgctaattcgttggcgcggactggcggcggtacacaaactgctgccgccggtcgtcatcggccccgtcatcatggtcatcggtctgtctgttgccgtggcggcaagcagcatggcaatgggtcaggcggacggcaaacaggtcatcgactataccgattcactgattctttccggctttacctttgccgttaccgccatcgtatcggttttcggcagcaggatgatgaagctgattcctatcttgatcggtgtcgcttcgggttatgttttggcactgctgatgggactggtggacacggcaagcattgcacacgcgccctggttcgccgttccccattttgaaacgcctcaggtcaactggcaggcggcactgtttatgctgcccgttgccgtcgcccccgccatcgaacacatcggcggcatcatggcaatcggcaatgtgacggggaaagactatacgaaagacccgggcttggacaaaacccttgcaggcgacggtttgggcgtgtgcgttgcgggtctgatcggcggcccgccggttacgacctacggcgaagtaacgggtgcggtgatgattaccaaaaacagcaaccccgtcatcatgacttgggcggcggtttttgccgtctgcatggcgtttttcggcaaattcaatgcgtttttggcttccattccgatgccagtaatgggcggcattatgctgctgctgttcggcacgattgcttctttgggcgtgaaaacgctgattgatgccaaagtcgatttgatgctgccgaaaaacctggtcatcgtcagctcggtactgaccacgggcatcggcggcatgacgctcaaattgggcagcttcagctttgccggcgtgggcttgtgcgccgtacttgccattatgttgaacagcctgctgcccgatccgaaagaatcctga

SEQ ID NO: 61745 - DNA, 717 bp, Neisseria meningitidis; identical to SEQ ID NO: 54603

SEQ ID NO: 61746 - DNA, 1020 bp, Neisseria meningitidis
atggatgccggtatttatctcgaagaaaccgctccgcacgccctgattgaacacaataatattttggataattcggtcggcgtctatctgcatggttcttccgaagcgatggtgcgcgagaacaaaatcgtcggcgacgcgactttgcgcgtgaacgagcgcggcaacggcgttaccgtttggaacgcgcccggtgcgcaagtcgtcggcaacgacatttccaaagggcgggacggcattttttccaacaccagcacatataacacctacaaaaacaaccgcttcagcgatttgcgtttcgccgtccactatatgtacaccaacgacagcgaaatcagcggcaatatttccgtgggcaacaatatgggctatgtgctgatgttttccgagcggctcaaagtattcgacaatatcgccgtcggcagccgcgatcagggcattatgctcaactatgtcaactattccgatattcacgacaacattatcaacaaagcgggcaagtgcgtatttgcctataatgccaactacgataaacttttcgccaatcattttgaaaactgccaaatcggcatacactttaccgccgccatcgaaggcacgtccctgcacgacaattccttcatcaacaacgaaagccaggtcaaatacgtcagcacgcgctttctcgactggagcgagggcggacacggcaactattggagcgacaacagcgcgttcgatttgaacggcgacggcttcggcgacagcgcgtaccggcccaacggcatcatcgaccaaatcatctggcgcgcgcccgtatcgcgtctcttgatgaacagtcccgcaatcagcatcgtcaaatgggcgcaggcgcagtttcccgccgttctgcctggcggcgtggtggacagcaaaccgctgatgaagccttatgcccccaaaattcaaacccgttatcaggcgatgaaggacgagttgctcaaagaagccgaaacgcggcagtcggaatggggcagggcggaaaacgggtctttgaactag

SEQ ID NO: 61747 - DNA, 669 bp, Neisseria meningitidis; identical to SEQ ID NO: 54451

SEQ ID NO: 61748 - DNA, 801 bp, Neisseria meningitidis
atgaacgcgttcaacctcatcatcatcggcgacgaaatcttacacggcagccgccaagacaagcatttcgtctttttcaaatccctgctcgaatccaaagggctgaagctcaatcaggtgcaatatctgcccgacgaacccgatttgctggtcaggcaactgcgccgcagcttttcagacggtataccgacgtttgttaccggcggcatcggtgctacgcccgacgaccacacgcgccaagcggccgccgccgctttggagttgcccgtcgtccgccatcctgaagccgccaagtttatcgaaggcgtaaccctgaaacgcggcgagccgctcgattcgcccgaacacgcccaacgcctgaaaatggcagatttccccgaaggcgcggaattggtgcccaatccgtttaacaacatcgccggattttctatccgcgagcattattttttccccggcttccccgtgatggcgcacccgatggcggaatgggttttggatacttattacgtcggccgcttcaaccaaaccaaacgcggcagccgcagcgtgtatgtgtttgagcagcccgaatcgcgcattacgccgcttatggagcatatcgagcaaacttatcccggcgtgcgttcgtacagcctgcccagcgtcggttggacgcattcagacggcacgcaggtcaaaccgcacattgagttcggcatcaaagccgaaggagaagccgtcaaccttttggacgcggcgtgggcggaagtgttgcacagcttggacggattgggagcagagctgaaaaatcgggtaaactga

SEQ ID NO: 61749 - DNA, 627 bp, Neisseria meningitidis; identical to SEQ ID NO: 54372

SEQ ID NO: 61750 - DNA, 771 bp, Neisseria meningitidis
atgaccacgaccgaacacgacaacgacgatgcattcctgctgcggtacagccgccacatcctcttggacgaaatcggcatcgaagggcagcagaaactttccgccgcgcatattttggtcgtcggctgcggcggtttgggtgccgccgccctgccctatctcgccgcttccggcatcggcacgctgaccatagccgattccgacacggtcgagctgcacaacctgcaacgccaagtcgcatttgacgagggcgatgtcggcaagcccaaagccgaagccttggcagaccgcctgaaacgcatcaaccataacgtcgatgtccgcaccgtcaacgaaaaactcgacggctgccgcctgaccggtttggttcaaaccgccgacatcgttttagactgctgcgacaactacgccacgcgccaagccgtcaaccgtgtctgcgtacaaacgaaaacaccgctggtttcaggagcagcggtgcgctttgaagggcaacttgccgtgtaccgtcccgacttgcccgactcgccgtgttacgcctgcctgtttgacggcggatcggcttcagacggcatctgttccctcttcggcgtgttctcgccgctggtcggcatcatcggcagtacccaagcggcggaggctctgaaaatcctgctggatgcgggcgaaccgtcgcacggcaggctggcggtttaccgtgccttggaagggggctggcaatatttcgacctgccgcgcaaccccgaatgcccgatttgcggcgcggaacggtaa

SEQ ID NO: 61751 - DNA, 2019 bp, Neisseria meningitidis; identical to SEQ ID NO: 54538

SEQ ID NO: 61752 - DNA, 759 bp, Neisseria meningitidis
atgaaacagaaaaaaaccgctgccgcagttattgctgcaatgttggcaggttttgcggcagccaaagcacccgaaatcgacccggctttggtggatacgctggtggcgcagatcatgcagcaggcagaccggcatgcggagcagtcccaaaaaccggacgggcaggcaatccgaaacgatgccgtccgtcggctgcaaactttggaagttttgaaaaacagggcattgaaggaaggtttggataaggataaggatgtccaaaaccgctttaaaatcgccgaagcgtctttttatgccgaggagtacgtccgttttctggaacgttcggaaacggtttccgaaagcgcactgcgtcagttttatgagcggcaaatccgcatgatcaaattgcagcaggtcagcttcgcaaccgaagaggaggcgcgtcaggcgcagcagctcctgctcaaagggctgtcttttgaagggctgatgaagcgttatccgaacgacgagcaggcttttgacggtttcattatggcgcagcagcttcccgagccgctggcttcgcagtttgccgcgatgaatcggggcgacgttacccgcgatccggtcaaattgggcgaacgctattatctgttcaaactcagcgaggtcgggaaaaaccccgacgcgcagcctttcgagttggtcagaaaccagttggaacaaggtttgagacaggaaaaagcccgcttgaaaatcgatgccattttggaagaaaacggtgtcaaaccgtaa

SEQ ID NO: 61753 - DNA, 366 bp, Neisseria meningitidis
atgaacctgattcaacagctcgagcaagaagaaattgcccgcctgaataaagaaatccccgaattcgcaccgggcgacaccgtagtcgtatccgtacgcgtcgtggaaggtacccgcagccgtctgcaagcctacgaaggcgttgtcattgcacgccgcaaccgtggtctgaacagcaacttcatcgtccgcaaaatctccagcggcgaaggcgttgaacgtactttccaactgtactctccgaccgtcgaaaaaatcgaagtcaaacgtcgtggcgacgtacgccgtgccaaactgtactacctgcgcggtctgaccggcaaagctgcacgcatcaaagaaaaactgcctgcacgcaaaggttga

SEQ ID NO: 61754 - DNA, 516 bp, Neisseria meningitidis
atgtacacttgcacttcctgcggcgaaaaacatgaagatatgcccgcaatcggctttaccgcccccgatccctataatcaactcagtgaagaagaacgcattgcttatcaagcagaatgcgattctgatttctgcatcatccgctatcccgaccaaaccgaccgctttatccgcgcggtgctgccgattccgattatcgggcatgaggaaacgctggaatatggcgtgtgggtgtccgtcagcgaaaagagttttaacgactatcaaagccactttcacgacaatccggaaaatgtcgtttatttcgggatgatctgcaaccggctgcccccttacgaatccgacaccttcggtatgcattgcaatgtcgttacccaacccgatggtcaacgccctttgctgcaactccatcaaggcagcgaacatccgctggtacgcgacttttatcacggcatagaatatgccgaggcacaggcaaggataggggcggtatccgaatcggattgctcaggataa

SEQ ID NO: 61755 - DNA, 729 bp, Neisseria meningitidis; identical to SEQ ID NO: 39174

SEQ ID NO: 61756 - DNA, 636 bp, Neisseria meningitidis; identical to SEQ ID NO: 55453

SEQ ID NO: 61757 - DNA, 1434 bp, Neisseria meningitidis
atggacacacaaacttacaactacaaagtggtgcgccagttcgccatcatgactgtagtttgggggattgtgggtatgttggtcggcgttatcgtcgccgcccagctttttgctcctgcccttgacttgtctaatatcggaccttggttccacttcggccgcctgcgtccgctgcacaccaatgcggttattttcgcatttggcggttgcggcctgatcggcacatcatactacgttgtccaacgtacttgtaatacccgtcttttcggcggttggctgccggcatttaccttttggggctggcaggcggtaatcgttgccgccgtcgtcagcttccctatgggttggacccaaggtaaggaatatgccgaactggaatggccgatcgatattctgattactttggtttgggtggcttacgccatcgtattcttcggtacgattgccaaacgtaagattaaacatatttacgttgccaactggttctacggcggctttattttggcggtcgcacttttacacatcgtcaacaatatcagcatcccggcagggttgatgaagtcataccccgtctattccggtgcgattgatgctatggttcaatggtggtacgggcataacgccgtgggcttcttcctgactgccggcttcttgggtatgatgtactatttcgtacccaaacaagcagcccgccccgtttactcctaccgcctgtccgtcgttcacttctgggcgttgatttttacctatatgtgggcgggtccgcaccatcttcactacactgcgctgcctgactggacgcaatctttgggtatggttctgtctttgattctgttcgcaccctcttggggcggtatgattaacggcatcatgaccttgtccggcgcgtgggacaaactgcgtacagacccgattcttaaattcctgattgtatccttgtccttctacggtatgtctacctttgaaggcccgatgatgtcgattaaaacggtcaatgcattgagccactatacggactggaccgtcgcgcacgttcatgcgggtgcgttgggctgggtaggctttgtaaccatcggttccgtctattacatgattccccgtctgttcggcaaagaacagatgcacagcaccaagctggtagaagcacatttttggattgcgaccatcggcgtggttctgtatatcgctgccatgtggattgccggtgtgatgcagggtttgatgtggagttctttgaacgatgacggtacgctgacctactcgtttgtcgaatccgtaaaacgcaccatgccttactacgtgatccgttttgcaggtggtttattgtatctgagtggtatgtgcattatggcgtacaacgtgtaccgcacagccatcggtggtaaagcagtcgatgccgaaatccctgcggtttcccaaacacagcaccactaa

SEQ ID NO: 61758 - DNA, 1206 bp, Neisseria meningitidis; identical to SEQ ID NO: 38565

SEQ ID NO: 61759 - DNA, 315 bp, Neisseria meningitidis
atgaaacttatctataccttcatcaaaatcattatcctgctgctcttcctgctgcttgccgttattaatacggatgccgttaccttttcctacctgccggggcaaaaattcgatttgccgctgattgtcgtattgttcggcgcatttgtagtcggtattatttttggaatgtttgccttgttcggacggttgttgtcgttacgtggcgagaacggcaggttgcgtgccgaagtaaagaaaaatgcgcgtttgacggggaaggagctgaccgcaccaccggcgcaaaatgcgcccgaatctaccaaacagccttaa

SEQ ID NO: 61760 - DNA, 726 bp, Neisseria meningitidis; identical to SEQ ID NO: 43300

SEQ ID NO: 61761 - DNA, 237 bp, Neisseria meningitidis; identical to SEQ ID NO: 37424

SEQ ID NO: 61762 - DNA, 948 bp, Neisseria meningitidis; identical to SEQ ID NO: 54669

SEQ ID NO: 61763 - DNA, 1248 bp, Neisseria meningitidis; identical to SEQ ID NO: 54413

SEQ ID NO: 61764 - DNA, 453 bp, Neisseria meningitidis
atgaatattgaagtagaaatgaaagtattggacgagaggatggcggattttatccctacctatgcgacagcgggttctgccggtttggacttgcgcgcctgtttggatgaggaagtcgtcttgcagccgggggaaacgtttcttgtgccgacaggtttggcaatttatttggccaatccttcatatgccgccgttttgctgccccgttccggcttggggcataaacacggcattgttttgggcaatttggtcggtttgattgactccgattatcaaggggaattgaaggtgtcgttatggaacagaagcagcgaaccgtttgccgtcaagccgtttgagcgtatcgcgcagatggttatcgttccaatcgtgcaggcgcgtttcaaacgtgtcgaagaatttgtcggaagcagccgtggagaaggcggtttcggcagtacgggtttgcattga

SEQ ID NO: 61765 - DNA, 1980 bp, Neisseria meningitidis
atgtctcaactggcaaacgcaatccgcttcctctcggccgatgccgttcaaaaagccaattccggccaccccggcgcgcctatgggtatggcggaaatggcggaaacattgtggacgaaattcctcaatcacaatcccgccaaccccaaattctacaaccgcgaccgcttcgtcctctccaacggccacgcgtctatgctgttgtacagcctgctgcacctgaccggctacaacctaagcattgaagacttgaaaaacttccgccaactgcacagcaaaacccccggccatcccgaatacggctacaccgacggcgtggaaaccacgaccggcccgttggggcaagggattgccaacgcggtgggtatggcattggcagaaaaaatccttgccgccgaatttaataaagacggtttgaacatcgtcgatcattacacctacgtcttcatgggcgacggctgcctgatggaaggcgtatcgcacgaagcctgctcactcgccggcactttaggcttgggcaaactgattgttttgtatgacgataacaatatttccattgatggtaaagtggacggctggtttaccgaaaacatcccgcaacgctttgaaagctacggctggcacgtcgttcctaacgtaaacggtcatgacaccgccgccattcaagccgccatcgaagccgcacgtgccgaaaccggcaaaccgtccatcatctgctgcaaaaccttaatcggcaaaggcagtgccaacaaagaaggcagccacaaaacccacggcgcacctttgggcgcggacgaaatcgaagccacgcgcaaacatttgggctggacttaccccgcctttgaaatcccgcaagaaatttacgatgcgtggaatgccaaagaacaaggcgcgaaactggaagccgactggaacgaactgttcgcgcaatatcaagccaaatatcctgccgaagccgcagaatttgtgcgccgtatggataaaaagctgccggaaaactttgacgggtacgttcagacggcattgaaagaagtgtgcgccaaagccgaaaccatcgctacccgcaaagccagccaaaacagcatcgaaatcttggcaaaagagttgcctgaattggtgggcggttcggccgacctgaccccgtccaacctgaccgactggtcaaacagcgtctccgttacccgcgacaaaggcggcaactacatccactacggcgtgcgcgagttcggtatgggtgcgattatgaacggtcttgccctgcacggcggcgtaaaaccctttggcgcgaccttcctgatgtttagcgaatacgaacgcaacgccttgcgcatggcggcactgatgaaaatcaaccctgtatttgtgttcacccacgattccatcggtttgggcgaagacggcccgacccaccagccgattgagcaaaccgccaccctgcgcctgattccgaacatggacgtatggcgtccgtgcgacaccgccgaatctctggtggcttgggcagaagccgtcaaagccgccgatcatccgtcctgcctgattttcagccgtcaaaacctgaaattccaagcgcgcagcgaacaacaactgaacgacatcaaacgcggcggctacatcatcagcgaagcccaaggcaacgcgcaagccgtcatcattgccaccggttccgaagtcgagctggctttggaagcgcaaaaagccctcgccgcgcaaaacatcgccgtacgcgtcgtttccatgccgtccaccaacgtattcgaccgccaagacgccgcctatcaagccaccgtcctgcccgaaggtctgccgcgcatcgccgtagaagccggacacgccgacggctggtacaaatacgtcggtttgaacggcgcagtcgtcggcatcaaccgcttcggcgaatccgcccctgccgacttactcttcaaagaattcggctttaccgtggacaatgtggtcgatacagtgaaatccgtgctgtaa

SEQ ID NO: 61766 - DNA, 1059 bp, Neisseria meningitidis
atgaccgccgccctgcacatcggacacctgtccaaaagttttcaaaacaccccggttttaaacgacatttcgctcagcctcgacccgggcgaaatcctctttatcgtcggcgcgtccggctgcggcaaaaccacccttttacgctgccttgccggttttgaacaacccgattttggcgaaatttcgctttccggcagaaccatcttctcgaaaaataccaacctccccgtccgcgaacgccgtttgggttatgtcgtacaggaaggtgtgctgttcccccacctgaccgtttaccgcaacaccgcctacgggctgggcaacggcaaaggcaagacggcgcaagagcggcagcgcatcgaagctatgttggaattgaccggcatttccgaacttgccggacgctatccgcacgaactttcgggcggacagcaacagcgcgtcgccctcgcccgcgccctcgcacccgatcccgaactgattttgttggacgaacccttcagcgcgctggacgaacagttgcgccgccagattcgcgaagacatgattgccgccctgcgcgccaacggcaaatctgccgttttcgtcagccacgaccgcgaagaagccctgcaatacgccgaccggattgccgtgatgaaacaggggcgcatcctccaaactgcaagccctcacgaattgtaccgacaacctgccgaccttgatgccgccctgtttatcggcgaaggcatcgtgttccccgccgcgctcaacgccgacggcaccgccgattgcggattgggccgcctgcctgttcaaagcgacgcacccgcaggcacacgcggcacactgctcatccgtccggaacagttcagccttcacccccattccgcacccaccgcctccattcacgccgtggttctcaaaaccacgcccaaagcgcggcataccgaaatcagtctccgggtcggacaaaccgtcctcacgctcaacctcccttccgcccccaccctgtcagacggcatttccgccgtcctccatttggacggtcccgccctgttcttccccggaaataccctctga

SEQ ID NO: 61767 - DNA, 4170 bp, Neisseria meningitidis
atgaccgataccgcaccgacagataccgatccgaccgaaaacggcacgcgcaaaatgccgtctgaacaccgccccaccccgccggcaaaaaaacgccgcccgctgctgaagctgtcggcggcactgctgtctgtcctgattttggcagtatgtttcctcagctggctcgccggtacggaatccggtttgcgtttcgggctgtaccaaatcccgtcttggttcggcgtaaacatttcctcccaaaacctcaaaggcacgctgctcgacggcttcgacggcgacaactggtcgatagaaaccgagggggcagaccttaaaatcagccgcttccgcttcgcgtggaaaccgtccgaactgatgcgccgcagcctgcacatcaccgaaatttccgccggcgacatcgccatcgttaccaaaccgactccgcctaaagaagaacgccctccgctcagccttcccgacagcatagacctgcctgccgccgtctatctcgaccgcttcgagacgggcaaaatcagcgcaggcaaagcctttgacaaaccaaccgtctatctcgaacggctggatgcttcataccgttatgacatcaaaggacaccgcctcgacctgaaggctgccgacacgccgtggagcaattcgtcggggtcagcctcggtcggcttgaaaaaaccgtttgccctcgataccgccatttacaccaaaggcggactcgaaggcaaaaccatacacagtacggctcggctgagcggcagcctgaaggatgtgcgcgccgaactggcgatcgacggcggcaatatccgcctctcgggaaaatccgtcatccacccgtttgccgaatcattggataaaacattggaagaagtactggtcaaagggttcaacatcaatccgtccgccttcgtgccttccctgcccgatgccgggctgaatttcgacctgaccgccatcccgtcgttttcagacggcatcgcgctggaaggctcgctcgatttggaaaacactaaagccggttttgccgaccgcaacggcatccccgtccgtcaggttttaggcaactttgtcatccggcaggacggcacggtgcatatcggcaatacgtccgccgccctgctcggacggggcggcatcaggctgtcgggcaaaatcgacaccgaaaaagacatcctcgatttaaatataggcatcaactccgtcggcgcggaagacgtgctgcaaaccgcgttcaaaggcaggttggacggcagcatcggcatcggtggcacgaccgcctcgcccaaaatctcttggcaactcggcatcggcacagcgcgcacggacggcagcctcgccattgcaagcgaccccgcaaacggacagcggaaactggtgctcgacaccgtcaacatcgccgccgggcaaggcagcctgaccgcgcaaggctatctcgagctgtttaaagaccgcctgctcaagctggacatccgttcccgcgcattcgacccttcgcgcatcgatccgcaacttccggcaggcaatatcaacggctcaataaaccttgccggcgaactggcaaaagagaaattcacaggcaaaatgcggtttttacccggcacgttcaacggcgtaccgattgccggcagtgccgacattgtttacgagtcccgccaccttccgcgtgccgccgtcgatttgcggctggggcggaacattattaaaacagacggcggcttcggcaaaaaaggcgaccggcttaacctcaatatcaccgcacccgatttatcccgtttcggtttcggactcgcggggtctttaaatgtacgcggacacctttccggtgatttggacggcggcatccgaacctttgaaaccgacctttccggcgcggcgcgcaacctgcacatcggcaaggcggcagacatccgttcgctcgatttcacgctcaaaggttcgcccgacacaagccgcccgatacgcgccgacatcaaaggcagccgcctttcgctgtcgggcggagcggcggttgtcgataccgccgacctgatgctggacggcacgggcgtgcagcaccgcatccgcacacacgccgccatgacgctggatggcaaaccgttcaaattcgatttggacgcttcaggcggcatcaacagggaacttacccgatggaaaggcagcatcggcatcctcgacatcggcggcgcattcaacctcaagctgcaaaaccgtatgacgctcgaagccggtgcggaacgcgtggcggcaagtgcggcaaattggcaggcaatgggcggcagcctcaacctgcaacacttttcttgggataaaaaaaccggcatatcggcaaaaggcggcgcacacggtctgcatatcgccgagttgcacaatttcttcaaaccgcccttcgaacacaatctggttttaaacggcgactgggatgttgcctacgggcgcaacgcgcgcggctacctcaatatcagccggcaaagcggcgatgccgtattgcccggcgggcaggctttgggtttgaacgcattttccctgaaaacgcgctttcaaaacgaccgtatcggaatcctgcttgacggcggcgcgcgtttcgggcggattaacgccgatttggacatcggcaacgccttcggcggcaatatggcaaatgcaccgctcggcggcaggattaccgcctcccttcccgacttgggcacattgaagccctttctgcccgccgccgcgcaaaacattaccggcagcctgaatgccgccgcgcaaatcggcggacgggtcggctctccgtccgtcaatgccgccgtcaacgtcagcagcaactacgggaaaatcaacggcaacatcaccgtcgggcaaagtaattctttcagtacctcgcccctgggcgggaaactcaacctgaccgttgccgatgccgaagtattccgcaacttcctgcccgtcggacaaaccgtcaaaggcagcctgaatgccgccgtaaccctcggcggcagcatcgccgatccgcacttgggcggcagcatcaacggcgacaaactctattaccgcaaccaaacccaaggcatcatcttggacaacggctcgctgcgttcgcatatcgcgggcaggaaatgggtaatcgacagcctgaaattccggcacgaagggacggcggaactctccggtacggtcggtatagaaaacagcggacccgatgtcgatatcggcgcggtgttcgacaaataccgcatcctgtcccgccccaaccgccgcctgacggtttccggcaacacccgcctgcgctattcgccgcaaaaaggcatatccgttaccgggatgattaaaacggatcaggggctgttcggttcgcaaaaatcctcgatgccgtccgtcggcgacgatgtcgtcgtattaggcgaagtcaaaaaagaggcggcggcaccgctccccgtcaatatgaacctgactttagacctcaatgacggcatccgcttcgccggctacggcgcggacgttaccataggcggcaaactgaccctgaccgcccaatcgggcggaagcgtgcggggcgtgggcacggtccgcgtcatcaaagggcgttataaggcatacgggcaggatttggacattaccaaaggcacggtctcctttgtcggcccgctcaacgaccccaacctcaacatccgcgccgaacgccgcctttcccccgtcggtgcgggcgtggaaatattgggcagcctcaacagtccgcgcattacgctgacggcaaacgaaccgatgagtgaaaaagacaagctctcctggctcatcctcaaccgcgccggcagtggcagcagcggcgacaatgccgccctgtccgcagccgctggcgcgctgcttgccgggcaaatcaacgaccgcatcgggctggtggatgatttgggctttaccagcaagcgcagccgcaacgcgcaaaccggcgaactcaaccccgccgaacaggtgctgaccgtcggcaaacaactgaccggcaaactctacatcggctacgaatacagcatctccagcgcggaacagtccgtcaaactgatttaccggctgacccgcgccatacaggcggttgcccgtatcggtagccgttcgtcgggcggcgagctgacatacaccatacgtttcgaccgcttctccggttcggacaaaaaagactccgccggaaacagcaaaggaaaataa

SEQ ID NO: 61768 - DNA, 1413 bp, Neisseria meningitidis
ttgttgtttgaatttaaagagaataaaatgattgttgcttctcgctggcccttgctggaaaaggtatttttacggtttggaatgccggttgccgtggttgatttggaatcgacgggcggcaatctgtatgaagacagggtaaccgaagtggctttggtcaagtttgagcagggaagggtggtgaggcatgagtggttggttaatcctcaaaaaccgattccgcagtttgtggcggggctgacggggatttcagacggcatggttgccgatgcgcctgtttttgcagagattgccggcgagttgttttcggtattgaagggttgtgtgctggttgcacataacagccgtttcgactatacgtttttaaagcatgagtttcatcgtgtgggtatcggattttcatcgcctgctttgtgcagtgtgcagctgtcccggtgtctgtatccgcaattttacaagcacagcctggacagtatcatcgaaaggttggggattgttgtggaagacaggcatcgtgcgatggcggatgtatcggcattgtgcgattatttggaatacagtctgtcggaacacggggtcgaggcatggatcaggcagtgtttccgtttgatgaatccgaaaccgttgcctgccgcgctgcccgaacggttgagggaacagttgtacggtttgcctgacggtatgggggtgctggcttgtttcgacggcggagggaaagtaaattacatcggtacgtttgaacgggtatatagcgaggtttcggctttattggattccggaaaagccccgtttgattggtgcaatacggaggaagtccgtttttttcccgctttgggcagcctgcatgcatataagattaaagcggaattggtcgggcgttatcattcgggttgttatgtatctgccaaaaatctgctgaaaacatttacgaccgtcaggtttgaaaaaggttcagacggcatgttgaatgcgaaaacagcggctttgaaaaacggtgtgacggataatccgcctaccggattatttgccaataaaaaggcggcgagacgggctttgtcgtcgtgggcggaaacatacggattgtgtcctgcctcagccggtatccttccggacggttatgcagaggatgagccttgtcccgtatatgtttcaggccgatgcgataaggcgtgcggccgttctgacgaacaggttttggcgtttgcacacaagttgcctattttggattggggaaaaatgcatgaggtagaaattaccgaaactgatcctttaacgggggaaaaagttgttctgcatggaatgggcggcgcattggaaatgggtgacgggctttggtatttcgataaagatttaccggatgcgtttaaggcgaagtttaaaacggacaggaaaaatattaaggaaatcggttaa

SEQ ID NO: 61769 - DNA, 699 bp, Neisseria meningitidis
ttggtcaaaacggcagacggctacaaagccattgcccatattcaagccggagaccgcgtcctttccaaggacgaggcaagcggagaaacgggatacaaacccgttaccacccgatacggtaatccgtaccaggaaaccgtttacattgaagtttcagacggcatcggcaacagccaaaccctgatttccaaccgcatccatccgttttacagtcaaggaaaatggatacaggcaggtcgtctgaaaaaaggcgacaccctgctttccgaaagcggcgcaaaacagacggttcaaaacattaccctcaaacagcagccgctcaaagcctacaacctgaccgttgccgactggcatacttacttcgtcaagggagataaggcggaaacggaaggggtgtgggttcataattcttgtccgccatataagagaccaaataacgcaacgacaaaagcacaacgagaaagtgtacaaggaaaaccctgcgttgaatgcggtaaattagccgaaaaaatgattgccgaccataaaaaaccattagttgtcgagtattatgaaacagggacaattgacaaatctaagatgagagcaattgaatcagtacaaccgcaatgtccgacttgttctgcaaaacaaggagggagattaagccaatattcaaaagaacagaaaaggaaactgagtaatgggaataaaaaatga

SEQ ID NO: 61770 - DNA, 1662 bp, Neisseria meningitidis; identical to SEQ ID NO: 55596

SEQ ID NO: 61771 - DNA, 483 bp, Neisseria meningitidis; identical to SEQ ID NO: 55730

SEQ ID NO: 61772 - DNA, 1119 bp, Neisseria meningitidis; identical to SEQ ID NO: 39438

SEQ ID NO: 61773 - DNA, 336 bp, Neisseria meningitidis; identical to SEQ ID NO: 45775

SEQ ID NO: 61774 - DNA, 1482 bp, Neisseria meningitidis; identical to SEQ ID NO: 54741

SEQ ID NO: 61775 - DNA, 1251 bp, Neisseria meningitidis
atgaccaaactgacacgaagacaaatcatccgccgtaccgccggcacactgttcgccctaagccccatcgcatccgccgttgccaaaacggtacgcgccccgcaattcaccgccgcacggatatggccgtcgcacacctacacccgcctgacgctggaaagcaccgccgcgctcaaataccagcacttcacgctcgacaacccgggcaggctggtcgtcgatatacaaaacgcgaacatcaataccgtattgcacggactttcccaaaaagtggcggcggacgacccctttatccgcagcatacgcgcgggtcagaacacaccgaccaccgtccgcctcgtcatcgatttgaaacagcccacccacgcacaagtcttttccctcccacccgtcggcggctttaaaaaccgcctcgtcgtcgatctctatccgcaagggatggatgccgacgatccgatgatggcgctgctcaacggcagcctgaacaaaacccgtcgcggctcccctgaagccgacctcgctcaaaacactcccgcacaaaccgaacgcggcaaaaacgggcgcagacccgtcattatgatcgaccccggacacggcggcgaagaccccggcgccgtcagcccgggcggtttgcaggaaaaacacgtcgtcctctccatcgcccgcgaaaccaaaaaacaattggaagccttgggttacaacgtctttatgacgcgcaacgaagacgtgttcatcccattgggcgtgcgtgtcgccaaagggcgagcacggcgggcggacgtatttgtctccatccacgccgatgccttcaccagcccctccgcgcgcggcacaggggtttatatgttgaacaccaaaggcgcgaccagctccgccgccaaattcttggaacagacgcaaaacaatgccgacgcggtcggcggcgtaccgaccagcggcaaccgcaacgtcgataccgccctgctcgatatgacccaaaccgccacactgcgcgacagccgcaaactcggcaaactggtgcttgaagaattgggcaggctcaaccatctgcacaaaggcagggtggacgaagccaatttcgccgttttgcgcgcacccgatatgccgtctatcctggtcgaaaccgccttcctgtccaatcctgccgaagagaagctgctgggcagcgaatccttccgccggcagtgcgcccaatccatcgcctcgggtgtccaacgctacctcaatacatccgtattgaagcggggttga

SEQ ID NO: 61776 - DNA, 453 bp, Neisseria meningitidis
atggcaaaaccgctcaaataccccgtctccgcactggtcgtcctttatagcggggacggcggcatcctgctcatcgaacgcacgcatccggaaggattttggcagtcggtaaccggcagcctcgaaccgggcgaaaccgtcgcccaaacggcaaggcgcgaagtttgggaagaaaccggcatcctgctggcggacgggcagcttcaagactggcacgacagcacggtttacgaaatctaccaccactggcggcaccgctatccaaaaggcgtgtttgaaaaccgcgaacacctcttctctgccgaaatcccgcgtgatacgcccatcgccctgcaacccgaagaacacgtctcctacggctggttcggcttggaagaagcggcggaaaaagtgttttccccgtccaacaggcgcgcgattctggaactgggcaggtttttgggcaaacggtaa

SEQ ID NO: 61777 - DNA, 684 bp, Neisseria meningitidis
atggaactggtatttatccgccacggacaaagcgaatggaacgcgaaaaacctgtttacaggctggcgcgacgtgaagctgagcgagcaggggcttgccgaggctgccgccgccggtaaaaaactgaaagaaaacggctatgagttcgacatcgccttcacatccgtcctgacccgcgcgattaagacctgcaacatcgttttggaagaatccgaccaactgttcgtaccgcaaatcaaaacgtggcggctgaacgaacgccactacggccaactgcaaggtttggacaaaaaacaaaccgccgaacaatacggcgacgagcaagtccgcatctggcggcgcagctacgacactctgccgccgcttttggacaaagacgacgcgttttccgcacacaaagaccgccgctatgcccatctgcctgccgatgttatccccgacggcgaaaacctgaaagtaacgctggatcgcgtattgccgttttgggaagaccaaatcgcccccgcgattttgagcggcaaacgcgtcttggtagcggcgcacggcaactccctgcgcgcgctggcaaaacacatcgagggtatttccgacgaagacatcatgggcttggaaatcccgaccggtcagccgctggtgtacaaattggatgacaacctgaaagtcctcgaaaaattctacctgtaa

SEQ ID NO: 61778 - DNA, 273 bp, Neisseria meningitidis; identical to SEQ ID NO: 37320

SEQ ID NO: 61779 - DNA, 192 bp, Neisseria meningitidis
atgaacacaataccgctccacaccatactcaaacttatggcgcatcccgaacgtatggcgatactgctccaactgttggacggcgattgcaatattgccgagctgtccgaatccctgtccatgcctgcgacagcggtttccaaccatttgagccgactgcgcgtggaaggtctggtggactttacgcgttag

SEQ ID NO: 61780 - DNA, 471 bp, Neisseria meningitidis; identical to SEQ ID NO: 55436

SEQ ID NO: 61781 - DNA, 696 bp, Neisseria meningitidis; identical to SEQ ID NO: 55768

SEQ ID NO: 61782 - DNA, 2310 bp, Neisseria meningitidis; identical to SEQ ID NO: 45075

SEQ ID NO: 61783 - DNA, 360 bp, Neisseria meningitidis; identical to SEQ ID NO: 36598

SEQ ID NO: 61784 - DNA, 555 bp, Neisseria meningitidis
atgaaaaaaatcatcgcctccgcgcttatcgcaacattcgcactcgccgcctgccaagacgacacgcaggcgcggctcgaacagcagcagaaacagattgaagccctgcaacagcagctcgcacagcaggcagacgatacggtttaccaactgactcccgaagcagtcaaagacaccattcctgccgaagcacaggcaaacggcaacaacgggcaacccgttaccggtaaagacgggcagcagtatatttacgaccaatcgacaggaagctggctgctgcaaagcctggtcggcgcggcggcaggcgcgtttatcggcaacgcgctggcaaacaaattcacacgggcaggcaaccaagacagtcccgtcgcccggcgcgcgcgtgcagcctaccatcagtccgcacgccccaatgcgcgcaccagcagggatttgaacacgcgcagcctccgcgcaaaacaacaggcggcgcaggcgcagcgttaccgcccgacaacgcgcccgcccgccaattaccgccgaccggctatgcgcggtttcggcaggaggcggtaa

SEQ ID NO: 61785 - DNA, 1086 bp, Neisseria meningitidis
atgaccgtcccccatattccgcgcggccccgtcatggcagacattgccgccttccgcctgaccggagaagaaaggcaacgcctgctcgaccccgcaatcggcggcatcatcctcttccgccgcaacttccaaaacatcgaacaactcaaaacactcaccgccgaaatcaaagccctgcgcacacccgaactcattatcgccgtcgatcacgaaggcggcagggtgcaacgtttcatcgaaagcttcacccgcctgcccgcaatgagtacgctcggcgagatttgggacaaagacggcgcgtccgccgccgaaaccgccgccggacaagtcggccgggttttggcaaccgagctttccgcctgcggcatcgatttgtccttcacgcccgtcttagatttggactggggaaactgccccgtcatcggcaaccgcagtttccaccacaatcccgaagcggtcgcccacctcgccctcgcccttcaaaaaggtttggcaaaaggcggtatgaaatcctgcggcaaacattttcccggacacggatttgtcgaaggagacagccatctggtcttgccggaagacaggcgcagcctgtccgaactcgaagccgccgacctcgcccccttccacattatgagccgcgaaggtatggcggcggttatgcccgcccacgtcgtttatccacaagtggacacaaagcccgcagggttttccgaaatctggctcaaacaaattttgcgccgcgacatcgggtttaaaggcgtaattttctcggatgatttgactatggagggcgcgtgcggggcaggcggcatcaaagaacgcgcccgcatttcctttgaggcaggttgcgacatcgtcctcgtctgcaaccgtcccgaccttgtggacgaactgcgcgaagatttccgcattcctgacaatcccgctttggcgcaacgttggcaatacatggccaacacgctcggcagtgccgccgcgcaagccgttatgcagacggcggatttccaagaggcgcaagcctttgttgccggccttgcctcgccgcaagacacggcgggcggcgtaaaagtcggcgaagccttttaa

SEQ ID NO: 61786 - DNA, 1509 bp, Neisseria meningitidis
atgaccacccatcccgcaaacgtcctcgcctccgtcgatttgggttccaacagtttccgcctccagatttgcgaaaacaacaacggacaattaaaagttatcgattcgttcaaacagatggtgcgcttcgccgccggtctggacgaacagaaaaacctgagtgccgcttcccaagaacaggctttggactgcctggcaaaattcggcgaacgcctgcgcggcttccgccctgaacaggtgcgcgccgtggcaaccaatacattccgcgtcgccaaaaacatcgcagatttccttcccaaggccgaagcggcactgggtttccccatcgaaatcatcgccgggcgcgaagaggcgcggctgatttataccggcgtgatccacaccctccccccgggcggcggcaaaatgctggttatcgacatcggcggcggttcgacagaatttgtcatcggctcgacgctgaatcccgacattactgaaagcctgcccttgggctgcgtaacctacagcctgcgcttcttccaaaacaaaatcaccgccaaagacttccaatctgccatttccgccgcccgcaacgaaatccagcgcatcagcaaaaatatgaggcgcgaaggttgggatttcgccgtcggcacatcgggttcggcaaaatccatccgcgacgtgcttgccgccgaaatgccccaagaggcggacattacctacaaaggcatgcgcgccctcgccgaacgcatcatcgaagccggttcggtcaaaaaggccaaatttgaaaacctgaaaccggaacgcatcgaagtttttgccggcggacttgccgtgatgatggcggcgtttgaagaaatgaaactcgacaggatgaccgtaaccgaagccgccctgcgcgacggcgtgttttacgatttgatcgggcgcggtttaaacgaagatatgcgcggacaaacggttgccgagttccaacaccgctaccacgtcagcctcaatcaggcgaaacgcaccgccgagaccgcgcaaacctttatggacagcctctgccacgctaaaaatgttacggttcaagagcttgccttgtggcaacagtatctcggacgcgccgccgcgctgcacgaaatcggtttggacatcgcccacaccggctatcacaagcattccgcctacatcctcgaaaacgccgatatgccgggtttctcacgcaaagaacagaccatacttgcccaactggtcatcggtcatcgcggcgatatgaaaaaaatgagcggcatcatcggcaccaacgaaatgttgtggtatgccgttttgtcgctgcgccttgccgcactgttctgccgttcgcgccaagacctgtctttcccgaaaaacatgcagttgcgcacggatacggaaagctgcggcttcatcctgcgtattgacagggaatggctggaacgccaccccctgattgccgacgcattggaatatgaaagcgtccaatggcaaaaaatcaatatgccgtttaaagtcgaggccgtctga

SEQ ID NO: 61787 - DNA, 702 bp, Neisseria meningitidis
atgtctttgaaaacagtagccgttatcggcgcaatggaacaagaaatcgagcttttgcgcgagatgatggaaaatgtcaaagccgtctctttcggcaagtttgccgcctatgaaggcgaattagcgggaaaacgcatggtgcttgcattgagcggcatcggcaaggtcaacgcggcggttgcaacggcttggcttatccatcaattcgcaccggactgcgttatcaacaccggcagcgcgggcggcttgggcaagggtttgaaagtcggcgatgtcgtggtcggcacagaaatcgcgcaccacgatgtcgatgtaaccgcattcggctatgtttggggacaagtgccgcaactgcccgccgtatttgtttcagacggcctcttggtcggcaaagcaaaacaggcggcggaagtgtttgaaggcgcggcggtagaacaaggcctgattgtcagcggcgaccgcttcgtccacagcagcgaaggcgtggcggaaatccgcaagcacttccccaaagtcaaagcagtggaaatggaagcggcggcgattgcccaaacctgtcatcagttggaaacgcctttcgtcatcatccgcgcggtttccgattcggcggacgaaaaggcagacatcagctttgacgaatttttgaaaacggcggcggcaagttctgcaaaaatggtggcagaaatcgtcaaatctttataa

SEQ ID NO: 61788 - DNA, 1218 bp, Neisseria meningitidis
atgaaaacggtagtctggattgtcgtcctgtttgccgccgccgtcggactggcactggcttcgggcatttacaccggcgacgtgtatatcgtactcggacagaccatgctcagaatcaacctgcacgcctttgtgttaggttcgctgattgccgtcgtggtgtggtatttcctgttcaaattcattatcggcgtattcaatatccccgaaaagatgcagcgtttcggttcggcgcgtaaaggccgcaaggccgcgcttgccttgaacaaggcgggtttggcgtattttgaagggcgttttgaaaaggcggaactagaagcctcacgcgtgttggtcaacaaagaggccggagacaaccggactttggcattgatgttgggcgcacatgccgccgggcagatggaaaacatcgagctgcgcgaccgttatcttgcggaaatcgccaaactgccggaaaagcagcagctttcccgttatcttttgttggcggaatcggcgttgaaccggcgcgattacgaagcggcggaagccaatcttcatgcggcggcgaagatgaatgccaaccttacgcgcctcgtgcgtctgcaacttcgttacgctttcgacaggggcgacgcgttgcaggttctggcaaaaaccgaaaaactttccaaggcgggcgcgttgggcaaatcggaaatggaacggtatcaaaattgggcataccgccgccagctggcggatgctgccgatgccgccgctttgaaaacctgcctgaagcggattcccgacagcctcaaaaacggggaattgagcgtatcggttgcggaaaagtacgaacgtttgggactgtatgccgatgcggtcaaatgggtcaaacagcattatccgcacaaccgccgccccgagcttttggaagcctttgtcgaaagcgtgcgctttttgggcgaacgcgatcagcagaaagccatcgattttgccgatgcttggctgaaagaacagcccgataacgcgcttctgctgatgtatctcggtcggctcgcctacggccgcaaactttggggcaaggcaaaaggctaccttgaagcgagcattgcattaaagccgagtatttccgcgcgtttggttttggcaaaggtttttgacgaaaccggagaaccgcagaaggcggaggcgcagcgcaacttggttttggcaagcgttgccgaggaaaaccgaccttccgccgaaacctgttga

SEQ ID NO: 61789 - DNA, 864 bp, Neisseria meningitidis
atgaataacgctttcgcattacccgccatccaaagcggcaacggcagcctcgaacaatacatccacaccgtcaacagcatcccgatgctgtcccaggaagaagaaacccgcctcgccgaacgccggataaagggcgacctcaacgccgccaaacaactcatcctgtcccacctgcgcgtcgtcgtttccatcgcgcgcggctatgacggctacgggctgaatcaggcagacctgattcaggaaggcaatatcggactgatgaaggcggtcaaacgctacaagcccggtagaggcgcgcgtctgttttcatttgccgtacactggattaaagccgaaatccacgagtttattttgagaaactggcgtttggttcgcgttgccaccaccaaaccgcaacgcaagctgtttttcaatttacgcagtatgcgtaaaaacctcaacgccctgtctcccaaagaggcacaagacatcgccgacgatttgggtgtcaaactttccgaagttctggaaatggaacagcgcatgacgggacacgacatcgccatcatggcagacaacagcgacgacgaggacagtttcgcccccatcgactggcttgccgaccacgattccgaaccgagccggcaactatcgaaacaggcgcattacgccctgcaaacagaaggtttacaaaacgctttggcgcaactggatgacaggagccgccgtattgtggaaagccgctggcttcaagacgacggcgggctgacgctgcaccagcttgctgcagaatacggcgtctctgccgagcgcatccgccagattgaagcaaaagccatgcagaaactgcgtggtttcctgaccgaagaagccgaagcggtttga

SEQ ID NO: 61790 - DNA, 1011 bp, Neisseria meningitidis
atgtccatcaaaatcctgattatttctcccagttggataggcgactgcgtgatgacccagcccttgttccgccgtttgaaggaacttcaccccggttgcacgattgatgtgttcgcaccgaagtggtcgatggcggtgtttgagcgtatgccggaagtgaatgagattcttgaaaatccgttcggacacggtgcgttggagttgaaacgccgctggcgggtcggcagggatttggggcggcgcggatacgatcaggttatcgtgttgcccggttctttgaaatcggcagtcatcgcgctagcaacgggtattgccaaaaggacgggttatgtcggtgaaagccgttattttctgttgaacgatatacgcaggctggataaggaacgtctgcctttgatggtggacagatatacggctctcgcgcatccgagtcaggaagattttgacgggcattcgggattccccgagttttccattgatgaacggcggcgggaaatttctgtcgaaactttcggtttgaatcttggaaagcctgttttggcattttgcccgggcgcggaattcgggccggcaaagcgttggccgacaaggcattttgccgagttgggcaaacattatctggcggcgggttggcaggtttggctgttcggttcgcaaaaagatgatgaaattgccgaggaaatcaactgcctttcagacggtatgtgtgtgaatttatgcggaaagaccgatttgtcgcaggcaatggatttgctgtcgttggcggacacggtcgtgtgcaacgacagcgggctgatgcacttggcggcggcattgggcaggaaggtggtggcggtttacggttcttccagcccgacacacacgccgcctttgagcgataaggcaaaaatcgtcagcctccatttggaatgttccccgtgttttaagcgggaatgtccgctagggcatacagactgcctcaacaagctgtatcccgagaagattgtgcaggcggttgaagaggcggtatga

SEQ ID NO: 61791 - DNA, 561 bp, Neisseria meningitidis
atgaaaatactcgctttattaattgccgctacctgtgctttatctgcgtgtggcggccaagctgaagaacaaccggcatctgcccaacctcaagagcaggcacaatccgaattaaaaaccatgccggtaagctataccgactatcaatcagtagccaataaagggcttgccgaccaaaaaactggtctgacccttccagaacatgttgttcctgccgacaatgcggaagggaagaatctgctgcatgacttttcagacggcctcacattaaccgttgataccgataaagccgacaaaattactgctgtccgagtagtctggaatacagatgcaatgcctcaaaaagcggaaaaactgtccaaagctgccgcagccttgattgcggcaaccgccccgggagaccgcacactgctgcgtgataccggcgaccaaatcaaaatggcaattgacagccataatgcgcaaaaagagccaacccgagaatgggcgcgtggtgggattgcttataaagtcactgttactaatttgccgagcgtggttttgacagcaaaagctgaataa

SEQ ID NO: 61792 - DNA, 285 bp, Neisseria meningitidis; identical to SEQ ID NO: 47739

SEQ ID NO: 61793 - DNA, 1023 bp, Neisseria meningitidis; identical to SEQ ID NO: 55836

SEQ ID NO: 61794 - DNA, 165 bp, Neisseria meningitidis
atgaacacaaaccaacctgccgtttacgacccgttgacacgcgcgctgcactggctgaccgttgccggcttcatcggcattctgaccaccattgtcctgtggacgatttatagtggattaacaaaaatcaggacaaggcgacgaagccgcagacagtacaaatag

SEQ ID NO: 61795 - DNA, 1644 bp, Neisseria meningitidis
atgaatgcttttacccgtgcatggtatgcgctcgaacgccattatcaggatacgcgtcatgtccttttgcgcgaccgctttgcctgcgaacccgaccgttttgagcgtatgcatgagcgtttggacgggatgttgttcgattacagcaaaaaccgtttgggcgaagatacgctgcaactgctctgccgtcttgcggagacggcggatttggaagggaaaatgcgtgctttgcggacgggtgcgaaagtcaacggcagcgaggggcgtgccgcgctgcatacggctttgcgcctgcccgacggtgcggatgccgtttatgtggacggcagggacgtgttgcccgaaatccgccgcgagttaaatcgtgcgttggagtttgcacacagtttggacgacggttcgtatcaggggataactgggaaacggattacggattttgtccacatcggcataggcggatccgacctcgggccggcaatgtgcgttcaggcactcgagccgttcagacggcatatcgccgtccattttgccgccaacgccgatcctgcctgcctggatgcggttttatgccgtctgaaccccgaaacgacagtgttttgcgttgccagcaagtccttcaaaacaccggaaaccctgctcaatgcacaggcagtcaaggcgtggtatcgcggtgcggggttctcggaatccgaaacggcgtgccatttttgcgcggtgtctgccgacactgcggcagctgcggctttcggtatcgcggcggaacgcgtgtttgcgatgtacgactgggtgggcggacgctattccgtctggtcgtccgtcggtttgcccgtgatggttgcggtcggcggggcgcgtttccgcgagttgttggcgggggcgcacgcgatggacagccattttttccacacgccgccgcgccgcaacattcccgttctgatggcactgattgccgtgtggtataacaatttccaacacgcggacgggcagaccgccgttccgtacagccacaacctgcgcctgctgccggtgtggctgaaccagctcgatatggagagtttgggcaaaagccgcgcttcagacggcagtcccgccgtgtgcaaaacgggcggcatcgtgttcggcggtgaaggggtcaactgccagcacgcctatttccaactgcttcatcaaggcacgcgcctgattccctgcgactttatcgtcccgatgacggcgcagggcgtggaggacggacgcagccgttttaccgttgccaacgcctttgcccaagcggaagccctgatgaagggcaaaaccttggacgaagcacgcgccgaattggcagatttgcccgaagcggaacgcgaacgcctcgcgccgcacaaagagttccccggcaaccgccccagtaacagcatcctgctcgaccgcctcacgccctacaatctgggtatgctgatggcggcttacgaacacaaaacctttgtgcagggtgtaatttgggacatcaatcccttcgatcagtggggggttgagtacggcaaacagttggcgaaaaccatcatcggcgaactggaaggcggcacgtccgtacacgatgcctcgaccgaagggctgatggcgttttaccgtgaatgccgtctgaaaggcgtcggcgcggcataa

SEQ ID NO: 61796 - DNA, 606 bp, Neisseria meningitidis
atgacccgtcaatccctgcaacaggctgcggaaagccgccgttccgtttatttgctaaataaaaatctgcccatcggcaaagatgaaatcgtccaaatcgtcgaacacgccgttttgcacacgccttcttcgtttaattcccaatctgcccgcgtggtcgtgctgtttggcgaagagcatgataaggtgtggcaatttgtcgaagacgcgctgcgtgccgtcgtgcctgccgacagttttgaaccgaccgcgcaaaaattgaacctgtttaaggcgggtgcggcaactattttgttttatgaagatcaaaatgttgtcaaaggtttgcaggagcagttccctgcttatgccgccaactttcccgtttgggcggaccaggcgaacgctatggtgcagtatgccgtttggacgacacttgccgcggtcggcgtaggtgcaaacctgcaacattacaatcccttgcccgatgcggcgattgccaaagcgtggaatatccccgaaaactggttgttgcgcgcacaaatggttatcggcggtattgaaggggcggcaggtgaaaagacctttgaacccgttgcagaacgtttgaaagtgttcggcgcataa

SEQ ID NO: 61797 - DNA, 1047 bp, Neisseria meningitidis
atgattccggccacctacaccctgtcccaaatcaccgcgcggctcggcggcgaatggcgcggcgaggacatttccgttaccgccgtgcgcccgctcgcagacgcgcaggcggaacacatcagcttccttgccaatccgaaatacaaagccgaagtccacgacagcagcgcgggcgcggtcatcgtttccgccaaagcggcagacggatttgaagggcgcaacctgattgtcgccgacgacccctatctctatttcgccaaagtcgcccgcctgttttcacccgtcgtcaaagcgcgcggcggcatccatccgaccgccgtcgtcgaaccgggcgcgaccgttcccgccagctgcgaaatcggcgcgaacgtctacatcggcgcaaacaccgtgctcggcgaaggctgccgcatcttggcaaacgccgtcgtccaacacgattgcaaactgggcgacgaagtcgtcctgcatcccaacgccgtcgtttattacggctgcacactgggcagacgcgtcgaaatccacagcggcgcggtcatcggcgcggacggtttcggactcgcttttgccggcgattcatggtttaaaatcccgcaaaccggcgcggtaacgctgggcaacgacgtagaaatcggctcgaacaccaacatcgaccgcggcgcgatgagcgacaccaccgtcggcaacggcaccaaaatcgacaaccaagtccaaatcggacacaactgcaaaatcggttcgcacaccgtcatcgccgccaaaaccggcatctcaggcagcgtaaccataggcagctactgcatcatcggcggcggcgtcggtacggtcggacacatcgaaatcgccgacaaaaccaccatcggcggcggcacgtccgtcacccacagcattaccgaaagcggcaaacacctcgccggcatcttcccgatgtccacccataaagaatgggcgcgcaacgctgtttacatccaccgcttaagcgaaatgaacaaacggctcaaaacactggagcagcagctttcagatgccggtcaagacagcaaataa

SEQ ID NO: 61798 - DNA, 246 bp, Neisseria meningitidis; identical to SEQ ID NO: 42918

SEQ ID NO: 61799 - DNA, 426 bp, Neisseria meningitidis
atgacacaagaaaccgctttgggcgcggcactaaaatccgccgtccaaactatgagcaaaaagaaacagaccgaaatgatcgccgaccacatctacggcaaatacgatgtgttcaaacgcttcaaaccgttggcgctcggcatcgatcaggatttgattgccgctttgccgcaatacgatgccgcactgattgcacgcgtcctcgccaaccactgccgccgtccgcgctatctgaaagccttggcgcgcggcggcaaacgtttcgatttgaacaaccgtttcaaaggcgaagttacccccgaagaacaggcgatcgcgcaaaaccatccttttgtgcagcaggctttgcaacagcagtccgcccaagctgccgccgaaacgctgtctgttgaagccgaagcagccgaatcttccgcagcagaataa

SEQ ID NO: 61800 - DNA, 606 bp, Neisseria meningitidis; identical to SEQ ID NO: 51371

SEQ ID NO: 61801 - DNA, 1188 bp, Neisseria meningitidis; identical to SEQ ID NO: 55791

SEQ ID NO: 61802 - DNA, 204 bp, Neisseria meningitidis
atgccgtctgaagcatgtttggttttcagacggcatttccttcgcttaaaacagcgtatcggcaaccccgccctgcctatccacggcaatctgcatctgaaaaccatctgtatcccaaaccacacccccatccctgtttccgtcatttgcaccctgtccgtattgggcaatcatcggtttttcgcttacaatagccgaatctga

SEQ ID NO: 61803 - DNA, 840 bp, Neisseria meningitidis; identical to SEQ ID NO: 44765

SEQ ID NO: 61804 - DNA, 1092 bp, Neisseria meningitidis
atgtcccatatttcccccatccccgaaatcctagccgacatcaaagccggcaaaatggtcatcatcaccgatgccgaagaccgagaaaacgaaggcgacctgctgatggcggcgcaattcgtcacgcccgaagccatcaacttcatgatcaaacacgcgcgcggcttggtctgcctgccgatggacggcgaaatggtcgaaaaactcgggctgccgatgatgacccaaaaaaacggcgcgcaatacggcaccaactttactgtctccatcgaagccgcacacggcattaccaccggcatttccgccgccgaccgcgccctgactattcaaaccgccgtttccccgaccgctaaacccgaagacatcgtccaacccggtcatatctttccgcttcgcgcccaaaaaggcggcgtactcgtccgcgccggacacaccgaagccggcgtcgacctggcgcaaatgaacgggctgattcctgcctccgttatttgcgaaatcatcaacgacgacggcacgatggcgcgtatgcccgaactgatgaaattcgccgaagaacacaagctcaaaatcggcacgattgccgacctcatcgaataccgcagccgtaccgaaagcctgcttgaagacatgggcaatgcgcctgtacaaaccccgtggggcgagttccaacaacacgtttacgtcgacaaactctccggcgaaacccacctcgccctcgtcaaaggcacgccctccgccgacaccgaaaccctcgtccgcgtccacgaacccttcagcgtcatggacttcatccaagctaacccgcgtcattcatggtcgctgcccaaagcactcgagcgcatccaacaggccgaaagcggcgtagtcatccttctgcaccgcaccgaagacggcgccgccctgctcgaccgcaccctgcccaaaggtgcaaaccaagcctacaaatgggacagcaaaagctacggcatcggtgcgcaaatcctcgccggcctcaacgtcaaaaaactgcgcgtcctcgggcagccctcatctttcaccggcctgaccggcttcggtttggaagtcgtcggctttgaagaagcggaaaaataa

SEQ ID NO: 61805 - DNA, 774 bp, Neisseria meningitidis; identical to SEQ ID NO: 37582

SEQ ID NO: 61806 - DNA, 720 bp, Neisseria meningitidis; identical to SEQ ID NO: 55680

SEQ ID NO: 61807 - DNA, 1449 bp, Neisseria meningitidis
atgaaattgcctattcaaaaattcatgatgctgtttgcagcggcaatatcgttgctgcaaatccccattagtcatgcgaacggtttggatgcccgtttacgcgatgatatgcaggcaaaacactacgaaccgggtggtaaataccatctgtttggtaatgctcgcggcagtgttaaaaatcgggtttacgccgtccagacatttgatgcaactgcggtcggccccatactgcctattacacacgaacggacagggtttgaaggcattatcggttatgaaacccatttttcaggacatggacatgaagtacacagtccgttcgataatcatgattcaaaaagcacttctgatttcagcggcggtgtagacggtggttttactgtttaccaacttcatcggacagggtcggaaattcatccggaggatggatatgacgggccgcaaggcagcgattatccgccccccggaggagcaagggatatatacagctattatgtcaaaggaacttcaacaaaaacaaagactaatattgtccctcaagccccattttcagaccgttggctaaaagaaaatgccggtgccgcctctggttttttcagccgtgcggatgaagcaggaaaactgatatgggaaagcgaccccaataaaaattggtgggctaaccgtatggatgatattcgcggcatcgtccaaggtgcggttaatccttttttaatgggttttcagggattgggagttggggcaattacagacagtgcggtaaacccggtaacctatgcggcagcacggaaaactttacagggtattcacaatttaggaaatttaagtccggaagcacaacttgcggccgcaaccgcattacaagacagtgcttttgcggtaaaagacagtatcaactctgccagacaatgggctgatgcccatccgaacattacagctactgcccaaactgccctttccgtagcagaggccgcaactacggtttggggcggtaaaaaagtagaacttaacccgaccaaatgggattgggttaaaaataccggctataaaaaacctgctgttcgccttatgcagactgtagatggggagatggctgggggaaatagaccgcctaaatctataacgtccaacagcaaagcagatgcttccacacaaccgtctttacaagcgcaactaattggagaacaaattagtagtgggcatgcttataacaagcatgtcataagacaacaagaatttacggatttaaatatcaattcaccagcagattttgctcggcatattgaaaatattgttagccatccaacaaatatgaaagagttacctcgcggtagaactgcgtattgggatgataaaacagggacaatagttatccgagataaaaattctgacgatggaggtacagcatttagaccaacatcaggtaaaaaatattatgatgatttatag

SEQ ID NO: 61808 - DNA, 624 bp, Neisseria meningitidis; identical to SEQ ID NO: 37310

SEQ ID NO: 61809 - DNA, 1197 bp, Neisseria meningitidis
atgtcccaaaaattgatcttggttttgaactgcggcagctcgtccctcaaaggcgcggtcctggataacggcagcggcgaagtcctgctcagctgccttgccgaaaaactcaacctgcccgatgcctacatcacattcaaagtaaacggcgaaaaacacaaagtcgatctgtccgcacatcccgaccacaccggcgcggtcgaagccctgatggaagaactcaaagcccacggcctcgacagccgcatcggcgccatcggccaccgcgtcgtcagcggcggcgaactgtacagcgaatccatcctcgttgacgacgaagtcattgccggcatcgaaaaatgcatcccgctcgcccccctgcacaaccccgcccacctcttgggcctgcgtgccgcgcaaagcattttcaaaggcctgcccaacgtcgtcgtattcgatacctccttccaccaaaccatgcccgaagtcgcctacaaatacgccgttccgcaggagttgtatgaaaaatacggcctgcgccgttacggcgcgcacggtaccagctaccgcttcgtcgccgacgaaaccgcgcgcttcctcggcaaagacaaaaaagacctgcgtatggtcattgcccacttgggcaacggcgcgtccatcaccgccgtcgccaacggcgaatcgcgcgacaccagtatgggcctgaccccgctggaagggctggtaatgggtacgcgcagcggcgacatcgatccttccgtattcggcttcctcgccgaaaacgccaatatgaccatcgcccaaatcactgaaatgctgaataaaaaatccggtctgctcggcatttccggcctgtccaacgactgccgcaccattgaagaagaagccgccaaggggcataaaggcgcgaaattggccttggatatgtttatctaccgccttgccaaatacatcggcagtatggcggttgccgcaggcggtttggacgcactggtctttaccggcggcatcggcgaaaactccgacatcatccgcgaacgcgtgatcggctacttgggcttcctcggtctgaacatcgaccaagaagccaacctgaaggcacgctttggcaacgccggcgtgattaccactgccggcagcaaagccgttgccgtggtcattccgaccaacgaggaattgatgattgcacacgataccgcccgcttgagcggtctgtaa

SEQ ID NO: 61810 - DNA, 2115 bp, Neisseria meningitidis
atggatttattatcggttttccacaaataccgtctgaaatatgcggtggccgtgctgacgatactgcttttggcggcagtcgggctgcacgcttccgtatatcgcaccttcacgcctgaaaacatccgcagccgcctccaacaaagcattgcacacacacaccggaaaatctcgtttgatgcggacattcagcgcaggctcctgccccggccgaccgtcatcctgaaaaacctgaccattaccgaacccggcggcgaccagactgccgtttccgtccaagaaaccaaaatcggattgagctggaaaaacctgtggtcggatcagatacagattgaaaaatgggtggtttcgagtgcggaacttgccctgacgcgcgacgggaaaggtgtttggaacatccaagacctgatcgacagccaaaaacgccaagcctcagtcaaccgcattatcgtcgaaaacagcaccgtccgcctcaatttcctgcaggaacagcttatcctgaaggaaatcaacctcaacctgcaatcccccgattcgtcggggcagccgtttgaaagttcgggcatactggtttggggaaagctgtccgtcccgtggaaaagcagggggctgttcctttcagacggcatcggcacgcccaaaatctcaccgttccattttgaagcttccacttcgctggacggacacggcattaccatttccaccaccggcagcccttctgtccgcttcaacgccggcggagcggatgccgccggcctcggcctgcgtgcagacacttccttccgcaacctccacctgaccgcccaaatccctacgctggcactcagaaataacagcattaaaattgaaaccgtcaacggcgcatttaccgccggcggcgaatatgcccaatgggacggttcgttcaaactcgacaaagccaaccttcactccggcatcgccaacatcggcaacgccgaaatctccggcagcttcaaaacaccgcgccaccagaccaacttctccctcaattcgccgctcgtatggacggaaaacaaagggctggacgcgccgcgcctgtatgtatcgacccttcaggataccgtcaaccgcctgccgcaaccccgtttcatcagccggctcgacggttcgctgtccgtaccgaatctgcaaaattggaatgccgaattaaacggcacattcgaccgccaaaccgttgccgcgaaattcagatacacacatgaagacgcaccgcatctggaagccgccgtcgcactgcaaaaattgaacctgaccccctatcttgacgacgtgcggcaacaaaacggcaaaatatttcccgacaccctcgccaagctgtccggcgacatcgaggcgcacctgaaaatcggaaaagtccaacttcccggcctgcaactggacgatatggaaacctacctccacgccgacaaaggccatatcgcgctcagccgtttcaagtcagggctttacggcggccataccgaaggcggcatcagcatcgccaacacccgtcccgccacttaccgcctgcaacagaatgcaagcaacatccaaatccaaccgctgctgcaagacctgttcggcttccacagcttcagcggcaacggcgatgcggtcatcgacctgaccgcgagcggcgaaacccgaaaagagcttatccgctcgcttcagggcagcctgtcgctgaatatttccaacggtgcatggcacggtatcgacatggacaatatcctgaaaaacggcatttcgggcaaaactgccgacaatgccgcacccagcacacccttccaccgattcacgctcaacagcgaaatttcagacggcatcagccgccacatcgataccgaactcttctccgacagcctctatgttaccagcaacggctataccaatctggatacgcaggaattgtctgaagatgtccttatccgcaacgccgtccatccgaaaaacaaaccgattcccctgaaaatcaccggtacggtggacaagccgtccattaccgtcgattacggcaggctgaccggcggcatcaattcgcgcaaagagaaacagaaaatcctcgaagacaccctgctggaacaatggcagtggctcaaacctaaagaaccgtaa

SEQ ID NO: 61811 - DNA, 786 bp, Neisseria meningitidis
atgggttttctgcaaggcaaaaaaattctgattaccggcatgatttccgagcgttccatcgcttacggcatcgccaaagcctgccgcgaacaaggcgcggaactggcgtttacctacgttgtggacaaactggaagagcgcgtccgcaaaatggcggcggaattggattccgaactcgtgttccgctgcgatgtcgccagcgacgacgaaatcaaccaagtgttcgccgatttgggcaaacattgggacggcttggacggtttggtgcattccatcggttttgcgccgaaagaagccttgagcggcgacttcctcgacagcatcagccgcgaagcgttcaacaccgcacacgaaatttccgcatacagcctacctgcgctggcaaaagccgcccgtccgatgatgcgcggcagaaactccgccatcgtcgccctgagctacttgggcgcggtgcgcgcgattccgaactacaacgtgatgggtatggcaaaagccagccttgaggcaggcatccgctttaccgccgcctgtttgggcaaagaaggcatccgctgcaacggtatttccgccggtccgatcaaaacactcgccgcctccggcatcgccgatttcggcaaactcttgggacacgtcgccgcccacaatccgctgcgccgcaacgttaccatcgaagaagtcggcaatgccgccgccttcctgctgtccgacctgtcgtccggcattaccggcgaaatcacttacgttgacggcggttacagcatcaatgccttgagcaccgagggataa

SEQ ID NO: 61812 - DNA, 519 bp, Neisseria meningitidis; identical to SEQ ID NO: 39562

SEQ ID NO: 61813 - DNA, 279 bp, Neisseria meningitidis; identical to SEQ ID NO: 56003

SEQ ID NO: 61814 - DNA, 309 bp, Neisseria meningitidis; identical to SEQ ID NO: 36432

SEQ ID NO: 61815 - DNA, 1155 bp, Neisseria meningitidis; identical to SEQ ID NO: 55553

SEQ ID NO: 61816 - DNA, 594 bp, Neisseria meningitidis; identical to SEQ ID NO: 55464

SEQ ID NO: 61817 - DNA, 234 bp, Neisseria meningitidis
atgaaccgccgaaaaatctatctgttgtctgttgccctcttcacactggcatttatgctgctcgtcctcttgggtgcttatctgctgaccgtcggcagcaaagccttcgccgtcgcctccttttttttcgcattcggcgcactgttcggacaaatcggcagcctcgccctctacctgcggcacaaatccctacgcgccgcccaatccgccgcaaaggaaaaccgctatgtctga

SEQ ID NO: 61818 - DNA, 966 bp, Neisseria meningitidis
atgagctacacgcaactgacccaaggcgaacgataccacatccaatacctgtcccgccactgcaccgtcaccgaaatcgccaaacagcttaaccgccacaaaagcaccatcagccgcgaaatcagacggcaccgcacccaagggcagcaatacagcgccgaaaaagcccagcggcaaagccagactatcaaacagcgtaagcgacaaccctataagctcgattcgcagctgattcagcacatcgacacccttatccgccgcaaactcagtcccgaacaagtatgcgcctacctgtgcaaacaccaccagatcacgctccaccacagcaccatttaccgctaccttcgccaagacaaaagcaacggcagcacgttgtggcaacatctcagaatatgcagcaaaccctaccgcaaacgctacggcagcacatggaccagaggcaaagtacccaaccgtgtcgtcatagaaaaccgacccgctatcgtcgaccagaaatcccgtatcggcgattgggaagccgacaccattgtcggcaaaggacagaaaagcgcattattgaccttggtcgaacgcgttacccgctacaccatcatctgcaaattggatagcctcaaagccgaagacactgcccgggcagctgttagggcattaaaggcacataaagacagggtgcacaccattaccatggataacggcaaagagttctaccaacacaccaaaataaccaaagcattgaaagcggagaattatttttgtcgcccttaccattcttgggagaaagggctgaatgagaacaccaacggactcatccggcaatacttccccaaacaaaccgatttccgtaacatcagtgatcgggagatacgcagggttcaagatgagttgaaccaccgaccaagaaaaacacttggctacgaaacgccaagtgttttattcttgaatctgttccaaccactaatacactag

SEQ ID NO: 61819 - DNA, 1347 bp, Neisseria meningitidis
atgtcggataacgttccaacgattgcggcagtcgctaccgcgcccggacgcggcggcgtgggcgtgatacgcatatcggggaaaaacctgctgccgatggcgcaggctttgtgcgggaaaacgcccaagccgcgcgtggcaacctatgctgattttacggacgcggacggacaggcaatcgacagcgggcttttgcttttttttgccgcaccggcaagttttacgggcgaagatgttatcgagcttcagggacacggcgggccggtagtgatggatatgctgctgaaccgctgtttggaattgggcgcgcgccttgccgaaccgggcgagtttacgaagcgtgcgtttttaaacgacaaactggacttggcacaggcggaaggcgtggcggatttgattgacgcatccagccgttcggcggcgcgtctggcgttgcgctcgctcaaaggcgatttttcgcggcggatacacggtctggtcgaagacttgattaccttgcggatgctggtcgaagcgacgttagattttcccgaggaagacattgattttctcgaagcggcagacgcacgcggcaaactggacggcttgcgccgcgccgtggatgatgtgcttgccaacgcgcagcagggcgcgattttgcgcgaaggtctgaatgtcgtattggtcggcgcgccgaatgtcggcaaatccagcctgttgaacgcgctggcgggcgacgaagtggcgattgttaccgatattgccggaacgacgcgcgacgcggtcagggaacgtatcctgattgacggcgttccggtgcatattgtcgatacggcaggtttgcgcgagacggacgacgtggtcgaacgcatcggcatcgaacgcagccgcaaagccgtatccgaagccgatgtcgcgctggtgttggtcgatccgcgcgaaggcgtgaacgacaagacacgggcgattttggacgcgttgccgccggagttgaaacgcatcgaaatccacagcaaatccgatttgcacgcacacgcggcaggcgggttcggtacgggcgcggaaaccgtcatcgcgctgtcggcgaaaaccggcgacggcttggacgcgctgaaacggacgttgttgcgcgaggccggatggcagggcgagggcgaagggctgtttttggcgcggacgcggcacgtcaacgcactcaaagcagcgcaggaagaattgtcgctggcggcattgtgcggcaaccatcaaatcgagctgtttgccgaacacttgcgcttggcgcaggtcgcatgcggcgaaatcacgggcgagtttacggcggacgacctgctcggcgtgattttttcgaggttttgtatcggaaaataa

SEQ ID NO: 61820 - DNA, 1131 bp, Neisseria meningitidis; identical to SEQ ID NO: 59617

SEQ ID NO: 61821 - DNA, 1254 bp, Neisseria meningitidis
atgcagacttacctcgtcggcggcgccgtccgcgattatcttttgggcttgcccgtcaaagaccgcgattgggtggtcgtcggcgcagacgcacaaaccatgctggcgcaaggcttccagccagtcggcaaagactttcccgtgtttctccatcccgaaacacacgaagaatacgccctcgcccgcaccgagcgcaaaaccgccaaaggttacgccggcttcagtttccacaccgacaaagacgttacgctggagcaggatttgatgcgccgcgacctgaccatcaacgcgatggcgcaagatgcggacggcaagattatcgaccctttcggcggacaacgggatttggcggcaggcattttgcgccacgtttccccggccttcgccgaagaccccgtccgcatcctgcgtactgcccgctttgccgcgcgttacaagtttgaaatcgccgaagaaaccataaagctgatgcggcagatggtggaaaacggcgaagcggacgcattggttgccgaacgcgtctggcaggagtttgcgaaaggtttgatggaaaaaaatccgcgcaaaatgattgaagtgttgcgcgaatgcggcgcgctcaaagtcttgctgcccgaagtcaatgccctcttcggcgtgccgcaacgcgccgactaccatcccgaaatcgacagcggcatccataccctgatgacgctgcaacgcgccgccgatatgggtttgagcctgcccgaacgctatgccgccctgctgcacgacttgggcaaagccaaaacaccgtccgacatcctgccgcgccaccacggacacgacctcgccggtgtcgaacccgtgcgcgaagtcaatcagcggctgcgtgcgccgaaacattgcgccgagcttgccgaacttgtctgccgttggcacattattttccaccaagtcggacagcttaaaagccaaaccattctgaacgttttgaaaaaaaccgacgctttcagacgccccgaacgctttcagacggcattgaacgtctgcattgccgacacgcaaggccgtctgaaccgcgaacacacgccctacccgcaacgcgcgcactggctcgccttactcgaagccgccaatcaggcggattcgggcaaaatcgccgccgaatgccgctcgcagggaaaagcgcaccttatcgccgaacaaatcgaccgggcgcggctggcacaaatcgccccattgcaaaaagcgtttcgagcggcgcaagacaaaacagaaaaacattaa

SEQ ID NO: 61822 - DNA, 777 bp, Neisseria meningitidis
atggctaagaaattcgataaagacagcttcagcggcacgctgattgtcgtgttggcggtcagcctgatttgttccatcatcgttgccggtgcggtcgtcggtttgaaacccatccaagagaaacaaaaactccaagacaaacaaggctatatcttgagcgtagccggtttgatggataaaaacaccgacattagcaaaacctttgccgagcgtatcgagcaacgtgttgtcgatttggcgaccggcgaatatgtcgctgatgcgcctaaagacttcagcgcacgcgttgccggcaaagaccctgcccaaagcatccaaatcaaacctgaagacgatttggcaggcatcaaaagccgtgccaaatacaccgaggtttatttggtaaaaggcgaagacggcaaaatcggccaaatcatcctgccgatgcacggcaacggtttgtggtcggtcatgtacggctttgtcgccatccaacccgacggcaacaccatcaacggcattacctactacgagcaaggcgaaaccccgggcttgggcggcgaaatcggcaatcctttgtggcagcaaaaattcgtcggcaaaaaactgtttgacggacaaggcaaactcgccctgcacgtcggcaaaggcgcgggttcggacaaagaacacggcgtagatgccctctccggtgcatcgctgacatccaaaggcgtgcaaggttcgttcgcctactggttcggcgaaaacggctatatcccctacctgaacaaattgaaatcagcaggagcgcaataa

SEQ ID NO: 61823 - DNA, 390 bp, Neisseria meningitidis
atgtccaaaaccatcatccacaccgacaaagcccccgccgccatcggcgcgtacagccaagccgtccgagcaggcgacaccgtttacatgagcggtcaaatccccctcgatcccgccacgatgaccgtcgtcggcaacggcgatttccgcgccgaagcgcgccaagtgttccaaaacctgcaagccgtcgccgaagcggcaggcggcacgctggccgacatcgtcaaactcaacgcctacctgaccgacttgggcaattttgccgtcttcaacgaagtgatggcggaatttattgccgagcccttccccgcccgcgccgccgtcggcgttgcctccctgccaaaaggcgtgcaggtcgaagccgaagccgtcctcgttttgaacgcataa

SEQ ID NO: 61824 - DNA, 948 bp, Neisseria meningitidis
atgaatatcctcagtaaaatcagcagctttatcggaaaaacattttccctctgggtcgcgctctttgccgccgccgcttttttcgcgcccgacaccttcaaatgggcggggccttatattccttggctgttgggcattattatgttcggtatgggtttgacgctcaaaccttccgacttcgatattttgttcaaacatcccaaagccgtcatcatcggcgtaatcgcacaattcgccattatgccggcaaccgcctggctgctgtccaaactgttgaacctgcctgccgaaatcgcggtcggcgtgattttggtcggctgctgcccgggcggtacggcttccaatgtgatgacctatctggcgcgcggcaatgtggctttgtcggttgccgttacgtctgtttccaccctgatttccccattgctgactcccgccatcttcctgatgcttgccggtgaaatgctggaaatccaagcggccggtatgttgatgtccatcgtcaaaatggttttgctccccattgttttgggtttgattgtccataaggttttgggcagtaaaaccgaaaagctgaccgatgcgctgccgctggtttccgttgccgccatcgtgctgattatcggcgcggttgttggggcaagcaaaggcaagattatggaaagcggcctgctgatttttgcggttgtcgtactccacaacggcatcggctacctgctcggcttctttgccgccaaatggaccggcctgccttatgatgcacaaaaaacgctggccatcgaagtcggtatgcaaaactcgggtctggccgccgcgctggccgccgcacactttgccgctgcgccggtcgttgccgttccgggcgcattgttcagcgtgtggcacaatatctccggctcgctgctggcaacttattgggcggccaaagccggtaaacataaaaaaccctaa

SEQ ID NO: 61825 - DNA, 2064 bp, Neisseria meningitidis
atgatgacccaaacccttttaatcgaactccttaccgaagaactcccgcccaaagctctgaataatctgggcaaccattttgccgccgccgttgccgaaggcttggaaaaagcgcaactggttgacggtgcagccgaatttacggcttatgcctcgccgcgccgtttggcggttcaagtcaaaaacgttaaagccgttcaggccgaccaaaaaatcgtgaaaaaaggccctgccgtggcgaatgccatgaaagacggtgcgccgaccaaggctttggaaggtttcgcacgcggtgcgggcgcgaaaatcgaagacttgaccatcgtccacgacggcaaacaggatgtgtacgcctacgaatacgtccaaaccggcaaaccgctgggcgaacttttggaagacattatcaatcaagccgttaagaaactgccgattccgaaagtgatgcgttggggcagcagcacgtttaccttcgtgcgccctgttcacgggctgattgtgctgcacggcggcgacatcgtaaacgtcagcgttttgggtctgcaaagcagcaatcaaaccttgggacaccgcttcttgtccaacggcgaaatcaccattgaaaacgccgacagctacgccgaacaaatgcgcgggcaaggcaaagtcgtcgcttcgtttgccgagcgcaaagccgcgattcagacggcattggaagggcaggcgcgccgtctgaacgcgaccgttgccgccgatgaagcattgctggacgaagtaaccgcgctggtcgaataccccgttgttttggaagccggttttgaggaacacttcctcgccgtgcctcaagaatgcttgattttgacgatgcagcaaaaccaaaaatacttcccgctgctcgaccaaaacggcaagctgatgaaccgcttcctgctggtctccaacctgcaaaccgcagacccgtcgcacatcatccaaggcaacgaacgcgttttgcgcgcgcgcctgtctgatgccgagttcttctacaaacaagaccaaaaggcgactttggaaagccgcctgcccaagctggcaaacgtggtttatcacaacaaaatcggttcgcaagccgaacgcatcgaacgcctgcaaagcattgccgcccacatcgctaaagcgttgggcgcagatgccgccgccgccgaacgcgccgcgcgtctggcaaaagccgacttggtaaccgaaatggtcggcgagttccctgaattgcaaggcaccatgggcaaatactatgcccgtttggacggcgaaaccgaagaaatcgccgaagccatcgagcaacactaccaaccgcgtttcgccggcgacaatctgccgaatggcaaagttgccaccgccgtggcactggcggacaaactagaaaccttggtcggcatttggggcattggtctgattccgaccggcgacaaagacccctacgccctgcgccgcgccgccttgggtattttgcggatgctgatgcagtacggtttggacgtgaacgaactgattcagacggcattcgacagcttccccaaaggtttgctcaacgaaaaaacgccgtctgaaaccgccgactttatgcaggcgcgccttgccgtgttgctgcaaaacgattatccgcaagacatcgttgccgccgtattggcgaaacagccgcgccgtttggacgacgtagtggcgaaactgcaagccgttgccgcgttcaaacaactgcccgaagccgccgcgctcgccgccgccaacaaacgcgtgcaaaatctgctgaaaaaagccgatgccgagttgggcgcggttaacgaaagcctgctgcaacaggacgaagaaaaagccctctttgccgccgcgcaaggcttgcagccgaaaatcgccgccgccgtcgccgaaggcaatttccaaaccgccttgtccgaactggcttccgtcaagccgcaagtcgatgccttctttgacggcgtgatggtgatggcggaagatgccgccgtaaaacaaaaccgtttgaacctgttgaaccgtttggcagagcagatgaacgcggtagccgacatcgcgcttttgggcgagtaa

SEQ ID NO: 61826 - DNA, 432 bp, Neisseria meningitidis; identical to SEQ ID NO: 38797

SEQ ID NO: 61827 - DNA, 165 bp, Neisseria meningitidis
atggccaaaacattgaaggcggaaacctatttttaccgcccttaccattcttgggagaaagggctgaatgaaaacaccaatggactcatccgacaatattccccaaacaaaccgttttccgaaacatcagcgatcgggagatacgtagggttcaagatgagttga

SEQ ID NO: 61828 - DNA, 1098 bp, Neisseria meningitidis; identical to SEQ ID NO: 54808

SEQ ID NO: 61829 - DNA, 933 bp, Neisseria meningitidis; identical to SEQ ID NO: 54672

SEQ ID NO: 61830 - DNA, 339 bp, Neisseria meningitidis; identical to SEQ ID NO: 55496

SEQ ID NO: 61831 - DNA, 759 bp, Neisseria meningitidis; identical to SEQ ID NO: 37775

SEQ ID NO: 61832 - DNA, 2058 bp, Neisseria meningitidis
atgcccgaacaaaaccgcatcctctgccgcgaactaagcctgctggcattcaaccgccgcgtgttggcacaggcggaagacaaaaacgtcccccttttggaacgcctgcgcttcctgtgcatcgtgtcgtccaatcttgacgagtttttcgaagtccgcatggcgtggctcaagcgtgaaaacaagctgcacccccggcgcaggctggacaacggcaaaatgccgtctgaaaccatcgccgacgttaccgaagcggcgcgctccctgatacggcaccagtacgacctgttcaacaacgtccttcagcccgagttggcgcgggaaagcatccatttttaccgccgccgcaactggacgggcgcgcagaaaaaatggatcgaagactatttcgaccgcgaactgctgccgatcctgacccccatcggactcgacccgtcccaccccttcccgcgaccgctgaacaaatcgctcaacttcgccgtcgaactcgacggcacggacgcgttcggcaggccttcggggatggcgattgtgcaggcaccgcgcatcctgccgcgcgttgttcccctgccgtccgaactgtgtggcggcggacacggcttcgtcttcctctcctccatcctgcacgcccacgtcggcaaactcttcccgggcatgaacgtcaaaggctgccaccagttccgcctgacgcgcgacagcgacttgaacgtcgatgaagaagacgtgcaaaacctccgcgccgccgttcaaaacgagttgcatgaccgcgaatacggcgacggcgtgcgcctcgaagtcgccgacacctgtcccgcccgcatccgcgacttcctgctgtcgcaattcaggctgaccgccgacgaactttaccaagtcaaaggccccgtgaacctcgtgcgcctcaacgccgtccccgatttggtcaaccgccccgatttgaaattcccgccgcacacgccgggcaggctgaaagccttgggcaaaaccgcgtccatattcgatttggtgcgccaatcgcccatcctgctgcaccacccctaccaatccttcgaccccgttgtcgaaatgatgcgcgaagccgccgccgaccccgccgtgcttgccgtcaaaatgacgatttaccgcaccggcacgcgctccgaactcgtccgcgccctgatgaaggcggcactcgccggcaaacaagtaaccgtcgtcgtcgaactgatggcgcgttttgacgaagccaacaacgtcaactgggcgaagcagctcgaagaggcgggcgcgcacgtcgtgtacggcgtgttcggctacaaaatccacgccaagatggcactggtcatccgccgcgaagacggcgtgctcaagcgttacgcccacctcggcacgggcaactaccaccaaggcacatcgcgcatctacaccgacttcggcatcattaccgccgacgaacaaatcaccgccgatgtgaacacattgtttatggaaatcacaggtttgggcaaacccggccgtctgaacaagctctatcaaagcccgtttaccctgcacaaaatggttatcggacgcatcaggcaggaaaccgaacacgccaaagcaggcaagccggcacggattactgccaagatgaattcgctcatcgaaccgaccgtcatcgaagccctgtatcgggcaagcgcggcaggcgtgcaaatcgatttgattgtgcgcggtatgtgcactctgcgccccggcgtgaaaggcttgtccgaaaacatccgcgtccgctccatcgtcggcaggcagctcgaacacgcgcgcgtgtattgcttccacaacaacggcgcggacgatacctttatttccagcgcggattggatggggcgcaacttcttccgccgcatcgaaaccgccgcgccgattaccgcgcccgaactcaaaaaacgcgtgatccgcgaaggtttggaaatggcattggcagacaacacccacgcctggctgatgcagcccgacggcggctatatccgcgccgcgcctgccgagggcgaaagcgaagccgacctgcaaaacgatttgtggacactgctcggaggctga

SEQ ID NO: 61833 - DNA, 966 bp, Neisseria meningitidis; identical to SEQ ID NO: 45729

SEQ ID NO: 61834 - DNA, 534 bp, Neisseria meningitidis; identical to SEQ ID NO: 54245

SEQ ID NO: 61835 - DNA, 1185 bp, Neisseria meningitidis; identical to SEQ ID NO: 56072

SEQ ID NO: 61836 - DNA, 954 bp, Neisseria meningitidis; identical to SEQ ID NO: 54637

SEQ ID NO: 61837 - DNA, 747 bp, Neisseria meningitidis
gtgcagcctgaaacctccgcccaataccagcaccgtttcgcccaagtcatacgcgggggcgaagccgcagacggtctgccgcaagaccgactgaacgtctatatccgcctgatacgcaacaatatccacagctttatcgaccgctgctataccgaaacgcggcaatactttgacagcgaagaatggagccgtctgaaagaaggtttcgtccgcgacgcgcacgcccaaacgccctattttcaagaaatccccggcgagttcctacaatattgccaaagcctgccgctttcagacggcattttggcactgatggattttgaatatacccaattgctggcagaagttgctcaaattccggatattcccgacattcattattcaaatgacagcaaatacacaccttcccctgcggcctttatccggcaatatcgatatgatgttaccgatgatttgcatgaagcggaaacagccttgttaatatggcgaaacgccgaagatgatgtgatgtaccaaacattggacggcttcgatatgatgctgctagaaataatggggtcctccgcgctttcgtttgacaccctcgcccaaacccttgtcgaatttatgcctgaggacgataattggaaaaatattttgcttgggaaatggtcaggctggactgaacaaaggattatcatcccctccttgtccgccatatccgaaaatatggaaggcaattccccgggccaaaaccatctatccgcataa

SEQ ID NO: 61838 - DNA, 525 bp, Neisseria meningitidis
atgaaaaaagcacttgccacactgattgccctcgctatcccggccgccgcactggcggaaggcgcatccggcttttacgtccaagccgatgccgcacacgcaaaagcctcaagctctttaggttctgccaaaggcttcagcccgcgcatctccgcaggctaccgcatcaacgacctccgcttcgccgtcgattacacgcgctacaaaaactataaagccccatccaccgatttcaaactttacagcatcggcgcgtccgccatttatgacttcgacacccaatcgcccgtcaaaccgtatctcggcgcgcgcttgagcctcaaccgcgcctccgtcgacttgggcggcagcgacagcttcagccaaacctccaccggcctcggcgtattggcgggcgtaagctatgccgttaccccgaatgtcgatttggatgccggctaccgctacaactacatcggcaaagtcaacactgtcaaaaacgtccgttccggcgaactgtccgccggtgtgcgcgtcaaattctga

SEQ ID NO: 61839 - DNA, 135 bp, Neisseria meningitidis; identical to SEQ ID NO: 44583

SEQ ID NO: 61840 - DNA, 717 bp, Neisseria meningitidis; identical to SEQ ID NO: 50217

SEQ ID NO: 61841 - DNA, 561 bp, Neisseria meningitidis
atgccggggcttgccggcttgattttgccgaaattgttggcacgcaattgggaggggcggcaacctatggaaaatagatttgcaaaaatcgttaaggatatttttagttttacccaatttgtttccgaagcggaaaataaaattcctaaccaatcctctcgttattacgattgctggtgggaattggaaatcttgaatgcttccgcattggaagattgggaaatatcgggaaagcctgaaaaatgggagaaatggacagaaaaatatcagaccgaagcgttacagtcagtcaagcatctatttgccgaagaagttcctgaaaataatatagtttgcgatatttctcattttttgcattttgccgattgggcagaagccgacattcccaatcaatcacgtttatatgccgaatattggtgggaaatggaaattttcaaaatgtcggttttagaagattgggaacgctcgggaaaaccgttagattgggaaaaatggcaaaggcaatatcgatctgaagcatttgaattagttaaaaaattgaaccgaagcaaacaagagtaa

SEQ ID NO: 61842 - DNA, 453 bp, Neisseria meningitidis; identical to SEQ ID NO: 54351

SEQ ID NO: 61843 - DNA, 411 bp, Neisseria meningitidis; identical to SEQ ID NO: 54400

SEQ ID NO: 61844 - DNA, 657 bp, Neisseria meningitidis; identical to SEQ ID NO: 39727

SEQ ID NO: 61845 - DNA, 756 bp, Neisseria meningitidis
atgaagtttgcccggttactctttctctgtgcggctctcgccggcacccaagcggcggctgccgaaatggttcaaatcgaaggcggcagctaccgcccgctttatctgaaaaaagataccggcctgattaaagtcaaaccgttcaaactggataaatatcccgttaccaatgccgagtttgccgaatttgtcaacagtcaccccaaatggcaaaagggcaaggtcagttccaaacaggcagagcctgcttacctgaagcattggatgaaaaacggcagccgcagctatgcgccgaaggcgggcgaattaaaacaaccggtaaccaatgtttcctggtttgccgccaacgcctattgcgctgcacaaggcaaacgcctgccgaccattgacgaatgggaatttgccggacttgcttccgccacgcagaaaaacggctcaaacgaacccggctacaaccgcactattctcgattggtatgcggatggcggtcgtaaaggcctgcacgatgtcggcaaaggccgcccgaactactggggcgtttacgatatgcacggtctgatttgggaatggacggaagatttcaacagcagcctgctttcttccggcaatgccgatgcgcaaatgttttgcagcggcgcatctgtcgggtcgagcgactcgtccaactatgccgcattcctccgctacggcatccgcaccagcctacaatccaaatacgtcttgcacaacttgggcttccgttgcacaagccgataa

SEQ ID NO: 61846 - DNA, 2157 bp, Neisseria meningitidis
atgcctgtccctcaacccaccgcaccttacgaccatttaactgccgaagcacgcaccttgcttttccgtaccgcttcctatctcaagcctgaagaacaggttgagctcgagaaggccgttgcctatgcatttcacgctcatgacggacaaacccggaaaagtggcgaaccatacattacgcatccaattgccgttgcgacgcagctcgccctttggcatatggacatacagggtctgtgtgcaggcgtgatgcacgacgtattggaagatacgggcgtgacaaaaggggaaatggcggcggtgttcggcaatacgattgccgagatggtggacggtctgtccaaactcgaaaaactcaaatttgaagatcatgcggaacatcaggcggagagtttccgcaaactgattttggcaatgaccaaagatgtgcgcgtcatcgtcgtcaaacttgccgaccgcctgcacaatatgcggacgctcggttcgatgcgcccggacaaacgccgccggattgcaagggaaacccttgaaatctatgcacagattgccaaccgtataggtttgaataacgcatatcaagagcttcaggatttatcgttccaaaacctgcatcccaaccgctacgagactttaaaaaaagcgatggacaagagccggaagaaccggcaggacgttgtcggcaaagtcttgcgcgcattcggccagcggctggtaggcgcgaatatagaggccaaaatcaaaggcagggaaaaaaacctgtacggcatccatcagaaaatgatggcgaaaaagctgcgctttgccgaggttatggatatttacggtttccgcgtcattgtcaacagcattccagcctgttatgccgcactcggcgcattgcacaccctctatcagcccaagcccgggcggttcaaagactatatcgccattccgaaaagcaacgggtatcaaagtctgcatacgactttggtcggcccttacggcttgccgattgaagttcagatacgtaccaaggaaatggatgctgttgccgaaggtggaatcgccggacattggagctataaatcatattctaagatggtcgatcaggcggtgcttcacacaaaccggtggctgaaaaatatcttagatttgcaggcaagcagtgccaatgccattgagtttctcgaacacgtcaaagtcgatttgtttccgaacgaaatctacatccttacgccaaaaggaaaaatcctaactttgcccaaaggggcaacgcctgtcgattttgcttatgcggtgcataccgatatcgggcacaaaaccgttgccgcacgtatcaacaatatcatgatgccgttgcgtacgaagctcaaaaccggcgattccgtcgaaattattacatccgaacatgccaaacccaatcctgcatggttgaatttcgccgtgtcaggcagggcgcgcagtgccatacgccaatatattaaaaaccttaaccggcacgatgcggtcgttttgggagagagcctcttacaaaaagccctgtccagtttgctgcccaaagatgtcctgctttcagacggcattaaagaaaaataccttgccgatctcaacgacaaacagacttcatttgaggaagtgctgtacaacgtcggtatggggcataccctgcctgtttatgtcgccatgcacattgccgagttggcaggggagcatttcggcagcgaggtcaggctcagttccattaaagttgatggtcaggaaagcgggcatattcattttgcagagtgctgccatccggttcccggcgattccatccgtttgctgttggttaagggaaaaggcatgattatccatagggatacctgcccgacgttgttaaagtccgatcccgaacagcagctggatgcagactgggaaaatatgaacgggcagaactaccgtgtcgggcttcaagtccaatcggaagacagccacggcttgctggcattaatggcgcaagcgatttccgattccggtgcggacattgagtcggtcgaaacaccgtctaaatcccagtcgggaacggaaggttttgtcgaattcaaattcttattgaaagtcaagaatctgaatcaattgaatcagattattcaaaatctgcatagtattccatatatccgcaaagtcatcagaagttga

SEQ ID NO: 61847 - DNA, 864 bp, Neisseria meningitidis
atgaacaaattttcccaatccggaaaaggtctgtccggttttttcttcggtttgatactggcgacggtcattattgccggtattttgttttatctgaaccagagcggtcaaaatgcgttcaaaatcccggttccgtcgaagcagcctgcagaaacggaaatcctgaaaccgaaaaaccagcctaaggaagacatccaacctgaaccggccgatcaaaacgccttgtccgaaccggatgctgcgaaagaggcagagcagtcggatgcggaaaaagctgccgacaagcagcccgttgccgacaaagccgacgaggttgaggaaaaggcggacgagccggagcgggaaaagtcggacggacaggcagtgcgcaagaaagcactgacggaagagcgtgaacaaaccgtcggggaaaaagcgcagaagaaagatgccgaaacggttaaaaaacaagcggtaaaaccatctaaagaaacagagaaaaaagcttcaaaagaagagaaaaaggcggagaaggaaaaagttgcacccaaaccgaccccggaacaaatcctcaacagcggcagcatcgaaaaagcgcgcagtgccgctgccaaagaagtgcagaaaatgaaaacgcccgataaggcggaagcaacgcattatctgcaaatgggcgcgtatgccgaccgccggagcgcggaaggacagcgtgccaaactggcaatcttgggcatatcttccaaggtggtcggttatcaggcgggacataaaacgctttaccgggtgcaaagcggcaatatgtctgccgatgcggtgaaaaaaatgcaggacgagttgaaaaaacatgaagtcgccagcctgatccgttctatcgaaagtaaataa

SEQ ID NO: 61848 - DNA, 189 bp, Neisseria meningitidis; identical to SEQ ID NO: 42129

SEQ ID NO: 61849 - DNA, 1104 bp, Neisseria meningitidis
atgatggaaacacagctttacatcggcatcatgtcgggaaccagtatggatggggcggatgccgtgctggtacggatggacggcggcaaatggctgggcgcggaagggcacgcctttaccccctatcccgacaggctgcgccgccaattgctggatttgcaggacacaggcacagacgaactgcaccgcagcaggattttgtcgcaagaactcagccgcctatatgcgcaaaccgccgccgaactgctgtgcagtcaaaacctcgcgccgtccgacattaccgccctcggctgccacgggcaaaccgtccgacacgcgccggaacacggttacagcatacagcttgccgatttgccgctgctggcagaacggacgcggatttttaccgtcggcgacttccgcagccgcgaccttgcggccggcggacaaggtgcgccgctcgtccccgcctttcacaaagccctgttccgcgacgacagggaaacacgcgcggtactgaacatcggcgggattgccaacatcagcgtactcccccccgacgcacccgccttcggcttcgacacagggccgggcaatatgctgatggacgcgtggacgcaggcacactggcagctgccttacgacaaaaacggtgaaaaagcggcacaaggcaacatattgccgcaactgctcgacaggctgctcgcccacccgtatttcgcacaaccccaccctaaaagcacggggcgcgaactgtttgccctaaattggctcgaaacctaccttgacggcggcgaaaaccgatacgacgtattgcggacgctttcccgattcaccgcgcaaaccgttttcgacgccgtctcacacgcagcggcagatgcccgtcaaatgtacatttgcggcggcggcatccgcaatcctgttttaatggcggatttggcagaatgtttcggcacacgcgtttccctgcacagcaccgccgaactgaacctcgatccgcaatgggtagaagccgccgcatttgcgtggttggcggcgtgttggattaaccgcatccccggtagtccgcacaaagcaaccggcgcatccaaaccgtgtattctgggcgcgggatattattattga

SEQ ID NO: 61850 - DNA, 1008 bp, Neisseria meningitidis
atgagcaccttcttccagcaaaccgcccaagccatgattgctaaacacatcaaccgcttcccgctattgaagttggaccaggtgattgattggcagccgatcgaacagtatctgaatcgtcaaagaacccgttaccttagagaccaccgcggccgtcccgcctaccccctgttgtccatgttcaaagccgtcctgctcggacaatggcacagcctctccgatcccgaactcgaacacagcctcatcacccgcatcgatttcaacctgttttgccgttttgacgaactaagcatccccgattacagcaccttatgccgttaccgcaaccggctggcgcaagacgacaccctgtccgaattgctcaaactgattaaccgacaactgaccgaaaaaggcttaaaagtagagaaagcatccgccgccgtcattgacgccaccattattcagaccgccggcagcaaacagcgtcaggccatagaagttgacgaagaaggacaaatcagcggccaaaccacaccgagtaaagacagcgatgcccgttggataaagaaaaacggcctctacaaactcggttacaaacaacatacccgtaccgatgcggaaggctatatcgagaaactgcacatcacccccgccaatgcccatgagtgcaaacacctgccgcctttgttagaagggttacccgaaggtacgaccgtctatgccgacaaaggctatgacagtgcggaaaaccggcaacatctggaagaacatcagttaccggacggcattatgcgcaaagcctgccgcaaccgtccgctgtcggaaacgcaaaccaaacgcaaccggtatttatcgaagacccgttatgtggtcgaacagagcttcggtacgctgcaccgtaaattccgctacgctcgggcagcctatttcggactgattaaagtgagtgcgcaaagccacctgaaggcgatgtgtttgaacctgttgaaagcggccaacaggttaagtgcgcccgctgccgcctaa

SEQ ID NO: 61851 - DNA, 2163 bp, Neisseria meningitidis
atgcaacaaaaaatccgtttccaaatcgaaggcatgacctgtcaggcatgtgcttcgcgtattgaaaaagtgttgaacaaaaaagattttgtcgaatcggcgggagtgaacttcgccagcgaggaggcgcaggtagtgtttgacgacagcaaaacctcagtagccgacattgccaaaatcattgagaaaaccggttacggcgcgaaggaaaaaacggaagatacattgccgcaacccgaagcagaacaccatatcggctggcggctgtggctgctgttcaccatcaacgtcccgttccttatcggcatggcggggatgatgatcggcagacacgattggatgattccgccgttgtggcagttcgcattggcgagtgtggtgcagctttggctgacaatcccgttttacaaaagcgcgtgggcgagtattaaaggtggattggcgaatatggacgtgctcgttaccatcggcacggtatcgatttatctgtattccgtctatatgttatttttcagtccgcatgcggcacacggcatggcgcatgtgtattttgaagcaggcgtgatggtgatcggttttgtgtcgctgggcaaatttttggaacaccgtaccaaaaaatccagcctgaacagcttgggcctgcttttgaaacttacaccaacccaagtcaacgtgcaacgcaacggcgaatggaaacagcttcccatcgaccaagtgcaaatcggcgaccttatccgcgccaaccacggcgaacgcattgccgcagacggcatcattgaaagcggcagcggttgggcggacgagagccatcttaccggcgaatccaatcctgaagaaaaaaaggcgggcggcaaagtgttggcgggcgcgttaatgaccgaaggcagtgtggtgtaccgcgccacgcagctcggcagccaaacccagctcggcgacatgatgaacgcgctctctgaagcacaaggcagtaaagcaccgattgcgcgcgtagccgataaagcggctgcggtattcgtgcctgccgtcgtgggcattgcgttgttgacttttattgttacttggctgattaagggcgattggacggttgcgctgatgcacgccgtcgccgttttggtgattgcctgcccgtgtgcgctcggtctggctacacccgccgcgattatggtcggcatggataaagcagtgaaacacggcatttggtttaaagacgcagcggcaatggaagaagccgcccacgtcgatgccgttgtgttggacaaaactggcacgctgaccgaaggcaggccgcaggttgccgccgtttattgtgttcccgacagcggctttgacgaagacgatttgtaccgcatcgccgctgccgtcgaacaaaacgccactcatccgcttgcccgtgccatcgtttccgccgcccaaacgcgcagcttggaaatccctgccgcacaaaacgctcaaaccgttgtcggcgcaggcattgccgccgaagtggaagacgtgggtttggtgaaagcaggcaaagccgaatttgccgaacttaccttgcccgagttttcagacggcgtttgggacattgcaagcattgttgcagtctcggtcgataacaaacccatcggcgcattcgcacttgccgacgcgttgaaagccgataccgccgaagccataggccgtctgaaaaaacacaatatcgatgtctatattatgagcggcgacaaccaaggcacggtcgaatacgtcgccaaacaactgggcatcgcacacgccttcggcaacatgagtccgcgcgataaagctgccgaagtgcaaaaactcaaagccgccggcaaaaccgtggcgatggtcggcgacggcatcaacgacgcgcccgcgcttgccgccgctaacgtcagcttcgccatgaaaggcggagcggacgttgccgaacataccgcatccgccacgctgatgcagcattcggtcaaccaactcgccgatgctctgctggtgtcgcaagccactttgaaaaacatcaagcaaaacctgtttttcgccttcttctacaatatcttgggcattcctctcgccgcgcttggctttttaaatcccgtcatcgctggcgcggcaatggcggcaagctcggtttccgtgttgagcaatgccttgcgcctgaaacgggtaaaaatcgattag

SEQ ID NO: 61852 - DNA, 396 bp, Neisseria meningitidis; identical to SEQ ID NO: 54642

SEQ ID NO: 61853 - DNA, 435 bp, Neisseria meningitidis; identical to SEQ ID NO: 40706

SEQ ID NO: 61854 - DNA, 3132 bp, Neisseria meningitidis
atgaacctcgaaactaaacccatcgccgaaacgccgaatttcatcgtgctcgaccaatatgaaaaaatcgaacagtcgggcagctaccaatcggaaaaccagttggaagcggagttaatcgccgatttgcagaatcagggttacgaataccgcaaggatttgaacagccaaagcaggctgctggaaaacctgcgcgcgcagttgcagcggctgaacgatgtggcgttttcagacggcgaatgggcgcggtttttgacggaatatctggacaggccgtctgaaaacattaccgataaaacccgaaaaatccacgacgaccatatttacgatttcgcttttgatgacggccgtctgaaaaatatttatctgctggacaaaaaaaaccttgcccgcaaccatgtgcagcttatcaaccagtttgagcagacgggcacgcatgcaaaccgctatgacgttaccgtgttggtaaacggcttgccgctggtgcagattgaattgaaaaagcgcggcgtggcggtgcgcgaggcattcaatcaggtgcaccgttacagcaaagagagcttcaacagcgaaaattcgctgttcaaattcctgcaaatcttcgtgatttccaacggcacggatacgcgctatttcgccaacaccaccaagcgcgacaaaaacagcttcgatttcacgatgaattgggcgcggtcggacaatcatccgattaaggatttgaaagactttactgccacgttcctgcagaaaagcgtattgctgggcgttttgctgcattacagcgtgttcgatgcgaatgatacgctgctgattatgcggccgtaccagattgccgccgccgaacgcattttgtggaaaatcaacagttcggcgcaggcgaagaattggagcgggccggaaagcggcggctatgtctggcacaccacgggcagcggcaaaacgctgaccagcttcaaggcggcgcgtctggcgacggaatcggcgtttatcgacaaggttttcttcgtggtggacaggaaggatttggactatcagacgatgaaggaataccaacgtttttcgaccgacagcgtgaacggttcggaaagcacggcgggcttgaaacgcaatttggaaaaagacgacaacaaaatcatcgttaccaccatccagaagctgaacaacctgatgaagagtgaagataatctgccggtttatcaccagcaagttgtctttattttcgacgaatgccaccgttcgcaattcggcgaagcgcaaaaaaacctgaaaaagaaatttaaaaaattctgccagttcggttttaccggtacgccgatttttcatgaccatatcgttgatggcaaactgattatgaaaggcaatgcgcttggttcggagagtacggaaagcgtatttgggagacagctgcattcttatgtgattaccgatgccatccgcgatgaaaaagtattgaaattcaaagtggattacaacgatgtgcgcccgcagttcaaagccgtggaagcggaacaggacgagaagaaactgagtgccgccgaaaaccgccaagccctgctgcatcctgaacgcatccgcgaaatcacgcaatatatcctgaaccagttcaggcagaaaacacaccgcttgaatgcgggcggcaaaggctttaacgccatgtttgccgtcagcagcgtggatgcggcgaagtgctattacgaagcgttcaaaacacaacaggcaggcagcctgcacccgctgaaagtggccaccattttttcctttgccgccaacgaagagcaaaacgccgtcggtgaaattgccgatgaaacctttgaaccggaagcgatggacagcagcgcaaaagaatttttgcaggctgccatcaacgattacaacgcctgtttcaaaaccaatttcggcacggacagcaaagcctttcagaactactaccgcgatttggcaaaacgggtaaaaaatcaggaagtggatttgctgattgtggtcggcatgtttttgacgggttttgacgcgccgacgctgaacacgctgtttgtcgataaaaacctgcgctatcacggcctgatgcaggcgttttcgcgcaccaaccgcatttacgatgccaccaaaaccttcggcaacattgtctgcttccgcgatttggagcaggcaaccattgatgcgattaccttgtttggcgacaaaaacaccaaaaatgtagtgctggaaaaaagttacgaagaatacatgaacggctataccgacagccagaccggcgaagcgcgacgcggctatttggatgtggcaaaagaattgcacgagcgtttccccgatcccgacaaaatcgaaacggaaaaagacaaaaaagattttgccaaactcttcggcgaatacctgcgggcggaaaacgtattgcagaactacgatgaatttgccgcgctgcgcgagttgcagagtgtggacgcggcggacgaagatgcgatgaaggcgtttcaagaaaaatactacctgagcgatgaagacgtgcaggaaatgcggcaagtgccgatgccgtctgaaagggcggtgcaggactaccgttccgcctacaacgacatccgcgattggttgcgccgccaaaaagcaggcgaacagaaagaacagtcaaaaatcgactgggacgatgtggtttttgaggtggatttgctcaaatcgcaggaaatcaatctggattacatcttgcaactgattttcgagcatcacaaaaaaatcaaaggcaaagcggagctggtggaagaaatccgccgtatcatccgcgccagtatcggacaccgcgccaaagagagcctgattgtggatttcatcaacgatacggatttggataaagtccccgatgttcccgccatactggaaaccttctacacctacgctcaagaggtgatgaggaatgaagccgcagagctgattgccgccgaaggtttgaacgaaaccgccgccaaacgctatttaatcagctcgctcaaacgcggctatgccagcgaaaacggtacggaactgaccgaaaccatgccgaaaatgagtccgctcaacccgcaatatctgacgaagaaacaaagtgtttttcaaaagattgcggcgtttgtggagaagtttgccggaatagggacagatatttga

SEQ ID NO: 61855 - DNA, 825 bp, Neisseria meningitidis
atgaaatggctcttcacccttttggcggtactcaatattgccgtattcggcggcacggtgggctataaattggccgttaaagcgacgggcggcgtgccggaaaaccgggccgtcgaaaacacgccccccgcaacgcccgccgccgacaatgcggcggcatccgtggaggatacggcggcactgctcaaaccgggcgacatcctgaccgaagaacaggcggagcagttgcgcttgaagaaagaagcggaacagaaaaaactgaaagagaaaaaacagcgtgaagaaaaagcccgccgcgaaaaactcgccgccgaaaaggcgcaggcggaacgcgaaaacggcgcggcggatgccttatgcgccgcgcaggcaagcctcacgatggacgaagatgactaccaccgcatcaaagggcttttgggcaaatggtcgcacgttgccagcaggagtgttgaaaaacgcaccgccaaagccaaacctgccgacaaaacctaccgcgtcgtcctgcccgtttccgccgatgccgaaaatcaggcggcggagctgtctgccaaaggtttcaaccccataccgtttgacggcgcattgagtttgggtgtcggcaacagccgggaaaacgcccaagccctgcaaaaccggcttgccggcgccggattcggcggggcgcatattgtcgaacactttgccgaagccgacaggcaggacgattctttgagcgtgtcgcgtatgacggttttgtttaccggcgtgaatgccgccgatgcggacgaaattcgtaaaatcacgtccctatacggcaaactgaacctcaagtcttgcaaatag

SEQ ID NO: 61856 - DNA, 324 bp, Neisseria meningitidis; identical to SEQ ID NO: 38702

SEQ ID NO: 61857 - DNA, 1011 bp, Neisseria meningitidis
atgagcgatacccccgctacccgcgattttggcctgatcgacgggcgtgccgtaaccggctatgtgctgtccaaccggcgtggtacgcgtgtctgcgtgctggacttgggcgggattgtgcaggaattttccgttttggcagacggcgtgcgcgaaaacctcgtggtgtcgttcgacgatgcggcttcctatgcggacaatccgtttcagattaacaagcagatagggcgcgtggccggacgcatccgcggtgcggcgttcgacatcaacggcaggacttaccgcgtggaggccaacgaaggcaggaacgcgctgcacggcggttcgcacgggctggccgttacccgtttcaacgcggtggcggcagacggccgttcggtggtgctgcgcagccgcctgcaacagtcggccgacggttatcccaacgatttggatttggatatttcctaccgcttggacgaggacgaccggcttaccgttagctatcgcgccaccgcgctcggcgacacggtgttcgacccgacgctgcacatttactggcggctggacgcgggcctgcacgatgcggttctgcatattccgcagggcggacatattccggccgatgccgaaaaactgcccgtctcaacggttttagacgacctcgaagtatttgatttcagccggcccaagccgctggatgccgccgttgccgccctgcgccgcgaaacgggtcgggccggttttgacgacgcttaccgcgtgccgtccgatataggccgtcccgccgctgtgttgcaagccggacgccgccgtcgtatcagcatatacagcgaccgcaatggcttggtcatctttaccgccgccccgcaggatttcgcgcggcacgatgcgggcgtttacgacgcgctggcgaccgaggcgcagacgctgcccgacagcctgcattggcccgagttcggcaatattcgtctgaacaagggtgataccagggaggcgacgattgcttacggcatcgaatccctttcttag

SEQ ID NO: 61858 - DNA, 1293 bp, Neisseria meningitidis; identical to SEQ ID NO: 38975

SEQ ID NO: 61859 - DNA, 462 bp, Neisseria meningitidis
atgtctgatttaccctctatctcccgattccttgccgacgaagccgcaacactcgatttgggtgcggcgtggtcttcccgtttaaacgcaccgctggtcatttatctcgagggggatttgggtgcgggcaaaaccacgctgacacgcggcatcctgcgcggattaggtcatctgggcgcagtcaaaagcccgacttacgccatcgtcgaatcctatccgctgaaacccttcaccctgcaccatttcgacctctaccgcttctcgttccccgaagaatgggaagacgcggggcttgacgaactgtttgccgcaaacagcgtctgcctgatcgaatggccgcaacagggcggggaatttacgccgcccgccgacatcaccacaacattgacacacgacggcggcggcagaaaatgcctgctgaccgcccataccgaacgaggacgcgaaagcctgccgctatga

SEQ ID NO: 61860 - DNA, 564 bp, Neisseria meningitidis; identical to SEQ ID NO: 54839

SEQ ID NO: 61861 - DNA, 1275 bp, Neisseria meningitidis
atgaaaacactgcaagactggctctcgcatttggaaaccgcccacagcggcggcttgatcgatatgggcttggaacgcgtaggcgaagtgaaaaaacggatgaagctcacgccgcaatgccccgtcgtcgttgtcgcgggaacaaacggcaaaggttcggtctgcgcctacctgacacagatttacaaacaggcgggctacaaaaccggcacactgaccagcccgcatttattgcgttacaacgaacgcatcgccatcaacgccgaacccgtttcggacgatacgattattgcctctttcgagcgcatcgaagccgcgcacggcgaaatatcactgacttattttgaattcaatgccttggcggctgtcgacatcttcatgcgcgaacaggttgacgtgatgatattggaagtcggcttgggcggacgcttggacgcggtcaacgcatttgacggcgattgcgcggtggttaccagcgtggatttggaccatcaggcgtttttgggcgatacggtcgaacaggtcggccttgaaaaggcaggcgtgttccgcagcggcaaacctgccatctgcggtcaaaaccccgcgcccgcatcattggtcgcacacgccgaagccataggtgcaaaactgctgatggtgcagcgcgatttcgagtttcacgcgatggaaaacatccaatggaactaccgcttccggccgcaacattcagacaaccccgcgcgcaaccgcaatgccctgcccttccccgcattgcgcggcacataccaactttccaacgccgcctgcacgttgaccgtattggaatgcttgaacgacaaattgcctgtggacatcggtgcaatcaaacgcggattgctgctggttgaaaatcccggacgcttccaagtcctgcccggccgtccgctgaccgttttggatgtcggacacaatccccacgctgcccgcgccctgcgccgcagcctgattaatttggcgtttgcgcaaaaacgcaccgccgtattcagtatgttgtccgacaaagacatagacggcgtgttggaaatcgttaaagaccagtttgacgagtggtatatcgcaccgttggacgtaccgcgcggcatgacgctcgagagcctgcaaaacaaactgcacgaacacagcatcgaaaacatacagacattcgcctccgtccgcgaagcataccgggcggcagcctcaaaagcgggcgagaacgacagaatcgtcgttttcggctcatttcataccgttgccgatgtcatgtcggtactgtaa

SEQ ID NO: 61862 - DNA, 492 bp, Neisseria meningitidis
atgaaataccgtcgtttttaccgcaatggcggcacttacttttttacggttgtaaccaataaacggcagaagattttgaccgatgatgcggtgcgtttggctttacggcaggcggtaatggcggtgcgcgaacggtatccgtttgaaattttggcatgggtgttgatgcccgaccatctgcataccatatggcggctgccggacaatgattctgcttattcggaacgctggcggcaaatcaagcggcacagccaatatttaatcggcggcaatctcaggctttggcaaaaacgcttttgggaacatactatccgcgatgaggccgatttttcctgccattttgattatctgcatttcaatccggtcaaacatggctatgtaggacaaatttctgattggcggttttctacgtttcaccgttatgtcaaacagggtatgtatccgcataattggggtggcggcaatgcggacttttctattggatacgattga

SEQ ID NO: 61863 - DNA, 1545 bp, Neisseria meningitidis
atgtgcggtgtattaggtttggtcagtcatgagccggtaaaccagcttctgtacgacggcttgcagatgttgcagcacagggggcaggatgcggcgggcattgcaacggccgaaggcggcaccttccatatgcacaaaggcaaaggcatggtgcgcgaagtgttccgcacacgcaatatgcgcgatttggtcggcaacgccggtatcgcccacgttcgttatcctactgcgggcaacgcgggcagcagcgcggaggcgcagcctttctacgtcagctcgcctttcggcattgttttggcgcataacggcaacctcaccaacactgccgaactttatgaaaacgtgtgtaacaaacacctgcgccacgtcaacaccagctccgattccgaagtcttgctcaacgtattcgcgcacgaattacgccgcgaagtctctaaaaacgccgacccacaccggctcaataccgacaatattttcaacgccgttgccgaagtccaccgtctggtgcgcggcgcatacggcgtggttgccatgattgcgggctacggcatggtcgccttccgcgatccttacggcatccgtccgctggcattgggttcgcaaaccgacgaagcaggcagaaaatcctatgccgtcgcctccgaatccgttgccttcaacgcgcttgcctacgatttggaacgcgacatccggccgggcgaagcagtatttgtcggctttgacggcacaatcatcgcccgccaatgcagcgaccgtgccaaactcagcccctgcctttttgaatatgtttattttgcccgccccgactctgtgattgacggtgtatcggtttaccaatcgcgcttggatatgggcgtgtccttggcggaaaaaatcaaacgcgagctgcccgtggacggcatcgatgtcgtgatgcccatccccgacaccagccgccccagcgcgatggagcttgccgtccacctcaaaaagccttaccgcgaaggtttgattaaaaaccgctatatcggccgcacctttattatgcccggtcaggcgacgcgcaaaaaatccgtgcgccaaaaactcagcccgatggaaaccgaatttgcaggcaaaagcgtgttgctggtggacgactccatcgtgcgcgggacgaccagccgcgaaatcgtcgaaatggtacgcgcggcgggcgcgcgcaaagtctatatcgcctccgccgcccccgaagtgcgctatcccaacgtatacggcatcgatatgcccacgcgcgaagagttgattgccaacgggcgcagcgcggcggaaatcgccgccgaaatcggcgcggacggcatcgtatttcaagacttgggcgatttggaagccgtcgtcaaagcactcaatccgaaaatcgaatccttcgattcgtcctgtttcaacggcatttatcagaccggcgacatcgatgatgcctacctcgaccgcctgtctgccgagaaatccggctgcggcggcctgaaaatccacccgagcaggatggaacacagcatcagcatcagcgatgcgggcgacgaagaataa

SEQ ID NO: 61864 - DNA, 261 bp, Neisseria meningitidis; identical to SEQ ID NO: 43315

SEQ ID NO: 61865 - DNA, 876 bp, Neisseria meningitidis
atgaacctctacgacctgctccttgccccctttgcagaatttgactttatgcgctacgccctcgcatccgtcttctgcctgtccctcagtgccgcacccgtcggcgtattcctcgtcatgcgccgtatgagcctgataggcgacgcattgagccacgccgtcttgcccggtgctgccgtcggctacatgtttgccggcttaagcctgcccgccatgggtttgggcggcgtagccgcaggtatgctgatggcactgcttgccggactcgtcagccgcttcaccaccctgaaagaagatgccaactttgccgccttttatctcagcagcctcgccatcggcgtagtcctcgtcagcaaaaacgggagcagcgtcgatttgctccacctccttttcggctctgtacttgccgtcgatattcctgccctgcagctcatcgccgccgtctccagcctcacgctcattacccttgccgtcatctaccgcccgctcgtactcgaaagcatcgaccccctgtttctcaaatctgtcggcggcaaaggcgggctttggcacgtcctctttctcgtcctggtcgtcatgaacctcgtatccggctttcaagccctcggcacactcatgtccgtcggacttatgatgctgccagccattaccgcccgcctatgggcgaagcacatgggcgcactcatcctcctatccgttctgacagccctgctgtgcggcttgagcggactgctcatttcctaccacatcgaaattccttccggtcccgccatcatcctctgttgcagcgtcctttatctcttttccgtcatactcggcaaagaaggcggcattctgaccaaatggctcaaaaaccaccgccaccacaccacctga

SEQ ID NO: 61866 - DNA, 471 bp, Neisseria meningitidis; identical to SEQ ID NO: 43747

SEQ ID NO: 61867 - DNA, 684 bp, Neisseria meningitidis
atgtggctggtcggtgcggcgcggcggattgccgatacgcgcacgtttacgcggatttataccgaaatcgccgtgccggtcgtgttggaacagcggcagcgacaagtcccgcattcggcggtaactgcgcgggttgccctgtcgcgtgagtttgtcagcttttttgaagaacacctgccgattgccgcgacatccgtcgtatccatattcggcgcgtgcatcatgctgctggtgctggaattttgggtcggcgtgtcggcggtgggcatacttgcgttgtttttatggcttttgccacgttttgccgccatcagcgaaaacctgtatttccgcctgaagaacagcttggaatgcgacaaccactttatccgaaaaggagaccggcggcagctggaccgccattacggactggttgcgcgcctgcgtgtgctgatttccaaccgcgaagccttcggctatctctgcgtcggcgcggcgatgggtattttgttcggctttgcttttgtgatgatgacgctcaaaggctacagcagcgcggggcatgtctattcggtcggcacttatctgtggatgtttgccatgagtttggacgacgtgccgcgattggtcgaacaatattccaatttgaaagacatcggacaacggatagagtggtcggaacggaacatcaaagccggaacttga

SEQ ID NO: 61868 - DNA, 1227 bp, Neisseria meningitidis
atgacctttttacaacgtttgcaaggtttggcagacaataaaatctgtgcgtttgcatggttcgtcgtccgccgctttgatgaagaacgcgtaccgcaggcggcggcaagcatgacgtttacgacgctgctggcactcgtccccgtgctgaccgtgatggtggcggtcgcttcgattttccccgtgttcgaccgctggtcggattcgttcgtctccttcgtcaaccaaaccattgtgccgcagggcgcggacatggtgttcgactatatcaatgcgttccgcgagcaggcgaaccggctgacggcaatcggcagcgtgatgctggtcgttacctcgctgatgctgattcggacgatagacaatacgttcaaccgcatctggcgggtcaattcccagcgtccgtggatgatgcagtttctcgtctattgggctttactgacgttcgggccgctgtctttgggcgtgggcatttcctttatggtcggctcggtacaggatgccgcgcttgcctcaggtgcgccgcagtggtcgggcgcgttgcgaacggcggcgacgctgaccttcatgacgcttttgctgtgggggctgtaccgcttcgtgccaaaccgcttcgttcccgcgcggcaggcgtttgtcggggctttggcaacagcgttttgtctggaaaccgcgcgctccctcttcacttggtatatgggcaatttcgacggctaccgctcgatttacggcgcgtttgccgccgtgccgttttttctgttgtggctgaacctgttgtggacgctggtcttgggcggcgcggtgctgacttcttcactctcctactggcagggagaagcgttccgcaggggcttcgactcgcgcggacggtttgacgacgtgttgaaaatcctgctgcttctggatgcggcgcaaaaagaaggcaaagccttgcctgttcaggagttcagacggcatatcaatatgggctacgacgagttgggcgagcttttggaaaagctggcgcggtacggctatatctattccggcagacagggttgggtgttgaaaacgggggcggattcgattgagttgaacgaactcttcaagctcttcgtttaccgtccgttgcctgtggaaagggatcatgtgaaccaagctgtcgatgcagtaatgatgccgtgtttgcagactttgaacatgacgctggcagagtttgacgctcaggcgaaaaaacagcagcaatcttga

SEQ ID NO: 61869 - DNA, 576 bp, Neisseria meningitidis; identical to SEQ ID NO: 55536

SEQ ID NO: 61870 - DNA, 549 bp, Neisseria meningitidis; identical to SEQ ID NO: 39055

SEQ ID NO: 61871 - DNA, 435 bp, Neisseria meningitidis; identical to SEQ ID NO: 39784

SEQ ID NO: 61872 - DNA, 483 bp, Neisseria meningitidis; identical to SEQ ID NO: 37786

SEQ ID NO: 61873 - DNA, 888 bp, Neisseria meningitidis; identical to SEQ ID NO: 55567

SEQ ID NO: 61874 - DNA, 951 bp, Neisseria meningitidis; identical to SEQ ID NO: 42789

SEQ ID NO: 61875 - DNA, 876 bp, Neisseria meningitidis; identical to SEQ ID NO: 54946

SEQ ID NO: 61876 - DNA, 876 bp, Neisseria meningitidis
atgccgaccgtccgttttaccgaatccgtcagcaaacacgaccttgatgccctgttcgagtgggcaaaagcaagttacggtgcagaaagttgctggaaaacgctgtatctgaaccgtctgcctttgggcaatctgtcgccggaatgggcggagcgcgtcaaaaaagactgggaggcaggctgctcggagtcttcagacggcattttcctgaatgcggacggctggtcagatatgggcggccgcttgcagcacctcgcccgcacatggaacaaggcggggctgcttcacggatggcgcaacgagtgtttcgacctgaccgacggcggcggcaaccccttgttcacgctcgaacgcgccgctttccgtccgttcggactgctcagccgcgccgtccatctcaacggactgaccgaatcggacggccgatggcatttctggataggcaagcgcagtccgcacaaagcagtcgatcccgacaaactcgacaatattgccgccggcggtgtttccggcggcgaaatgccgtctgaagccgtgtgccgcgaaagcagcgaagaagccggtttggataaaacgctgtttccgtttatccgtccggtatcccggctgcacagcctgcgccccgtcagccggggtgtgcacaatgaaatcctgtatgtattcgatgccgtcctacccgaaaccttcctgcctgaaaatcaggacggcgaggttgcgtgttttgaaaaaatggacatcggcagcttggttgccaccatgttgtcgggaaacatgatgcacgacgcgcaactggttacgctggacgcgttttgccgttacggtctgattgatgccgcccatccgctgtccgagtggctggacggcatacgtttatag

SEQ ID NO: 61877 - DNA, 780 bp, Neisseria meningitidis; identical to SEQ ID NO: 38358

SEQ ID NO: 61878 - DNA, 771 bp, Neisseria meningitidis; identical to SEQ ID NO: 54335

SEQ ID NO: 61879 - DNA, 726 bp, Neisseria meningitidis; identical to SEQ ID NO: 49217

SEQ ID NO: 61880 - DNA, 1419 bp, Neisseria meningitidis; identical to SEQ ID NO: 54234

SEQ ID NO: 61881 - DNA, 852 bp, Neisseria meningitidis; identical to SEQ ID NO: 55288

SEQ ID NO: 61882 - DNA, 372 bp, Neisseria meningitidis; identical to SEQ ID NO: 37474

SEQ ID NO: 61883 - DNA, 1143 bp, Neisseria meningitidis; identical to SEQ ID NO: 39162

SEQ ID NO: 61884 - DNA, 2214 bp, Neisseria meningitidis; identical to SEQ ID NO: 54944

SEQ ID NO: 61885 - DNA, 750 bp, Neisseria meningitidis; identical to SEQ ID NO: 54728

SEQ ID NO: 61886 - DNA, 420 bp, Neisseria meningitidis; identical to SEQ ID NO: 55512

SEQ ID NO: 61887 - DNA, 1224 bp, Neisseria meningitidis
atgtctgcgcaatcacaaaacaatcatacgtccccattggtcgtcttgaccacgctgttcttcatgatgggttttattacctgcatgaacgacatccttatccctcatttgaaagaaattttcgacctgtcttacgttcaggcgatgctgatccaattctgtttctttaccgcctatgcggtgatgtccatcccgatgggggcttttgtcggcaaagtcggctacaaaaacggcgttatcggcggctttctgctgacggcggtcggatgcctgctgttttatcctgctgcgggcagccattcttacgcggtatttttgggcgcgttgtttattttggcttccggcgtaacgctgcttcaggttgccggtaatccttatgttaccctgctggcgaaacccggcaaggaatcggcaacactgacgctggttcaggcgtttaacgctttgggtacgaccattgcgccgcaaatcggcgcgttcctgattttggcggacgcaacccaaaccgtcagcaaggcggaacagatttcttccgtacagattccctatttgggactggcggggctgctgattatccttgccgttttcgtgaaaatgatccggctgcccgacgcgcgcaaaattgccgccgaggaaagcgcgcacaaccacgacggcaaaaccagcgtatggcaatacaaacatctcgtgttcggtacggcaggcattttctgctatgtcggcgcggaggtgtctatcggttcgttgatggtcaacgtattgggttatctgaaagggctggatcatgcttctgccgcgcattacctgtcgttctattggggcggcgcgatggtcggacgtttcctcggttcggcggtgatggcgaaattcgcgcccaaccgttatttggcgtttaacgcatcggctgcggtcgtactgcttgccgtcgcgatggcgacgggtagcggcaatgcggatgtggcgatgtggtcgctgcttgccatcggttttttcaactcgattatgttcccgacgattttctctttggcaaccaaaggattgggaaaatttaccaacgcggcttccggtgtactgtgtaccgcgattgtcggcggtgcggtcgttcctgtcgtgcagggctgggtggcagatacttacaccctgatgtcttcgtttgtcgtttccgtcatctgttatctgtatatcgtgttttttgcggtgtacggatatagggcggacaaataa

SEQ ID NO: 61888 - DNA, 1311 bp, Neisseria meningitidis
atgatcgtgcccgacctctttgtcgcccacttccgcgaagccgtcccctacatccgccaaatgtgcggcaaaacgctggtcgccggcatagacgaccgcctgctcgaaggtgataccttaaacaagctcgccgccgacatcgggctgttgtcgcaactgggcatcaggctcgtcctcatccacggcgcgcgccacttcctcgaccgccacgccgccgcgcaaggccgcacgccgcattattgccggggcttgcgcgttaccgacgaaacctcgctcgaacaggcgcagcagtttgccggcaccgtccgcagccgttttgaagccgcattgtgcggcagcgtttccgggttcgcgcgcgcgccttccgtcccgctcgtatcgggcaacttcctgaccgcccgtccgataggtgtgattgacggaaccgatatggaatacgcgggcgttatccgcaaaaccgacaccgccgccctccgtttccaactcgacgcgggcaatatcgtctggctgccgccgctcggacattcctacagcggcaagaccttctatctcgatatgcttcaaaccgccgcctccgccgccgtctcgcttcaggccgaaaaactcgtttacctgaccctttcagacggcatttcccgccccgacggcacgctcgccgaaaccctctcggcacaggaagcgcaatcgctggcggaacacgccggcggcgaaacgcgacggctgatttcgtccgccgttgccgcgctcgaaggcggcgtgcatcgcgtccaaatcctcaacggagccgccgacggcagcctgctgcaagaactcttcacccgcaacggcatcggcacgtccattgccaaagaagccttcgtctccatccggcaggcgcacagcggcgacatcccgcacattgccgccctcatccgcccgctggaagaacagggcatcctgctgcaccgcagccgcgaatacctcgaaaaccacatttccgaattttccatcctcgaacacgacggcaacctgtacggttgcgccgccctgaaaacctttgccgaagccgattgcggcgaaatcgcctgccttgccgtctcgccgcaggcacaggacggcggctacggcgaacgcctgcttgcccacattatcgataaggcgcgcagtatgggcataagcaggctgttcgccctctccacaaataccggcgaatggtttgccgaacgcggctttcagacggcatcggaagacgagttgcccgaaacgcggcgcaaagcctaccgcagcaacggacggaactcgcatattctggtacgtcgcctgcaccgctga

SEQ ID NO: 61889 - DNA, 705 bp, Neisseria meningitidis
atgctgcgttctattttggcggcttccctattggcggtatcttttccggcagcggctgaagcattgaattacaatattgtcgaattttccgaatcggccggtgtcgaggcggttcaggatacaatgtccgcgcgtttacaggtggcggcggaaggacgggacaaaaatgccgtcaatgccgagtttgttaaaaaattcaacaatttcaccagaaaatcaaaaaatggtagctttaaaaccgaattggtatcgcgcagtgcgatgccgcgctatcaatataccaacggcagacgcattcaaacaggttgggaggagcgtgcggaatttaaggtcgaaggtagggattttgatgagttaaaccgttttattgccgatgttcaggcagatgccgcattggaatatacggatttccatgtgtcgcgtgaacgccgaaacgaggtcatcgatcaggtcagtaaagatgctattttgcgtttcaaggcgcgtgccgacaagttgtcgggcatattgggtacgtccggttataaaatcgtcaaattaaatttgggacacatcggcagccatatcgcgggtgggggaactgctcaggcaaaaatgcttcgtgccatgccgatggcggcaagcgtcaatatggagggtgcggattccgccgcgccgggtgtggaggaaatcagcatcagtgtcaatggaacggttcagttctaa

SEQ ID NO: 61890 - DNA, 1302 bp, Neisseria meningitidis; identical to SEQ ID NO: 45009

SEQ ID NO: 61891 - DNA, 903 bp, Neisseria meningitidis; identical to SEQ ID NO: 55357

SEQ ID NO: 61892 - DNA, 645 bp, Neisseria meningitidis
gtgaacaaacggctgttttgcagccgcaacggcttgcgctattacctgttgggcggtttctgtttgagtgtttttccgtttttgctggtgtttgcctcatccgtttgggcggtttatcggacgggcgggcaggttttgccgccgtatgtccgggcggatgccgcgctggtgttgggcgccgccgcgtgggacaaacgcccttctccggtttttcgggaacgcatcaaccacgccatcgcgctttatcagagccgcagggtaggcaaaatcgtgtttacgggagggcgaaccaaaaaaggctatatgaccgaagccgaggtcgggcggcggtacgcgctcaaacagggggttccggcgcgcaacatcctgtttgaaaacacttcgcgcaacacttatgaaaacctgaacaacatccgtccggttttgcgtgccaacggtattgccagcgtggtgattgtcagcgatccctaccatttggcacgggcggcggaaatggcggaggatttgggtgtccgcgtttatatgtctgccacgccgaccacgcggtttgatgcgggaaataagaaaaaaatctttatgctgcaagagggatatgcgttatccctctaccgtttggaaaaatgggggcgggattttttcaattag

SEQ ID NO: 61893 - DNA, 3243 bp, Neisseria meningitidis
atgcaaaatatgaaaaaccaagtacgcggatcaggcatggatgcacgatccaatccggccaatgtttcagacggcctgcaaaacagttcgagccatatcggtaccaacacgcgctaccgcctgaccaagctcggcgaacaaatggcgcgcctgcccatcgacccgaaaatcgcgcgcattttgctggcggcgaagaaacacgactgtatggcggaaatattggtgattgcgtccgcgctgtcgattcaagacccgcgcgagcggccgttggaagcgcgcgatgctgcctccaaggcacacgaacgttttaccgacaagcagtccgatttccttgcctatctgaacatttgggacagcttccagcgtgagcgcgacaaaggtttgtccaacaagcagctggtgcagtggtgccgccaatatttcttgtcgcacctgcggatgcgcgaatggcgcgagctacaccaccagcttgcccaaactgcgattgaaatgggtttgaccaccaaagaagccgctttcagacgttctcccgaagtcaggcagctcacgtcgtctgaaaatgcaggcgaccaagacctatccgccaaactcaaacaaaaacaactggataagaaacaacaccgcgcccaaatccgcgctgccaaagaagcgggctacgaacaaatccaccgcgccctgctcaccggcctcatcgccaacgtcggcatgaaatcacccgacggcaacgtctacaccagcacgcgcggcagccgcttccaccttttccccgcctccgccctgttcaaggcgaagcccaaatgggtgatggcggcagaactcgttgaaacgacaaaactttatgcccgcgacgtagccgccatccagcccgaatggatcgagcaggaagcgccgcacctcgtccgctaccactatttcgagccgcattgggaacaaaaacgcggcgaagtcatcgccagcgaacgggtaacgctctacggcctgaccgtcctgccgcgccgccccgtgtcctacggcagaatcgcccccgaagaagcgcgcgaaatctttatccgcggcgcattggtggcacaggaatgcgatttgaaagcggacttttttgtccacaacaaaaagctgattaaagaaattaccgaactcgaacacaaatcgcgcaagcaagacgtgctggtcgatgacgaagccctgtttgcgttttataacgaacgactgcccgaaatggcttggaaagacgcgcaaggcagcgtttggggaagtgaagattccgtacggattattgaatctgacaaagccgagaggtcgtctgaaaatgagcgcaacgagtttcgtaaaaacaagcgtaatgggtctcgccaaaatgaaaatcacggcaacaccgtaggttgggttgaaaacccaacatcagccgcaactgcaaaaactgttgggtttgacaacccaacctacgctactcagcaacccaccccctcccccgagagggagggtcggggagagggcaaaacagttgccgcacaaaccaacttttccgcaaccgcagcaaaccctctcccgcaggagagggaacagagtgcctcagcttcaacgttttcagacgacctgcgtcctgcaaatctgcagcaaaccgccccctcccccgtgggggagggctggggagagagcaaaacagttgccacccaaaccaacttttccgcaacctcaacactttcagacgaccccaaacccaaaaagcagcctgcacctcaaaaaggccgtctgaaacccctacccctcgccgacatccgcaccttccaagcctggctcaaaaccgccgagtgcgacaatccgcgcctgctgttcctcagccgcgacgatctgatgcaacacgccgccgcacacattaccgaagaacagttccccaaattctggcaaaccgcagacggcaaattcaaactttcctaccgcttcgagccgcaccatccgctagacggcgtgaccatgaccgtgccgctgaccgtcctcaaccgcctgcacgcgccatcgctcgaatggctggtgcccggtatgttgcgcgaaaaaatccagctgctgattaaagcactgccgaagcaaatccgccgcatttgtgtgcccgtacccgatttcatcaccaaattcctcgaaagcaatcccgaccgccaagcgaccatcattccccagttggcgcactttatcgccaaaagcgccagcgatatgcggattctcgagcaaatcgaccaagacgcatgggcggcgcaagaattgcccgaacactgctatctgaatctgcgcattatcgacgacggcggacaagagcttgccggcggccgcaaactgcacgaattgcaacaacagctcggccaagccgccgccgtcaccttccgcgacaacacccaagaattcgagcgcgacaacgttaccacatgggacatcggaaccctgcccgaatccatcaaattcgcccgcggcaaacaacagctcaccggctacctcggcctgcaaaaagaaaaagacggccgcatcgccctgcgcctgtttgacaccaccgaagccgccgaacaggcacaccgtcaaggcgtcatcgaattgatgaagctgcaattaaaagagcaggtaaaagacctgaacaaaggcatccaaggcttcacccaagccgccatgctgctcaaacacatcaacgccgacaccctgcgcgacgacctcacccaagccgtctgcgaccgcgcctttatcggcgaagacgagctgccgcgcaacgaaaaagccttcaaagaacaaatcaaacgcgcccgtagccgcctgcccgccgtcaaagaagccctcagccgctacctgcaggaaaccgcagccgcctacgccgaactcaacggcaaactcggcaaacatccattgacccacctcctaagactacgcctgcaaaccctgcttgcccccggcttcgccacccgcaccccgtgggcacaatggccgcgcctccccatctacctcaaagccatgaccctgcgcctcgaaaaatacagcagcaaccccgcccgcgacgcagcccgcgaagccgatatacaggaattggaacaaatgtggcaggaaaaaaacgacggtttggtgaaacaaggacaacccatttcagacaacctagccgcgtttaaatggatgattgaagaattgagagtgtcactgttcgcacaggaattgaagacaccgtatccagtgtcggtgaagaggttgttaaaagagtgggagaaaattttttaa

SEQ ID NO: 61894 - DNA, 120 bp, Neisseria meningitidis; identical to SEQ ID NO: 43584

SEQ ID NO: 61895 - DNA, 291 bp, Neisseria meningitidis; identical to SEQ ID NO: 60315

SEQ ID NO: 61896 - DNA, 534 bp, Neisseria meningitidis; identical to SEQ ID NO: 55408

SEQ ID NO: 61897 - DNA, 1680 bp, Neisseria meningitidis
atggaaattattaacgatgcagaacttatccgttccatgcagcgtcagcagcacatagatgctgaattgttaactgatgcaaatgtccgtttcgagcaaccattggagaagaacaattatgtcctgagtgaagatgaaacaccgtgtactcgggtaaattacattagtttagatgataagacggcgcgcaaattttcttttcttccttctgtgctcatgaaagaaacagcttttaaaactgggatgtgtttaggttccaataatttgagcaggctacaaaaagccgcgcaacagatactgattgtgcgtggctacctcacttcccaagctattatccaaccacagaatatggattcgggaattctgaaattacgggtatcagcaggcgaaataggggatatccgctatgaagaaaaacgggatgggaagtctgccgaaggcagtattagtgcattcaataacaaatttcccttatataggaacaaaattctcaatcttcgcgatgtagagcagggcttggaaaacctgcgtcgtttgtcgagtgttaaaacagatattcagattataccgtccgaagaagaaggcaaaagcgatttacagatcaaatggcagcagaataaacccatacggttcagtatcggtatagatgatgcgggcggcaaaacgaccggcaaatatcaaggaaatgtcgctttatcgttcgataaccctttgggcttaagcgatttgttttatgtttcatatggacgcggtttggcgcacaaaacggacttgactgatgccaccggtacggaaactgcaagcggatccagaagttacagcgtgcattattcggtgcccgtaaaaaaatggctgttttcttttaatcacaatggacatcgttaccacgaagcaaccgaaggctattccgtcaattacgattacaacggcaaacaatatcagagcagcttggccgccgagcgcatgctttggcgtaacagacttcataaaacttcagtcggaatgaaattatggacacgccaaacctataaatacatcgacgatgccgaaatcgaagtgcaacgccgccgctctgcaggctgggaagccgaattgcgccaccgtgcttacctcaaccgttggcagcttgacggcaagttgtcttacaaacgcgggaccggtatgcgccaaagtatgcccgcacctgaagaaaacggcggcggtactattccaggcacatcccgtatgaaaatcataaccgccggattggatgcagcggccccgtttatgttgggcaaacagcagtttttctacgcaaccgccattcaagctcaatggaacaaaacgccgttggttgcccaagataaattgtcaatcggcagccgctacaccgttcgcggatttgatggggagcagagtcttttcggagagcgaggtttctactggcagaatactttaacttggtattttcatccgaaccatcagttctatctcggtgcggactatggccgcgtatctggcgaaagtgcacaatatgtatcgggcaagcagctgatgggtgcagtggtcggcttcagaggagggcataaagtaggcggtatgtttgcttatgatctgtttgccggcaagccgcttcataaacccaaaggctttcagacgaccaacaccgtttacggcttcaacttgaattacagtttctaa

SEQ ID NO: 61898 - DNA, 396 bp, Neisseria meningitidis; identical to SEQ ID NO: 54211

SEQ ID NO: 61899 - DNA, 993 bp, Neisseria meningitidis; identical to SEQ ID NO: 55577

SEQ ID NO: 61900 - DNA, 276 bp, Neisseria meningitidis; identical to SEQ ID NO: 44823

SEQ ID NO: 61901 - DNA, 264 bp, Neisseria meningitidis
ttgcgcccgggcggctcgtggctcgcgctcaaagccctccccctctgtctgccgctttcaggtatcttgaaaaagaaaatctatacctaccaatacagctccatgctggttctgatttattttgccgaagccgttatgcgcctgttcgacgcctatccagcagaacagatttgcgccgcgctttccgcagtattcagcatcatcttcttcatatcctgcctgtcgttcgtcaaacaatacaaggaaacaaacaatgcccgctga

SEQ ID NO: 61902 - DNA, 1245 bp, Neisseria meningitidis; identical to SEQ ID NO: 43384

SEQ ID NO: 61903 - DNA, 1002 bp, Neisseria meningitidis
atgaaacggaaaatttggctgctgccgctgctggcggtttcggcatacctgcaggcgcagacggaagtcaggctggcggtgcataagtcgttcagcctgcccaaagggctgattgcgcgcttcgagcgggcaaacgatgcgaaggtgtcgattattcaggcgggcggcgcgaacgaaatgctcaacaaactgattttgagccgcgccaacccgattgccgacgcggtgtacggtttggacaacgccaatatcggcaaggcgcgggaaatgggcattttggcggcggcgcaacccgaatccgcccccgtcgcggtcgggctgccttcggctttggcggtcgattacggctatgtgtccatcaattacgacaaaaaatggtttgaaggcaaaaagctgcccctgccgcaaaccctgcaggatttgacccgccccgaatataaaaacctattggtcgtgccgtcccccgccacgtcgtccccggggctgggcttcctgatggcgaacatcagcggtctgggcgaagaaggcgcgttcaaatggtgggcacagatgcggcagaacggcgtgaaggtcgccaaaggctggagcgaggcgtattacaccgacttttcgcacaacggcggcgcgtatccgctggtggtcggttatgccgccagcccggcggcggaagtgtatttttccaaaggcaaatacagcgagccgccgacgggcaacctgtttttaaaaggcggcgtattccgccaggtcgaaggcgcggcggtcttgaagggcgcgaaacagccggaattggcggcaaaactggtgcaatggctgcaaagtcgggaagtgcagcaggcggttccgtccgaaatgtgggtttaccccgccgtcaaaaacacgcgcctgcccgacgtgttccgcttcgcccaagccccgacgcacaccaccgcccccgcgcagcgcgatattgatgcgaaccagcgcggatgggtttcccgttggattagaacggttttgaaataa

SEQ ID NO: 61904 - DNA, 819 bp, Neisseria meningitidis
atgaaaaaaacagtttttacatatgccatgatcgccctgaccggtactgccgccgctgcacaagagcttcaaaccgctaatgagtttaccgtccacaccgacctctcttccatttcttcaactcgtgctttcctgaaagaaaaacacaaagctgccaaacacatcggcgtgcgtgctgatattccttttgatgccaaccaaggcatccgcttggaagccggtttcgggcgcagcaaaaaaaatattattaatttggaaacagatgagaacaagctgggtaagactaaaaatgtaaaactgcccaccggcgttcctgaaaaccgtatcgatctttacacaggctacacctacacccaaacgttaagtgattctttaaatttccgtgtgggtgccggcttgggttttgaatcttcaaaagacagcattaaaaccaccaagcatacgcttcacagcagccgtcagtcgtggttagccaaagttcacgcggatttgctttcccaactgggtaacggctggtatatcaacccttggtctgaagtgaaatttgacctcaattcccgctataaattaaacaccggcgttaccaatctcaaaaaagacatcaatcaaaaaaccaacggctggggctttggattgggtgcaaatattggtaaaaaactgggcgaatccgccagcatcgaggcggggccgttctacaaacaacgcacttacaaagaatccggcgagtttagtgtaacaaccacgagtggcgacgtatcgctcaccatcccgaaaaccagtattcgtgaatacggcttgcgcgtcggcataaaattctga

SEQ ID NO: 61905 - DNA, 759 bp, Neisseria meningitidis
atgccttgcctggccgtggttttggtcggaggcgaccctgccagcgcggtttatgtccgcaacaagaaaactgcctgccaaaaatgcggcatcaaatcactgtcttacgaactgcccgaatcaacatcgcaggaagaactgctggcactggtcgaccgcctgaatgccgattccgaagtggacggtattctggttcagctgcccctgccgaagcacctcgacagccaggcggttttggaacgtatttcgccggataaggacgtggacggcttccatccttacaatgtcggcaggctggcggtcaaaatgccgctgatgcgcccgtgtacgcccaagggcgtgatgacgcttttggaagcttacggcattgatccgaaggggaaaaaagcggtcgtggtcggcgcgtcgaatatcgtcggccgcccgcaggctttggaactgctgctggcgcgcgcaacggtaacggtctgccacagcgcaaccgaaaatctggcagacgaggttgccggagccgatattttggtggtcggcgtgggcattccgaactttgtcaaaggcgaatggatcaaacccggcgcggtcgttatcgatgtgggcatcaaccgtttggacgacggcagcctgtgcggcgacgtgaaatttgaaacggcaaaagaacgggcggcgatgattacgcccgttcccggcggcgtgggtccgatgacgattgccacattgatggaaaacaccctgcacgcggcttcactgcacgatgcttga

SEQ ID NO: 61906 - DNA, 450 bp, Neisseria meningitidis
atgagtatttatgccgtcgcgcacatcgtccacctgtattgcgccattgcctttgtcggcggcgtgttttttgaagtgctggttttgtccgtcctgcatacgggacgggtgtcgtgcgaggcgcggcgcgaagtggaaaaggcaatgtcttaccgcgccgtcagggtgatgccgtttgtggtcggactgctgttcgccagcggcgtcgtgatggcggcaaaccgctatctttctatattgggcgaaccgtttgccacttccttcggtacgatgctgacgctgaaaatcctgttggcgttcagcgtgttggcgcacttcgccatcgccgtcgtcaaaatggcgcgttccacactgaccgtcggctggtcgaaatacatacacgccgtcgtctttacccatatgctgctgattgtctttttggcaaaagcgatgttttatatcagctggtaa

SEQ ID NO: 61907 - DNA, 864 bp, Neisseria meningitidis; identical to SEQ ID NO: 55772

SEQ ID NO: 61908 - DNA, 1221 bp, Neisseria meningitidis; identical to SEQ ID NO: 55321

SEQ ID NO: 61909 - DNA, 651 bp, Neisseria meningitidis; identical to SEQ ID NO: 55420

SEQ ID NO: 61910 - DNA, 369 bp, Neisseria meningitidis
ttggtcgtgtatttttatccgaaagacagtacgccgggctgtacgacggaaggcttggatttcaatgcgcgtttggaacagtttgaggcattgggttataccgtggtcggtatttcccgcgacggcgtaaaggcgcatcagaatttttgcgccaagcagggtttccggttcgagctgttgagcgacaaggatgaaacagtgtgccgcctgtttgatgtcatcaaattgaagaaactgtacgggaaagagtcgttaggtatcgagcgcagtacgttcgtcttgaataaggatggagaaatcgcccatgaatggcggaaagtcaaagtggcgggtcatgcacaggaagtgttggaaacgctttcccgataa

SEQ ID NO: 61911 - DNA, 600 bp, Neisseria meningitidis
atgagcgagttggataacatccttgcccataaccggcagtttgtcgagtcgggcgaatatgaaaaatactttaccgacaaataccccgaacgcgggctggcagttttgtcctgtatggatgcgcggattatcgggctgctgcccgacgcgttgggtttgaaaaacggcgatgccaagctgattaaaaatgccggcgcgctggttacgcacccgtggggttcggtgatgcggagtcttttggttgccgtgtttgaattgaaggtcagagagattatggtcatcgcccatcacgattgcggtatgcaggggctgaatgccgaagaattcctcgggcgcgtccgggaaagccagattcccgaagaccgtatcgaaaccctgcgttatgccggtatcgacctcgacggctggctgaccggtttcgacaacgtcgaagacagtgtgcgccacacggtggaccttatccgtaaccatccgctgatgccgcgccatatcgccgttcacggactggtcatccatcccgttaccggcaaactgacgctggttgtggacggcagtgtttcagacggcatggacttatcggaaggaatggaaacatcatga

SEQ ID NO: 61912 - DNA, 927 bp, Neisseria meningitidis; identical to SEQ ID NO: 56068

SEQ ID NO: 61913 - DNA, 1344 bp, Neisseria meningitidis
atgtttcacagtgtcaatgtatttacgggcgaaacgctttaccgccgtccagctcaagattatgcggagtttgaacggcggctggcggatttgaaaatgcgcggcggggcgttcgcgcaactgggcgtaaccgaacgtgccgcgcgcctgcaaaaatttgccgaccgtttggaggcggagaaagagcgttttgcggaaatggtgtgtgaggaagtcggacgctgcttgcacgaatgccgtgcggaaatcggcaagtctatcgaactgatacgctattacgcccgccttgcccccgaactgcttgcccacaaaaccatcgcgacgcaggcgagtttgagtcaggtgcgcttcgagcctttgggcgtggtgtttgccgtcatgccttggaactatcccgtctggcaggtattgcgtttcgccgttcccgctatgtgcgcgggcaacgcgtgcgccgtcaaacccgcgcccagcgtggcacgcgtcagtcaggcactgttcgatttggcttcagacggcattcctctggcaggcgtgtggctggatgaggcgggcacgctcaaggcggttgaagataccgatgcaatggcgtttaccggttcaacgtatacggggcgcatccttgcggcacacgcgggcgcaaaccttaagaaaaccgtgttggagctcggcggtagcaacgcctttatcgtgatgcccgatgctgatttggagcgtgccgccgcagaagcctgttattcccgtttccgcgatgcggggcaatcgtgtaacgccgccaagcgcatcatcgtaaccgaagccgcagccgatcgttttatcacgctgtttcttgccgaatgcgctaaattgaaaatgggcgaccccaaacatcccgatactacgcttgcaccgctgcaccgcgaagatttgcgggacagggttcacgggcaggttgaagatgccgtttcaaacggcgcggtatgcctgaccggcggaaaaatcccacaagggcgaggctggttttatcccgcgacggttttagacagggtaaatcctgcctgccgcgtctggagagaagaagtattcgggccggccgccctgattttgcgcgccgaaaacgaagaacatgccatccgccttgccaatgattccccgttcgggctcggtgcctgcatttataccgccgataccggatgcgcctggcggtttgccgaaaaaatacaggcgggatcggtgtttatcaaccgccataccagcagcgatttgcgcctgcctttcggaggggttaaagattccggttacgggcgcgaattgtccgaattcgggctgtacgagttcgtcaacgtcaaaacctactggcagaaataa

SEQ ID NO: 61914 - DNA, 1269 bp, Neisseria meningitidis
gtgaaaccgctgcgcagactgacaaacctccttgccgcctgcgccgtagcggccgccgccttcggacagcccgccctcgcggcggacttggcgcaagacccgttcattaccgataacgcccaacggcagcactacgaacccggaggcaaataccacctcttcggcgacccgcgcggcagcgtttccgaccgcaccggtcaaatcaacgtcatccaagactatacccaccagatgggcaacctgctcatccaacaggcaaacatcaacggcacaatcggctaccacacccgcttttccggacacggacacgaagaacacgcccccttcgacaaccacgccgccgacagcgcaagcgaagaaaaaggcagcgtcaacgaaggctttaccgtataccgcctcaactggaaagggcacgaacatcatcccgccgacggctatgacggcccgcagggcggcaattaccccaaacctacgggcgcacgagacgaatacacctatcacgtcaacggcacagcccgcagcattaaactcaatccgaccgacacccgcagcatccggcaacgcatatccgacaactacaacaacctcggcagcaatttctccgaccgcgccgatgaagccaacaaaaaaatattcgagcacaatgccaagctcgaccgctggggcaacagcatggagtttgtcaacggcgtcgccgccggcgcgctcaacccctttatcagcgcgggcgaagccgttgaccagtggatgcaggaaaaccccaatgccgccgaaaccgtcgaagccctggtcaacgtcctgccgtttgccaaagtcaaaaacctgacaaaggcggcaaaaccggggaaggctgcggttagtggggatttctcagactcctacaagcataacactgcttcaagattatctcagtctgtagatggagaaatgtttcaaacccgcaatgttgattttaaagcaaaatctattgggactaaaattcatgatggagctcaagggaaacatatttcaggacatagaaactacattgaaggtaagagtactttaaatcaaaacattaatcctcaagaattgttgaacggaatacattcaggtgcttatccagttatttctaaaggagcaagaggaaatcctgttgttgattttgggtatcctataggcagcgatgggaaatcaggattaagtaccaattttggtacgattcattcaggtaaaaatggagttcacattgttccggctaaccctaaaaccattaaaaaggtgcaatag

SEQ ID NO: 61915 - DNA, 1623 bp, Neisseria meningitidis
atgcaagtaaatattcagattccctgtatgctgtacagacgcgggagtgttaagccccccttgtttgaagctccgcggctcctgccgagcttcaccgaccccgttgtgcccaagctctctgctcccggcggctacattgtcgacatccccaaaggcaatctgaaaaccgaaatcgaaaagctggccaaacagcccgagtatgcctatctgaaacagctccaagtagcgaaaaacgtcaactggaaccaggtgcaactggcttacgataaatgggactataagcaggaaggcttaaccagagccggtgcagcgattatcgcgctggctgttaccgtggttactgcgggcgcgggagtcggagccgcactaggcttaaacggcgcagccgcagcagcggccgatgccgcctttgcctcactcgcttctcaggcttccgtatcgctcatcaacaataaaggcgatgtcggcaaaaccctgaaggaactgggcagaagccgcacggtaaaaaatctggttgtagcggcggcaacggcaggcgtatccaacaaactcggtgcctcttcccttgccacttggagcgaaaccccttgggtaaacaacctcaacgttaacctggccaatgcgggcagtgccgcgctgatcaacaccgctgttaacggcggcagcctgaaagacaatctggaggcaaatatcctggcggcattggtgaataccgcgcatggggaggctgcgagtaagattaagcaattggatcagcactatatcgcccacaaagttgcccatgccgtagcaggctgtgcagcagcgacggcgaataagggtaagtgtcaggacggtgcgattggcgcagccgtgggtgagattgttggggaagctttggttaaaaataccgattttagcgatatgaccccggaacaattagatctggaagttaagaaaattaccgcctatgccaaacttgcggcaggtacagttgcaggcgtaacgggaggagatgtcaatactgctgcacaaaccgcacaaaacgcggtagaaaataatgcggttaaagctgttgtaactgctgcaaaagtggtttataaggtagccagaaaaggattaaaaaacgggaaaatcaacgttagagatttaaaacagacgttgaaagacgaaggttataatttagccgacaacctgaccaccttattcgacgaaacattggattggaacgatgccaaagccgttattgatattgtcgtcggaacagagctgaatcgcgctaataaaggggaagcggcacaaaaggtcaaggaagttttagaaaaaaatcgtccttatatccctaataaaggtgctgtaccgaatatgagtacatacatgaaaaataatccttttggaaaacagctggctcaaatttcagaaaagacaacgcttccgacgcagcaagggcagtctgtcttcttggtaaaaagaaaccaagggttattaaaaaccggtgataggttttatttagatggccaacataaaaatcatttagaggtttttgataaaaatgggaactttaagtttgttctaaatatggatggttcgcttaaccaaatgaaaactggggcagcaaaaggtcgtaaattaaacttaaaatag

SEQ ID NO: 61916 - DNA, 1881 bp, Neisseria meningitidis
atgccttatttcgccctgtttgacgatgccgtaagcggccgcgcaaaacgctatcaaaatcatgtggaaagccgttttttccgtcccgaagaactcgatgctttggacagcgcgctgcaaaagggctggcaaaaagggctgcattcggtgttgtttgcagactacggattcggtttgccgctgacgggggtcgagtccgaacgcggcggcaatcttgccctgcactggtttgccgactgcgccgacaccgatgccgaaaactggcttgcccgacattcagacggcctccccgccggcatttccacgccgcaatcctccgtatccgaagccgattacctcgaccatatccgccaaatccacgaagccatccggcgcggcgacacctatcaaatcaactacaccacccgcctgcacctgcaagcctacggcaatcccatcagcctctaccgccgcctgcgccagcccgtcccctatgccgtcttgtcccacctgcccgatgcggaggggcaatccgcgtggacgctgtgtttctcgcccgaactcttcctcaacctcgcttcagacggcaccatcagcaccgaaccgatgaaaggcaccgcgccgattttgggcgacggacaagacgaacgccgcgccgccgagttgcaagcagacccgaaaaaccgcgccgaaaacgtgatgattgtcgatttgctgcgcaacgacctcggcaaaatcgcccaaaccggcaaagtatgcgtacccgagccgtttaaagtatcgcgtttcggcagcgtctggcagatgaccagcaccatccaagcccaagccttgccgcacacctcgttcgccgacatcctccgcgccgccttcccctgcggcagcatcaccggcgcgcccaaaaaaatgagtatgcagattatcgaaacgctcgaaaccgaagcgcgcggactttatacgggcagcattggctatttgaacccgtgttccggcggcttggggtttgaaggcacgttcaacgtcgttatccgcaccttgtcgctcaaacctgcttcggcttcagacggcattgtttcaggcatcggcggcccagattcaaacgtgcaagcccgaacggcagggcaaggcgaggcaacgccgtaccggtttcaagttcatccactctatcaaggggtgtacggcgtcggttccggcatcgtcatcgacagcgatcccgccgccgaatatcgcgaatgcggctggaaagcccgtttcctcaacgaattgcgccccgacttcggcatttttgaaaccatgcgcgtggaaaacaggcaatgcgccctactcgaccgccacctatgccgtctgaaagccgccgcccaagccctcaacctgcccctgcccgacggctgcgaaaatcaaatcaaacaatacattgccgacttgcccgacggcgcgttccgcgtcaaagccctgctcgcttcagacggcatcagcctgtcccgcgccgttttaaaccatttggctgacaaacaacgcgtcatcatttcgcccgccgtcctgcccgcacaaaactacctgcgccgcttcaaaaccacccaccgcactctcttcgaccaagcgtggcaaaccgccgaaacacaaggcgcgttcgacagcctgtttttcaattcagacggcatcctgctcgaaggcggcagaagcaacgtgttcgtcaaacatcgcggacaatggctcacgccctctttagatttagacattttaaacggcataatgcgccaagccgtgttggacgaaccgcaaaaatatttgcaaacaaatcaagtaatcgaaacacacatcacacaaaaaacactgcaagaagccgaagaaatccgcctctccaacgccttgcgcggcgtatttgccgccgcccttgcctga

SEQ ID NO: 61917 - DNA, 1377 bp, Neisseria meningitidis
atgaaacacatccacattatcggtatcggcggcacgtttatgggcgggattgccgccattgccaaagaagccgggtttgaagtcagcggttgcgacgcgaagatgtatccgccgatgagcacccagctcgaagccttgggtataggcgtacacgaaggcttcgacgcggcgcagttggaggaatttaaagccgacgtttacgtcatcggcaatgtcgccaagcgcgggatggatgtggttgaggcgattttgaaccgcgggctgccttatatttccggtccgcaatggctggctgaaaacgtgctgcaccatcattgggtactcggtgtggcggggacgcacggcaaaacgaccaccgcgtccatgctcgcatgggttttggaatatgccggactcgcgccgggcttccttatcggcggcgtaccggaaaactttagcgtttccgcccgcctgccgcaaacgccgcgtcaagacccgaacagccaatctccgtttttcgttatcgaagccgacgaatacgacaccgcctttttcgacaaacgctccaaattcgtacattaccgcccgcgtaccgtcgtgttgaacaatctggaattcgaccacgccgacatctttgccgacttgggcgcgatacagacccagttccaccacctcgtgcgcaccgtgccgtctgaaggcttaatcatctgtaacggacagcagcaaagcttgcaggatactttagacaaaggctgctggacgccggtggagaaattcggcacggaacacggctggcaggccggcgaagccaatgccgacggctcgttcgacgtgttactagacggcaaaacggccggacgcgtcaaatgggatttgatgggcaggcacaaccgcatgaatgcgctcgccgtcattgccgccgcgcgtcatgtcggtgtcggcattcagacggcctgcgaagccttgggcgcgtttaaaaacgtcaaacgccgcatggaaatcaaaggcacggcaaacggcatcaccgtttacgacgacttcgcccaccacccgaccgccatcgaaaccaccatagaaggtctgcgtcagcgcgtcggaaacgcccgcatcctcgccgtcctcgagccgcgctccaacaccatgaaactcggcacgatgaagtccgccctgcctgtaagcctcaaagaagccgaccaagtgttctgctacgccggtggcgtggactggaacgtcgccgaagccctcgcgcctttgggcggcaggctgcacgtcggcaaagacttcgatgccttcgttgccgaaatcgtgaaaaacgccgaagcaggcgaccatattttggtgatgagcaacggcggtttcggcggaatacacggaaagctgctggacgctttgagatag

SEQ ID NO: 61918 - DNA, 522 bp, Neisseria meningitidis; identical to SEQ ID NO: 43029

SEQ ID NO: 61919 - DNA, 510 bp, Neisseria meningitidis; identical to SEQ ID NO: 54788

SEQ ID NO: 61920 - DNA, 291 bp, Neisseria meningitidis
atggcagaaagtaaaagggtacaacggctattgagggtctttatcgcgcttgacgaacatccgattatcggtctgagcaataaggatttatcggtcggactggggctgacgccatcacaagtcagcagggatattgatgatttggttgcatcgggattggtcatcaagcttgaaaacggcaactacgcctacggtatcaaaaccctgcaaatcgccgagcggttcaggcggcagcatgaacggctgcaaagcaagattgccgaaatcggcaagcgggtgaatgcagattaa

SEQ ID NO: 61921 - DNA, 1869 bp, Neisseria meningitidis; identical to SEQ ID NO: 55320

SEQ ID NO: 61922 - DNA, 492 bp, Neisseria meningitidis; identical to SEQ ID NO: 54307

SEQ ID NO: 61923 - DNA, 234 bp, Neisseria meningitidis; identical to SEQ ID NO: 50280

SEQ ID NO: 61924 - DNA, 306 bp, Neisseria meningitidis; identical to SEQ ID NO: 43025

SEQ ID NO: 61925 - DNA, 1368 bp, Neisseria meningitidis
atgcctgaccttcataccgaattttcccgactcctgccggcagatgaaattgccgaactttctccgacgcttttaaaagaccagcgcaaccgctttacgtctgcaccagacatcattttgcagccgcgcagcgttgaaagcgtgcaaaccattatgcgtttttgttacgaacaccgtattccggttacgccgcaaggcggcaataccggtttgtgcggcgcggcagtatcggaaaacggcgtattgctgaacctttccaaactcaaccgcatccgcagcatcaatttgtcagacaactgcataaccgtcgaagcaggttccgtactccaaaccgtccaacaggcagccgaagcctcaaacaggctgttcccactcagtctcgccagcgaaggctcctgtcaaatcggcggcaacatcgcctgcaatgccggaggtttgaacgtattgcgttacggcacgatgcgcgacctgattatcggtttggaagtcgtcctccccaacggcgagctggtttcccatctccatcccctgcataaaaacaccaccggctacgacctgcgccatctgtttatcggcagcgaaggcacactgggcatcatcactgccgccacactcaagctttttgcccgtccctcggacaaggcaacggcatgggtcggcatacccgacatcgaatccgccgtccgcctgctgaccgaaacccaagctcactttgccgaacgcctatgcagttttgaactggtcggccgttttgccgccgagttgtcttccgaattcagcaaattccccctgccgacacattcagaatggcatattttacttgagttgaccgactcattacccgacagcaatcttgatgatcggcttgtcgaatttctttataaaaaaggatttaccgacagcgtattggcacaaagcgaacaagaacgtatccatatgtgggcattgcgcgaaaacatctccgcatcgcaacgcaaactgggcaccagcatcaaacacgatattgccattcctatcggacgcgttgccgactttgtccgccggtgcgccaaagatttggaacagaattttaaaggcatacaaatcgtctgcttcggacatcttggcgacggcagcctgcactacaatactttcctgcccgaaatcctcagcaatgaagtctatcgttacgaaaacgacatcaacgacgcagtttatcgcaacgttcttgcctgcaacggcacgattgccgccgaacacggcataggtatcatcaaaaaacagtggctggacaaagtacgcacgcctgccgaaatcgccctgatgaaaagcatcaaacaacaccttgatccatataacattatgaatccgggcaaactgcttccgtaa

SEQ ID NO: 61926 - DNA, 2970 bp, Neisseria meningitidis
atgaaaacctccgaactgcgccaaaaattcctaaaattttttgaaaccaaaggccacaccgtcgtccgctcttccagcctcgtgccgcacgacgacccgaccctgctgtttaccaacgcgggcatgaaccagtttaaagacgtattcttaggtttcgacaaacgcccgtacagccgcgccaccaccgcgcaaaaatgcgtacgcgcaggcggcaagcacaacgacttggaaaacgtcggctacaccgcccgccaccacaccttctttgaaatgatgggcaacttctccttcggcgactacttcaaacgcgacgccatccatttcgcttgggagtttctgacttcccccgaatggctcaacatccctaaagacaaactgttggcgaccgtttacgcagaagacgacgaagcctacaacatctggttgaacgaaatcggtatgccgtctgaacgcatcgtccgcatcggcgacaacaaaggcgcgaaatacgcgtctgataatttttggcaaatgggcgacaccggcccttgcggcccctgctccgaaattttctacgaccacggcgaagaaatttggggcggcattcccggcagccccgaagaagacggcgaccgctggatcgaaatttggaactgcgtatttatgcagttcaaccgcgacgaacaaggcaatatgaatccgctgcccaagccgtccgtcgataccggcatgggtttggagcgcatggcggcagtaatgcaacacgtccacagcaactacgaaatcgacttgttccaagacctgctcaaagccgttgcccgcgaaaccggcgcagctttcagcatggaagaaccaagcctaaaagtcatcgccgaccacatccgctcctgctcattcctgattgcagacggcgtattgccttccaacgaaggccgcggctacgtattgcgccgcattatccgccgcgccgtgcgccacggttacaaactgggtcagaaacaagcatttttctacaagctcgtgcctgatttggtgaaagcgatgggcgacgcgtatcccgagttgaaagagaagcagacgcaaattatggaagccctgcgcgcggaagaaagccgcttcggcgaaacgctggaaaaaggcatgggcttgttcaaccaagtctataatgaattgaaattcaatcaaatttttgatcttctggcgaaagaatttaaggttacacctgttgaagatattgatcttgatatgtttagtacaagaaattttgtaggaagaagtgctgaaattccttatatatcaaatcaacaccctaacgtggattatcccgctcctatggggaacgtaaatgaaaaaatttatgctatgccagtgagattaacagatggaagaattggtattaatatttttcctactgatgaaactgcacgcctaatccttagcaatgattggaatagtttgcgcttctattctttttgtaattcgttgattacttattatcaacagaaaggtcaattagaaacattaaaattgaacggcgaacacatcttcaaactctacgacacctacggtttcccctacgacctgactgccgacatctgccgcgaacgcaatatcgaactggacgaagcaggcttcgagcgcgaaatggaagcccaacgcacacgcgcacgcgccgcacaaagcttcaaagccaacgcccaactgccttacgacggtcaagacaccgagtttaaaggttatagcgaacgccaaaccgaatccaaagtcctcgccctctacaaagacggcgagcaagtcaacgaattgaacgaaggcgacgaaggtgccatcgttatcgactttaccccgttctatgcagaatccggcggccaagtcggcgacgtcggctatatctttgcaggcgaaaaccgctttgaagtacgcgatacccaaaaaatcaaagcagccgtattcggccaattcggcgtacaaacttcaggccgtctgaaagtcggcgacagcgttaccgccaaagtggacgacgaaatccgcaatgccaatatgcgcaaccacagcgcgacccacctgatgcacaaagccctgcgcgacgtattgggcggacacgtcgaacaaaaaggctctttagttaccgccgaatccacccgtttcgacatttcccatccccaagcggtcactgccgaagaaatcgccgaagtcgaacgccgcgtcaacgaagccgttttggcgaacgttgccgtcaatgcagccattatgagcatggaagacgcgcaaaaaaccggcgcgatgatgctcttcggcgaaaaatacggcgaagaagtgcgcgtactgcaaatgggcggtttctctaccgaattgtgcggcggcacacacgtttcacgcaccggcgacatcggcctcttcaaaatcatcagcgaaggcggtattgccgcaggcgtgcgccgtatcgaagccatcaccggcctgaacgcactcaaatgggcgcaagagcaagagcgtttggtgaaagacattattgccgaaaccaaagcccaaaccgaaaaagacgtactggcaaaaatccaagcaggcgcggcacacgccaaagcattggaaaaagaattggcacgcgccaaagccgaactcgccgtccacgcaggcgccaaactcttggacgatgcaaaagacttgggcgcagccaaactcgttgccgcccaaatcgaagccgacgcagccgccctgcgcgaaatcgttaccgatttaaccggtaaatccgacaacgccgtgattcttttagcggcagtaaacgacggcaaagtctccctgtgcgccggcgtatccaaaccgttgaccggcaaagtgaaagcaggcgatctggttaaatttgcagccgaacaagtcggcggcaaaggaggcggcagaccagatttggcacaggcagggggcacggatgcaggcaaattgcccgccgtgttggatagcgtgaaagactgggtcggcgcgaagctggcttga

SEQ ID NO: 61927 - DNA, 1485 bp, Neisseria meningitidis; identical to SEQ ID NO: 55660

SEQ ID NO: 61928 - DNA, 771 bp, Neisseria meningitidis
atggaacccgaacgcctgcaaaaagtgcttgccgcgtccggcgtcggctcgcgccgcgaaatggaagaatggatcaacaacggctgggtaacggtcaacggcaaaaccgcgcaactgggcgacaaagtcacccccgacgaccacgttaccgtcaaaggcagcatcatcaaactcaaatgggccgaccgcctgccgcgcatcatcctatattacaaacaagaaggcgaaatcgtttcccgcgacgacccgcaaggccgcgtcagcatattcgaccgcctgccgcaggccgccagcagccgctgggtcgccatcggacgcttggacatcaacaccagcggacttctgattctcaccacctccggcgaactcgtccaacgtttcgcccaccccagcttcgaagtcgaacgcgaatacgccgtgcgcgtcttgggcgggctgaccggcgaacaaatgcgcgtcctcaccgaagaaggcgtgatgctcgaagacggcttggcaaaagtcgaacgcatccgcgaacaaggcggcgaaggcgcgaacaaatggtacaacgtcgtgattaaagaaggccgcaaccgcgaagtgcgccgcatttttgaaagccaagggctcaccgtcagccgcctcgtgcgcgtcggcttcggtcccatcggactgcccaaccgcctcaaacgcgggcagttctacgaactcaaccccgccgaagtcgccaacatcatcaaatgggcggacatgctgctgccgggcgaacgccgccgcaaaaaagcctaa

SEQ ID NO: 61929 - DNA, 198 bp, Neisseria meningitidis; identical to SEQ ID NO: 36305

SEQ ID NO: 61930 - DNA, 354 bp, Neisseria meningitidis; identical to SEQ ID NO: 54883

SEQ ID NO: 61931 - DNA, 654 bp, Neisseria meningitidis
atgaagataacgcactgcaaattaaagaaaaaagtacagaaagaactgctccgtttttttgtactggaagttaccgcccgttctgccgccgatattttgggtatccatcccaattcggcagcactgttctaccgtaaaatccgcacggttatcaaccatcatttggccttggctgccgatgaggtttttgagggccctgtcgagccggacgaaagcgatttcggcggacggcgtaaaggcagacgtggtcgcggtgcggcaggaaaagtggttgtcttcggcattctgaaacgcaacggacgggtctataccgttgtggtggataatgccaagtctgaaacgttactccctgtcatcaaaaagaaaatcatgccggacagtattgtttataccgatagtctgagcagctgcgacaagttggacgtgagcggtttcatttattaccgcatcaaccattccaaggaatttgcagaccgtcagaaccacattaacggcattgagaatttttggaatcaggcaaaacgtgtcttgcgaaaatacaatggaatcgatcgcaaatctttcccgctgttcttgaaagaatgcgaatttcgatttaacttcggcacaccgtctcaacagcttaaaatcctgcgggattggtgtgggatttag

SEQ ID NO: 61932 - DNA, 372 bp, Neisseria meningitidis; identical to SEQ ID NO: 41171

SEQ ID NO: 61933 - DNA, 759 bp, Neisseria meningitidis
atgaatccaaaaactccccccgaccatacagaagatgccgtgcgcctctccaaacgcatggcgcaactggggctttgttcgcgccgcgaagccgacggctacatcgaacagggctgggtaacggtcaacggcaaaaccgccgtacttggtcagaaagtttcaccagcagaccgtatcgaactgaacaagaaagcccacgaacagcaggcggcacgcattaccatcctgttgaacaaacccgtcggctatgtcagcgcacaagcggaaaaaggctataaatccgccgccgaactgattacccctgaaaatcactgggaaggcgataccagccgcatccgtttcgatccgaaacacaaaatcggtcttgcccccgccggcagactcgatatcgattcagtcggattgctggtgttgacgcaggacggccgtatcgccaagcagcttatcggcgaaaacagcggcagtgaaaaagaatatttggtgcgcgtgcgcggaaaattggacgaaaaaggacttgccttactgaatcacggattgagtttggacggcgagaaactgcgtcccgcccaagtagaatggcaaaacgaagaccaactgcgcttcgtgttgaaacagggtaaaaagcggcaaatccgccgtatgtgcgaactggtcgggctgcgcgtcgtcgggctgaaacgcatccgcatgggcaaggtcaaactcggcaggctgccgcccggcaaatggcgttatctcgcccccggcgaatcgttttaa

SEQ ID NO: 61934 - DNA, 951 bp, Neisseria meningitidis
ttgctgaatgaggcggtggatgcgcttgccgtgcgcgaagacggtgtctatgtggacggtacgttcggcaggggagggcattcccggctgattttgtcgcgtttgggcgatgcggggcggttgattgttttcgacaaagatccgcaggcgattgctgtggcagaagagctggcgcgttcggacaaacgggtcggtgtcgtgcatggcggttttgcttcgtttcagacggcattggacggtttgggtatcggcaaggtggacggtgcgctgtttgatttggggatttcgtccccgcaaatcgatgacggcagccgcggtttcagcttccgtttcgatgcccctttggatatgcgtatggatacgacgcgcggtatgtctgccgcagagtggatagcggttgcgtcggaacaggatttgcacgaggtaatcaagaattatggtgaagagcggtttagccgccagattgcgcgcgccattgttgcgcaacgggcggaaagtccaatcgatacaacccgcaagctggcgcagatcgtggcacaaaacgtccgtactcgcgagcgggggcaggatcctgcgacgcgcaccttccaggcaatccgcatctttattaaccgcgagcttgaagaagtaggggcagtattgccgcaggtcatgtgtcgtctgaaagagggcggacgtttggcggtcattgctttccattcgttggaagaccgcattgtgaagcagtttgtcaaaaaatattcgcaacacgcgcccctgccgcgctgggcggcggtcagggaagcggatttgcccgagccgcccctgaaaatcgcgggcagggcattaaagccgggtgaggcggaaattgccgccaatccgagggcgagaagtgcggttttgcgtgtggcggagcggactgccggtccgataccggaacaatcacagagaaaaacgtctgaatggcaatga

SEQ ID NO: 61935 - DNA, 585 bp, Neisseria meningitidis; identical to SEQ ID NO: 56076

SEQ ID NO: 61936 - DNA, 447 bp, Neisseria meningitidis; identical to SEQ ID NO: 45533

SEQ ID NO: 61937 - DNA, 1302 bp, Neisseria meningitidis; identical to SEQ ID NO: 39130

SEQ ID NO: 61938 - DNA, 903 bp, Neisseria meningitidis
atggataccgcaaaaaaagacattttaggatcgggctggatgctggtggcggcggtctgcttcaccattatgaacgtattgattaaagaggcatcggcaaaatttgccctcggcagcggcgaattggtcttttggcgcatgctgttttcaaccgttgcgctcggggctgccgccgtattgcgtcgggacaccttccgcacgccccattggaaaaaccacttaaaccgcagtatggtcgggacgggggcgatgctgctgctgttttacgcggtaacgcatctgcctttggccaccggcgttaccctgagttacacctcgtcgatttttttggcggtattttccttcctgattttgaaagaacggatttccgtttacacgcaggcggtgctgctccttggttttgccggcgtggtattgctgcttaatccctcgttccgcagcggtcaggaaacggcggcactcgccgggctggcgggcggcgcgatgtccggctgggcgtatttgaaagtgcgcgaactgtctttggcgggcgaacccggctggcgcgtcgtgttttacctttccgtgacaggtgtggcgatgtcgtcggtttgggcgacgctgaccggctggcacaccctgtcctttccatcggcagtttatctgtcgtgcatcggcgtgtccgcgctgattgcccaactgtcgatgacgcgcgcctacaaagtcggcgacaaattcacggttgcctcgctttcctatatgaccgtcgttttttccgccctgtctgccgcattttttctgggcgaagagcttttctggcaggaaatactcggtatgtgcatcatcatcctcagcggtattttgagcagcatccgccccactgccttcaaacagcggctgcaatccctgttccgccaaagataa

SEQ ID NO: 61939 - DNA, 729 bp, Neisseria meningitidis; identical to SEQ ID NO: 48938

SEQ ID NO: 61940 - DNA, 1113 bp, Neisseria meningitidis; identical to SEQ ID NO: 37030

SEQ ID NO: 61941 - DNA, 519 bp, Neisseria meningitidis; identical to SEQ ID NO: 55905

SEQ ID NO: 61942 - DNA, 465 bp, Neisseria meningitidis; identical to SEQ ID NO: 55305

SEQ ID NO: 61943 - DNA, 360 bp, Neisseria meningitidis; identical to SEQ ID NO: 38354

SEQ ID NO: 61944 - DNA, 1380 bp, Neisseria meningitidis; identical to SEQ ID NO: 55466

SEQ ID NO: 61945 - DNA, 3204 bp, Neisseria meningitidis
atggctaaattttttatcgaccgccctatttttgcgtgggttatttcgattttcattattgcggcgggtattttcggcatcaaaagcctgcctgtttcgcaatatccgtctgtcgccgccccgaccattactttgcacgccacttatccgggtgcgtccgcgcaggtaatggaagacagcgtgctttccgtgatcgagcggaatatgaacggcgtggaaggtttggattatatgtccacttccgccgattcgagcggcagcggcagcgtgagcctgacctttacgcccgataccgacgagaatctggcgcaggtggaagtgcagaacaagctttccgaagtattgagcacgctgccggcaaccgtccagcaatacggcgtaaccgtatccaaggcgcgttccaatttcctgatgattgtgatgctttcgtcggatgtgcagtcaaccgaagagatgaacgactacgcgcagcgtaatatcgttcccgaactgcagcgtatcgaaggcgtggggcaggtacgcctgttcggcgcgcaacgcgcgatgcggatttgggttgatcctaagaaactgcaaaactacaatttgtcgtttgccgatatcggcagcgcgctgtccgcccagaacgtccagatttcagcgggttctatcggttcgcttcccgccgttcgcggacagacggttacggctaccgtaacggcgcaagggcagttgggtacggcagaagaattcggcaacgtcatcctccgcgccaataccgacggttctaatgtttacctgaaggatgtggcaagggtcggactgggtatggaagactattcttcctcaacccgtctgaacggtgtaaataccaccggtatggcggtgatgctgtccaacagcggcaatgcgatggcgacggcaaaggcggttaaagaacgcatggcgacgttggaaaaatactttcctcagggtatgagctggaaaaccccttacgatacttccaaattcgtcgaaatttcgattgaaaaagtgattcatactttaatcgaagcgatggtgctggtgtttgtcgtaatgtatctcttcctgcaaaacatccgttatacgctgattccgaccatcgtcgtaccgatttcgctgttgggcggtttcgccttcatctcttatatgggcatgtcgattaacgtactgaccatgtttgcgatggttttggtcatcggcatcgtggtcgatgacgcgattgtggtggttgaaaacgtcgagcgcattatggcgggtgaaggcttgccgcccaaagaagcgaccaaaaaagcgatgggtcagatttcgggcgcggtcatcggtattaccgccgttctgatttccgtgttcgtaccgttggcgatgttcagcggggcgacgggcaatatttacaaacagtttgccctgacgatggcgtcatcaatcgcattctccgccttccttgcgctgacccttacccctgctttgtgtgccacaatgttgaagacaatcccgaaagggcatcacgaagagaaaaaaggtttcttcggctggtttaacaagaaattcaacagttggacgcacggttacgaaggccgggttgccaaagtgctgcgtaagactttccgcatgatggttgtctatatcggcttggcggttgtgggcgtgttcctgtttatgcgtctgccgacttcattcctgccgaccgaagaccaaggcttcgtcatggtcagcgtgcaactgcctgcaggagcgacccaagagcgcaccaatgcgactttggcgcaagttacccaactggcgaaaagcattcctgaaatagaaaacatcattaccgtttccggcttcagcttttcgggcagcggtcagaatatggcgatgggttttgccatattgaaagattggaacgagcgtaccgcgcccggcagcgatgccgttgcgattgccggcaagctgacgggtatgatgatggggacgcttaaagacggttttggcatcgccgtcgtcccgcctccgattctggagttgggcaacggttcgggtctgagcatcaacctgcaagaccgcaacaataccggccataccgcattgctggcgaagcgcaacgagttgattcagaaaatgcgtgccagcggtttgtttgaccccagcaccgtccgtgccggcggtttggaagactcgccgcagttgaaaatcgacatcaaccgtgccgccgcggcggcgcaaggcatttcgtttgccgacatccgcaccgcattggcaagtgcgctgagttcgtcttatgtcagcgacttcccgaaccaaggccgtctgcaacgcgtgatggtgcaggccgacgaggatgcccgtatgcagcctgccgatattttgaacctgaccgtgccgaacaaatccggcgtcgccgtaccgctttccaccattgctactgtttcttgggaaaacggtacggaacagagcgtacgcttcaacggttatccttcgatgaagctgtccgcttcgcctgcaaccggcgtttccaccgggcaggctatggcggcggttcaaaaaatggttgacgaattgggcggcggttacagcctggagtggggcggacagtcgcgcgaagaggcaaaaggcggctcgcaaaccctgattttgtacggtttggcggttgcagccgtatttttggtacttgccgcgctttatgaaagctggtcgattccgctggcggtcatccttgtgattccgttgggtttgatcggtgcggctgcgggcgtaaccgggcgcaacctgtttgaaggactgttgggcagcgttccctcgttcgccaacgacatctactttcaagtcggtttcgttaccgtgatgggtttgagtgcgaaaaacgcgattttgattatcgagtttgccaaagaccttcaagcgcaagggaaaagcgcggttgaagccgctttggaagcagcccgcctgcgtttccgtccgattatcatgacctcgttcgcctttattttgggcgtggttcccctgtatattgccggcggtgcaagttctgccagccagcgcgccattggtacaaccgtattctgggggatgctcatcggcacgctcttgtccgtgttccttgttccgcttttctatgtggtggtgcgcaaattcttcaaagaaactgcatacgagcatgaaatggcgatcagacatgcatcagaagcgggcataaccggttcgaacgacagccaacattaa

SEQ ID NO: 61946 - DNA, 1179 bp, Neisseria meningitidis
atggaatttgtttacgacgtggcagaatcggcagtcagccctgcggtgattaaagtaatcggcttgggcggcggcggttgcaatgcaatcaataacatggttgccaacaatgtgcgcggtgtggagtttatcagtgccaatacggatgcgcagtctctggcaaaaaaccatgcggcgaagagaatccagttgggtacgaatctgacacgcggtttgggcgcgggcgcgaatcccgatatcggccgtgcggcagcccaggaagaccgggaagccattgaagaagccattcgcggtgcgaatatgctgtttatcacgaccggtatgggcggcggtaccggtaccggttccgcgccggttgttgctgagattgccaagtctttgggcattctgaccgttgccgtggttacccgaccgttcgcatatgaaggtaagcgcgtccatgtcgcacaggcagggttggaacagttgaaagaacacgtcgattcgctgatcatcatcccgaacgacaaactgatgactgcattgggtgaagacgtaacgatgcgcgaagccttccgtgccgccgacaatgtattgcgcgatgcggtcgcaggcatttccgaagtggtaacttgcccgagcgaaatcatcaacctcgactttgccgacgtgaaaaccgtgatgagcaaccgcggtatcgctatgatgggttcgggttatgcccaaggtatcgaccgtgcgcgtatggcgaccgaccaggccatttccagtccgctgctggacgatgtaaccttggacggagcgcgcggtgtgctggtcaatattacgactgctccgggttgcttgaaaatgtccgagttgtccgaagtcatgaaaatcgtcaaccaaagcgcgcatcccgatttggaatgcaaattcggtgcggctgaagacgagaccatgagcgaagatgccatccggattaccattatcgctaccggtctgaaagaaaaaggcgcggtcgattttgttccggcaagggaggtagaagcggttgccccgtccaaacaggagcaaagccacaatgtcgaaggtatgatccgcaccaatcgcggtatccgcacgatgaaccttaccgctgcggatttcgacaatcagtccgtacttgacgactttgaaatccctgctattttgcgtcgtcaacacaattcagacaaataa

SEQ ID NO: 61947 - DNA, 1188 bp, Neisseria meningitidis; identical to SEQ ID NO: 37286

SEQ ID NO: 61948 - DNA, 579 bp, Neisseria meningitidis
atgagcgaacagacacagcagcaaaacagtgaagaagcggttgaaaatgtggaggcggtggaaaccgtcgagacagtaggaaatgcggacggtgtgcaggaacaggctgccgcagagccggcttatgaggatttgcaggcgcggattgccgagctggaagcgcagttgaaagacgagcagctgcgcgctttggcaaacgagcaaaacctgcgccgccgccaccagcaggaaattgcggatacgcacaagttcgccggacagaagtttgccgtggaaatgctgccggtcaaggattatctggaaatggcgcttttggatcagagcggcaatttcgatgcgctgaaaatgggcgtgcagatgactttgaacgagttgcagaaagcatttgatgctacgcaaatcaaggaaatcaaccctaaagcgggcgataagctcgatccgaatatccatcaggcgatgcaggcggtggcaagcgaacaggagccgaataccgtggtgggtgtgatgaagaagggttatacgctgtccgaccgcgtgttgcgcccggctatggttacggtggcacagaaggaagcctga

SEQ ID NO: 61949 - DNA, 1605 bp, Neisseria meningitidis
atgcagttcggcgcgaagccgctatttgaaaacgtatccgtcaaattcggcgaaggcagccgctacggtttgatcggcgccaacggctcaggcaaatccaccttcatgaaaatcctcggcggcgatttggaacagaccgccggtgaagtcgcaattgaaaacggcgtgcgtttgggtaaattgcgccaagaccagtttgcctacgaagacatgcgcgtgctggacgtggtgatgatggggcataccgaaatgtgggcggcgatgaccgaacgtgatgcgatttacgccaatcccgaagccaccgaagacgactacatgaaagccgccgaactggaagccaagttcgccgaatacgacggctacaccgccgaagcgcgtgccgccgaactgttgagcggcgtgggcatttccgaagatttgcacaatgcgaaaatggcggaagtcgccccgggcttcaaactgcgcgtattgctggcgcaagccctgttctccaagccggatgtgctgttgcttgacgaaccgaccaataacttggacatcaacaccatccgctggctggaaggcgtgttgaaccaatacgactccaccatgatcatcatctcgcacgaccgccactttttgaacgaagtctgcacccacatggcggatttggactacaacaccatcaccatctatcctggcaactacgacgactacatgctcgcttccgcccaatcgcgtgagcgcgccctgaaagacaacgccaaagccaaagagaaactgcaagagctgcaagagttcgtcgcacgcttctctgccaacaaatccaaagcccgtcaggcaaccagccgtctgaaacaggccgacaaaatcaaatcggagatggtcgaagtcaaaccttccacccgtcaaaacccgtatatccgttttgaagccgatgaaaaagccaagctgcaccgtcaggctgtggaagttgaaaaactggcgaaacgctttgaaacccagttgtttaaaaacctgaacttcatccttgaagcgggacaacgcctcgccatcatcggcccgaacggcgcgggcaaatccaccctgctgaaactcttggccggcgcgtacaaccccgaatattcagacggcctgttaccggacgaaggcagcatcaaatgggcggaaaaagccagtgtcggctactatccgcaagaccatgaaaacgacttcgacgtcgatatggatttgagcgaatggatgcgccaatgggggcaggaaggcgacgacgaacaagtcatccgcggcactttggggcgtttgctcttcggcagtaacgatgtcgtgaaaaaagtgaaggttctctccggtggtgaaaaaggccgtatgctttacggcaaactgttgctgttgaaacccaatgtcttagtcatggacgaaccgaccaaccatatggacatggaaagcatcgaatccttgaacatggcactggaaaaatacaacggcacgctgatttttgtctcccacgaccgtcagttcgtttcctccttggcaacccaaatcatcgaactggacggcaaaggcggatatgaacactacttgggcgattacgaaagttacttggagaaaaaaggcgtagcataa

SEQ ID NO: 61950 - DNA, 171 bp, Neisseria meningitidis; identical to SEQ ID NO: 39149

SEQ ID NO: 61951 - DNA, 921 bp, Neisseria meningitidis
atgaccttaaccgaattgcggtacatcgtcgcagtcgcccaagaacgtcatttcggcagggcggcgcggcgttgttttgtcagtcagcccactttgtctattgccattaagaaattggaagaagagcttgccgtctctttgtttgaccggagcagcaacgatattattacgaccgaggcgggggaacgtatcgttgcacaggcgcgtaaggtattggaagaggcggagcttatcaggcatttggcaaatgaagaacaaaacgagctggagggtgcgttcaaactcgggctgatttttacggttgcgccgtacctgctgccgaaactgattgtctcgttgcgccgtactgcaccgaaaatgcctttgatgttggaagagaattacacgcatactttgaccgagtcgctcaaacgcggggacgttgatgcgattatcgttgccgaaccgtttcaagagccgggcattgttaccgaacccttgtatgacgaaccgtttttcgtgattgtcccgaaagggcattcatttgaggaactggatgccgtttcgccccggatgctgggtgaggagcaggttttgctgctgacggaaggcaactgtatgcgggatcaggtactctcaagctgttccgaattggcggcgaaacaacgcatacaggggttgaccaatacattgcagggcagctcgatcaatacaatccgccatatggtcgccagcggtttggcaatcagcgtgttaccggcaaccgcgctgaccgaaaacgatcatatgctgttcagcattattccgtttgaaggtacgccgccaagccggcgggtcgtattggcgtaccgccgcaattttgtccgtccgaaggcgttgtcggcgatgaaggcggcgattatgcagtcgcagcttcacggggtaagttttatccgcgactag

SEQ ID NO: 61952 - DNA, 1578 bp, Neisseria meningitidis
atgcgcgccaaccccaaaacacaggcaatgccgtctgaaaccatatccctgatgaaaacacgcagcctaatttcccttttatgcctccttctctgttcatgttcttcatggttgcccccactggaagaacggacggaaagccgtcatttcaatacttccaaacccgtccgcctggacaacatcctgcaaatccggcacacccctcataccaacgggctatccgatatctatctgctgaacgacccccacgaagcctttgccgcccgcgccgcccttatcgaatctgccgaacacagcctcgatttgcaatactacatctggcgcaacgacatttccggccgactgctgttcaacctcgtgtaccttgccgcagaacgcggtgtgcgcgtacgcctgctgttggacgacaacaacacgcgcggattggacgacctcctgctcgccctcgacagccatcccaatatcgaagtgcgcctgttcaaccccttcgtcttccgcaaatggcgcgcactcggctacctgactgatttcccccgcctcaaccgccgcatgcacaacaaatcctttaccgccgacaaccgcgccaccatactcggcggacgcaatatcggcgacgaatacttcaaagtcggtgaggacaccgttttcgccgacctggatatcctcgctaccggcagcgtcgtcggcgaagtatcgcacgacttcgatcgctactgggcaagccattccgcccacaacgccacgcgcatcatccgcagcggcaacatcggcaagggtcttcaagcactcggatacaacgacgaaacgtccagacacgcgctcctgcgctaccgcgaaaccgtcgaacagtcgcccctctaccaaaaaatacagacaggacgcatcgactggcagagcgtccaaacccgcctcatcagcgacgaccctgcaaaaggactcgaccgcgaccgccgcaaaccgccgattgccgggcggctgcaagacgcgctcaaacagcccgaaaaaagcgtctatctggtttcaccctatttcgtccccacaaaatccggcacagacgcactggcaaaactggtgcaggacggcatagacgttaccgtcctgaccaactcgctacaggcgaccgacgttgccgccgtccattccggctatgtcaaataccgaaaaccgctgctcaaagccggcatcaaactctacgagctgcaacccaaccatgccgtccctgccacaaaagacaaaggcctgaccggcagctccgtaaccagcctgcatgccaaaaccttcattgtggacggcaaacgcatcttcatcggctcattcaacctcgacccccgttccgcacggctcaatactgaaatgggcgttgttatcgaaagccccaaaatcgcagaacagatggagcgcacccttgccgataccacacccaaatacgcctaccgcgttaccctcgacaggcacaaccgcctgcaatggcacgatcccgccacccgaaaaacctacccgaacgaacccgaagccaaactttggaaacgcatcgccgcaaaaatcctatccctgctgcccatagaaggtttattatag

SEQ ID NO: 61953 - DNA, 1575 bp, Neisseria meningitidis
atggctcaaatccaaatgagcgcaaatgttaaaaccatcaacgccgtctttgccgccatgctggtaggtacagtcggctattttatttattggggcttgggttatacccattacaattacgccgccttattcattattgccacgatgttcggcgtgtttatggcgttcaacatcggcggcaacgatgttgccaattctttcggcaccagcgtcggtgcgggtacgctgaccatcccgcaggctttgctgattgcggcggtatttgaggtcagcggcgcggtcatcgcgggcggtgaggtaaccaataccatacgcaaaggcatcgtcgatttgaagggtgttgatttcgaacccatacagtttgtgtttattatgatgtccgcgcttttggcggcggcgttgtggctgttgtttgcctcgaaaaaagggcttccggtatctaccacccattccattatcggcggcattgtcggcagcgcggtatgtatggcggtaatgaacgatgccgcatcgggcgatttgatacgttggggcaagctgggcggtattggtgtttcttgggtattgtcgcccgtgttgggcggcgcggtgtcctatttcctgttttcgcgcgtcaagaaaaacgtcttagattacaacgcttgggcggaaggcacgctcaagggcatcaagcaggaaaaaaaggcctataaagaacggcaccgcctgtttttcgagggtttgtccgaagccgaaaaagtcgagtacgccaccaaaatggcgcacgacgcgcaaatttacgacgaacccgaattcgatccgcaagagctgcaatcggagtattaccgcggtctttatgcgttcgacaaccgtaaaaacaatgtcgattcctacaaagcgctgcattcttggattccctttatcgcttcgttcggcgcgatgatgatttccgctatgctgattttcaagggcttgaaaaacctgcatttggggatgagcaacgtcaacagcttcctgaccatctttatgataggcgcggcggtgtggatggggacgtttgtttttgccaaaagcctcaagcgtaaagacttgggcaaatcgacctttcagatgttttcatggatgcaggtctttaccgcctgcggcttcgcattcagccacggggcgaacgatatcgccaacgccatcggtccgtttgccgcgattatggatgttttgcgtaccaacagcgttgccgcgcaaaatgtcgtccccccgattgcgatgctgactttcggtatcgcgctgattgtcggtttgtggtttgtcggtaaagaggtgattaaaaccgtcggtacgagtttggcggaaatgcaccccgcctcgggttttactgccgaactgtccgccgcatctgtcgtgatgggcgcgtcgctgatggggctgcccgtgtccagtacgcatatcttggtcggcgcggtactcggtatcggtctggtcaaccgtaatgccaattggaaactgatgaagcccatcggtttggcgtgggtcattaccctgcctgccgccgccgtattgtcggttgtctgctacttggttttacaggcagtattctga

SEQ ID NO: 61954 - DNA, 1350 bp, Neisseria meningitidis
atgttgaatccatcccgaaaactggttgagctggtccgtattttggaagaaggcggctttattttcagcggcgatcccgtgcaggcgacggaggctttgcgccgcgtggacggcagtacggaggaaaaaatcatccgtcgggcggagatgattgacaggaaccgtatgctgcgggagacgttggaacgtgtgcgtgcggggtcgttctggttgtgggtggtggcggcatcgatgatgtttaccgccggattttcaggcacttatcttctaatggacaatcaggggctgaatttcttcctgattttggcgggcgtgttgggcatgaatacgcttatgttggcagtatggttggcaatgttgttcctgcgcgtgaaagtggggcgttttttcagcagtccggcgacgtggtttcggggcaaagaccctgtaaatcaggcggtgttgcggctgtatgcggacgagtggcggcaaccttcggtacgttggaaaataggcgcaacgtcgcacagcctgtggctctgcacgctgctcggaatgctggtgtcggtattgttgctgcttttggtgcggcaatatacgttcaactgggaaagcacgctgttgggcgattcgtcttcggtacggctggtggaaatgttggcatggctgcctgcgaaactgggttttcccgtgcctgatgcgcgagcggtcatcgaaggtcgtctgaacggcaatattgccgatgcgcgggcttggtcggggctgctggtcggcagtatcgcctgctacggcatcctgccgcgcctgctggcttgggtagtgtgtaaaatccttttgaaaacaagcgagaacggcttggatttggaaaagccctattatcaggcggtcatccgccgctggcagaacaaaatcaccgatgcggatacgcgtcgggaaaccgtgtccgccgtttcaccgaaaatcatcttgaacgatgcaccgaaatgggcggtcatgttggagaccgagtggcaggacggcgcgtggttcgagggcaggctggcgcaggaatggctggataaaggtgttgccgccaatcgggaacaggtcgccgcgctggaagcggagttgaagcagaaaccggcgcaactgcttatcggcgtgcgcgcccaaactgtgccggaccggggtgtgttgcggcagattgtccgactctcggaagcggcgcagggcggcgcggtggtgcagcttttggcggaacaggggctttcagacgacctttcggaaaagctggaacattggcgtaacgcgctggccgaatgcggcgcggcgtggctggaacccgacagagcggcgcaggaaggccgtctgaaaaccaacgaccgcacttga

SEQ ID NO: 61955 - DNA, 663 bp, Neisseria meningitidis; identical to SEQ ID NO: 45178

SEQ ID NO: 61956 - DNA, 201 bp, Neisseria meningitidis; identical to SEQ ID NO: 43357

SEQ ID NO: 61957 - DNA, 1215 bp, Neisseria meningitidis; identical to SEQ ID NO: 55070

SEQ ID NO: 61958 - DNA, 312 bp, Neisseria meningitidis; identical to SEQ ID NO: 38726

SEQ ID NO: 61959 - DNA, 1437 bp, Neisseria meningitidis
atgccgctgctgtctgtcgagttcgcactgttctttctcgccttcctgccgatttactggggcttggcgaaatacccgtccgtccaaaacctgctgcttttggctgccggtatgggctggctctaccatatcggccccgtatttgcggcaatcgtcgtcctttattcctcctgcgtgtaccttttgggcgaactgctccgttccgatcgcgaaaatacgcgccgcttttggctggggtgcggcattgccgtctcgctgaccgtcttgggctttttcaaatatttcgactttttccgcccgctgattgcacaatatgccggacaaggcggcgcaatcgacatcctgatgccgctggggctttcgtattacaccttccagtcgctcgcctatctggtttactgcttccgcgccccgcacgccgcgcgtttcgagtggcacgagctgctgctgcacctgagttttttccccaccgttacctccggcccgattatccgcgccgccgcattcaaaagcgcagacggcgagcaggcgggcgcattggcgcaaatccgtacccgccaaccgcgctcacccgtccgccccgcactcgccgtttccctgattctgctgggtattgccaaaaaatggtggctggcggggatgctggcggaaaactgggtgtcgcccgtatttgaaaatcccgcccaattcgacggctggggcgtattgggcggcgtgtacggctataccttccaactctttttagacttttccggatattccgatttggttatcggcatggcgatgctgctgggtttccggctgcccaaaaacttctccgcaccgcttcgtgctttaaacatccgcgcattttgggacaaatggcacatcagcctttccacctggatacgcgactacatctacatccccttgggcggcagcaaaaaaggctttttacggacacagctcaacctgatggcggcaatggtactctcaggcatctggcacggctacggctggaacttcctcatttggggcgcgctgcacggcacggcactggtgctgctcaacacgggcgatcgctatttcggacgcaacgcgctatgccgtctgaaataccttgcgccgctctcgtggtttgttaccttccatttcgtctgccttagctttgttgtcttcaataccgcaagccccgacgatgcaggcgcagttttcaatgccctctttgccaatgccaacggctggaatgcgccgcaacaggcaaacatgctgctgcttgcctcgtttgcatccgtgatgctgctctacccttacctgcaacgcgctttcgacggcgcggtcaaaggtttggaaaaaatcccgatgtggctgtggtttatccccgtttccgccgtcctgctgctgattatcgtattggccccctcggggattcccggctttatttatgccaatttttaa

SEQ ID NO: 61960 - DNA, 120 bp, Neisseria meningitidis; identical to SEQ ID NO: 43584

SEQ ID NO: 61961 - DNA, 423 bp, Neisseria meningitidis
atgaataaaaaccgtaaattactgcttgccgcactgctgctgattgcctttgccgccgtcaagctcgttttgttgcaatggtggcaggcgcagcagccgcaagctgtggcggcgcaatgcgatttgaccgagggttgcacgctgccggacggaagccgcgtccgcgccgccgccgtttcaaccaaaaaaccgtttgatatttatatcgaacacgcgcccgccggcacggaacaggtcagcatcagcttcagtatgaaaaatatggatatgggtttcaaccgctatatgttcgagcggcaaccgtcggggacttggcaggcagtacgcatccgcctgcccatctgtgtcgaaggcaggcgcgattttacggcagacattacaatcggcagtcggacatttcagacggcatttaccgccgaataa

SEQ ID NO: 61962 - DNA, 336 bp, Neisseria meningitidis; identical to SEQ ID NO: 60467

SEQ ID NO: 61963 - DNA, 2151 bp, Neisseria meningitidis
atgaaaaccccactcctcaagcctctgctcattacctcgcttcccgttttcgccagtgtttttaccgccgcctccatcgtctggcagctaggcgaacccaagctcgccatgcccttcgtactcggcatcatcgccggcggccttgtcgatttggacaaccgcctgaccggacggctgaaaaacatcatcgccaccgtcgccctgtttaccctctcctcgctcacggcacaaagtaccctcggcacagggctgcccttcatcctcgccatgaccctgatgaccttcggctttaccattttaggcgcggtcgggctgaaataccgcaccttcgccttcggcgcactcgccgtcgccacctacaccacacttacctacacccccgaaacctactggctgaccaaccccttcatgattttatgcggcaccgtactgtacagcaccgccatcatcctgttccaaatcatcctgccccaccgccccgtccaagaaagcgtcgccaacgcctacgacgcactcggcggctacctcgaagccaaagccgacttcttcgaccccgatgaggcagcctggataggcaaccgccacatcgacctcgccatgagcaacaccggcgtcatcaccgccttcaaccaatgccgttccgccctgttttaccgccttcgcggcaaacaccgccacccgcgcaccgccaaaatgctgcgctactacttcgccgcccaagacatacacgaacgcatcagctccgcccacgtcgactaccaagagatgtccgaaaaattcaaaaacaccgacatcatcttccgcatccaccgcctgctcgaaatgcagggacaagcctgccgcaacaccgcccaagccctgcgcgcaagcaaagactacgtttacagcaaacgcctcggccgcgccatcgaaggctgccgccaatcgctgcgcctcctttcagacagcaacgacaatcccgacatccgccacctgcgccgccttctcgacaacctcggcagcgtcgaccagcagttccgccaactccagcacaacggcctgcaggcagaaaacgaccgcatgggcgacacccgcatcgccgccctcgaaaccggcagcctcaaaaacacctggcaggcaatccgtccgcagctaaacctcgaatcaggcgtattccgccatgccgtccgcctgtcccttgtcgttgccgccgcctgcaccatcgtcgaagccctcaacctcaacctcggctactggatactactgaccgcccttttcgtctgccaacccaactacaccgccaccaaaagccgcgtccgccagcgcatcgccggcaccgtactcggcgtaatcgtcggctcgctcgtcccctactttaccccctccgtcgaaaccaaactctggatcgtcatcgccagtaccaccctctttttcatgacccgcacctacaaatacagcttctcgacatttttcatcaccattcaagccctgaccagcctctccctcgcagggttggacgtatacgccgccatgcccgtacgcatcatcgacaccattatcggcgcatcccttgcctgggcggcagtcagctacctgtggccagactggaaatacctcacgctcgaacgcaccgccgcccttgccgtatgcagcaacggcgcctatctcgaaaaaatcaccgaacgcctcaaaagcggcgaaaccggcgacgacgtcgaataccgcgccacccgccgccgcgcccacgaacacaccgccgccctcagcagcaccctttccgacatgagcagcgaacccgcaaaattcgccgacagcctgcaacccggctttaccctgctcaaaaccggctacgccctgaccggctacatctccgccctcggcgcataccgcagcgaaatgcacgaagaatgcagccccgactttaccgcacagttccacctcgccgccgaacacaccgcccacatcttccaacacctgcccgaaaccgaacccgacgactttcagacagcactggatacactgcgcggcgaactcgacaccctccgcacccacagcagcggaacacaaagccacatcctcctccaacagctccaactcatcgcccggcagctcgaaccctactaccgcgcctaccgccaaattccgcacaggcagccccaaaatgcagcctga

SEQ ID NO: 61964 - DNA, 5451 bp, Neisseria meningitidis
atgaaaaccaaacgttttaaaattaacgccatatccttatccatctttcttgcctatgcccttacgccatactcagaagcggcattggtcagagacgatgtcgattatcaaatattccgtgactttgcagaaaacaaaggcaaattttttgtcggcgcaaccgatttatcagtgaaaaacaaacaaggtcaaaacatcggcaacgcattatccaacgtaccgatgattgattttagcgttgcagatgtcaacagacgtacattaaccgtcatcgatccccagtatgccgtcagcgtcaaacatgtaaaaggagacgaaatctcttattacgggcatcacaatgggcacttagatgttagcaatgatgaaaacgaatatcgttcagttgcacaaaatgactacgaaccaaataaaaattggcatcacggtaatcaaggtcgtcttgaagactacaacatggcacgccttaataaattcgtaacagaagtcgcacctattgcaccaaccagtgcaggcggcggcgttgaaacctataaagataaaaaccgtttttctgagtttgtgcgagttggagcaggtacgcaatttgaatataacagccgctacaatatgacagagctttcacgagcttatcgttatgccattgcaggtacgccttatcaagacgtgaatgtcacatcaaatctaaatcaagaaggcttgattggcttcggtgataattcaaaacatcattccccaaaaaaactcaaagaagttttatctcaaaacgcattgactaactatgctgtgttaggcgatagcggttcaccattatttgcttatgataaacaagaaaaacgctgggtctttttaggtgcttacgattattgggcaggctatcaaaaaaactcttggcaagaatggaatatctataaaaaagaatttgcagataaaatcaaacaacgcgataacgccggcaccatcaaaggtaatggaaaacatcattggaacattacttctggcacaaacagccatatcggttcgacagcggtaaggcttgccaacaatgaaagggatgcaaacaacggacagaatgttacctttgaagacaacggcactttggtattggatcaaaacatcaaccaaggcgcgggcggtctgtttttcaaaggcgattacacagtcaaaggtgcaaataatgacatcacttggctaggtgcggggattgatgttgccgacggcaaaaaagtcgtttggcaagtcaaaaatccgaatggcgacagattggcaaaaatcggcaaaggcactttggaagtaaacggcacaggcgttaaccaagggcaattaaaagtcggcgacggtacggttattctgaatcaacaagccgatgccgacaaaaaagtccaggctttctcccaagtcggcattgtcagcggacgcggtacattggtattaaatagttcaaatcagattaatcccgataacctatatttcggtttccgtggcggtcgtttggatgccaatggcaatgacttgacttttgaacacatccgcaacgtggatgaaggtgcgcgcattgtcaaccacaacacagaccatgcctccacaatcacgctaacgggtaaatctttgattaccgatcccaaaaccatctctattcattatattcaaaataatgatgatgacgataatggttattactattaccgccctaggaaaccgattccacaaggcaaagatctttattacaaaaactatcgttattacgccctaaaatccggcggcagcgtgaacgcaccgatgcccgaaaacggacaaacggaaaataacgactgggtctttatgggatataagcaagaagaagcccagaaaaacgcgatgaaccacaaaaacaatcagcgtattagcggttttagcggtttctttggcgaagaaaacggaaaaggacataacggcgcattaaaccttaatttcaacggcaaaagcgcgcaaaaccgtttcttgttaacaggcggcacgaatttaaacggaaaaataagcgtaactcaaggcaatgtcttgttatcaggtcgtccaacaccacacgcaagagattttgtgaacaaatcttcagcccgaaaagacgcacatttctccaaaaacaatgaagtcgtatttgaagacgactggataaaccgcacattcaaagccacagaaattgcggttaatcaatccgcatcattctcttccggcagaaatgtatccaacattaccgccaacatcaccgcaacagacaacgccaaagtaaatttgggttacaaaaacggcgatgaagtttgcgtgcgctcggactataccggttacgttacctgcaacacagacaacttatccgataaggctttaaacagctttggagcgacacagattaacggcaatgtgaatttgagtcagaatgcggcattggtcttaggcaaggctgcattatgggggcaaattcaagggcaaggaaacagcagcgtcagcctaaaccaacatagcaaatggcatttgaccggcgacagccaagtacacaatctgtcattggcggatagccatattcatttgaacaacgcttccgacgcgcaaagtgcaaataaataccacacgctcaaaatcaatcatttatccggtaacgggcattttcattatctgacgcacctggcgaaaaatcttggggataaggtgcttgtgaaggaatccgcatccggtcattatcagctccatgttcaagataaaacaggcgaacccaatcaggaagggctgaatctctttgatgcatcatccgtacaagaccgttcgcacctttctgtttccttggcgaataaccatgtagatttaggcgcattgcgttatacaatcaaaacagaaaacggtattacccgattgtacaatccttatgccgagaaccgccgccgagtcaaaccggccccgtctcctgccacaaacacggcttctcaagcacaaaaggcaacacaaacggacggtgcacaaattgccaagcctcaaaatatcgtcgtcgcaccacctagcccgcaggcaaatcaagccgaagaagcaaaacgccaacaagcaaaagcggagcaagtgaagcgtcagcaagcagaagcagagcgtaaatcggcagagttagcaaaacaaaaagcagaagccgaacgcgaagcaagagagctggcgacccgccaaaaagcagaacaagaacgcagcagcgccgaacttgcacgtcgacatgaaaaagaacgcgaagcggcagagttgtcggcaaaacaaaaagtcgaagccgaacgtgaggctcaagcattggcggtacgccgaaaagccgaagccgaagaggcaaaacgccaagctgcagagcttgcacgccggcatgaaaaagaacgcgaagcggcagagttgtcggcaaaacaaagggtcggggaagaggaacgccgtcaaacagcccaatcccagccgcaacgccgcaaacgccgtgccgcaccgcaggattatatggcagcttcccaagaccgtcctaaacgccgcggacaccgttcggtacagcaaaacaatgtggaaattgcccaagcccaagcagaacttgtgcgccgacagcaggaagaacgcaaagcggcagagttgttggcaaaacaaagggcagaagccgaacgtgaggctcaagcattggctgcgcgccgaaaagcagaagccgaagaggcaaaacgccaagctgccgaacttgcacatcgccaggaagcagaacgcaaagcggcagaattgtcggcaaaccaaaaagccgcagctgaagcccaagcattggcggcacgccaacaaaaagcccttgcgcgtcaacaggaagaagcacgaaaagctgcagagttagccgtcaaacaaaaagcggaaaccgaacgcaaaaccgccgaacttgccaagcaaagggcagcagccgaagcagcaaaacgccagcaagaagctcgccagaccgccgaacttgcacgtcgtcaagaagcggaacgccaagcagcagagttgtcggcaaaacaaaaagccgaaacagatcgagaagcggcagaatcggcgaaacgaaaagctgaggaagaagagcaccgtcaagcagcccaatcccagccgcaacgccgaaaacgccgtgccgcacctcaggattatatggcagcttcccaaaatcgtccgaaacgtcgcggacgcagatctactctgccggcaccgccctcgccatcatttgattcgtcagcttacgcagcacccagggccttgcataatccggactggtatgaaaatgactatgaagaaatccccttggatgcgttggaagatgaaaatgtatctgaatcagttgacacatcagacaaacagcctcaagacaatacggaacttcatgaaaaatatgaaaatgattatgaagaaatccccttggatgcgttggaagatgaagatgtatccgaatcggttgacacatcagacaaacagcctcaagacaatacggaacttcatgaaaaagttgagacagtgagtttgcaaccaagagccgcgcagccgcgagcccaagccgccactcagccgcaagcccaagccgccgcgcaagccgatgcagtcagcaccaataccaactcggctttatctgacgcaatggcaagcacgcaatctatcttgttggatacaggtgcttcattaacacggcacattgcacaaaaatcacgcgctgatgccgaaaaaaacagcgtttggatgtcgaacatcggttatggccgtgattatgcttccgcacaatatcgccggtttagttcgaaacgcacgcaaacacaaatcggcattgaccgcagcttgtccgaaaatatgcagataggcggcgtattgacttactctgacagtcagcatacttttgatcaggcgagcggcaaaaatacttttgtgcaagccaacctttatggtaagtattatttaaatgatgcttggtatgtggccggcgatattggtgcaggcagcttgagaagccggttacaaacacagcaaaaagcaaactttaaccgaacaagtatccaaaccggccttactttgggcaatacgctgaaaatcaatcaattcgagattgtccccagtgcgggaatccgttacagccgcctgtcatctgcagattacaagttgggtaacgacagtgttaaagtaagttctatgtcagtgaaaacactgacggccggactggattttgcttatcggtttaaagtcggcaaccttaccgtaaaacccttgttatctgcagcttactttgccaattatggcaaaggcggcgtgaatgtgggcggtaattccttcgcctataaagcagataatcaacagaaatattcagcaggtgccgcgttactgtaccgtaatgttacattaaacgtaaatggcagtattacaaaaggcaaacaattggaaaaacaaaaatccggacaaattaaaatacagattcgtttctaa

SEQ ID NO: 61965 - DNA, 723 bp, Neisseria meningitidis; identical to SEQ ID NO: 42576

SEQ ID NO: 61966 - DNA, 2106 bp, Neisseria meningitidis
ttgacactctatgccgtagaagagctcaactacgacaaactagacagccaaaaaaggcgcagatttctcggcatcagctacagcaaagcacacgacaccaccacccaagtcatgaaaaccgcgctgccctcaagggtagttgcagaatctgccaatctgcaatcaggttgggataccaaactgcaaggcacacagtttgaaaccacactgggtggcgcaaccatacgcgcaggcgtaggtgagcaggcacgggcagatgccaagattatcctcgaaggcatcaaaaccacgatccacaacgaaaccgtgagcagcagcaaatctgctctatggcaaaaacaggcaggacggggcagtaacatcgaaaccttgcaattgccgagtttcaccggtcccgttgcgcccgtactgtccgcacccggcggctatatcgccgacatccccaaaggcaacctcaaaaccgaaatcgaaaaactcgccaaacagcccgagtatgcttatttaaaacagcttcaagttgcgaaaaacatcaactggaatcaggtgcagcttgcttacgataaatgggactacaaacaggagggcatgacacccgcagcagcagctgtcgtcgttatcgtcgtaactgtattgacctacggcgcactgtccgccccggcagccgccggaacggcgggcgcggcaggcgcaggagcgggaggagccgcagcaggaacggcagccggaactggagtagcagcaggaacggcagccacaaccggagtagcagcaggcacatcagctgcagctatcaccacagccgcaggcaaagccgcactggccagtctcgccagccaagccgcagtttccctcatcaacaacaaaggagacataaaccataccctgaaagaactgggcaaaagcagcaccgtcagacaggccgccaccgccgccgtaaccgcaggcgtactgcagggcataagcgggctgaacacccaagcagccgaagccgtcagcaaacattttcacagtcccgcagcaggcaaactgaccgctaacctgatcaacagcaccgctgccgcaagtgtccataccgccatcaacggcggcagcctaaaagacaacttgggcgatgccgcactgggtgcgatagtcagtaccgtacacggagaagtagcgagcaaaatcaaatttaatctcagcgaagactacattgcccacaagatagcccatgccgtagcaggctgtgcatcggcggtagcaaataaaggcaaatgtcgggacggcgcaatcggcgcggcagtcggcgagatggtgggagaaaccctgttggacggacgcgatgtaggcaaactgtcaccccaagaacgccaaaaagtcatagcctactcgcagattatcgcaggcagcgtagtggcattggttaaaggggatgtgaatacggcggcgaatgcggctactgtggcagtggagaataatagtcttttagctcgcaggagggtaaatatacgttggactccgcgacaagaattggaacatgaatatgccattcttgaaatccaggccattaccaatcaaatccgaaggctggatccgaaatttaacgggattgctattctgaggactcctggagagccgtggacaagacatgatgtacaaacatacaggcaatattataatcaattaagggaatccagaggctttgctgttgacccaatttatagaatcaggataaacaacggcaatgaatttaaccgtatcatgtcatcaaaatacccttataatgagctttatgtagccaatcctaaatcggcgacggggtattttagggtagattcgtataatcctgcgacagaggaaattatttcaagaaaatttacccaattttctcaaatccaagaaagtacggggattggttatatcaaggaggctgttagaaaatatagccctggtgctgtcatttccaatgttccaagtacacctactacgataagaggaagaaagcttgaaggaaaacttattttagaagttcctgctcaggtcaatccaattccacaatctgtattaagggcggcacaagaagaaaatgttatcattagagatacaacaggaaggatttacaaatga

SEQ ID NO: 61967 - DNA, 276 bp, Neisseria meningitidis; identical to SEQ ID NO: 38139

SEQ ID NO: 61968 - DNA, 510 bp, Neisseria meningitidis; identical to SEQ ID NO: 42226

SEQ ID NO: 61969 - DNA, 1056 bp, Neisseria meningitidis; identical to SEQ ID NO: 55146

SEQ ID NO: 61970 - DNA, 1404 bp, Neisseria meningitidis
atggatactacattgaaaaccaccttgacttctgttgcagcagccttcgcattatccgcctgcaccatgattccccaatacgagcagcccaaagtcgaagttgccgaaacgttcaaaaacgataccgccgacagcggcatccgtgcggtcgatttaggttggcatgactattttgccgacccgcgcctgcaaaagctgatcgacatcgcactcgagcgcaataccagtttgcgtaccgccgtattgaacagcgaaatctaccgcaaacaatacatgattgagcgcaacaacctcctgcccacgcttgccgccaatgcgaacgactcgcgccaaggcagcttgagcggcggcaatgtaagcagcagctacaaagtcggactgggtgcggcatcttacgaactcgatctgttcgggcgtgtacgcagcagcagcgaggcggcactgcaaggctatttcgccagcaccgccaaccgcgatgcggcacatttgagcctgattgccaccgttgccaaagcctatttcaacgaacgttacgccgaagaagcgatgtctttggcgcaacgtgttttgaaaacgcgcgaggaaacctacaagctgtccgaattacgttacaaggcaggcgtgatttccgccgtcgccctacgtcagcaggaagccctaatcgaatctgccaaagccgattatgcccatgccgcgcgcagccgcgaacaggcgcgcaatgccttggcaaccttgattaaccaaccgatacccgacgacctgcccgccggtttgccgttggacaagcagttttttgttgaaaaactgccggccggtttgagttccgaagtattgctcgaccgtcccgacatacgcgccgccgaacacgcgctcaaacaggcaaacgccaatatcggtgcggcacgcgccgcctttttcccatccatccgcctgaccggaaccgtcggtacgggttctgccgaattgggtgggttgttcaaaagcggcacgggcgtttggtcgttcgcgccgtctattaccctgccgatttttacctggggtacgaacaaggcgaaccttgatgtagccaagctgcgccaacaggcacaaatcgttgcctatgaatccgccgtccaatccgcatttcaagacgtggcaaacgcattggcggcgcgcgagcagctggataaagcctatgacgctttaagcaaacaaagccgcgcctctaaagaagcgttgcgcttggtcggcctgcgttacaagcacggcgtatccggcgcgctcgacttgctcgatgcggaacgcagcagctatgcggcggagggtgcggctttgtcggcacaactgacccgcgccgaaaaccttgccgatttgtacaaggcactcggcggcggattgaaacgggatacccaaaccgacaaataa

SEQ ID NO: 61971 - DNA, 633 bp, Neisseria meningitidis; identical to SEQ ID NO: 54518

SEQ ID NO: 61972 - DNA, 1185 bp, Neisseria meningitidis
atggctaaggaaaaattcgaacgtagcaaaccgcacgtaaacgttggcaccatcggtcacgttgaccatggtaaaaccaccctgactgccgctttgactactattttggctaaaaaattcggcggtgctgcaaaagcttacgaccaaatcgacaacgcacccgaagaaaaagcacgcggtattaccattaacacctcgcacgtggaatacgaaaccgaaacccgccactacgcacacgtagactgcccgggccacgccgactacgttaaaaacatgattaccggcgccgcacaaatggacggtgcaatcctggtatgttccgctgctgacggccctatgccgcaaacccgcgaacacatcctgctggctcgccaagtaggcgtaccttacatcatcgtgttcatgaacaaatgcgacatggtcgacgatgccgagctgttggaactggttgaaatggaaatccgcgacctgctgtccagctacgacttccccggcgacgactgcccgattgtacaaggttctgcactgaaagccttggaaggcgatgccgcttatgaagagaaaatcttcgaactggctgccgcattggacagctacatcccgactcccgagcgtgccgtggacaaaccgttcctgctgcctatcgaagacgtattctctatttccggtcgtggtacagtagtaaccggtcgtgtagagcgcggtatcatccacgttggtgacgagatcgaaatcgtaggtctgaaagaaactcaaaaaaccacttgtaccggtgttgaaatgttccgcaaactgctggacgaaggtcaagcaggcgacaacgtaggcgtattgctgcgcggtaccaaacgtgaagacgtagagcgtggtcaagtattggctaaaccgggtacaatcactcctcacaccaagttcaaagcagaagtatacgtactgagcaaagaagagggtggccgccataccccgttcttcgccaactaccgtccgcaattctacttccgtaccaccgacgtaaccggcgcggttactttggaagaaggtgtggaaatggtaatgccgggtgaaaacgtaaccatcaccgtagaactgattgcgcctatcgctatggaagaaggtttgcgctttgcgattcgcgaaggcggccgtaccgtgggtgccggcgtggtttcttctgttatcgcttaa

SEQ ID NO: 61973 - DNA, 966 bp, Neisseria meningitidis; identical to SEQ ID NO: 54620

SEQ ID NO: 61974 - DNA, 1344 bp, Neisseria meningitidis; identical to SEQ ID NO: 55605

SEQ ID NO: 61975 - DNA, 126 bp, Neisseria meningitidis; identical to SEQ ID NO: 42246

SEQ ID NO: 61976 - DNA, 630 bp, Neisseria meningitidis; identical to SEQ ID NO: 44175

SEQ ID NO: 61977 - DNA, 1056 bp, Neisseria meningitidis; identical to SEQ ID NO: 54922

SEQ ID NO: 61978 - DNA, 945 bp, Neisseria meningitidis; identical to SEQ ID NO: 54346

SEQ ID NO: 61979 - DNA, 630 bp, Neisseria meningitidis; identical to SEQ ID NO: 40769

SEQ ID NO: 61980 - DNA, 1404 bp, Neisseria meningitidis; identical to SEQ ID NO: 54458

SEQ ID NO: 61981 - DNA, 681 bp, Neisseria meningitidis; identical to SEQ ID NO: 55189

SEQ ID NO: 61982 - DNA, 2385 bp, Neisseria meningitidis; identical to SEQ ID NO: 56014

SEQ ID NO: 61983 - DNA, 1014 bp, Neisseria meningitidis; identical to SEQ ID NO: 36441

SEQ ID NO: 61984 - DNA, 486 bp, Neisseria meningitidis
atgattcaaatcggcatcatcatgggcagcaacagcgattggcccgttatgcggcaggcagcgcagtttcttgaagagttcggcgtagaatatgaggcgcgcgtcgtttccgcacaccgcaccccggatttaatgttccaatacgctgaaaccgcacgggagcgcggcatcaaagccattatcgcgggcgcgggcggcgcggcgcacctgcccggcatggttgccgccaagaccaccgtccccgttttgggcgtacccgtccccagcaaatacctgcgcggcgaagattcgcttttatcgattgtacaaatgcccaaaggcgtacccgtcgccacattcgccatcggcgaggcaggcgcggcaaatgccgcattgttcgccgtttccatgctcgccaacgaaacccccgaactggcgcaaaaactggcagacttccgagccaaacaggaacaggctgttttgagtatggaattggaacagatttaa

SEQ ID NO: 61985 - DNA, 1188 bp, Neisseria meningitidis; identical to SEQ ID NO: 54494

SEQ ID NO: 61986 - DNA, 1677 bp, Neisseria meningitidis
atgagcttcaaaaccgatgccgaaatcgcccaatcctccaccatgcgcccgattggcgaaattgccgccaagctgggtctgaatgccgacaacattgagccttacggtcattacaaggcgaaaatcaatcctgccgaagcgttcaaactgccgcaaaaacagggcaggctgattttggttaccgccattaatccgactccggcgggcgaaggcaaaaccaccgtaaccatcggtttggcggacgcgttgcgccacatcggcaaagatgccgtgattgccctgcgcgaaccttctctggggccggtgttcggcgtgaaaggcggcgcggcaggcggcggctatgcccaagttttgccgatggaagacatcaatctgcactttaccggcgacttccacgccatcggtgcggcgaataacctgctcgccgccatgctcgataaccatatctaccaaggcaacgagttgaacatcgatccgaaacgcgtgctgtggcggcgcgtggtcgatatgaacgaccgccagttgcgcaacatcatcgacggcatgggcaaacctgttgacggcgtgatgcgtcctgacggtttcgacattaccgttgcttccgaagtgatggcggtattctgccttgccaaagacatcagcgatttgaaagagcgtttgggcaacatccttgtcgcctacgccaaagacggcagccccgtttacgccaaagatttgaaagcacacggcgcgatggcggccctgctcaaagatgcgattaagcccaacttggtacaaaccatcgaaggcactccggccttcgtacacggcggcccgttcgccaacatcgcccacggctgcaactccgtaaccgcaacccgtctggcgaaacaccttgccgactacgccgtaaccgaagcaggcttcggcgcggatttgggtgcggaaaaattctgcgatatcaaatgccgtctggcggatttaaaacctgatgcggctgttgtcgtggctactgtccgcgctttgaaatacaacggcggcgtggaacgcgccaacctcggcgaagaaaatttagacgctttggcaaaaggtctgcctaatctgctgaaacacatttccaacctgaaaaacgtattcggactgcccatcgtcgttgcgctcaaccgcttcgtgtccgactccgatgccgagttggcgatgattgaaaaagcctgtgcggaacacggcgttgaagtttccctgaccgaagtatggggcaaaggcggcgcgggtggtgcagacttggcgcacaaagtcgttaacgccatcgaaaaccaaccgaacaacttcaattttgcctacgatgtcgagttgggcatcaaagacaaaatccgtgcgattgcccaaaaagtgtacggcgcggaagatgttgatttcagcgcggaagcgtctgccgaaatcgcttcactggaaaaactgggcttggacaaaatgccgatctgcatggcgaaaactcaatactctttgagtgacaacgccaaactgttgggctgccccgaaggcttccgcatcgccgtgcgcggcatcaccgtttccgccggcgcgggcttcatcgtcgcgctgtgcggcaatatgatgaagatgccgggtctgccgaaagttccggccgccgagaaaatcgatgtggacgaacacggcgtgattcacggcttgttctga

SEQ ID NO: 61987 - DNA, 933 bp, Neisseria meningitidis; identical to SEQ ID NO: 55401

SEQ ID NO: 61988 - DNA, 1008 bp, Neisseria meningitidis
atgagcaccttcttccagcaaaccgcccaagccatgattgctaaacacatcaaccgcttcccgctattgaagttggaccaggtgattgattggcagccgatcgaacagtatctgaatcgtcaaagaacccgttaccttagagaccaccgcggccgtcccgcctaccccctgttgtccatgttcaaagccgtcctgctcggacaatggcacagcctctccgatcccgaactcgaacacagcctcattacccgcatcgatttcaacctgttttgccgctttgacgaactgagcatccccgattacagcaccttatgccgctaccgcaactggctggcgcaagacgacaccctgtccgaattgctcaaactgattaactgccaactgaccgaaaaaggcttaaaagtagagaaagcatccgccgctgtcgttgatgccaccattattcagaccgccggcagcaaacagcgtcaggccatagaagtcgatgaagaaggacaaatcagcggccaaaccacaccgagtaaggacagcgatgcccgttggataaagaaaaacggcctctacaaactcggttacaaacaacatacccgtaccgatgcggaaggctatatcgagaaactgcacatcacccccgccaatgcccatgagtgcaaacacctgccgccgttgttggaaggactgcccaaaggtacgaccgtctatgccgacaaaggctatgacagtgcggaaaaccggcaacatctggaagagcgtcagttgttagacggcattatgcgcaaagcctgccgcaaccgtccgctgacggaaacgcaaaccaaacataaccgatatttgtcgaagatccgttatgtggtcgaacaaagcttcggtacgctgcaccgcaaattccgctatgcgcgggcagcctatttcgggctgattaaagtgagtgcgcaaagccacctgaaggcgatgtgtttgaacctgttgaaagccgccaacaggctaagtgcgcccgctgccgcctaa

SEQ ID NO: 61989 - DNA, 456 bp, Neisseria meningitidis
atggatttgcgcaaattaaaaaaactgattgatttggttgaagaatcgggtatcgccgaaatcgaagttaccgaaggcgaagaaaaagtccgcatcacccgaaccatcgccgccgcacccgtttacgccgcgcccgtacctgccgccgcgccggccgtaacgcctgccgccgcacccgttgcggcatccgcgcccgccgccgcacctgccgcccgcgatttgtccgacgcgcaaaaatcacctatggtcggcacgttctaccgcgcacccggcccgaatgccgcgccttttgtcgaagtcggccaacaggttaaagccggcgacacgctgtgcatcatcgaagcgatgaagctgatgaacgaaatcgaagccgaaaaatccggcacggtcaaagaaattttggtcgaaaacggtacgcccgtcgaattcggcgaaccgctcttcatcatcggataa

SEQ ID NO: 61990 - DNA, 303 bp, Neisseria meningitidis; identical to SEQ ID NO: 44727

SEQ ID NO: 61991 - DNA, 390 bp, Neisseria meningitidis
atgtggaaaattacgaaagagcaaggtcaagatttaagttttgcaacatattgcttattatcggcagcaattaatttgcaagaatttaaattatggttggagaaggttgtcttagatatgcctattgataatatacatttttatatttttgatttaattgatcttaaagaaggagtaggagatatttataatattttggattttgttccgaattcagacttatctaaagaccaagatgacgcattaacaggcattgccttcttaaggggtatagatgtctatgaccctcccgtttcaaaagaaaaagcattaaaagccttaaagaaacatcctgaaatttatcagaggtttcagcatttctttccgtttgtagaactgcccccgctttaa

SEQ ID NO: 61992 - DNA, 558 bp, Neisseria meningitidis; identical to SEQ ID NO: 56097

SEQ ID NO: 61993 - DNA, 759 bp, Neisseria meningitidis
atgattaccatccgcaacgtcagctaccgcatcggcacacgccccatcctcgacaacgtcagcctcgacatccccgaaggcggcattaccgccctcgtcggccccaacggtgcgggcaaatccaccctgttttcctttatggcgcggctgcgcccgcttgaaagcggcagcatcgcctaccgcggcaaaaaccttgcctgcacccccaccgccgaactcgccaaaaccctgtccatcctcacccaagaaaacagcatcatgagccgcatcaccgtgcgcgacctgctcatgttcggccgctatccctaccatcaaggcagaccgactgccgaatgccgccgtatcgttaacggtgcaatcgaagaattccacctgcaagacttcgccgaccgctacctgaccgagctttccggcggacaacgccaacgcgccatgattgccatggtgttctgccagcgcaccgactacgttttgctggacgaaccgctgaacaacctcgacatgtatcatgcccgctccctcatgcaaatcctgcgccggctgaccgacgaacacaagcgcaccaccgtcgtcgtattacacgacatcaaccaggccgccgcctacgccgaccacgtcgtcgccatgaaaaacggccaagtcgccatgcagggcaagcccgacgacattttcaccgccgcaaacatcaaaaccctgttcgatatggatgtgtccgtcctcgaccaccaaagcaaaaaactcatcgtccaccatatctga

SEQ ID NO: 61994 - DNA, 1785 bp, Neisseria meningitidis; identical to SEQ ID NO: 55819

SEQ ID NO: 61995 - DNA, 2151 bp, Neisseria meningitidis
atgctcaccgatttagaaaaaaacgccatccgcgaccattaccaaaacatcggcaaaaacctgcccggtttccgtccgcgcgcttcgcagcgggaaatgattgcggcggttgccaacgctttttcgcggacgttggcgcgcgaagaaggcggcgagccgcccaagcgcgagggcgagagcatcgccgtaatcgaagggccgaccggcgtgggcaaatcgcttgcctacctgctggcgggcggcatcatggcgcagacgcgcggcaagcggctgattgtgagcagcgcaacggttgccttgcaggagcagttggtagaccgcgacctgccgtttttggtcgaaaaaagcggtttggaactgagcttcgcgcttgccaaagggcgcggccgctatctctgcccctacaaactctatcaactgacgcaaagcaatgcccagcaaaacctgctcggctttgaagcccccgccgtcttgtgggacagcaaacccaagcccgaagaattgaagctgctgcgcgacatcgccgacgaattttccgcccgacggttcaacggcgaccgcgacacttggccggaaaaaatcgatgacgcgatttggctcaaagtgaccaacgaccgccacggctgcctgaaaaccgcctgtcccaaccgtccggaatgtccgttttacctagcacgcgatgtcttggaaaccgtcgatgtcgtcgttgccaaccacgatcttctgcttgccgacatcagtatgggcggcggcgtgattctgcctgcgcccgaaaacagtttctattgcatagacgaagcgcaccacctgcccaaaaaagccctcagccgttttgccgccgaacattcatggaatattgccgtttggacgctggaaaaactgccgcagctgaccggcaaaattgccgcgcttaccgataaagccgaacttgccaacctggccgacgaagccgccgcatccttgctcgacagcctgcacgaatggcagttccatttggcggaagagccgtctttaagtatggggccgtctgaaaacgacagacgaaccaacagcgaaccgacttggctgtgggaagacggcaaaatccccgaaggcctcgaaaccaccgtttccaatacggccattgctgcgcgcagcctgctcaaacacgttgtcgggctgaacgatgcgctttccgccgcgcgccgcgaaaaagaacaggacggcgcgctcctcgaccgcctgaccggcgagttcggcatcttcatcgtccgtatcgaacaaatcagcgcggtttgggatttgctctccaccgtccccctcgaaggcgaagagccgctggcaaaatggataacccgccgtgccgacgacaaaaacgactacattttcaacgccagccccatcagcagcgcatcccaccttgccaacagcctgtggcggcgtgcggcaggcgcggtattgacttccgccaccctgcaatccttgggcaacttcaacctgatgctgcgccaaaccgggctgcaatggctgcccgaaaccaccaccctcgccctcaaaagcccctttgactttgaaaaacagggcgaactctacatcccccccatatacgccagccccaaagaccccgaagcccacaccgccgccgtcatcgaatggctgcccaagcttatttcgcccaccgaagccatcggcacgctcgtcttgttttcctcgcgcaaacaaatgcaggatgtcgccctgcgcctgcccggagactacctgccgctcttgctcgtacaaggcgaattacccaaagccgtcctcctgcaaaaacaccaccgggccatagaagaaggcaaagccagcatcatcttcggactcgacagtttcgccgaaggactcgacctgcccggcaccgcctgcgtgcaagtcatcatcgccaagctgccgtttgcgatgcctgacaaccccatcgaaaaaacccaaaaccgctggatagaacagcgcggcggcaatccttttattgaaatcaccgtccccgaagccggcatcaaactcatccaggccgtcggccgcctcatccgcaccgaacaagactacggccgcgtaaccatcctcgacaaccgcatcaaaacacagcggtacggccaacaattattggccggcctgccgccgtttaaaaggatagggtaa

SEQ ID NO: 61996 - DNA, 1008 bp, Neisseria meningitidis; identical to SEQ ID NO: 55419

SEQ ID NO: 61997 - DNA, 648 bp, Neisseria meningitidis; identical to SEQ ID NO: 37692

SEQ ID NO: 61998 - DNA, 219 bp, Neisseria meningitidis; identical to SEQ ID NO: 54559

SEQ ID NO: 61999 - DNA, 405 bp, Neisseria meningitidis; identical to SEQ ID NO: 54989

SEQ ID NO: 62000 - DNA, 1170 bp, Neisseria meningitidis; identical to SEQ ID NO: 55287

SEQ ID NO: 62001 - DNA, 309 bp, Neisseria meningitidis
atgaccctgaaaaccgatttattgcctaaaatcaacaacgaagattatcaacgcctcatcctcaaacacagtgcggaatttagcggtggcgaaatccgcctattgaacgaaatcctcgaaaaattcaatttcgacgttgttcaggcgcaggcattggcgcaagccgtcatgcagcaaatccgcttcgaccccaacgcctaccacatcgacagcgacgacgaagacaccaccggcatctgcccccactgcatcaacccgcctatgccgcccctgcgcgactatctcgtttggcgcgaaacccgcggataa

SEQ ID NO: 62002 - DNA, 891 bp, Neisseria meningitidis
atgaacagcccttttcacaacatcggcatcgtaacccgccccaacacgcccgacatccaagacaccgcacacacgctgattacctttttgaagcagcacggctttaccgtctatctcgacgaagtcggcataaaggaaggctgcatctatacccaagacaccgtcggctgccatatcgtcaacaagaccgaactggggcaatactgcgacctggtcgccgttttaggcggagacggcacctttctctccgtcgcccgcgaaatcgccctgcgcgccgttccgattatcggcatcaaccaagggcatttgggcttcctgacccaaattccccgcgaatatatgacggacaagctattgcccgttttagaagggaaataccttgccgaagagcgcatcctgattgaggccgcactcatccgcgaaagcaaaaccgccgaacgcgccatcgccctcaacgatgccgtcctctcccgtggcggtgccggacagatgattgagtttgaagtcttcgtcaatcgggaattcgtctatacccagcgttcggacgggctgattgtctccacccccaccggatcgaccgcctattcgcttgccgccggcggccccatcatgcaggcaggattacacgccttcacgctcgtccccatctgcccgcaatccatgaccaaccgccccatcgccattccagacacgtccgaaatcgaaatcctcgttacccaaggcggcgacgcgcgcgtccatttcgacggtcaaacccatatcgacgtgcaaaacctcgaccgcatcaccatccgccgctaccgaaaccccttacgcatcctacatccgaccgactaccaatatttcaaaaccctgcgccaaaaactgcactggggcgaacaattggtctga

SEQ ID NO: 62003 - DNA, 1239 bp, Neisseria meningitidis
atggctttttatgcttttaaggcgatgcgtgcggccgcgttggctgccgccgttgcattggtactgtcgtcttgcggtaaaggcggagacgcggcgcagggcgggcagcctgcgggtcgggaagcaccggctcccgtcgtcggtgtcgtaaccgtccatccgcaaaccgttgcgttgaccgtcgagttgccgggacgtttggaatcgctgcgtaccgccgatgtccgtgcgcaagttggcggcattatccaaaaacgcctgttccaagaaggcagttatgtccgtgccggacagccgctgtatcagatcgacagttccacttatgaagcaaatctggaaagcgcgcgcgcgcaactggcaacggctcaggcaacgcttgccaaagcggatgcggatttggcgcgatacaagcctttggttgccgccgaagccgtcagccggcaggaatacgatgctgcggtaacggcgaaacgttctgccgaggcaggtgtcaaagcagcacaggcggcaatcaaatctgccggcattaatctgaaccgttcgcgcattaccgcgccgatttccggctttatcggtcagtccaaagtttccgaaggtacgctgttgaatgcgggcgatacgaccgtgctggcaaccatccgccaaaccaatccgatgtatgtgaacgttacccagtctgcatccgaagtgatgaaactgcgccgtcagatagccgaaggcaaactgctggcggcggatggtgtgattgcggtcggcatcaaatttgacgacggcacagtttaccctgaaaaaggccgcctgctgtttgccgatccggccgtcaacgaatcgaccggtcagattaccctgcgcgccgccgtaccgaacgatcagaatatcctgatgcccggcctgtatgtgcgcgtgctgatggaccaagtggcggtggataacgcatttgttgtgccgcagcaggcggtaacgcgcggtgcgaaagataccgtgatgattgtgaatgcccaaggcggtatggaaccccgcgaggtaacggttgcgcaacagcagggtacgaattggattgttacgtcgggtctgaaggacggggacaaggtggttgtggaaggcatcagtatcgccggtataacgggtgcgaaaaaggtaacgcccaaagaatgggcgccgtctgaaaaccaagccgccgcgcctcaatccggcgttcagacggcatctgaagccaaaactgcttctgaagcggaataa

SEQ ID NO: 62004 - DNA, 471 bp, Neisseria meningitidis
ttgaacattaccgttttggcagtcggcaccaaaatgccgcgctgggttgatgaggccgtcgccgaatacgccaaacgcttcggacgcgacgtcgcctacgcactcaaagaaatcaaacccgaaaaacgcggcgcgggcgtgaatgccgcccaaggtatggcggcggaagaaaaacgcatccttgaagccgttccgcaaggcgcgttccttgtcgttcttgacgaacgcggcaaagcgccgacctccgtcgagctggcggaacacctcaaaagctggcggcaaaacggcgaacacgtctgcttcgtcatcggcggcgcggacggcatgaccgaccgcctcaaacaacaagcccgcatgatgatgcgcctgtccagcctcaccctgccgcacggcatggtgcgcgtccttctgaccgagcagctctaccgggccgtttccatcctgcacaaccatccttatcatcgggaataa

SEQ ID NO: 62005 - DNA, 3216 bp, Neisseria meningitidis
atgcccaaacgtaccgacctaaaatccatccttatcatcggcgccggccctatcgttatcggtcaggcctgcgaatttgactattcgggcgcacaggcctgcaaggctttgcgtgaagaaggctataaagtcattttggtaaactccaaccccgccaccatcatgaccgaccctgaaatggcggatgttacctacatcgagccgattatgtggcagacggtggagaagattatcgccaaagagcggcccgatgcgattctgcccacgatgggcggccagaccgcgctgaactgtgcgctggatttggcgcgcaacggcgtgctggcgaaatacaacgtcgagttaatcggcgcgacagaagacgcgattgacaaggcggaagaccgtggccgctttaaagaagcgatggaaaaaatcggtttgtcttgcccgaaatcttttgtctgccacacgatgaacgaagccttggcggcgcaagaacaggtcggcttcccgacgctgattcgtccgtctttcacgatgggcggttcgggcggcggcattgcctacaataaagacgagtttttggcgatttgcgaacgcggtttcgatgcgtcgcccacgcacgagctgctgattgagcagtccgtcctcggctggaaagagtacgagatggaggtggtgcgcgataagaacgataactgcatcatcatttgctcgattgaaaacttcgacccgatgggcgtgcatacgggcgactcgattacggttgcgccggcgcaaacattgacagacaaagaataccaaatcatgcgtaatgcttcgttggcagtattgcgcgaaatcggcgtggacacgggtggctcaaacgtgcagtttgcggtgaaccctgaaaacggcgagatgattgtgattgagatgaacccgcgcgtgagccgttcatccgcgctggcttccaaagcgacgggcttcccgattgcgaaggtggcggcgaaactggcggtcggctttacgctggacgagttgcgcaacgacatcaccggcggcaaaacccccgcgtcattcgagccgtccatcgactatgtggtaaccaaaatcccgcgttttgcgtttgaaaaattccctgccgcagacgaccgcctgaccacgcagatgaaatcggtgggcgaagtgatggcgatgggacgcacgattcaggaaagtttccaaaaagccctgcgcggcttggaaacaggcttgtgcggcttcaatccgagaagctccgacaaagcggaaatccgccgcgaactggcaaaccccggccccgagcgcatgctgtttgtggcagacgcgttccgcgcgggcttcacgccggaagaaatccacgaaatctgcgccatcgacccttggttcttggcgcaaatcgaagacttggtgaaagaagaaaaatcggtttcagacggcattttgagtgatttggatttcgccgccctacgccgtctgaaacgcaaaggcttctccgacaaacgcatcgcgcagcttttgggcgtaaaagaaaaagaagtgcgcgaacaccgctacgcgctgaagctgcatccggtttacaaacgcgttgacacctgcgccgccgagttcgccaccgaaaccgcctatctttactccacttacgaagaagaatgcgaatcccgtccttccgaccgtaaaaaagtgatgattctcggcggcggcccgaaccgcatcggtcagggcatcgagtttgactactgctgcgttcacgccgcgctcgccctgcgcgaatccggttttgaaacgattatggtcaactgcaacccagaaaccgtgtccaccgacttcgacaccagcgaccgcctctatttcgagccgctgacattggaagacgtgttggaaatcgtccgcaccgaaaacccgtggggcgtgattgtgcattacggcggtcaaaccccgctcaaactcgccaacgcgctggttgaaaacggcgtaaacatcatcggcacgtccgccgacagcatcgacgccgccgaagaccgcgaacgcttccaaaaagtgttgaacgacttaggtctgcgccaaccgcccaaccgcatcgcccacaacgaagaagaagcactcgtcaaagccgaagaaatcggctatccgctggtcgtgcgcccgtcttatgttttgggcggacgcgcgatgcagattgtccactctgccgaagccttgcaaaaatacatgcgcgaagccgtgcaggtttccgaagacagccccgtgttgctcgatttcttcctcaacaacgcgattgaagtggatgtggactgcgtttcagacggcaaagacgtggttatcggcggcatcatgcagcacgtcgaacaggcgggcatccactccggcgactccggctgctcgctgccgccctactccttaagcgaagaaatccaagacgaaatccgccgccaaactaaagcgatggcgtacgcgctgggcgtggtcggactgatgaacgtgcagtttgccgtacaagacggcgtggtgttcgtattggaagtgaacccgcgcgccagccgcaccgtgcccttcgtctccaaagccaccggcgtgccgctcgccaaagtcggcgcgcgctgcatggcaggcatttccctgaaagaacaaggcgtggaaaaagaagttgtccccgatttctatgccgttaaagaagccgtgttcccattcatcaaattcccgggcgtggatacgattttgggaccggaaatgcgctccaccggcgaagtcatgggcgtgggcgcaagctttggcgaagcctactacaaagcccaactcggcgcgggcgaacgcctcaacccgaccggcaaaatcttcctctccgtgcgcgaagaagacaaagaacgcgtcattaaaaccgccaaaaacttccaagccttaggctacggcatctgcgccacgcgcggcacggcgcaatacctgaccgaacacgggctgattgtacaaaccatcaataaagtccccgaaggccgcccgcacatcggcgacgcgctgaaaaacggcgaaatcgcactggtcgtgaataccgtttccagcgatccgcaatccgtgtccgacagccacatcatccgccaaagcgcattgcagcaacgtgtgccgcaatacaccactactgcgggcggcgaagcgatgagcgaaggcgcgaaaagccgcgaccacttgggcgtgtacagcgttcaagaactgcacgggcgtttgaaaaaccgcagctga

SEQ ID NO: 62006 - DNA, 510 bp, Neisseria meningitidis; identical to SEQ ID NO: 54807

SEQ ID NO: 62007 - DNA, 312 bp, Neisseria meningitidis; identical to SEQ ID NO: 42205

SEQ ID NO: 62008 - DNA, 786 bp, Neisseria meningitidis
gtgaaacacatcagttcgaccaataatgaacacatccggcacctgcaccgcctgttgtcgcaaggaaagttcagacggcaatacgcccaaaccgttttggagggcgtgcacctgcttcaggttttcctgcaatccggcagaaaaccggtcggggtatatattcccgagggcaaaatgccgtctgaagaagtccgcaggctgagggcggttgtgccggaaggcaaggttttttccgtttcagacggcatattgaaaaaaatcagcagcttgacttgtgcggatgatgtgcttgcgctgattgatattccggatgcgggtgctttgcctgccggcggcgactgtgtggttttggacggcgtgcaagatccgggcaatgtcggcaccgtcttacggagtgcggcggcggcaggggtaggtacggtcgttttgggcaggggttgcgcggacgcgtggtcgcccaaggtattgcgcgcggggatgggcgcgcatttcttgtcgggcatttatccgcaggcggatttggaaatatggttggcgcgctataaaggccgtgtgtttgccaccgccttgcgcgaggaaaagcaggcggttttgtacggcgaagatttgtgcggaccgacagcctgggtgtttggcaacgaaggcgcgggggtcggtaaagcggttttggacagggcggacaagtgtgtcaggattccgatgcacgatgcaaccgagtctttaaatgtcgcgatggcggcgacaatctgcctgtttgaacagatgcggcagcggtcggcgtattga

SEQ ID NO: 62009 - DNA, 672 bp, Neisseria meningitidis; identical to SEQ ID NO: 37112

SEQ ID NO: 62010 - DNA, 1446 bp, Neisseria meningitidis
atgaaattgcctattcaaaaattcatgatgctgtttgcagcggcaatatcgttgctgcaaatccccattagtcatgcgaacggtttggatgcccgtttacgcgatgatatgcaggcaaaacactacgaaccgggtggtaaataccatctgtttggtaatgctcgcggcagtgttaaaaatcgggtttacgccgtccagacatttgatgcaactgcggtcggccccatactgcctattacacacgaacggacagggtttgaaggcattatcggttatgaaacccatttttcaggacatggacatgaagtacacagtccgttcgataatcatgattcaaaaagcacttctgatttcagcggcggtgtagacggtggttttactgtttaccaacttcatcggacagggtcggaaattcatccggaggatggatatgacgggccgcaaggcagcgattatccgccccccggaggagcaagggatatatacagctattatgtcaaaggaacttcaacaaaaacaaagactaatattgtccctcaagccccattttcagaccgttggctaaaagaaaatgccggtgccgcctctggttttttcagccgtgcggatgaagcaggaaaactgatatgggaaagcgaccccaataaaaattggtgggctaaccgtatggatgatattcgcggcatcgtccaaggtgcggttaatccttttttaatgggttttcagggattgggagttggggcaattacagacagtgcggtaaacccggtaacctatgcggcagcacggaaaactttacagggtattcacaatttaggaaatttaagtccggaagcacaacttgcggccgcaaccgcattacaagacagtgcttttgcggtaaaagacagtatcaactctgccagacaatgggctgatgcccatccgaacattacagctactgcccaaactgccctttccgtagcagaggccgcaactacggtttggggcggtaaaaaagtagaacttaacccgaccaaatgggattgggttaaaaataccggctataaaaaacctgctgttcgccttatgcagactgtagatggggagatggctgggggaaataagccaccgaaaccaagtacgcagcaacactctacacactctgataacaatataggcttacctgccccatatgttaaacctgatacatctatttctccgacaggaacaatttatgtagacagcaaaggaaatgcaataccaacaccaataggcggttatataacaggttcgcctgatgctcgttttatccaagtccgagatagtaatggaaacttgactggagccagaatagatgatgctcatcatgcaaatacccatcaagacccacgcgcacttacaggacacgcacatgtaccaggagttacaaatgatgacggaaccccatggttacccatcaaataa

SEQ ID NO: 62011 - DNA, 1968 bp, Neisseria meningitidis
gtggggaacacctttaaatcaatccttgtctgggtcgccttgggtatcggcctgatggctgcgttcaacgctttagacggtaaaaaagaagacaacgggcaaatcgaatattctcagttcatccaacaggtcaacaacggcgaagtatccggcgtcaacatcgaaggatccgtcgtcagcggctacctgattaagggcgagcgcaccgacaaaagcaccttcttcaccaacgcgcctttggacgacaacctgattaaaacactgctcgacaaaaacgtccgtgtaaaagtaacgccggaagaaaaaccgagcgcgctggctgccctgttttacagcctgctgcccgtcctgctgctgattggcgcgtggttctactttatgcgtatgcagacgggcggcggcggaaaaggcggcgcattctcattcggcaaaagccgcgcacgcctgctggacaaagatgccaacaaagtgacctttgccgatgtcgccggctgcgacgaagccaaagaagaagtgcaggaaatcgtcgattacctcaaagcaccgaaccgctatcaaagcttgggcgggcgcgtgccgcgcggcatcctgctggcgggcagcccgggtacgggtaagacgcttttggcaaaagccattgcaggcgaagccggcgtgccgttcttcagcatttcaggttccgactttgtcgaaatgttcgtcggtgtcggtgcgagccgcgtccgcgatatgttcgagcaggcgaagaaaaacgccccctgcatcatctttatcgacgagattgacgcagtcggccgccaacgcggcgcaggtttgggcggcggcaatgatgagcgcgagcaaacattaaaccaattgttggttgaaatggacggttttgagagcaatcagactgtaattgtgattgcggcaaccaaccgccccgacgtactcgatcctgcgctgcaacgccccggccgtttcgaccgccaagtcgtcgtccccctgccggacatccgggggcgcgaacagattttgaacgtccattctaaaaaagtgcctttggacgaatctgtggatttattgtccctcgcgcgcggcacgccgggtttttccggtgcggatttggcgaacttggtcaacgaagccgccctgtttgccggccgccgcaataaagtcaaagtcgatcagagcgattttgaagacgccaaagacaaaatctatatgggtccggaacgccgcagtatggtgatgcacgaagacgaaaaacgtgcgacggcgtatcacgaatccggacacgcgattgttgccgaaagcctgccctttaccgaccccgtccacaaagtaaccattatgccgcgcggacgtgcgctgggtctgacttggcagcttccggagcgcgaccgcatcagtatgtataaagatcagatgttgagccagctctccatcctgttcggcggacggattgccgaagacatcttcgtcggacgcatctccaccggcgcatcaaacgactttgaacgcgcaacccaaatggcgcgcgagatggtaacgcgctacggcatgagcgacaaaatgggcgtgatggtttatgcggaaaacgaaggcgaagtcttcttgggacgcagcgtaacccgttcgcaaaacatttccgagaaaacccagcaggacatcgacgcggaaatccgccggattttggacgagcagtatcagattgcctacaaaatcctcgatgaaaaccgcgacaagatggaaacgatgtgcaaagccctgatggaatgggaaaccatcgaccgcgatcaggtactggaaatcatggcgggcaaacaacccagcccgcccaaagattacagccacaacctgcgcgagaatgcggacgcggcggaagataacgcgccgcacgctccgactcgggaagaaaccgaagcacctgccccggcagacaccgcttcgacagagtccgagcagcagcctgaaaacaaggcttaa

SEQ ID NO: 62012 - DNA, 531 bp, Neisseria meningitidis; identical to SEQ ID NO: 48015

SEQ ID NO: 62013 - DNA, 642 bp, Neisseria meningitidis
atgaaagcctttaccaaaattaccgccatcgtcgccccgctcgaccgcagcaacgtcgataccgacgccatcatccccaaacaatttttaaaatccatcaaacgcagcggcttcggccccaatgcctttgacgaatggcgttacctcgaccacggcgaaccaggcatggacaacagcaaacgcccgttgaaccctgatttctcgctgaaccagccgcgttaccaaggcgcgcaaatcctgttgacgcgtaaaaacttcggttgcggctcttcacgcgaacacgccccttgggcattggacgactacggcttccgcgccgtcatcgcccccagcttcgccgacatcttctttaacaactgctacaaaaacggccttttgcctatcgtgttgaccgaagaacaggttgaccggcttttcaaagaagttgaagccaacgaaggctaccggctctccatcgaccttgccgggcaaaccctgaccacccccggcggcgaaacattagcattcgacattaccgaacaccgcaaacactgcctcttaaacggcttggacgaaatcggactgaccctgcaacacgccgatgaaattcacgcctttgaagaaaaacgccgccaaagccagccttggctgtttaacggttaa

SEQ ID NO: 62014 - DNA, 585 bp, Neisseria meningitidis
ttgtactgtctgcggcttcgtcgccttgtcctgatttttgttaatccactatatctgcatcagtttcatgaaacgcaagtcggaagcgtcaaacaactgattgcccattttgaccggctgattgacgaattggacaaacaaatcgacgaccacacccacacgcattttgacggcaaagcccaagtggcggagcaaatcaaaggcatcggttcgataacgacggctacgctgatggcgatgctgcccgaattggggcggctgtcgcacaaacggatagcgagtttggccggcattgccccgcacccgagggagagcggggaaaccaaattcaaaagccgctgctttggcggaaagtctgcggtacgtaaggcgctgtatatggctaccgtggcagcgacacgttttgaaccgcttattcgggatttctaccaacgcctgccgtccgagggtaagccgtataaggttgccgttacggcatgtatgcgcaaactgctgacgatatcgaatgcccggatgcgtgattattttgccgaaaacgataccgccgaaaacgataccgccgaaaacggtatccggacggcttga

SEQ ID NO: 62015 - DNA, 1065 bp, Neisseria meningitidis
atggaaaaagaattcaggatattaaatatcgtatcggccaagatttggggcgggggcgaacaatatgtctatgatgtttcaaaagcattgggactgcggggctgcacgatgtttaccgccgtcaataaaaataatgagttgatgcacagacgcttttccgaagtttcttccgttttcacgacacgccttcacacgctcaacgggctgttttcgctctgcgcgcttacccgctttattcggaaaaaccgcatttcccacctgatgatacacaccggcaaaattgccgccttatccatacttttgaaaaaactgaccggggtgcgcctgatatttgtcaaacacaatgtcgtcgccaacaaaaccgatttttatcaccgcctgatacagaaaaacacagaccgctttatttgcgtttcccgtctggtttacgatgtgcaaaccgccgacaatccctttaaagaaaaataccggattgttcataacggtatcgataccggccgtttccctccctctcaagaaaaacccgacagccgtttttttaccgtcgcctacgccggcaggatcagtccggaaaaaggattggaaaacctgattgaagcctgtgtgatactgcatcggaaatatcctcaaatcagactcaaattggcagggcacggacatccggattatatgtgccgcctgaagcgggacgtatctgcttcaggagcagaaccatttgtttcttttgaagggtttaccgaagacattgcttcgttttaccgccaaagcgatgtcgtggttttgcccagcctcgtcccggaggcattcggtttgtcattatgcgaggcgatgtactgccgaacggcagtgatttccaatactttgggcgcgcaaaaggaaattatcgaacatcatcaatcggggattctgctggacaggctgacacctgaatctttggcggatgaaatcgaacgcctcgtcttaaaccccgaagcaaaaaacgcactggcaacggcagggcatcaatgcgtcgccaaccgttttaccatcaaccatatcgccgacaaattattggatgcaatataa

SEQ ID NO: 62016 - DNA, 210 bp, Neisseria meningitidis; identical to SEQ ID NO: 39235

SEQ ID NO: 62017 - DNA, 591 bp, Neisseria meningitidis; identical to SEQ ID NO: 36437

SEQ ID NO: 62018 - DNA, 537 bp, Neisseria meningitidis; identical to SEQ ID NO: 55520

SEQ ID NO: 62019 - DNA, 402 bp, Neisseria meningitidis; identical to SEQ ID NO: 55387

SEQ ID NO: 62020 - DNA, 1338 bp, Neisseria meningitidis; identical to SEQ ID NO: 55394

SEQ ID NO: 62021 - DNA, 660 bp, Neisseria meningitidis; identical to SEQ ID NO: 44247

SEQ ID NO: 62022 - DNA, 1776 bp, Neisseria meningitidis
atgagtatcgtgctgcacggcgtggcggcgggcaaaggcattgccgtcggttgcgcccacctgattgcgcgcggtacggaggaagtgccgcagtatgatgttgcggaggcggacaccgatgccgaagccgaacgtttcgatgccgccgtcaaagccacgcgcaaagagttggaacagctccgcagcgcaattcccgaaaacgccccgaccgagttgggcgcgttcatctcgctgcacctgatgctcttgaccgatgttaccttgtcgcgcgaacccgtcgatattttaagggaacaaaaaatcaacgccgagtgggcattgaagcagcagagcgacaaactcgccgcccaattcgacaatatggacgatgcctatttgcgcgaacgcaagcaggatatgctgcaagtcgtccgccgcatccacaacaacctgatcgggcagggcaacgagttggaagttgccgacaacctgtttgacgaaaccgttctgattgcaaacgacctttcgcccgccgacacggttttgtttaaagagcagcgcattgccgccttcgttaccgatgccggcggccccaccgggcatacggcgattttgggcaggagcttggacatcccgtccgtcgtcgggctgcacaacgcgcgcaaactgattaccgaaggcgaaacggtcattgtggacggtatcaacggcgtgttgattatcgcgccggatgagtcggtgttgaacgaataccgccgccgtgcccgcgaataccgcagccacaaacgcgatttgaacaagctcaaaaaaaccgccgccgccaccgccgacggggtctgcatcgagcttgtgggcaatatagaatccgccgaagacgtgaaaccgctgcacaacctcggcgcagacggcatcgggctgttccgcagcgagtttctttacctgaaccgcgatacgatgccgtctgaagacgagcagtacgaagtgtacagcgcgattgtcaaaaaaatgaaaggcaaaagcgtaacgatacggacagtcgatttgggtgtggacaaaaacccgcgctggttcgggaaaaacagcacgcccaacggcagcctcaaccccgcgctgggcatgaccggcatccgcctgtgccttgccgaaccggtcatgttccgcacccagatgcgcgccatcctccgtgcggcggtacacggccccgtgcggatgatgtggccgatgattacctccgtatccgaagtgcgccagtgcctcatccacctcgacaccgcgcaacgccagcttgccgaacgcggcgatgccttcggtaaagtcggcatcggctgtatgattgaaattccgtctgccgcgctgaccgtcggcagtattttgaaactggtcgatttcatctccgtcggtaccaacgacctgattcaatacatcttgtccgtcgatcgcggcgacgacagcgtcagccacctctaccagcccggccatcccgccgtgctgaaaatgctgcaacacgtcatccgtaccgccaaccgcatggacaaagacgtatccgtatgcggcgagatggcgggcgataccgcgtttacccgcgttttattgggtatggggctgcgccgtttttccatgaaccccaacaacatcctgcccgtcaaaaacatcattctgcacagcaatgtcggacagctcgaaagcgatattgcgaaagtcatccgctgcgaagacgaagagaagtcggaaaagctgatcaaacagatgaacagcgtgtctgtcgaggaagaagccgacttcaaggggcggaaataa

SEQ ID NO: 62023 - DNA, 1362 bp, Neisseria meningitidis; identical to SEQ ID NO: 54822

SEQ ID NO: 62024 - DNA, 1098 bp, Neisseria meningitidis
ttggcggcaacgctggcaggcggcttctttttattcaccaaagatgatttctttcttttgtggaaatccgcgctgaccgccttgggtttcgcctctaacctgtattttgcaagggggaaggattatttcgatcccgcgcaggaagaaaagcccctgctgcacatctggtctttgtcggtcgaagaacaattttactttgtctttccgatactgctgctgcttgtcgcccgcaaaagcctgcgcgtacagttcggcttccttgccgcactgtgtgccttaagccttgccgcctcctttataccttccgcgctcgataaatattacctgccccacctgcgcgcctgcgaattactgataggatcgctgaccgccgtgtggatgcggtaccggcaacagcggaatctcgccgtcgggaaacggtatgccgccgtcggcgcattgttttccgcgtgcatactgtccgcctgcctgtttgcctattcggaacaaaccgcctatttcccaggccccgccgctttgattccctgtctggctgttgccgcgctgatttatttcaaccattacgaacacccgcttaaaaaatttttccaatggaaaatcaccgttgccgccggtttgatttcctattcgctttatctgtggcattggccgatattggcctttatgcgctatatcggcccggacaacctgccgccttattcgccggcggcagcgatcgtcctgactctagcgttttccctgatttcttatcactgcatcgaaaagccgtttaaaaaatggaaaggttcgttcgcacaatccgttttatggatttatgccttgcctatgctcattttgggggcgggctcgtttttcgcgatgaggctgccgtttatggcgcaatacgaccgcttggggctgacgcgttccaacacctcctgccacaacaataccggcaaacaatgcctatggggggatacggaaaaacagccggaactgctggttttgggcgattcccacgccgaccattacaaaacattcttcgatgccgtgggcaaaaaagaaaaatggtccgccacaatggtttccgccgacgcttgcgcctatgtggaaggctga

SEQ ID NO: 62025 - DNA, 681 bp, Neisseria meningitidis; identical to SEQ ID NO: 55623

SEQ ID NO: 62026 - DNA, 918 bp, Neisseria meningitidis; identical to SEQ ID NO: 55893

SEQ ID NO: 62027 - DNA, 702 bp, Neisseria meningitidis
atgagcgcgcgtgaaaatattttggcaaaactgaaaaaagccgatgccttgccgatggaagagcctgcggttttcgattattaccgcgaaaagggcgtttcttgggacagcgaagccgagcgtctgaaacattgggctgccgcaatgcgcgcggtcaaaaccgaaatttattgggtgacgaaaagcaattggatgcaggttttccgcgaagcggcagaaggcaagggtttgaaaaacatcctgctgcccttggcgaccgaacacggacaaattgcccgtgccgcattggcgggcagcaatatcgaaccgattgtcttcgagcgcgaaatcgatacttggaaaaccgagtttttcacgaacatcaatgcgggcttcagcggcgcgcaatgcggcatcgcccgcaccggcacgctgatgctgttttccagccccgaagaaccgcgtactttgagtctcgttccgcccgtgcatttctgcctgttcgatacgtccaagatgtacaacgagtttcacaatgccgtcgaaggcgaaaaactggtggaaaacggtatgccgaccaatgtattcctgatttccggcccgtccaaaaccgcagacatccaactgacgcttgcttacggcgcgcacggcccgcgcgatttggtcatcctcgccatcctgcccgaccacatttcccctgccgatttggaggaaaacgcatga

SEQ ID NO: 62028 - DNA, 2934 bp, Neisseria meningitidis
gtgccatcttcaataaaggacaaagacagggagcgcgaatatactcatcatccgtccagaggaggaggaggctctgtctcattcaacaataccgatacccttgtttcccaacaaagcggtactgccgtttttggcacagccacctacctgccgccctacggcaaggtttccggttttgataccgctaagctgaccgagcgcaacaatgccgttaattggattcatacgacccacccagggttgataggctacagctacgccggtgtcgtatgcagagacagcacaggctgtcccaaacttgtctataaaacccgattttccttcgataatcccgacttggcaaaaacaggaggcaggctggataggcacacagagccaagccgcgacaattcgcccatttacaaattgaaggatcatccatggttgggcgtgtctttcaatttgggcagcgacaataccgtcaaaaatggcaaatcatccagcaaattgatatcttcttttaatgaaaacaataataatcaaaccatcgtctctacgacagaaggtgaccctatttcccttggcgaccagcagcgcgaacataccgccgtggtctattatctgaacgccaaactgcacctgctggacaaaaaacagattcaaaatatcaccgacaaaacagtgcagttgggtgtcttgaagccgagcatcgatgtgaagacacaaaggacggggattgccggcattctagcttttcatgctcagtgggacattaaagataccgggcagattccagtcaagctcggcctgcagcaagtcaaagcaggccgctgcatcaataaaccgaaccccaatcccaacaaaaaagacctttcgccggcactgactgcccccgcgctgtggttcggacctgtgcaaaatggtaaggtgcagatgtattccgcttcggtttctacctaccccgacagttcgagcagccgcatcttccttcaaaatctgaaaagaaaaaccgaccccggcagacccggccgctattccctcgcaaccttgaataagtcggatattgaaagtcgaaagccgactttcacagggcggcaaacaatcatccgattggatggcggcgtacagcagatcaaactggataaaagcaatgaggccaccggtttaaatggaaataccaacaacaacactttcggcattgttaaggaatatagcgtcaatcctgagaccaatgagtggaaaaaagtgctgctgccttggacggttcggagttttagtaatgacaatgaatttgtaaaattcaacaaagaatcagacaaatacagccaaagataccgcatccgcgaaaacggcaacaacagcaagcgcgatttgggcgacatcgtcaacagccccatcgtggcggtcggcgggtatttggctacttccgccaacgacgggatggtgcatatcttcaaaaaaggcaacggcggggatgaccgcaactatagtctgaagctcagctacatccccggcacgatgccgcgcaaggatattgaaagcaaagactccaacctcgccaaagagctgcgcacctttgccgaaaaaagctatgtgggcgaccgctacggcgtggacggcggctttgttttgcgcaaagttgataacttaaacgggcaaaaccgcgtgtttatgttcggcgcgatgggctttggcggcagaggcgcatacgccttggatttgaccaaagccgacggcagtgacccgacaaaagcctctttgtttgatgtaaaagataacggcaataatggcaataatcgcgtggaattaggctacaccgtcggcacgccgcaaatcggcaaaacccacgacggcaaatacgccgctttcctcgcctccggttatgcgactaaagaaattaacagcacagacaataaaaccgcgctgtatgtgtatgatttggaaagcagcggcacgctgattaaaaaaatcgatgtacccggcggcaagggcgggctttcgtcccccacgctggtggataaagatttggacggcattgtcgatatcgcctatgccggcgatcgcggcggcaagatgtaccgctttgatttaagcaatcaagattctagtcaatggactgtacgcactatttttgaaggcacaaaaccgattacttccgcgcccgccatttcccaactgaaagacaaacgcgtggttatcttcggcacgggcagtgatttgagtgaggaggatgttgataataatgatatacaatctatttacggtatttttgacaatgacacagacacgggttttgcgcaagacgggctgggcaaagggctgctcgagcaaaagctggaaaaagacaaagacggcaaaacgctgtttttaagcgactacaaaaggtctgacggctcgggcgacaagggctgggtagtgaaattggaagccggacagcgcgttaccgtcaaaccgaccgtggtattgcgtaccgcctttgtaaccatccataaatatacgggtaatgacaaatgcggcgcggaaaccgccattttgggcatcaatactgccgacggcggcaagctgaccaagaaaagcgcgcgcccgattgtgccggaagccaatacggctgtcgcgcaatattccggccataagaaaacttccagcggcaaatccatccctataggttgtatggaaaaaggcaatgaaaccgtctgcccgaacggatatgtttacggcaaaccggttaatgtgcgttatctggatgaaaagaaaacagacggattttcaacaacggcagacggcgatgcgggcggcagcggtatagaccccgccggcaagcgttccggcaaaaacaaccgctgcttctcccaaaaaggggtgcgcaccctgctgatgaacgatttggacagcttggacattaccggcccgacgtgcggtatgaaacgaatcagctggcgtgaaatcttctactga

SEQ ID NO: 62029 - DNA, 777 bp, Neisseria meningitidis
atgaaaaattggtttgctgccttgctgttggcagtacccatgggtgcggcatttgcttcgggcggtcatgcacactatgagaaagtcgatatcgatttgcgcgaccaagtcagcctgcagcgcggcgcacaaatctttaccaactattgcctgtcctgccactcggcaagcggtatgcgtttcaaccgtttgaaagacatcggtttgactgacgaagaaatcaagaaaaacctgatgtttaccaccgataatgtcggcgatgtcatgcattcggcgatgaacccgaaagatgcggcaaaatggtttggtgctgctccgcccgatttgacattgattgcgcgttccaaaggtgcagactacctttacgcttatatgcgcggcttctataaagatccgacccgtccgagcggctggaacaatactgtattcgataaagtcggtatgccccacccgttgtgggaacagcaaggcgttcaagccgttgagttggatgccaaaggtcagccggttatggtaaaagacgaacacggcgagatgaagcctaagctgtattgggaatctaccggtttgcacagccgccgtctgcctaacggcaaagtgatccaaaaagagtacgacgcatatgtacgcgatttggtcaattaccttgtgtacatgggcgaacctgcacaactgcaacgcaaacgtataggctatgtcgtgatgattttcctatttgcggttatgctgcctttggcgtatttcctgaaaaaagaatattggaaagacgtacactaa

SEQ ID NO: 62030 - DNA, 930 bp, Neisseria meningitidis; identical to SEQ ID NO: 36354

SEQ ID NO: 62031 - DNA, 864 bp, Neisseria meningitidis; identical to SEQ ID NO: 39125

SEQ ID NO: 62032 - DNA, 369 bp, Neisseria meningitidis; identical to SEQ ID NO: 54842

SEQ ID NO: 62033 - DNA, 2526 bp, Neisseria meningitidis
atgaatccaaactcaaaacataacactaactttaccaatcttcttaaaccgtctgatagtgatataaaacaatttgccgcacaacacatccgccacctcaccgacctgctcaaccgctatgcctacgaatactacaccctcgacgcgcccagcgtacccgatgccgaatacgacaaattattccgcgagctcgaagcgttggaattaaaccatcccgagctcaaactgcccgacagtccgacccagcgcgtcggcggcgagcctttagcgggatttgccgaagtgcgccacgaagtgccgatgctgtcgctgaccaacgctttttccccgcaagatgaaaacggcgtgttcgaccatgccgaaatgtacgctttcgaccaacgcgtgcgcgacggtttggacggcggcaaacccgaatacgttatcgaacccaaattcgacggcctcgccatcagcctgctctaccgcgacggcgtattggtacaggcggcaacgcgcggcgacggcacaacgggcgaagacgttacccaaaacatcaaaaccgtcgccaacatccccctgcggctgcacggcgaaaatacgcccgaactcatcgaagtacgcggcgaagtactgatgcaaaaagccgattttgccgccctcaataaaagacaagccgaaaacgggcaaaaaccctttgccaatccgcgcaacgccgctgccggcagcctgcgccaactcgattcgcgcatcactgcgcaacgcaaactgcactttttcccctactccgtcgcccgccagcaaggcggtttcgtcgcggaagaacacatccaagaactcgcctatttccaagcactcggcttcagtctgccaaatggcaatttcggctgtttcaaaaatatcgacgaagtattggcgttttacgaacaaatgcagcaaaaacgccccgaactgccctacgaaatcgacggtatggtggtcaaagtcaacagcttggcgcaacagcgcgaactcggcttcatctcacgcgcgccacgctgggcgattgcccacaaattccctgccgaagaagccctgaccattgtcgaagcgattgacgtgcaaatcggcaggacgggcgcggtaacgccggttgcccgattacaacccgtattcgtcggcggcgtaaccgttaccaacgccaccctgcacaatcaggacgaagtttcccgaaaagacgtgcgcgtcggcgataccgtcgtcgtgcgccgcgctggagacgtgattcccgaagtcgtgcgtgtgatttttgaacgccgcccgatgcaggaaaccgccgttgctgtttcagacggcatcgggcatcggcaggacgatttgtttgccgaaacaccgtccgctaatcaaacccaatccgttccgctccacaagccctaccgcctgccgacccattgccccatctgccgcagcgaaatcgaacgcgaagaaggcgaagccgtcgcccgatgcagcggcggtatgctttgtcaggcacaacgcgcgcaaggcttaatccacttcgcctcgcgcaaagccatggacatcgacggcttgggtgaaaaacaaatcgaacagcttgtcgcccaagacctcgtccgccacttcgccgacctctaccgcctcgatattccgaccctgcaaaaaatgaaagaaacgacggacaaaaccgttgccgaatcggatcaaacgccgtctgaaggcagttcggtcggcgcgtcgggcaaacataaaaaacaaccggtcaagtgggcggaaaacatcctcgggggcatagaatccggcaaaacgcccgaactcgcgcgcttcctgttcgcgctcggcatccgccacgtcggcgaacgcaccgccaaaacgctggcgcaggcattcggcacattggaacgcgtccgccgcgcccccgaacccgtcctcgcctgcctgcccgacatcggtacggtagtggcgcattccattgcccacttcttcgcccaagccgaacagcaggcgatgatagacgaactgctcgccgcaggcgttgccccgcaaacccaagccgttaccatcccgcccgcccgccacgccgaaccgcaacgctggatcgcccgcctgcccgacttcaaaattagcgaaaacaaagcccaagccttatgggaactcgctggtaaaaacatagaaggtctacaaaacgacaaagccctccccgccgactggcaagcatggcgcagcgaaccacaaaacgccgccctactcgaaaacctgaaaaccttcttcgcgcaaatgccgtctgaagacgaggcggcgcaaggttcagacggcatcaataaagccgtagcaggcaaaacctttgtattaaccggcaccctgcccacgctcaaacgcgaccaagcccaatccctaatcgaagccgcaggcggcaaagtttccggcagcgtgtccaaaaaaaccgactacgtcgtcgccggagaagccgcgggcagcaagctggaaaaagccaatgccttgggcgtttccgtcctcagcgaagccgaactgcttaccctgctcggctga

SEQ ID NO: 62034 - DNA, 939 bp, Neisseria meningitidis
atgcttgaactgaacggactctgcaaacgcttcggcggcaaaacggttgccgacaacatctgcctgactgtcgggcgcggcaaaatactcgccgtactggggcggtcgggctgcggaaaatccaccctgctgaatatgattgcgggcatcgtccggccggacggcggcgaaattcagctgaacggggaaaacattacccgtatgccgcccgaaaaacgccgtatttcgctgatgtttcaagattacgcgctgtttccccatatgagtgcgctggaaaatgcggcattcggtttgaaaatgcaaaaaatgccgaaagccgaaaccgaacgccttgctatggcggcacttgccgaagtcggactggaaaacgaggcacaccgcaagcctgaaaaactttccggaggcgagaaacaacggttggcactggcacgcgctttggttgtccgcccttccctactgttgctggacgaatcgttttccagtttggacacgcatttgcgcggcacgctgcgccgtatgaccgccgaacgcatccgaaacggcggcatccctgccgttttggttacccattcgcccgaagaagcctgtacgacggcggacgaaatcgccgtgatgcacgaagggaaaatcctccaatacggcacgcccgaaaccttggttcaaacgcctgccgacgtgcaggtcgcccgactgatggggttgcccaacaccgacgatgaccgccatataccgcaacatgcagtgcgtttcgatcaagacggcatagcgtgccgcgtattgtcccgcacctgtttgcccgaatcgttcagcctgtccgtcctccatccggaacacggcatcctgtggctgaacctcgatatgcggcacgccggtgaaatatcgggaaacgatacggtacacatccgtatcgaagaccgggaaatcgtccgcttccgctga

SEQ ID NO: 62035 - DNA, 1161 bp, Neisseria meningitidis
ttgagcaaaatgacctgcatcgaagacttgcgccgcgttgccaagcgcaaaatgccgcgtatgttttacgattacatcgattcgggttcgtggacggaaacgacttatcgggaaaatacttcggatttcaaagacatccgcttccgtcaaaaagtattggtcaatatggagggacgcagccttgagactaaaatgatcgggcaggatgtgaaaatgccggtggcgattgcgccgacgggttttaccggcatggcacacgcagacggcgaaattttggcggcgcgggcggcggagaagttcggtattccgtttacgttgtccaccatgtccatctgctcgattgaagacgttgccgagaacaccagcgcgccgttttggtttcagctttatgtgatgcgcgaccgcgaatttatggaaaacctgattaagcgcgcgaaggatgccaaatgttcggcattggttttgaccgccgatttgcaggttttggggcaacgccacaaagacatcaaaaacggcctgtccgcgccgccgaaaccgaccatcgccaatttaatcaatctggcgaccaaaccggaatggtgcatgaaaatgctgaacacggaacgccgcacgttccgcaatatcgtcggacacgcgaagaacgtcggcgatttgtcttcgctgtcttcatggacttccgaacaattcgacccgcgcctgagctgggacgatgtggcgcgtattaaagatttgtggggcggcaagctgattatcaaaggcattatggaacccgaagacgcggaaaaagcagcgaaaagcggcgcggacgcattgattgtttccaaccacggcggccgacagctcgacgataccgtgtctgccatcaaagccttgcccgacatcgtcagcgcagtgggcagcgacatcgaagtttggatggacagcggtatccgcagcggtcaggatattttgaaggcgtgggctttgggcgcgaaaggtacgatgataggccgggcgtttctgtatggtttgggtgcgtatggtgaagaaggcgtaacccgtgcgctggaaatcctgtataaagaaatggatatatctatggcgtttacgggacaccgcgatattcaagatgtcgatgcttcgattttgagaggcaaagattggggcagggaaacggtttag

SEQ ID NO: 62036 - DNA, 126 bp, Neisseria meningitidis; identical to SEQ ID NO: 38379

SEQ ID NO: 62037 - DNA, 654 bp, Neisseria meningitidis; identical to SEQ ID NO: 44597

SEQ ID NO: 62038 - DNA, 447 bp, Neisseria meningitidis; identical to SEQ ID NO: 50949

SEQ ID NO: 62039 - DNA, 333 bp, Neisseria meningitidis; identical to SEQ ID NO: 55058

SEQ ID NO: 62040 - DNA, 1257 bp, Neisseria meningitidis; identical to SEQ ID NO: 54903

SEQ ID NO: 62041 - DNA, 279 bp, Neisseria meningitidis
atgcttgaaattgagattgtgtacgggctgcccgaccgacaggttttgaaaaccatgcagcttgccgagggaacaaccgtccgcgccgccgcactgcaaagcggtttggacggcatatttgaagatttaaacctgcattccgcgcctttgggcattttcggcaaagccgtcaaagacgacacgcccctgcgcgacggcgaccgcatcgaagtgtaccgcccgctgttgatcgaccccaaagaagcgcgccgcaaacgcgttcaaaatcaagaagaataa

SEQ ID NO: 62042 - DNA, 231 bp, Neisseria meningitidis; identical to SEQ ID NO: 38834

SEQ ID NO: 62043 - DNA, 645 bp, Neisseria meningitidis; identical to SEQ ID NO: 54864

SEQ ID NO: 62044 - DNA, 1986 bp, Neisseria meningitidis
atggctaaaaacaaccaatacagcgaatccagcatcaccgtcctcaaaggcttggagccggtcaaagaacgtcccggcatgtacacccgcaccgacagcccgacccacatctgtcaggaagtgattgataatgcggcggacgaggcgttgggtggtttcgcgactgcaatcgacgtgcaaattcatgaagacggttcgctttccgtccgtgataacggccgcggtattcccgtcggcctgcaccctgaagaaggcgtacccgtagtcgaactcgtgttcacccgtctgcacgcgggcggcaagttcaacaaaaaagacggcggcagcgcgtatgccttttcaggcggactgcacggcgtgggcgtatccgtcaccaacgccctctccacccgccttgaggtaacggtcaaacgtgaaggcaaaatccaccgtatcgtgtttgccggcggcgacgtggtcgaaccgttggcacaagtgggcaaatgcgccgtcaaagacagcggcaccgaagtgcgcgtctggccggacggcaaatattttgaaagcccgaattacagcattcccgaactcgaacgcctgctgcgtgccaaagccgtgctgctgccgggtgtgcgcgtttccctgacccgtccggtcaaaggcgaagacgaagcgcacacccaaacctggcactaccccgacggcctgaaaagctatctgaccgacctgattgccgacgcgcaagaagctgtgccgctgttctcttgcgaaaactacatttcagacgaacacaacggcgatttcagcatcggcgaaggagcggcgtttgccctgacttggctggaagaaggctcgtgtgccaacgaaagctatgtcaacctcatccccacccctttgggcggcacgcatgaagcaggcttgaaacaagccgtgttcaacgccgtcaacaatttcatcaatctgcacaacctcttgccgcgcggcgtgaaagtacaaagcgacgacgtgttcggcaaaaccgcctttgtcctctctgcccgtgtcctcgacccgcagttccaaggtcagaccaaagacaagctgaccaaccgcgacgcgctgaaacttgtcgccgctgtagcgggcgaccctttggaattgtggctgaaccaaaacgtggacttcggtaaaaaaattgccgaactcgccatccgtcaggcgcaggcgcggatgcgttcggttaagaaaatcgaaaagaaaaaaggcagcggcgtcgccgtcctgcccggcaagctgaccgactgcgaaagcgaagacatccgcgaaaacgaactcttccttgtcgaaggcgattccgccggcggctcagccaaactcgcccgcgacaaagccacccaggccatcctgcccctgcgcggcaaagtgctcaacagctttgaagtccaccccgaccagctcttcggcaacgccgaaatccacgacatttcagttgccatcggcgtcgatccgcacggcatcaacgaccatcccgatttaagcggcctgcgttacggcaaaatcgccatcctgtccgatgccgacgtggacggctcgcatattcaagttttgctgctgaccctgttctaccgccacttcccgaaactggtcgctgacggacacatctacgtcgcccagccgccgctgttccgcgtagatgtcaacgcacaaggtaaaagcaaacccgcccgcaaattctacgccctcgaccaaaacgaacttgacggcattttagagcggctgcaaaaagaaggcgttaaagaaactgcttattccatcagccgtttcaaaggcttgggtgagatgaacccagaccagctcaaagatactaccatgcaccccgacacccgccgcctgttgcaggtacaaatcccagaaggcgcggatgacgagacgcgcgacatcttcgtcaaactgatgggcaaaggcgaagccgccgcccgccgtgcctggatggaacgcgaaggcgatacggcggaactcgatatttga

SEQ ID NO: 62045 - DNA, 1245 bp, Neisseria meningitidis; identical to SEQ ID NO: 54870

SEQ ID NO: 62046 - DNA, 1386 bp, Neisseria meningitidis
atggtcagcatttttgatattttcaaaatcggtatcgggccttccagttcgcatacggtcggcccgatgaaggcagccgccgcctttgcggcaggtttggatgcacaggctgttcgcatcgtcatcgacatttacggctcgctcgcactgaccggatacggacacggtacatttgacgcgctgatgctcggtttggaaggcagcctgccgcacgacatcccgcttgccggcattcccgaacgcctcgaacgcatccgcacgcagcacatcctccggctcaacgggcaagaaatccgcttcatccccgaccgcgacctgaacatacgcggcaatcaagtgctgcccaaacaccccaacggcctgcgatttaccgcctatgcttcagacggcatcgtcttgaaagaacaggtttattactcgaccggcggcgggtttgtcgttaccggagaagatttcgagcggcagtcggaaacggaaaaaactgttccttatccttacaacagttgtgccgagctgcttgaccgatgccgtctgaaccggctcgacatctccgaagtcgtgttggcaaacgaagccgcgcttgccggatgcggcgaagccgaaatccgccgccgcgccgctgccgttgccgaggttatggaaggctgcatcaaacgcggcttgggtgcggacggcgaactgcccggcggattgaacgtccgccgccgcgccccgcagcttgccgccaagctcaaagtcctgcgcgaaaccgaaatcgtcaacacccagctctggccgatggtgtacgccatggcggtcaacgaagaaaacgccgccggcggacgcgtcgttaccgcaccgaccaacggcgcggcaggcatcattcccgccgtattgcactatttccgcaagttcaatccgcacgccacacaggaacgcgtcgaaaacttcctgctcaccgcaggcgcaatcggcatcctctacaagaccaacgcctccatttccggtgcggatgtcggctgtcagggcgaagtcggcgtagcgtgttcgatggcggcgggcgcatacgccgaagtcatcggcggcacgcccaaacaagtggaaaacgccgccgaaatggcgatggaacaccatttggggctgacttgcgaccccgtcggcggactggtgcaaatcccctgcatcgagcgcaacggcatcgccgccgaaaaagccctcaaactcggcacgctcgcgcttttagaagacggcacggacaaaaaagtctcgctcgacgaagtcatccgaaccatgctgcaaaccggccgggatatgaaggcgacctacaaagaaacctcgcttgccggactcgccgccacgctccggaaaaaagccgtccccgtatccgtgcgcgtggtcgagtgctga

SEQ ID NO: 62047 - DNA, 423 bp, Neisseria meningitidis; identical to SEQ ID NO: 40586

SEQ ID NO: 62048 - DNA, 213 bp, Neisseria meningitidis; identical to SEQ ID NO: 55102

SEQ ID NO: 62049 - DNA, 240 bp, Neisseria meningitidis
atgccccatacccttcccgatatttcccaatgtatcagacaaaatttggaacaatatttcaaagacctgaacggtaccgaaccttgcggcgtgtacgatatggtcttgcatcaggtggaaaaaccgctgctggtgtgcgtgatggagcaatgcggcggcaaccagtccaaagcctccgtgatgctggggctgaaccgcaataccttgcgtaaaaaactgattcaacacggtttgttgtga

SEQ ID NO: 62050 - DNA, 588 bp, Neisseria meningitidis; identical to SEQ ID NO: 39526

SEQ ID NO: 62051 - DNA, 201 bp, Neisseria meningitidis; identical to SEQ ID NO: 41439

SEQ ID NO: 62052 - DNA, 1356 bp, Neisseria meningitidis
atgtctgattttttccattctgacgtgttgtccgtttccgagttgaacgcatttgccaaaagtattttggaaaaccaccttgccggtctgtggattgcgggcgaagtgtccaacctgacccgtgccgccagcgggcattattatttctcgctcaaagacagccgcgcgcaggtgcgttgcgcgatgttcaagggtgcggcggcgcgtttggcgaaacctttgaaagaaggcgaccatatcgaagtggcgggcaaaatcagtatttatgaaacgcggggcgaatttcagattaccgtgaacgaagtgcggctcaaaggtttggggcagctttacgaagcctatgagcggttgaaggcgcagttgcaggcggaaggcgcgtttgcggaggaacgcaaaaaaccgttgcccgtccgccctcaatgtatcggcatcgtaaccagtttggcggcggcggcattgcgcgatgttgtaaccaccttgaaacgccgcgcgcccgaaattcccgttatcgtttatccgacacctgttcaaggcacaggcagcgagtttcagattgcccaagcgattaaaaccgcatcgcaacgcgccgaatgcgacgtgttgattgtctgtcgcggcggcggcagcattgaagatttgtgggcgtttaacgaagaaccggtcgtacgcgcaatcgaagcctgcacggttcccgtcgtcagtggcgtgggacacgaaaccgatttcacgcttgccgattttgtcgccgacgtgcgcgcgcccacgccgaccggcgcggcggaactggtcagccccaaccgccaagaatcgctacatcgtctcgcccaggcgcaaggccgtctgaaaaccgttttggaacaacgctatttcgatgccagccaaaaactcgactggcttgcgcggcaaatccgtcatccgcgccaaaaacttgatgagcagcgcgcttcaatcggcaagctggcgcaaacgctgtcttactctatgaagcaaaacctccgtgcccacaccgcccgttttgaacgccaaacccaagccctgcaacattaccgtcctgatgtttccgtttgcaaaaacaacatcgtccgccttcagacggcattgcccgccgccttcagccaactgcttacccaccgccgccaaagcctgaccgcccaagccgcattgctcgaagccgtttcgccgcagcacattttggaacgcggcttttccgtcgtcaaagatacacgcggacaagtcatccgcaacgccgatgttttgaagcaggggcagaagctgcacattaccttcgccgacggcgaaaccgacgtgcgcgtaagcaaagaacaagggcagcaggatttgttcgattgcatttaa

SEQ ID NO: 62053 - DNA, 1254 bp, Neisseria meningitidis
atgtccgaacaacatatttcgacttggaaaagtaaaatcaacgcattgggaccagggattatgatggcttcggcggcggtcggcggttcgcacctgattgcctcgacgcaggcgggcgcgctttacggctggcagatcgcgctcatcatcatcctgaccaacctcttcaaatacccgtttttccgcttcagcgcgcattacacgctggacacgggcaagagcctgattgaaggttatgccgagaaaagccgcgtttatttgtgggtattcctgattttgtgcatcctctccgccacgattaacgcgggcgcggtcgccattgtcaccgccgccatcgtcaaaatggcgattccctcgctgatgtttgatgccggcacggttgccgccttgattatggcatcctgcctgattattttggtgagcggacgttaccgcgctttggatcgcgtttccaaaatcatcatcgttactttgagtatcgccacgcttgccgccgccggcatcgctatgtcgcgcggtatgcagatgcagccggactttatcgagccgacaccgtggacgcttgccggtttgggcttcctgatcgcgctgatgggctggatgcctgcgccgattgaaatttccgccatcaattctttgtgggtaaccgaaaaacaacgcatcaatccttccgaataccgcgacgggatttttgatttcaacgtcggttatatcgccagtgcggttttggctttggttttccttgcactgggcgcgtttgtgcaatacggcaacggcgaagcagtgcagatggcgggcggcaaatatatcgggcaattgatcaatatgtacgccgttaccatcggcggctggtcgcgcccgctggtggcgtttatcgcgtttgcctgcatgtacggcacgacgattaccgttgtggacggctatgcccgtgccattgccgaacccgtgcgcctgctgcgcggaaaagacaaaacgggcaacgccgaattctttgcctggaatatttgggtggcgggcagcggtttggcggtgattttttggtttgacggcgtaatggcgaatctgctcaaatttgcgatgattgccgcttttgtgtccgcccctgtgtttgcctggctgaattaccgtttggtcaaaggtgatgaaaaacacaaactcacatcaggtatgaatgcccttgcattggcaggcttgatttatctgaccggttttaccgttttgttcttattgaatttggcgggaatgttcaaatga

SEQ ID NO: 62054 - DNA, 375 bp, Neisseria meningitidis; identical to SEQ ID NO: 38650

SEQ ID NO: 62055 - DNA, 807 bp, Neisseria meningitidis; identical to SEQ ID NO: 45050

SEQ ID NO: 62056 - DNA, 1290 bp, Neisseria meningitidis; identical to SEQ ID NO: 38999

SEQ ID NO: 62057 - DNA, 360 bp, Neisseria meningitidis; identical to SEQ ID NO: 42498

SEQ ID NO: 62058 - DNA, 1410 bp, Neisseria meningitidis
atgaaatacatcagcacgcgcggcgaaaccgcacacaaaccgttcagcgaagttttattgatggggcttgcccccgacggcggtctgatgctgccggaacattatccgcaaatcgggcgcgaaaccttggacaaatggcgcggttcggcttatcccgaattggcgtttgaaattatgcgcctgttcgttacggatattccggaggacgatttgcgcgatattctgaaccgtacttacacggaagcggcgttcggtactaaggaaatcacccccgtccgcacgctttcagacggcatcaaaatccaagccttgtccaacggcccgacgctggcgttcaaagatatggcgatgcagtttttgggcaatgcgtttgaatatgttttaaacaaagaaggcaaaaaactcaatatcttgggcgcaaccagcggcgatacgggttcggctgcggaatatgccttgcgcggcaaaaaaggcgtgaacgtatttatgttgtcgcccgacggtaagatgagcgcgttccaacgcgcgcagatgtacagcctgcaagacgggaatatccacaatatcgccgtgaagggtatgtttgacgactgtcaggatattgtgaaggcggtgcagaacgatgccgcgttcaaggaaaaataccacatcggtacggtcaattcgatcaactggggacgcatcgtcgcacaagtggtttattactttgcgggctatttcaaagcgacacaaagcaatgacgagcaagtcagcttctgcgtgccgagcggcaacttcggcaacgtttgcgcgggacacatcgccaaacagatgggtttgcctatccgccgcctgattgtcgcgaccaatgaaaacgatgtgttggacgagtttttcaaaaccggtgcataccgcccgcgcaacagcgcgcatacttatgttacctccagcccgtcgatggacatttccaaagcgtccaacttcgagcgtttcgtgttcgacctgatggatcgcgatcctcaggaaatcaatacgctgtgggcggaagtagcggcgggcaaaggctttgacctgcggtttgctttagaaaaagtcggtggcaaatacggttttacctccggcaaatccacccaccccgaccgcctcgccaccatcagacaggtttatgagcaagaccaagaactcatcgacccgcacactgccgacggcgtaaaagtcgcccgcgaagtgcgcgaagaaggggaaacggttgtgtgtttggaaaccgcgttggcagcgaaattcgatgcgaccatacgcgaagccgtcggcgatgccgccattccgcgccccgccgcgctggaaggtttggaaacattgccgcagcgcgtgcaaaccgtgccgaacagtgcggatgcggtaaaaggcatcatcgaacaaacccttgcctga

SEQ ID NO: 62059 - DNA, 1086 bp, Neisseria meningitidis; identical to SEQ ID NO: 43799

SEQ ID NO: 62060 - DNA, 1128 bp, Neisseria meningitidis
atgttagaatgcacggcaaaccaccgttcaggcgaaattatgtcccaaactatcgacgaactcctccttccccaccgcaacgccatcgacaccatcgatgccgaaatcctgcgcctgctcaacgaacgtgcgcaacacgcccacgccatcggcgagctgaaaggcacgggcgcagtgtaccgtcccgaacgcgaagtcgccgtgttgcgccgcattcaggatttgaacaaaggcccgctgcccgacgaatcggtagcacgcctgtttcgggaagtgatgagcgagtgcctcgccgtcgaacgcccgctgaccatcgcctatctggggccgcagggcacgtttacccagcaggcggcgatcaagcatttcggacacgccgcgcacaccatggcgtgtccgaccatagacaactgcttcaagcaggttgaaacccgtcaggcggattatctggtcgcgcccgtggaaaactcgaccgaaggctcggtcgggcgcacgttggatttgcttgccgttaccgcgttgcaggcgtgcggcgaagtcgttttgcgcatccaccacaaccttttgcgtaaaaacaacggcagcaccgaaggcattgccaaagtcttttcccacgcgcaggcgttggcgcagtgcaacgactggttgggcagacacctgcccaacgccgaacggattgccgtgtccagcaatgccgaagccgcaaggctggttgccgaatcggacgacggtacggttgccgccatcgccggacgcacggcggcggaaatctacggactcgatatggttgccgagtgcatcgaagacgaaccgaacaacaccacgcgcttcttggtgatgggacatcacgaaaccggtgcaagcggcagcgacaagacttcgctggccgtttccgcgcccaaccgggcaggcgcggttgcctcgctgctgcaaccgctgactgagtcgggtatttccatgaccaagtttgagagccgtccgagtaaatccgttttgtgggaatacctgttcttcatcgacatcgaaggacaccgccgggacgcgcagattcagacggcattggaacgcttgggcgaacgcgcttcgttcgtcaaagtcatcggttcgtacccgaccgccgttttgtag

SEQ ID NO: 62061 - DNA, 279 bp, Neisseria meningitidis; identical to SEQ ID NO: 36778

SEQ ID NO: 62062 - DNA, 717 bp, Neisseria meningitidis; identical to SEQ ID NO: 39172

SEQ ID NO: 62063 - DNA, 288 bp, Neisseria meningitidis; identical to SEQ ID NO: 41116

SEQ ID NO: 62064 - DNA, 1356 bp, Neisseria meningitidis
atgtcggaatatacgcctcaaacagcaaaacaaggtttgcccgcgctggcaaaaagcacgatttggatgctcagtttcggctttctcggcgttcagacggcctttaccctgcaaagctcgcagatgagccgcatcttccagacgctcggtgccgatccgcacagcctcggctggttctttatcctgccgccgctggcggggatgctggtgcagccgattgtcggccattactccgaccgcacttggaagccgcgtttgggcggccgccgtctgccgtatctgctttatggcacgctgattgcggttattgtgatgattttgatgccgaactcgggcagcttcggtttcggctatgcgtcgctggcggctttgtcgttcggcgcgctgatgattgcgctgttggacgtgtcgtcaaatatggcgatgcagccgtttaagatgatggtcggcgacatggtcaacgaggagcagaaaggctacgcctatgggattcaaagtttcttagcaaatacgggcgcggtcgtggcggcgattctgccgtttgtgtttgcgtatatcggtttggcgaacaccgccgagaaaggcgttgtgccgcagaccgtggtcgtggcgttttatgtgggtgcggcgttgctggtgattaccagcgcgttcacgattttcaaagtgaaggaatacgatccggaaacctacgcccgttaccacggcatcgatgtcgccgcgaatcaggaaaaagccaactggatcgaactcttgaaaaccgcgcctaaggcgttttggacggttactttggtgcaattcttctgctggttcgccttccaatatatgtggacttactcggcaggcgcgattgcggaaaacgtttggcacaccaccgatgcgtcttccgtaggttatcaggatgcgggtaactggtacggcgttttggcggcggtgcagtcggttgcggcggtgatttgttcgtttgtattggcgaaagtgccgaataaataccataaggcgggttatttcggctgtttggctttgggcgcgctcggctttttctccgttttcttcatcggcaaccaatacgcgctggtgttgtcttataccttaatcggcatcgcttgggcgggcattatcacttatccgctgacgattgtgaccaacgccttgtcgggcaagcatatgggcacttacttgggcctgtttaacggctctatctgtatgcctcaaatcgtcgcttcgctgttgagtttcgtgcttttccctatgctgggcggcttgcaggccactatgttcttggtagggggcgtcgtcctgctgctgggcgcgttttctgtgttcctgattaaagaaacacacggcggggtttga

SEQ ID NO: 62065 - DNA, 624 bp, Neisseria meningitidis
atgaatcaattcgaattgtgccaaaaagaacatgtcaatccatttgccttgtcaaagcaatatctattggttgtaacattcgtcaaatccagcagtaaaaattttcaggcagcattactttgggcaagaagtgccaaattatttgagaatcttgagattggaaaagaaaccatctattgctgcgctttcgataaaacagcagaacaggctgggatggccggggtatttttgaattatattgaaaattggaatggcaaacagatttacatcaatggccgaatccatagtggcagtatttatgatttgttaggggttttagactgctatcaaaaatcacagtcctgtcccaaccctaaaagccactgttgctttgtttcagacgacatttttctatggcatggatcaagaccaacgtttgaaatcagtcttgatctaactggaaagaaaaaagaaacatcctctgcaaagaaatttgtgatgccttgtattaatttccgtcaccataggattgaaaaagaaacctacttaggaaattggaatgaacaaattgccgcattggcagtaaaacaaaatatagattggtgtccaagttttgatattgagaattttagacagtatgaataa

SEQ ID NO: 62066 - DNA, 1170 bp, Neisseria meningitidis
atgacagcacataaaatcctgcccgtcctgctttccatcatcttaggcgtttctcacgcaacggccgcatcgcccgcgcccaacaaaccggcggtacacgccgcccccacgttccaaacacccgaaaccctcacagcggcacacatcgttatcgaccttcaaagcaaacagattttatccgccaaaaacatcaatacccctgtcgaaccggcggcactaacccaactgatgaccgcatatctggttttcaaaaacatgaaatcgggaaatatccgatctgaagaaaacttaaaaatacccgaatccgcatgggcttcagaaggaagcagaatgtttgtacgtcccggcgatacggtcagcaccgacaaactcttaaaaggcatgattgcactatccgcaaacgatgccgccctaacccttgtcggccgactgggcaacggctcgattgaaaattttgtgcaacaaatgaacaaagaagcccgacgcttgggcatgaagaacactgtattcaaaaacccgacaggcttgagtagagaaggacaggtttccaccgccaaagacctcgccctgctgtctgaagcattgatgcgcgactttccggaatattacccgctgttttccatcaaatctttcaaattcaaaaatatagagcaaaacaaccgcaatatccttttatatagggacaacaatgtaaacggtctgaaagccggacacacagaaagcggcggctacaaccttgccgtgtcatactccggcaacggcaggcacatccttgtcatcacattgggttcggaatcggcggaaacacgcgcatcagacaacagcaagctgctgaaccgggcattgcaagccttcgatacgcccaaaatatatccgaaaggcaaaaccgttgcccaaatccaaatttccggaggcagcaaaaaaaccgtccgcgcaggcttcctcaaagaagcctacatcactctgccacataaggaagcgaaaacaaccgaacaaattttggaaaccatacagccgattcccgccccggtaaaaaaggggcagattttaggaaaaatcaaaatcagacaaaacggatacacccttgccgaaaaagaaatcgtcgcactggaaaatgtagaaaaaagaagccggtggcaaaggctttggacgcgtctgacagggcaatag

SEQ ID NO: 62067 - DNA, 1827 bp, Neisseria meningitidis
ttgggcatttcccgcaaaatatcccttattctgtccatactggcagtgtgcctgccgatgcatgcacacgcctcagatttggcaaacgattcttttatccggcaggttctcgaccgtcagcatttcgaacccgacgggaaataccacctattcggcagcaggggggaacttgccgagcgcagcggtcatatcggattgggaaacatacaaagccatcagttgggcaacctgttcatccagcaggcggccattaaaggaaatatcggctacattgtccgcttttccgatcacgggcacgaagtccattcccccttcgacaaccatgcctcacattccgattctgatgaagccggtagtcccgttgacggattcagcctttaccgcatccattgggacggatacgaacaccatcccgccgacggctacgacgggccacagggcggcggctatcccgctcccaaaggcgcgagggatatatacagctacgacataaaaggcgttgcccaaaatatccgcctcaacctgaccgacaaccgcagcaccggacaacggcttgccgaccgtttccacaatgccggcgctatgctgacgcaaggagtaggcgacggattcaaacgcgccacccgatacagccccgagctggacagatcgggcaatgccgccgaagccttcaacggcactgcagatatcgtcaaaaacatcatcggcgcggcaggagaaattgtcggcgcaggcgatgccgtgcagggtataagcgaaggctcaaacattgctgtcatgcacggcttgggtctgctttccaccgaaaacaagatggcgcgcatcaacgatttggccgatatggcgcaactcaaagactatgccgcagcagccatccgcgattgggcagtccaaaaccccaatgccgcacaaggcatagaagccgtcagcaatatctttacggcagtcatccccgtcaaagggattggagctgttcggggaaaatacggcttgggcggcatcacggcacatcctgtcaagcggtcgcagatgggcgcgatcgcattgccgaaagggaaatccgccgtcagcaacaattttgccgatgcggcatacgccaaatacccgtccccttaccattcccgaaatatccgttcaaacttggagcagcgttacggcaaagaaaacatcacctcctcaaccgtgccgccgtcaaacggcaaaaatgtcaaactggcagaccaacgccacccgaagacaggcgtaccgtttgacggtaaagggtttccgaattttgagaagcacgtgaaatatgatacgaagctcgatattcaagaattatcggggggcggtatacctaaggctaagcctgtgtttgatgcgaaaccgagatgggaggttgataggaagcttaataaattgacaactcgtgagcaggtggagaaaaatgttcaggaaataaggaacggtaataaaaacagtaactttagccaacatgctcaactagagagggaaattaataaactaaaatctgccgatgaaattaattttgcagatggaatgggaaaatttaccgatagcatgaatgacaaggcttttagtaggcttgtgaaatcagttaaagagaatggcttcacaaatccagttgtggagtacgttgaaataaatggaaaagcatatatcgtaagaggaaataatagggtttttgctgcagaataccttggcaggatacatgaattaaaatttaaaaaagttgactttcctgttcctaatactagttggaaaaatcctactgatgtcttgaatgaatcaggtaatgttaagagacctcgttataggagtaaataa

SEQ ID NO: 62068 - DNA, 984 bp, Neisseria meningitidis
atgagtgaaatcaaaaccgacgaccccaaacgcggcatcaaactcagaggcgcggacaaaaccgcccgcatccccatcaaagtcgtcccccttcaggaaaaattaaaaaagcccgaatggatacgcgccaaacttccatcgcgcaaattctttgaaatcaaagacattttgcgcgaacaaaaaatgcacaccgtttgcgaggaagcctcctgccccaacatcggcgaatgcttcagcaaaggcacggcgaccttcatgattatgggcgacatctgcacccgccgctgcccgttctgcgacgtgggacacggccgcccgaatatgctcgaccccgacgaaccgaaaaacctcgccgaatccgtcaaagccatgaacctgcgttacgtcgtcatcacctccgtcgaccgcgacgacctgcgcgacggcggcgcacagcatttcgccgactgcatcaaagccatccgcgaaaccagcccgaacaccaaaatcgaaatcctcgtccccgacttccgaggacgcttggacatcgcactcaaaatccttgccgaaaccccgcccgacgtgatgaaccacaacctagaaacccatccgagcctgtacagaaaagcccgtcccggtgccaattatcaacattctttagacttattaaaacgttataaagaaatgatgccgcacatcccgaccaaatccggcatcatggtcggcttgggcgaaacagacgaagacgtgcgtgaaattatgcgcgatatgcgggcgcacaatatcgaaatgattaccatcggacagtacctccagccttcagacggacacctgcccgtcctgcgctacgttacgcccgagcagttcaaaatctttgaaaaagaagcatacgaactgggcttcagcaatgccgccatcggcgcgatggtacgttccagctaccacgccgacgaacaggctaccgaagccttacgcgaaagccacggcggttgcgggcatcattaa

SEQ ID NO: 62069 - DNA, 1851 bp, Neisseria meningitidis; identical to SEQ ID NO: 54364

SEQ ID NO: 62070 - DNA, 876 bp, Neisseria meningitidis
atgtttcagaaacacttgcagaaagcctccgacagcgtcgtcggagggacattatacgtggttgccacgcccatcggcaatttggcggacattaccctgcgcgctttggcggtattgcaaaaggcggacatcatctgtgccgaagacacgcgcgttaccgcgcagcttttgagcgcgtacggcattcagggcaaactcgtcagcgtgcgcgaacacaacgaacggcagatggcggacaagattgtcggctatctttcagacggcatggttgtggcacaggtttccgatgcgggtacgccggccgtgtgcgacccgggcgcgaaactcgcccgccgcgtgcgtgaggtcgggtttaaagttgtccctgttgtcggcgcaagcgcggtgatggcggctttgagtgtggctggtgtggcgggatccgatttttatttcaacggttttgtaccgccgaaatcgggcgaacgtaggaaattgtttgccaaatgggtgcgggcggcgtttcctatcgttatgtttgaaacgccgcaccgcatcggggcgacgcttgccgatatggcggaactgttccccgaacgccgtctgatgctggcgcgcgaaatcacgaaaacgtttgaaacgttcttaagcggcacggttggggaaattcagacggcattggctgccgacggcaaccaatcgcgcggcgagatggtgttgatactgtatccggcgcaggatgaaaaacacgaaggcttgtccgagtccgcgcaaaatgtgatgaaaatccttgctgccgaactgccgaccaaacaggctgccgagcttgccgccaagattacaggtgagggcaaaaaggctttgtacgatttggcagtgtcgtggaaaaacaaatag

SEQ ID NO: 62071 - DNA, 675 bp, Neisseria meningitidis; identical to SEQ ID NO: 54660

SEQ ID NO: 62072 - DNA, 129 bp, Neisseria meningitidis; identical to SEQ ID NO: 55260

SEQ ID NO: 62073 - DNA, 1041 bp, Neisseria meningitidis; identical to SEQ ID NO: 55816

SEQ ID NO: 62074 - DNA, 987 bp, Neisseria meningitidis; identical to SEQ ID NO: 40869

SEQ ID NO: 62075 - DNA, 1032 bp, Neisseria meningitidis; identical to SEQ ID NO: 36792

SEQ ID NO: 62076 - DNA, 234 bp, Neisseria meningitidis; identical to SEQ ID NO: 55793

SEQ ID NO: 62077 - DNA, 594 bp, Neisseria meningitidis; identical to SEQ ID NO: 55822

SEQ ID NO: 62078 - DNA, 1260 bp, Neisseria meningitidis; identical to SEQ ID NO: 55040

SEQ ID NO: 62079 - DNA, 2748 bp, Neisseria meningitidis
atgcaacagcaacatttgttccgattaaatattttatgcctgtcgctgatgaccgcgctgcccgtttatgcagaaaatgtgcaagccggacaagcacaggaaaaacagttggataccatacaggtaaaagccaaaaaacagaaaacccgccgcgataacgaagtaaccggtttgggcaaattggtcaaaaccgccgacaccctcagcaaggaacaggtactcgacatccgcgacctgacgcgttacgaccccggcatcgccgtcgtcgaacaggggcgcggcgcaagctcgggttactcgatacgcggtatggacaaaaaccgcgtttccttgacggtggacggcttggcgcaaatacagtcctacaccgcgcaggcggcattgggcgggacgaggacggcgggcagcagcggcgcaatcaatgaaatcgagtatgaaaacgtcaaagctgtcgaaatcagcaaaggctcaaactcggtcgaacaaggcagcggcgcattggcgggctcggtcgcatttcaaaccaaaaccgccgacgatgttatcggggaaggcaggcagtggggcattcagagtaaaaccgcctattccggcaaaaaccgggggcttacccaatccatcgcgctggcggggcgcatcggcggtgcggaggctttgctgatccacacgggtcggcgcgcgggggaaatccgcgcccacgaagatgcaggacgcggcgttcagagctttaacaggctggtgccggttgaagacagcagcaattacgcctatttcatcgttaaagaagaatgcgaaagcgggaattacgaaacgtgtaaaagcaaaccgaaaaaagatattgtcggcaaagacgaacgtcaaacggtttccacccgagactacacgggtcccaaccgcttcctcgccgatccgctttcatacgaaagccggtcgtggctgttccgcccgggttttcgttttgaaaacaaacggcactacatcggcggcatactcgaacacacgcaacaaactttcgacacgcgcgatatgacggttccggcattcctgaccaaggcggtttttgatgcaaataaaaaacaggcgggttctttgtccggcaacggcaaatacgcgggcaaccacaaatacggcggactgtttaccaacggcgaaaacggtgcgctggtgggcgcggaatacggtacgggcgtgttttacgacgagacgcacaccaaaagccgctacggtttggaatatgtctataccaatgccgataaagacacttgggcggattatgcccgcctctcttacgaccggcagggcatcggtttggacaatcattttcagcagacgcactgttctgccgacggttcggacaaatattgccgcccgagtgccgacaagccgttttcctattacaaatccgaccgcgtgatttacggggaaagccacaggctcttgcaggcggcattcaaaaaatccttcgataccgccaaaatccgccacaacctgagcgtgaatctcgggtttgaccgctttggctctaatctccgccatcaggattattatcatcaaaacgccaaacgtgcctattcgtcgaatctgcccactcaaaacggcaatcaaaaaatcagccccaacggcagcacaagcactccctattgggtcagcataggcaggggaaatgtggttacggagcaaatctgccgcttgggcaacaatacttatacggactgcacgccgcgcagcatcaacggcaaaagctattacgcggcagttcgggacaatgtccgtttgggcaggtgggcggatgtcggcgcgggcttgcgctacgactaccgcagcacgcattcggacgacggcagcgtttccaccggcacgcaccgcaccctgtcctggaacgcaggcatcgtcctcaaacctgccgactggctggatttgacttaccgcacttcaaccggcttccgcctgccctcgtttgcggaaatgtacggctggcgggcgggtgttcaaagcaaggcggtcaaaatcgatccggaaaaatcgttcaacaaagaagccggcatcgtgtttaaaggcgatttcggcaacttggaggcaagttggttcaacaatgcctaccgcgatttgattgtccggggttatgaagcgcaaattaaaaacggcaaagaagaagccaaaggcgacccggcttacctcaatgcccaaagcgcgcggattaccggcatcaatgttttgggcaaaatcgattggaacggcgtatgggataaattgcccgaaggttggtattctacatttgcctataatcgtgtccatgtccgcgacatcaaaaaacgcgcagaccgcaccgatattcaatcacacctgtttgatgccatccaaccctcgcgctatgtcgtcggcttgggctatgaccaaccggaaggcaaatggggtgtgaacggtatgctgacttattccaaagccaaggaaatcacagagttgttgggcagccgggctttgctcaacggcaacagccgcaatacaaaagccaccgcgcgccgtacccgcccttggtatattgtggatgtgtccggttattacacgattaaaaaacacttcaccctccgtgcgggcgtgtacaacctcctcaactaccgctatgttacttgggaaaatgtgcggcaaactgccggcggcgcagtcaaccaacacaaaaatgtcggcgtttacaaccgatatgccgcccccggccgaaactacacatttagcttggaaatgaagttttaa

SEQ ID NO: 62080 - DNA, 2286 bp, Neisseria meningitidis; identical to SEQ ID NO: 55500

SEQ ID NO: 62081 - DNA, 1527 bp, Neisseria meningitidis
atgaacacgccccttccttattccaattacctcatccgcatcctgacggcatctgtctatgatgtcgcggtcgaaacgcctttggaaccggcacgcagcctttctgtacgtttgaaaaacaacatccttttgaaacgcgaagatttgcagccggttttttcgttcaaaatacgcggcgcgtacaacaaaatgtccaagttgccgaaagatgcgctcgcttgcggcgtgattgcggcaagcgcgggcaatcacgcacaaggcgtggcattgtccgcacagcgtttgggttgccgtgccgttatcgtcatgccggagactacgccgaaaatcaaagtggatgcggtcaaaagccgtggcggcgaggtggttttgcggggcgtttcatacaacgatgcctacgattatgcgatggagttggcggaaaaagaagggttaacctatatcgcgccgtttgatgatcctgatgtgattgcgggacaggggacggtggggatggaaattgtcagccagcatcccgatccaatccgcgccgtattcgtaccgataggcggtggcggtttggcggcgggcgtggcggcatttatcaagcaggtccgccccgaaatcaaagttatcggcgttcagaccaacgattcctgctgtatgaagcagtcggtcgaagcgggtgaaatcgtccatttgaaagatgtcgggctgttttcagacggcactgcggtcaaagtcgtcggaaacgaaaccttccgcctctgcaaagaacttttggatgaaatcattacagtcgataccgatgcggtttgcggcgcggtcaaggatattttcgatgacacgcgcagcattaccgagccggcgggcgcgttggcgttggcgggtctgaaagcctatatcgcccgagaaggcgcggaaaaccaaaccctgattgccgttaccagcggtgcgaatatgaattttcaccgtttgcgccacgtttcggaacggagcgaattgggcgagggcaacgaaggtatttttgccgttaccatccctgaagaacgcggcagcttccttaagtttgtcaatatattgggaaataggaatattaccgagttcaactaccgctacggggacgatgaaaaagcgcatatctttgtcggacttcaagcggcaggcccgcaggatttggcggttatcggcagccggttggatgaggcgggattgcccaatgtcgacctgaccgatgatgagattgccaaaatccatatccgctatatggtcggagggcggacggacaaagtagaaaacgagcgtctggtcagttttgagtttccggagcgtccgggggcgttggcgcgttttttgaaccatatgcagggcggttggaacattacgctcttccattaccgcaaccacggtgcggattacgggcggattttggtcggtatcgatgtgccgccgcacgatgccgccgcatttgacggtttcttggaaagtctgggatacagctatcacgaggaaacgcaaaatgccgcgtacaagctgtttcttgcctga

SEQ ID NO: 62082 - DNA, 768 bp, Neisseria meningitidis
atgtcttcaaataaagcttcattttttacacgtctgcgccgcttgtgccgcttgacggtctggctgttcaaaaccggcaaaaacctgcgcggtattgacggcggctgccccgagtcgcgtaatcgggcggtaatcgagttgggtaggggggctttggcggctttggatatcggattggaggtgggcagacccacacccgaacatccgaacggtgtcttggttgccgccaaccacgtgtcctggctggatattttcgcgatgagcgcggtttatccgagcagctttatcgccaagcaggaaatcaaaagctggccggtattgggcaagatggggcagaacgcgggaacggtgttcatcaaccgcaattcgcggcgcgacatcgaaccgattaaccgcgccgtctgcgaaaccttgcaacgcggtcaaaacgtcagttttttccccgaagcgcgtacttcctccggactggggctcctgccgttcaaagccgcgctgttccaatccgccatcgatgcgggggcaaaggttttggcggtcgcgctgcgttattatgacgaaacgggaaaaaggacggctcgtccgtcgtatgccgatgtcggtttgccgatctgcctgtggcgcattgtgtctatgaaaaaattgacgataaaagttgatttcgtttgcgtggcggatgcggcggaaagcgaagaccgttatgctttaaaagataaaatcgaagaaagcatccgtgccgttgtcgccgacgatgcggatatcgctgtctga

SEQ ID NO: 62083 - DNA, 2301 bp, Neisseria meningitidis
atgcaccgaccgaccgccaaacagattctgcacgaagtatttggttatcccgaatttcgcggcaggcaggaggctgtcatcaatactttggcaggcggcgggagtttgacggtgctgatgccgacgggcggcggcaagtctttgtgttaccagattcccgcgctgatgcgcgaaggcgtggcggttgtcgtatcgccgctgattgcgttgatgaacgaccaagtggcaaacctgcacgccgccggcatcgaagcggcggcagtcaacagcagcacatcggcagatggggcgcgcgagattgccgacaagcttgcccaaggccgtctgaaactgctttatgtcgcgccggaacgcttggttaccgaccgctttttgcgttttctcgaccaacaaaccgtcagcctgttcgccattgatgaggcgcattgcgtcagccaatggggacacgatttccgccccgagtaccaacagctcggcatgcttgccgaacgctatccgaacgtcccgcgcatcgccctgaccgccaccgccgatgccgccacgcgcgccgacatcaagcattatctgcacttggacgatgcgcccgaatttatctccagctttgaccgcccgaatatttattatcaggttatcgaaaaaaataatggcaaaaaacaactgcttgaattcatccgcaaagaaatgacggggcaaagcggcattgtgtattgcctaagccgcaaaaaagtcgaagatgtggcgcagtttttgcgtgaaaacggattaaacgcgattccgtatcatgccggtttgagcatggacgtgcgcgaggaaaaccaacgccgctttacgcgtgaagacaatattatcgtggtggcgaccgtggcgttcggtatgggcatagacaaacccgacgtgcgctttgtcgcccatctcgatatgccccagagtgtcgaacatttctatcaggaatcggggcgcgccggacgggacgggctgcctgccgtgagttggctgtgttacggtttgaacgattgggtgttgctgcacgaacggattgccgaaggcaacagcgacgaggtgcaaaagcaaatcgaaatgcaaaaactcgatgccatgcttgccgtctgcgaaaccgccgcctgccgccgcgtactgctgctcaaacatttcggcgaagcatccgaaccctgcggccattgcgacaactgcctgcatccgcccgtacggtttgacggcacggtgttggtgcaaaaattactcagctgcgtgtaccgcgccggacaacgttttgccgccggttacatcaccaaccttttgcgaggtaaaagcgacgattggatacgcggcaaccggcacgaacaactgtccacattcggcatcggtacggagttgtccaacaaagaatggcgcagcgtcatccgccagtgtatcagcctcggctacctcaccgtcaacattacccgatatcaggcattgcaactgaccgaagccgccaaaaaagtcctcaaaggcgaaaccgaagtgatgctgcgtccgctcaagcgcgacaagcccgccgcccgcaccctcaaagacaactggctgcgtaccgaacgcgaagaacgcctgtggcaggcattgcgcgtttggcgtatgaaacaggcagaagccgaaggcatccccgcctatatgattttcggcgacaaaaccctgcgcgaccttgtcgaaaaaatgccgcaagacctcaacggtctgcacgacatctacggcttgggcgaagccaaaatcgaccgtttcggacacggtatcctcgaagtctgccgcaacgccgccgactttagccacgatgccgtcatccgtccgcaaaccgaacgcgaacaacaactgcgtcaaaaactcgaagcctggcggtatgaacaggcaagggcggaaaactgcgccctgcatgccgtcctctccgacgaaagccttgccgatatgcttgccgccacgcccgaaaccgaaaccgacctcgaaggcgtgcacggcttgggcagcgtacgcgccgccaaatacggacgggacatcctcgccgtctgccgtccgttttcagacggcatcgatgaagccgccaaacacaaacgccgcctgatgcgcgccctgattcaatggtgcggcgaaacggcaaaacacgaacagtccgaaccctaccgcattctcagcaaagccgccctgcgcgccattgccgccaaacagccggaaggtttggcggagcttgccgccgtatatggcgtaggcgaagaaaaagccgcacgttacggtgcggcggtgttggcggtattggaacgaaatgccgtctga

SEQ ID NO: 62084 - DNA, 915 bp, Neisseria meningitidis
atgaaacaccccaaactcacccttatcgccgcattgctgaccactgccgcaactgccgcccccctgccggttgtaaccagcttcagcattttaggcgacgtagccaaacaaatcggcggagagcgcgtatccatacaaagtttggtcggagccaaccaagatacgcacgcctatcatatgaccagtggcgacattaaaaaaatccgcagtgcaaaactcgtcctgctcaacggcttaggacttgaagctgccgatgtacaacgtgccgtcaaacagagcaaagtatcctatgccgaagcgaccaaaggcatccaacccctcaaagccgaagaagaaggcggacaccatcacgaccacgatcatgaccacgaaggacaccaccatgaccacggcgaatatgacccccacgtctggaacgaccccgtccttatgtccgcctatgcccaaaacgttgccgaagccctgataaaggccgatcccgaaggcaaagtttattatcaacaacgcttgggcaactaccaaatgcagcttaaaaaactgcacagcgacgcacaagccgcatttaacgccgtccctgccgccaaacgcaaagtcctgaccgggcacgatgccttttcctatatgggcaaacgttaccatatcgaattcatcgccccgcaaggcgtgagcagcgaagccgagccttcagccaaacaagtcgccgccatcatccgccaaatcaaacgcgaaggcatcaaagccgtatttaccgaaaacatcaaagacacccgcatggttgaccgtatcgccaaagaaaccggtgtcaacgtcagcggcaaactgtattccgacgcactcggcaacgcgcccgcagacacctacatcggaatgtaccgccacaacatcaaagccttgaccaacgcgatgaagcaataa

SEQ ID NO: 62085 - DNA, 237 bp, Neisseria meningitidis
atgcgcaaagcctgccgcaaccgtccgctgtcggaaacgcaaaccaaacgcaaccgatatttgtcgaagacccgttatgtggtcgaacagagcttcggtacgctgcaccgtaaattccgctacgctcgggcagcctatttcggactgattaaagtgagtgcgcaaagccacctgaaggcgatgtgtttgaacctgttgaaagcggccaacaggttaagtgcgcccgctgccgcctaa

SEQ ID NO: 62086 - DNA, 1023 bp, Neisseria meningitidis
ttgagttaccgcgatgcaggtgtcgatatcgacgcaggcgaccaactggtcgaaaacatcaaaccgtttgccaaacgcaccatgcgtccagaagtattgggggatttgggcggttttggcgcattggtcgaaatcggcaagaaatataaaaatcccgtattggtcagcggtacggacggtgtgggtaccaagctcaagcttgcctttgattgggataaacacgatatggtgggcatcgaccttgttgcaatgagtgtcaacgatattttggttcaaggagcagaacctctgtttttcttggattatttcgcctgcggcaaattggatgttccgcgcgcaaccgatgtcatcaaaggcattgcacaaggttgcgaagaatccggctgcgccctgattggcggggaaactgccgaaatgccgggcatgtatcccgtcggagaatacgatttggcgggttttgccgtcggcgtagtggaaaaagagaatgtcattaccggccgcagtatcggcgcgggcgatgtggtattgggtttggcttccaacggcgcacattcaaacggctattcccttatccgtaaaatcatcgaacgcgacaatcccgatttggatgccgagtttgataatggcaaaaccttgcgggaggctgttattgcgccgacccgtctgtatgtgaaaccgattcttgccgctttggaaaaatttaccattaaaggtatggcacacattaccggcggcggcattaccgaaaacgtgccgcgcgtgttgcctgaaaacacggttgcacaaatcgatgctaaatcgtgggaattgcccaagctcttccaatggcttcaaaaggcgggcaatgtggaaacccaagaaatgtaccgaacctttaactgcggcatcggcatggtcgttattgttgctgccgaagatgccgatgcggttcagggtctcttgggtgaacaaggtgaaacagtttaccgtttaggtttgatccgtgagcgtcagggagacgagcatcaaacccaggttgcctga

SEQ ID NO: 62087 - DNA, 126 bp, Neisseria meningitidis; identical to SEQ ID NO: 54224

SEQ ID NO: 62088 - DNA, 159 bp, Neisseria meningitidis; identical to SEQ ID NO: 48769

SEQ ID NO: 62089 - DNA, 975 bp, Neisseria meningitidis; identical to SEQ ID NO: 55716

SEQ ID NO: 62090 - DNA, 1428 bp, Neisseria meningitidis; identical to SEQ ID NO: 54904

SEQ ID NO: 62091 - DNA, 828 bp, Neisseria meningitidis; identical to SEQ ID NO: 54360

SEQ ID NO: 62092 - DNA, 393 bp, Neisseria meningitidis; identical to SEQ ID NO: 36603

SEQ ID NO: 62093 - DNA, 1239 bp, Neisseria meningitidis; identical to SEQ ID NO: 38584

SEQ ID NO: 62094 - DNA, 1110 bp, Neisseria meningitidis
atgaaatacaagagaatcgtatttaaagtcggcacatcttcgattacccattcggacggcagcctctcgcgcggcaaaatccaaaccattacccgccagcttgccgcattgcatcatgcgggacacgagctggtcttggtttcatccggcgcggttgcggcagggttcggtgcgctgggtttcaaaaaacgtccggccaaaatcgccgacaaacaggcttccgccgccgtcgggcaggggctgctgatggaagaatatacggcaaacctgtcttcagacggcatcgtgtccgcgcaaatcctgctcaaccgcaccgactttgccgacaaacgccgctaccaaaatgccggcggcgcgctttccgtgctgctgcaacgccgcgcgattcccattattaatgaaaacgacacggtttcggttgaggagttgaaaatcggcgacaacgacacattgagtgcgcaagtggcggcgatgatacaggcagacctcttggtgctgctgaccgacatagacggtctttacacgggcaacccgaacagcaatcccgatgccgtacggctggacagaatcgaacacatcaaccatgaaatcatcgaaatggcaggcggcgcgggctcgtcaaacggcacgggcggtatgctgaccaaaatcaaagcggcgacgattgcgaccgagtccggcgtaccggtctatatctgttcctcgctcaaacccgatgcgcttgccgaagcggcagataatcaggcggacggctcgtttttcgtcccccgcgccaaaggtttgcggacgcagaagcaatggctggcgttctattccgaaagccggggcggcgtttatgtggacgaaggtgcggaacacgctttgtccgaacagggaaagagcctgctgatgtcgggcgttgccggaatcgaagggcatttttcccgtatggacaccgtaaccgtgtacagcaacgcaaccaaacagcctttgggcaaagggcgcgtccttttcggctctgccgccgccgaagacctgctcaaatcgcgcaaagcgaaaggcgtgttcatccatcgggacgattggatttccatcacgcccgaaatacgcctgcttctgaccgaattttag

SEQ ID NO: 62095 - DNA, 984 bp, Neisseria meningitidis
atgaaaaactttctttcccttttcgcctccatactgatgtctgccctgattgccgtgtggttcagccaaaaccccatcaacgcctactggcagcagacctaccaccgcaacagtccgctcgaaccgcttgccgcctacggatggtggcggagcggtgcggcgttgcaagaaaacgcctacaccttttcagacggcatcaaagccttcctgtccggcgaaacgccgtcgacggctcaaggcggcggttcggcagatatgccgtctgaagccgccgcatcagaagccgtccctcaaaccggtaaaacagaatggaaacaagacaccgaagccgccgccgtccgcagcggcgacaaagtcttttttgccggcgactcgctgatgcagggcgttgcacccttcgtgcaaaaaagcctgaaacagcaatacggcatcgaatccgtcaacctcagcaaacaaagcacggggctgtcctacccctcattcttcgactggccgaaaacgattgaagaaaccctgaaaaaacatcccgaaatcagcgtgctcgccgtcttcctcggcccgaacgacccgtgggatttccccgtcggcaaacgatacctcaaattcgcttccgacgaatgggcgcaagaatacctgaaacgcgtcgaccgcatccttgaagccgcacacacgcaccgcgtccaagtcgtctggctcggcatcccctatatgaaaaaagccaagctcgacgggcagatgcgctacctcgacaaactgctttcggaacacctggaaggcaaaatcatcctgattcccaccgcgcacaccctgagcggcggggaagaccgctacaccgactccgtcaacgtcaacggcaaacccgtccgctaccgcagcaaggacggcatacactttaccgccgaaggacaaaaactgctggcggcaaaaataatggaaaaaatcgtttttgaaccaagtacgcaaccatcaagtacacagccatga

SEQ ID NO: 62096 - DNA, 636 bp, Neisseria meningitidis
ttgaacatcaaatattcgggcatcgaaaacaggtttgaaaccgccatcctgaagaaaaacggcgtaagatacggcttcgtctccttcgcccccaaccttgccgccgtcaaactgaacgattatgccaaagttagaaaactgattaccaaaaccaaacagaaagccgacatcgtcattgtaatgttccacggcggcgcggaagggaaacaggcggaacacctgccgttcgataccgaaatcttctatggggaaaacaggggcaacgtcgtcgagtttgcacggcttgccgtcgattccggcgcggatgtcgtattcgggcagaggccgcacgttactcgcgccgtcgaactttaccgcgaccgcttcatctcctacagcggcggcaactttgccacctacggcgcaatcaacacctccggcatcagcggcatcgcgccgattttcaaaattatcaccgacaaacaggggcggttcgtttccggtaacattatccccatcactcaagtcggcgataaaatccccaaaatcgaccccgagaaaaccgttatcgggcggattatttatctgaaccgcagcgatttccccaaggggaacggactggatgtctcgcccgacggcagcatcacgcgccggtaa

SEQ ID NO: 62097 - DNA, 345 bp, Neisseria meningitidis
atgaataagaaatatccgaaaattaactatatcggtaataaagagaaaatagcttcctggatttgtgaccagcctccgtctgatgtagatacagttgcagatgtatttagtggaggctgttcctttgcctatgaagccaaaaaacgcggctatcgtgtgattactaacgatattttggcaattaattaccaaattgctttagcattaatagaaaacaaccatgaaacattaaatgacgatgatgtcgcaatgattttttcaggcagcccgcatgccggttttatgagtcagcgttatgccgaaaaattctattttcacgatgaatgccaacaacttgatttgtac

SEQ ID NO: 62098 - DNA, 363 bp, Neisseria meningitidis; identical to SEQ ID NO: 37674

SEQ ID NO: 62099 - DNA, 453 bp, Neisseria meningitidis; identical to SEQ ID NO: 49903

SEQ ID NO: 62100 - DNA, 114 bp, Neisseria meningitidis; identical to SEQ ID NO: 42949

SEQ ID NO: 62101 - DNA, 537 bp, Neisseria meningitidis; identical to SEQ ID NO: 42803

SEQ ID NO: 62102 - DNA, 369 bp, Neisseria meningitidis; identical to SEQ ID NO: 37026

SEQ ID NO: 62103 - DNA, 174 bp, Neisseria meningitidis; identical to SEQ ID NO: 36913

SEQ ID NO: 62104 - DNA, 396 bp, Neisseria meningitidis; identical to SEQ ID NO: 37459

SEQ ID NO: 62105 - DNA, 499 bp, Neisseria meningitidis
atgagaaaaagtcgtctaagccggtataaacaaaataaactcattgaactgtttgtcgcaggtgtaactgcaagaacggcagcagagttagtaggcgttaataaaaataccgcagcctattattttcatcgtttacgattacttatttatcaaaacagtccgcatttggaaatgtttgacggcaaagtagaagcagatgaaagttattttggcggacaacgcaaaggcaaacgcggtcgcggtgctgccggtaaagtcgccgtattcggtcttttgaagcgaaatggtaaggtttatacggttacagtaccgaattcaaaccgctactttatttcctattatccgtgaacaagtgaaacctgacagcattgtttatacggattgttatcgtagctatgatgtattagatgtgcgcgaatttagccattttagcttcgctgaaacttcgttttcgtatcaatcacagcacacattttgctgaacgacaaaaccatattaa

SEQ ID NO: 62106 - DNA, 393 bp, Neisseria meningitidis; identical to SEQ ID NO: 37839

SEQ ID NO: 62107 - DNA, 450 bp, Neisseria meningitidis; identical to SEQ ID NO: 40267

SEQ ID NO: 62108 - DNA, 375 bp, Neisseria meningitidis; identical to SEQ ID NO: 42749

SEQ ID NO: 62109 - DNA, 522 bp, Neisseria meningitidis
gtgaaagatagtttaatggacgcctttgatttttttatgcaaggcaattttaaaaaaattgcaactgaacaaggtttagaccgtaaatattttatattccactatatcgtatgtaatttatctgccatttcttctttttgtttaatgaaggttatccatagttatactatcctttgtttattaataatgataattggcattgcatttggatttatcttgagaaatagggttctatctatagtaaaaaataaacaaaattttttatctgatatgtttcccttggaaatgcctttcttttctagagtatacaaaatacctatcttggccagattcttgaataggggaatgaaatggctttatctccaaaattttttctgtttagttatgatttgtttctcgatatctcttatccttaatgaagaaagggggtggatgccttattttgcctgctattggtttggactttgttatccagtaagcacttattacgtttttttatccagagattataaacatatctaa

SEQ ID NO: 62110 - DNA, 438 bp, Neisseria meningitidis; identical to SEQ ID NO: 39862

SEQ ID NO: 62111 - DNA, 171 bp, Neisseria meningitidis; identical to SEQ ID NO: 42347

SEQ ID NO: 62112 - DNA, 435 bp, Neisseria meningitidis; identical to SEQ ID NO: 36184

SEQ ID NO: 62113 - DNA, 192 bp, Neisseria meningitidis; identical to SEQ ID NO: 54511

SEQ ID NO: 62114 - DNA, 1367 bp, Neisseria meningitidis
atgcagcatctgactgaaagaatgactcaaattgccaagctgctgaattcttccgcaaacaatcctgatatagacattcccgattttcttactgaaatcaaagattattcagaattttccgtgacagatgaaaatggaacctacctgcattgggacaaattccgccagattcacacggaagatacgcggatgaaatggcgcgccgttaaggaaagccgcaaaaaaatccaaaaaccaattgatttcccgtttgaacatcagttttggttctgcattcccgactctttgcaggcacggcttcatttgattgacaaaagctgcggcagttctatcggcacgtctagcttgggtggcttcggcagaagcgagcaaaacagattcttgctcaagtctctgattatggaagaagcgattacatccgcccaactggaaggtgcggctaccacgcgtaaagtggccaaggatatgctcaaatcgcagcgtaaacccaaaacaaaagacgaaatcatgatagtgaacaactatcacttgatgaaaaaagcggtagaattgaaaaatacgccgttaagtgttgaaatgattttggatttgcaccgcattgctaccagcaacgctattgaaaacaaggccgaccccgggcaattcaggcgggacgacgaaatctttatcgccgataacgacggcaacagcctgtaccaaccaccgccacacgggcaggttcatacgctgatggaagcggtatgcacgtttgccaacaacacttatgacggcgtggaaaatccgtttatccatccggttgtccaagctatcatcctgcatttcctgattggctacatccatccgttcggagatggcaacgggcggatagcgcgggctttgttctattggtttatgctcaaaaacagctactggctgtttgaatacatatcaatcagccgtcttctgaaaaacgctccggcccaatacgccaaatcctatttgtatgcggaaactgacgattcagatttaacctatttcatctattaccaatgcgatattatcaagcgggcggttgccgatttggagcactacatttccgacaaacaaaaacaccaacaggaattcaaagcagcgattgcccaatatactgaaaagataggaaagttgaaccaacggcaaattggtatcctgcaaaaagcagtggaagaaagcggaaaaatctttactgcactagaaattgccaaccaatacggcatctccctgaatactgcccgtagcgatttgagcaaactgggagaatatagattcctagtaccgttcaaatcaggaaatgctttagagtatgttgctcctcaggatttattggaaaggttagaaaaaaaaaatag

SEQ ID NO: 62115 - DNA, 291 bp, Neisseria meningitidis; identical to SEQ ID NO: 39870

SEQ ID NO: 62116 - DNA, 126 bp, Neisseria meningitidis; identical to SEQ ID NO: 39360

SEQ ID NO: 62117 - DNA, 210 bp, Neisseria meningitidis; identical to SEQ ID NO: 55789

SEQ ID NO: 62118 - DNA, 210 bp, Neisseria meningitidis; identical to SEQ ID NO: 40404

SEQ ID NO: 62119 - DNA, 219 bp, Neisseria meningitidis; identical to SEQ ID NO: 36291

SEQ ID NO: 62120 - DNA, 453 bp, Neisseria meningitidis; identical to SEQ ID NO: 43802

SEQ ID NO: 62121 - DNA, 279 bp, Neisseria meningitidis; identical to SEQ ID NO: 37183

SEQ ID NO: 62122 - DNA, 402 bp, Neisseria meningitidis; identical to SEQ ID NO: 55449

SEQ ID NO: 62123 - DNA, 462 bp, Neisseria meningitidis; identical to SEQ ID NO: 43699

SEQ ID NO: 62124 - DNA, 331 bp, Neisseria meningitidis
atgtttgatggcgaagtagaagcagatgaaagttattttggcggacaacgcaaaggcaaacgcggtcgcggtgctgccggtaaagtcgccgtattcggtcttttgaagcgaaatggtaaggtttatacggttacagtaccgaatactcaaaccgctactttatttcctattatccgtgaacaagtgaaacctgacagcattgtttatacggattgttatcgtagctatgatgtaattagatgtgagcgaatttagccattttagcttcgctgaaacttcgttttcgtatcaatcacagcacacattttgccgaacgacaaaaccatattaa

SEQ ID NO: 62125 - DNA, 159 bp, Neisseria meningitidis; identical to SEQ ID NO: 50295

SEQ ID NO: 62126 - DNA, 429 bp, Neisseria meningitidis; identical to SEQ ID NO: 56121

SEQ ID NO: 62127 - DNA, 216 bp, Neisseria meningitidis; identical to SEQ ID NO: 37963

SEQ ID NO: 62128 - DNA, 258 bp, Neisseria meningitidis; identical to SEQ ID NO: 56044

SEQ ID NO: 62129 - DNA, 432 bp, Neisseria meningitidis
atgaccgaaaacgcacaggacaaggcgcggcaggctgtcgaaaccgtcgtcaaatccccggagcttgtcgagcaaatcctgtccgacgagtacgtgcaaataatgatagcccggcgtttccattcgggatcgttgccgccgccgtccgacttggcgcaatacaacgacattatcagcaacggggcagaccgcattatggcaatggcggaaaaagaacaagccgtccggcacgaaaccatacggcaagaccaaaccttcaacaggcgcgggcaactgtacggcttcatcagcgtcatcctgatactgctttttgccgtcttcctcgtatggagcggctaccccgcaaccgccgcctcccttgccggcggcacagtggttgccttggcgggtgctttcgtgattggaagaagccgagaccaaggcaaaaattaa

SEQ ID NO: 62130 - DNA, 396 bp, Neisseria meningitidis
atgatgtattcgtttgaagcgaatgcaaatgcagtaaaaatatctgaaactgtttcagttgataccggacaaggtgcgaaaattcataagtttgtacctaaaaatagtaaaacttattcatctgatttaataaaaacggtagatttaacacacatccctacgggcgcaaaagcccgaatcaacgccaaaataaccgccagcatttcccgcgccggcgtattggcggggggcggcaaacttgcccgcttaggcgcgaaattcagcacaagggcggttccctatgtcggaacagcccttttagcccacgacgtatacgaaactttcaaagaagacatacaggcacgaggctaccaatacgacaccgaaaccgacaaatttgcaaaggtctcaggctaa

SEQ ID NO: 62131 - DNA, 393 bp, Neisseria meningitidis; identical to SEQ ID NO: 54872

SEQ ID NO: 62132 - DNA, 528 bp, Neisseria meningitidis
atggaaatgaaacaaatgcttttagccgtcggcgtggcggcggtgttggcgggctgcggcaaggatgccggcggttacgagggttattggcgcgaaaaatcggacaaaaaagagggtatgattgccgtcaaaaaagaaaaaggcaattacttccttaataaaatcaacgtggttacaggtaaggaagaatctatgcttttgtctgaaaaagacggcgagctttcgataaacacggggataggggaaatcccgatcaaactttccgacgacgggaaagagctgtatgtcgaacgcaggcagtatgtcaaaaccgatgcggcgatgaaggacaaaatcatcgcccatcagaaaaagtgcggacaaacagcacaggcataccgcgacgcgcgaaatgcgttgccgtcaaaccagacgtatcagcagcatctggcggcgatcgagcaattgaaacggcggtttgaagccgagtttgacgaattggaaaaagaaatcaaatgcaacggcagaagcccggcattgttgctttag

SEQ ID NO: 62133 - DNA, 417 bp, Neisseria meningitidis; identical to SEQ ID NO: 39888

SEQ ID NO: 62134 - DNA, 495 bp, Neisseria meningitidis
atgatttttaaacagaatcaaaattattggacagttttttatacgaatgaagaagctctgattgttcaaacatgttcaggtttgggattaacggcaatagaccacctatatccccctcatatcctgccattggataccgacaatgaaactttaggcacaacggtcttgcaagcattggcaaacagcaggactttcgtttatgacagtccagaagaccaagatttttttgataccgaaaaaattcggcaacgctatgaggattgggttgccaagctatgcgggaacttgggctataaaaccagacgcgccctatttaaaaacatgatgagcgtggatatttggctgcacaacggctgcctgaaaatcagcccgagccgccatgtcaagctggaagcgtgggatgccattgatgcagacgatgtcattttatcattggataacagccctgaagaaatcggagcaggtttaaagttggcattgagccgctgccgatag

SEQ ID NO: 62135 - DNA, 2256 bp, Neisseria meningitidis
atgggacagtacaagaagctttggtacttgctgtttgccgttctggcggtatgctttaccattcttggctatatgggcagcgaggtttacaaaaaagccccgccttaccccgaacaggtcgtttccgcatccggcaaggtcttgatgacgaaagacgatattttggcaggtcagtctgcatggcagactaccggcggtatggaggtcggttcgattctgggccacggcgcatatcaggctccggactggacggcggactggctgcatcgtgagttggttgcctggttggatctgactgcgcaagaaacttacggtaaaaaatttgacgaagtttctcctgaagaacaagctgttctgaaaacacgtttggctgacgaataccgcaaccaaagccgtgttaaggaagatggttctgttgttgtcagcgaaacccgcgtgaaagccatcgaaagcatcctgccttactaccacggtgtgtacagcgacgatcctaagttccaaaccactcgcgaacactttgcaatgaaaaacaatacattgccaagccaagaagcgcgtgaaaaactgttcaacttcttcttctggacttcttggtctgcttcgaccaaccgtcctgacgagaattttacttacaccaacaactggccgcacgaacctttgatcaacaacgtaccgaccactgaaaactatatgtggtcattcaccagcgttgttcttctgctgatgggcatcggtttgctgatgtggggttattccttcctgaccaaacacgaagaagtggaagtgccgtctgaagacccgatttccaaaatccaactgaccccttcgcaaaaagcattgggcaaatacgtcttcctgacggtcgccctgtttgtggtacaagtattgctgggcggcctgaccgcacactacaccgtcgaaggccagggtttctacggtatcgacgaggcgttgggctttgaaatgtccgactggttcccctacgccctgacccgtacttggcacatccaatccgctatcttctggattgcaaccggctttttgacggcaggtttgttcctcgcgccgattgtcaacggcggcaaagatcccaagttccaacgtgccggtgtgaacttcctctatatcgccctcttcatcgtggtcggcggttcttacgcgggcaacttcttcgcgttgacgcacatccttccccccgaatttaatttctggttcggacaccaaggttacgaatacctcgatttgggtcgtttctggcaactcctgctgatggtcggactgctgttgtggctgttcctgatgttgcgctgcacggtttccgccttcaaagaaaaaggcgtggacaaaaacctgctggcaatctttgtcgcttctatggtcggtgtgggcgtgttctacgcaccgggactgttctatggcgaaaaatccccgattgccgtaatggaatactggcgttggtgggtggttcacctgtgggtggaaggcttctttgaagtatttgccactgccgccttcgcatttgtcttctacaatatgggctttgtccgccgcagtaccgccactgcctccactttggccgctgccgccatctttatgttgggcggcgttccgggtacgctgcaccacctgtacttctccggctctacctccgcctctatggcaatcggcgcctgcttctccgctttagaagtcgtgccgctcgtgttgctgggtcgtgaagcatacgagcattggtcttaccaacacctgtccgactgggcgaaacgcctgcgttggccgctgatgtgcttcgttgcagtcgccttctggaatatgatcggtgccggcgtattcggcttcctgatcaatccgccgatttccctgttctatatccaaggtttgaacacttctgccgttcacgcgcacgccgccttgttcggtgtgtacggtttcttggcattgggcttcgtattgctggttgcccgttatttgaaaccgaacgtgcagtttgacgacaaactgatgacttggggcttctggctgctgaacggcggtttggtgggtatgattgccatcagcctgttgccggttggcgtgattcaggcatacgcctccatcacgcacggtctgtggtatgcgcgtagcgaagagttcctgcaaatggaaatcttggatactctgcgttgggttcgtactgctgctgacttgatcttcatcggcggtgcaatctgtgtcgccatccaagccactaaaatcgtattcggccgcgacaaataa

SEQ ID NO: 62136 - DNA, 234 bp, Neisseria meningitidis
atggaagccatcgtctatctcgaagacaacgaatacatcgccttgtgcgacctgttgaaattggccggacttgccgaaagcggcggacaggcgaaggcgttgattgccgaagggttggtgtcgcgcaacggcgaaaccgaaacctgtaaaaccgccaaaatacgcggcggcgaagtcatcgagtttgacggcgcacgcttggaaattgccgatggatacgaccctgaagaataa

SEQ ID NO: 62137 - DNA, 375 bp, Neisseria meningitidis; identical to SEQ ID NO: 56062

SEQ ID NO: 62138 - DNA, 2112 bp, Neisseria meningitidis
atgaaaatatcatttcatttagctttattacccacgctgattattgcttccttccctgttgctgccgccgatacgcaggacaatggtgaacattacaccgccactctgcccaccgtttccgtggtcggacagtccgacaccagcgtactcaaaggctacatcaactacgacgaagccgccgttacccgcaacggacagctcatcaaagaaacgccgcaaaccatcgatacgctcaatatccagaaaaacaaaaattacggtacgaacgatttgagttccatcctcgaaggcaatgccggcatcgacgctgcctacgatatgcgcggcgaaagcattttcctgcgcggttttcaagccgacgcatccgatatttaccgcgacggcgtgcgcgaaagcggacaagtgcgccgcagtactgccaacatcgagcgcgtggaaatcctgaaaggcccgtcttccgtgctttacggccgcaccaacggcggcggcgtcatcaacatggtcagcaaatacgccaacttcaaacaaagccgcaacatcggtgcggtttacggttagtgggcaaaccgcagcctgaatatggacattaacgaagtgctgaacaaaaacgtcgccatccgtctcaccggcgaagtcgggcgcgccaattcgttccgcagcggcatagacagcaaaaatgtcatggtttcgcccagcattaccgtcaaactcgacaacggcttgaagtggacggggcaatacacctacgacaatgtggagcgcacgcccgaccgcagtccgaccaagtccgtgtacgaccgcttcggactgccttaccgcatggggttcgcccaccggaacgattttgtcaaagacaagctgcaagtttggcgttccgaccttgaatacgccttcaacgacaaatggcgtgcccaatggcagctcgcccaccgcacggcggcgcaggattttgatcatttctatgcaggcagcgaaaatggcaacttaatcaaacgtaactacgcctggcagcagactgacaacaaaaccctgtcgtccaatttcacgctaaacggcgactacaccatcggccgttttgaaaaccacttgaccgtaggcatggattacagccgcgaacaccgcaacccgaccttaggttacaaccgcgccttttccgcctccatcaacccctacgaccgcgcaagctggccggcttcgggcagattgcagcctattctgacccaaaaccgccacaaagccgactcctacggcatctttgtgcaaaacatcttctccgccacgcccgatttgaaattcgtcctcggcggccgttacgacaaatacacctttaattccgaaaacaaactcaccggcagcagccgccaatacagcggacactcgttcagccccaacatcggcgcagtgtggaacatcaatcccgtccacacactttacgcctcgtataacaaaggcttcgcgccttatggcggacgcggcggctatttgagcatcgatacgttgtcttccgccgtgttcaacgccgaccccgagtacacccgccaatacgaaaccggcgtgaaaagcagttggctggacgaccgcctcagcactacgttgtctgcctaccaaatcgaacgcttcaatatccgctaccgccccgatccaaaaaacaacccttatatttatgcggttagcggcaaacaccgttcgcgcggcgtggaattgtccgccatcgggcaaatcatccctaaaaaactctatctgcgcggttcgttgggcgtgatgcaggcgaaagtcgttgaagacaaagaaaatcccgaccgagtgggcatccatttgaataacaccagcaacgttaccggcaacctgtttttccgttataccccgaccgaaaacctctacggcgaaatcggcgtaaccggtacaggcaaacgctacggttacgactcaagaaataaagaagtgactacgcttccaggctttgcccgagttgatgccatgcttggctggaaccataaaaatgttaacgttacctttgccgcagccaatctgttcaatcaaaaatattggcgttcggactctatgccgggtaatccgcgcggctatactgcccgggtaaattaccgtttctga

SEQ ID NO: 62139 - DNA, 1176 bp, Neisseria meningitidis; identical to SEQ ID NO: 46694

SEQ ID NO: 62140 - DNA, 1164 bp, Neisseria meningitidis; identical to SEQ ID NO: 38788

SEQ ID NO: 62141 - DNA, 1266 bp, Neisseria meningitidis; identical to SEQ ID NO: 55965

SEQ ID NO: 62142 - DNA, 2088 bp, Neisseria meningitidis; identical to SEQ ID NO: 55290

SEQ ID NO: 62143 - DNA, 966 bp, Neisseria meningitidis; identical to SEQ ID NO: 61818

SEQ ID NO: 62144 - DNA, 603 bp, Neisseria meningitidis; identical to SEQ ID NO: 56065

SEQ ID NO: 62145 - DNA, 666 bp, Neisseria meningitidis; identical to SEQ ID NO: 56066

SEQ ID NO: 62146 - DNA, 1218 bp, Neisseria meningitidis; identical to SEQ ID NO: 56067

SEQ ID NO: 62147 - DNA, 318 bp, Neisseria meningitidis
atggcggaaaagctggcgatgtcggcaggcgggtatgccaaaatcgaacggggcgaaacgcagttgaatatcccgcgtttggagcagttggctcagattttcaaaatcgatatgtgggacttgctcaaatcgggcggcggcgggatggtgtttcagattaatgaaggtgatagtggtggcgatattgcgttgtatgcgtcaggtgatgtttcgatgaaaatagaatttttaaaaatggagttgaaacattgtaaagaaatgttggaacaaaaagacaaagaaatcgagttgctccgcaagctgaccgaaaccgtttaa

SEQ ID NO: 62148 - DNA, 696 bp, Neisseria meningitidis; identical to SEQ ID NO: 41477

SEQ ID NO: 62149 - DNA, 501 bp, Neisseria meningitidis; identical to SEQ ID NO: 41327

SEQ ID NO: 62150 - DNA, 4176 bp, Neisseria meningitidis
atgaatttgttgaacttatttaatccgttgcaaactgccggcatggaagaagagtttgatgccattaaaatcggtattgcctctcccgaaaccatccgctcatggtcttatggcgaagttaaaaaacctgaaaccatcaactaccgtacgttcaaacccgagcgcgacggcttgttctgcgccaaaatctttggcccggtcaaagactacgaatgcttgtgcggtaaatacaaacgcttgaaatttaaaggtgtaacttgtgaaaaatgcggcgtggaagtaaccctgtccaaagtacgccgcgaacgtatgggtcacattgaattggccgcgcccgtcgcacacatttggttcttaaaatccctgccttcccgcttgggtatggtgttagacatgactttgcgcgacatcgagcgcgtattgtactttgaagcatttgtggtaaccgatcccggtatgactccgctgcaacgccgccaattgctgactgaagacgattactacaacaagctggacgaatacggcgacgacttcgatgccaaaatgggtgcagaaggtatccgcgaattgctgcgtaccttgaatgtagcaggcgaaatcgaaatcctgcgtcaagagctggaatcgaccggttccgacaccaaaatcaaaaaaatcgccaaacgcttgaaagtattggaagccttccatcgttccggtatgaaattggaatggatgattatggatgtgctgccggtattacctcccgatttgcgtcctttggttccgttggacggcggccgttttgccacttccgatttgaacgatttgtaccgccgcgtcatcaaccgcaacaaccgtctgaaacgcctgctggaactgcacgcgcccgacattatcgtccgcaacgaaaaacgtatgttgcaagaagcagttgactcgctgttggataacggtcgtcgcggtaaagccatgaccggtgccaacaaacgtccgctgaaatcattggcagacatgattaaaggtaaaggcggtcgcttccgtcaaaacctgttgggcaaacgtgtggactactccggccgttccgtgattaccgtaggcccatacctgcgtctgcaccaatgtggtctgccgaaaaaaatggctttggaactgttcaaaccgttcattttccacaaattggaaaaacaaggtctggcttccaccgttaaagcagcgaaaaaattggtagagcaagaagtaccggaagtatgggacatcttggaagaagtcatccgcgaacatccgattatgctgaaccgtgcgccgaccctgcaccgtttgggtattcaagcgtttgaacctatcttgattgaaggtaaagcgattcagttgcacccattggtgtgtgccgcgttcaacgccgactttgacggcgaccaaatggcggtacacgttccattgagcttggaagcacaaatggaagcacgcacgctgatgctggcttcaaacaacgtattgtctcctgccaacggcgaaccgattattgtaccttcccaagatatcgtattgggtctgtactacatgacccgcgaccgtatcaatgccaaaggcgaaggcagcctgtttgccgatgtgaaagaagtgcatcgcgcataccataccaaacaggtcgagctgggtacaaaaatcaccgtacgtctgcgcgaatgggtgaaaaacgaagcaggtgagtttgagcctgtcgttaaccgttacgaaacaaccgtcggccgtgcattgttgagcgaaatcctgccgaaaggcctgccgtttgaatatgtcaacaaagcgttgaagaaaaaagaaatttctaaactgattaacgcatcgttccgcctgtgcggcttgcgcgatacggttatctttgctgaccacctgatgtacaccggtttcggatttgcggcaaaaggcggtatttccattgccgttgacgatatggaaattccaaaagaaaaagcggccttgctggctgaagccaatgccgaggttaaagaaatcgaagaccaataccgtcaaggtttggttaccaacggcgaacgctacaacaaggtggtcgatatttggggtcgtgccggcgataaaatcgctaaggcgatgatggacaacctgtccaaacaaaaagttatcgaccgtgccggcaacgaagtcgatcaagagtcattcaactccatctatatgatggcagactccggtgcccgtggttctgcggctcagattaaacagttgtcaggtatgcgcggtttgatggcgaaacctgacggctcgattattgaaacgccgattacctcaaacttccgcgaaggtctgaccgtattgcaatactttattgcgacccacggtgcgcgtaagggtttggcggataccgcattgaaaaccgcgaactccggttacctgacccgtcgtctggtagacgtaactcaagatttggtcgttgttgaagacgattgcggtacttcagacggctttgttatgaaggcagtggtacaaggcggtgatgtgattgaagcattgcgcgatcgtattttgggccgtgttactgcgtctgacgttgtcgatccgtcaagcggcgagaccttggttgaagccggtacgttgttgactgaaaaactggtggatatgattgaccaatccggtgtcgatgaagtcaaagtccgtacgccgattacttgtaaaacccgccacggtttgtgcgcgcactgttatggtcgcgacttggcacgtggtaagctggtcaatgccggtgaggcagttggtgtgattgccgcccaatcaatcggcgaaccgggtacccagctgactatgcgtacgttccacatcggtggtgcggcatcccgtgcggcagcagccagccaagtggaagccaaatccaacggtacggcacgattcagcagccaaatgcgttatgttgccaacaataaaggcgagttggttgtcatcggccgttcttgtgaagtcgtgattcacgacgatatcggccgtgaacgcgaacgccacaaagtaccttacggtgccatcctgctggtacaagacggtatggccattaaagccggtcaaaccttggcaacctgggatccgcatacccgtccgatgatcaccgaacatgcaggtatggtgaaatttgagaacgtggaagagggtgttaccgttgcgaaacaaactgacgatgtaaccggtttgtccactttggtggtgattgacggtaaacgccgttccagcagcgcgtccaaactgctgcgtccgactgtaaaattgttggatgaaaacggcgtggaaatctgtattcccggtacgtccactccggtttcgatggcattccccgttggtgcggtgattaccgtacgcgaaggtcaggaaatcggtaaaggcgacgtattggcgcgtatcccgcaagcctcttccaaaacccgcgacattaccggtggtctgccgcgcgttgccgaattgtttgaagcacgcgtgccgaaagatgccggtatgttggcggaaattaccggtaccgtttccttcggcaaagagaccaaaggcaagcaacgtctgattgttactgacgtggacggtgtagcatacgagaccttgatttccaaagagaaacaaattctggtacacgacggtcaagtggtaaaccgcggtgaaaccatcgtggacggagctgttgatccgcatgatattctgcgtttgcaaggtatcgaagcactggcacgctacattgtccaagaggtgcaagaggtttaccgtctgcaaggtgtgaagatttctgataaacacatcgaagtcatcatccgtcaaatgttgcgccgtgtgaacattgcggatgccggcgaaaccgggttcattaccggagagcaggtcgaacgcggcgatgtgatggcggccaatgaaaaagctttggaagaaggcaaagagccggcacgttacgaaaacgtattgctgggtattaccaaagcctccctgtccaccgacagtttcatttctgccgcatcgttccaagaaacgacccgtgttctgaccgaagccgcgattatgggcaaacaagacgaactgcgcggtttaaaagagaacgtcatcgtcggccgcctgattcctgccggtaccggtttgacttaccaccgcagccgtcatcaacaatggcaagaggtggaacaggagactgctgaaacccaagtaacggatgaataa

SEQ ID NO: 62151 - DNA, 321 bp, Neisseria meningitidis; identical to SEQ ID NO: 56069

SEQ ID NO: 62152 - DNA, 279 bp, Neisseria meningitidis; identical to SEQ ID NO: 36930

SEQ ID NO: 62153 - DNA, 330 bp, Neisseria meningitidis; identical to SEQ ID NO: 37077

SEQ ID NO: 62154 - DNA, 354 bp, Neisseria meningitidis; identical to SEQ ID NO: 36586

SEQ ID NO: 62155 - DNA, 621 bp, Neisseria meningitidis
atggcacgttatattggccctaaatgtaagttggcacgtcgcgaaggtacggatttgtttttgaagagtgcgcgccgctctttggattccaaatgtaaaattgattccgctcccggtcagcatggtgcaaaaaaaccgcgtttgtcagactatggtttgcagttgcgtgaaaaacaaaaaatccgccgtatttatggcgtattagaacgtcagttccgtcgttatttcgcagaagctgatcgtcgtaaaggttctaccggcgagttgctgttgcagttgctggaatctcgtttggataatgtcgtttatcgtatgggtttcggttctacccgagctgaagcaagacagcttgtttctcataaggcgatagttgtgaatggacaagttgtcaatattccttctttccaagtgaaagctggtgatgttgtctcagttcgtgaaaaagccaaaaaacaggtacgtattcaagaagcattgggtttggcaactcaaatcggcttgccgggttgggtttctgtagatgcggataaacttgagggtgtgttcaaaaacatgccggatcgctcggaattgaccggtgatattaatgaacagctggtggtagagttctactctaaataa

SEQ ID NO: 62156 - DNA, 714 bp, Neisseria meningitidis; identical to SEQ ID NO: 41313

SEQ ID NO: 62157 - DNA, 2760 bp, Neisseria meningitidis
atgaaaagaatgttatttaacgcaacgcaggccgaagagctgcgcgttgccatcgtcgacggacaaaacctgctggatttggacatcgaaacgctgggcaaagaacagcgcaaaggcaatatctacaaaggcatcattacccgcatcgagccgtcgctggaagcgtgtttcgtggattacggaaccgaccgccacggcttcttgccgtttaaagaagtctcccgctcatacttccaagactacgaaggcggacgcgcgcgcatccaagacgtgctcaaagaaggcatggaagtcatcgtccaagtcgaaaaagacgagcgcggcaacaaaggcgccgcgctgaccaccttcatcagcctcgccggacgctatctggtattgatgccgaacaacccgcgcggcggcggcgtatcccgccgtatcgaaggtgaagagcgtcaagagttgaaagccgccatggcggaactcgacattccgaacggcatgagcatcatcgcccgtaccgccggcatcggccgcagcgcggaagagttggaatgggacttgaactacctcaaacaactctggcaggcgattgaagaagcaggaaaagcgcatcacgacccctacctgctctttatggaaagctcgctgctgatccgagccatccgcgactatttccgccccgacatcggcgagattttggtggacaatcaagaagtttacgaccaagttgccgagttcatgagctacgtcatgccgggcaatataggccgtctgaaactctacgaagaccacacgccgctgttttcccgcttccaaatcgaacaccaaatcgaaagcgcgttttcgcgcagcgtcagcctgccctccggcggcgcgatcgtcatcgaccataccgaagccctcgtctccatcgacgtgaactccgcacgcgccactcgcggcgcagacattgaagacaccgcgttcaaaaccaatatggaagccgccgaagaagtcgcccgacaaatgcgcctgcgcgacttgggcggcttggtcgtcatcgacttcatcgacatggaaaaccccaaacaccagcgcgatgtggaaaacgtcctgcgcgacgcgctcaaaaaagaccgcgcccgcgtgcagatgggcaaactctcccgtttcggacttttagaattgagccgccaacgtttgaaaccggctttgggcgaaagcagccacgtcgcctgtccgcgctgcgccggcaccggcgtgattcggggcatcgaatccaccgccctgcacgttttacgcatcattcaagaagaagcgatgaaggacaacaccggagaagtgcgcgcacaagtgcccgtcgatgtcgccaccttcctgctgaacgaaaaacgcgccgagctgtttgcgatggaagagcgtttggatgtcaacgtcgtcctgattccgaacatccacctcgaaaatccgcactacgaaatcaaccgcatccgcaccgacgacgtagaagaagacggcgaaccgagctacaaacgcgtcgccgagccggaagaagacgaatccgccaaaccgttcggcggcgaaaaagccaaagccgcccgtcccgaacccgccgtcaaaggcgtgcgccacaccagccccgccccgactgccgcccccgagaaaaaaacctcttggtgggacagcttcaaagcatggctcaaacgcattttcggcggcagcgaaacccaagccgcgcccgctgccgaaacctccgaaaaacgcagcacggcaaaccgcagcggcagccgcgccaacaaccgccgccaaaacccgcgccgcagcaaacgcgaaggcagcaaagtagaagtccgcgaagtggcaggcaaaactgccggacaggaagcgcgtgccgacaaagccgaaacgcgcaacaacggcaaccgccgccgcaatgaacgcggcgaccgtgccgccgaacgcgccaacgaagcggaaatccaaagccgcaacgtacagcctgccgcaaccgttgcagatgccgcaccgtccgaaaccgaaatgcaaaccggcaaacgccgccgcaacggcagccgcagcgaacgcagccaaaccgcgccggaaaccgccgccgttgccgaaacagccgttcagacagcggaaaacacgccgtccgaaccgcataccgcagaagacaaaggcagcaagcccaaatccgaacgcaaccgccgcgaacgcgacagccgcgacgccaaagaacgccgcgagcgcaacaatcagcgcgaccgccgtcaaaacggcaaaaaacgcaatatcccgtctgccgccaaaatcgagcagtacctgaatattcacgacaccgccgacaaagtccgttccgccgccgcgcacgttttcggcgaaaccgacgcaaacgcgccgattaccgtcagcattgccgatccggttgcagaaagggatcttccgacagcatctcccgccgtttcaaacggcgacgcaccggtttatgatgcggcggaaaaaatccgccgtgccaccgccgccatcctgcccgaaggcgcgacaccgaaagccgaagcacaggaaatgccgtctgaaaccgcaacctttacggctgcggcggaacaggcacgggaaaccgcacaaaccggcggactcgtcctgatcgaaaccgaccctgccgcattgaaggcatgggcggcacaacccgaagtccaaaccggacgcggtttgcgccgttccgaacagcccaagccgtctgaagtcgcaaccgtccctgccgaagaaatgatccaagtcgaaacccggcaaggctga

SEQ ID NO: 62158 - DNA, 291 bp, Neisseria meningitidis; identical to SEQ ID NO: 54697

SEQ ID NO: 62159 - DNA, 873 bp, Neisseria meningitidis; identical to SEQ ID NO: 39987

SEQ ID NO: 62160 - DNA, 438 bp, Neisseria meningitidis; identical to SEQ ID NO: 56083

SEQ ID NO: 62161 - DNA, 1077 bp, Neisseria meningitidis
atgcaagaatggttccaaaacctctttgccgcaacgctcggtctgggcgatttgggcatcaccgtaggcttggtggtatccgtcatcgtcaaaatcgtgattatcctgattccgctgattctgaccgttgcctacctgacgtatttcgaacgtaaagtcatcggcttcatgcagcttcgcgtcggtccgaacgtaaccggcccgtggggtctgattcagccgtttgccgacgtgttcaaactcttgtttaaagaggtaacccgtccgaagctgtcaaacaaagccctgttctacatcggcccgattatgtcgcttgctccgtctttcgcagcatgggcagtgattccgttcaacgaagaatgggtgctgaccaacatcaatatcggccttttgtacatcctgatgattacctcgctgtcggtttacggcgtgatcatcgcgggctgggcttccaactccaaatattcgttcttgggtgcaatgcgtgcttccgcacaaagcatttcctacgagattgccatgagtgccgcgctggtgtgcgttgtgatggtatcgggcagcatgaacttctccgacatcgttgccgcacaagccaaaggcatcgcgggcggttccgtgttctcgtggaactggctgccgctcttccccatcttcatcgtttatctgatttccgccgttgccgaaaccaaccgcgcaccgtttgacgtggcagagggcgagtccgaaatcgttgccggacaccacgttgaatattccggcttcgcattcgcgctgttcttccttgccgaatacattttcatgattctgattgccgcgctgacatcgctgatgtttctcggcggctggttgtctccgttcccgcaaagctggggctttatcggtacgccttccgcattctggatgtttgtgaaaatggcggcagtgttgtactggtatctgtggatccgtgcaaccttcccgcgctaccgttacgaccaaatcatgcgtttgggctggaaagtgctgattccgatcggcttcgcctacatcgtgattttgggcgtgtggatgatttcaccgctgaatttgtggaaataa

SEQ ID NO: 62162 - DNA, 1047 bp, Neisseria meningitidis
atgatgaaaatcaaagccctgatgattgccgccgcattgctggcagcagccgatgtccacgccgcaccgcaaaaggcaaaaaccgcatccgccaaagttgccaaagttgccaaagttgccaaagttgccaaagttgccaaagttgccaaagttgccgccacggcgcaaaaagaagccgcacccgcacaacagcagggcggtatccgcttttcagacggcattgccgccgttgccgacaacgaagtcatcacgcgccgccggcttgccgaagccgttgccgaagccaaagccaacctgcccaaagaggcgcagataagcgaatccgagctgtcccgacaggtgctgatgcagcttgtcaaccaatccctgattgtacaggcgggcaaacgccgcaacattcaagcaagcgaagcggaaatcgatgccgtcgtcgcaaaaaattccgccctcaaaaacctcagccccgcccaacgccgcgattttgccgacaacatcattgccgaaaaagtccgccagcaggcagtgatgcagaacagccgcgtgagcgaagctgaaatcgatgccttcctcgagcaggcgcaaaaacaaggcatcaccctgcccgaaggcgcaccgttgcgccaataccgcgcccaacacatcctgattaaagccgacagcgaaaacgccgccgtcggcgcggaaagcaccatccgcaaaatctacggagaggcccgcagcggcacagacttttccagcctagcgcgccaatattcgcaagacgcgagcgcgggcaacggcggagatttgggctggtttgccgacggcgtgatggttcccgcctttgaagaagccgtccacgcgctcaaacccggacaggtcggcgcgcccgtccgcacccaattcggctggcatatcatcaaattgaacgaagtgcgcgatgccggcacacctcaggaacgtatccgcaattccgtgcggcaatacatcttccaacaaaaagccgaacaggcaaccgtcaacctgttgcgtgacctgcattccggcgcgtatgtcgacatccgctaa

SEQ ID NO: 62163 - DNA, 2379 bp, Neisseria meningitidis
gtgctggcattgggcctctgcttcggcacgcattgcgccgccgccgatgccgttgcggcggaggaaacggacaatccgaccgccggaggaagcgttcggagcgtgtccgaacccatacagcctaccagcctgagcctcggttcgacctgcctgttttgcagtaacgaaagcggcagccccgagagaaccgaagccgccgtccgaggcagcggcgaagcatccatccccgaagactatacgcgcattgttgccgacaaggtggaaggacagtcgcaggtgcaggtgcgtgccgaaggcaacgtcgtcgtcgaacgcaaccggacgaccctcaataccgattgggcggattacgaccagtcgggcgacaccgttaccgcaggcgaccggttcgccctccaacaggacggtacgctgattcggggcgaaaccctgacctacaatctcgagcagcagaccggcgaagcgcacaacgtccgcatggaaatcgaacaaggcggacggcggctgcaaagcgtcagccgcaccgccgaaatgttgggcgaagggcattacaaactgacggaaacccaattcaacacctgttccgccggcgatgccggctggtatgtcaaggcagcctctgtcgaagccgatcgggaaaaaggcataggcgttgccaaacacgccgccttcgtgttcggcggcgttccccttttctatacgccttgggcggacttcccgcttgacggcaaccgcaaaagcggcctgcttgttccctcactgtccgccggttcggacggcgtttccctttccgttccctattatttcaaccttgcccccaatctcgatgccacgttcgcgcccggcgtgatcggcgaacgcggcgcggtctttgacgggcaggtacgctacctgcggccggattatgccggccagtccgacctgacctggctgccgcacgacaaaaaaagcggcaggaataaccgctatcaggcgaaatggcagcatcggcacgacatttccgacacgcttcaggcgggtgtcgatttcaaccaagtctccgacagcggctactaccgcgacttttacggcaacaaagaaatcgccggcaacgtcaacctcaaccgccgtgtatggctggattatggcggcagggcggcgggcggcagcctgaatgccggcctttcggttctgaaataccagacgctggcaaaccaaagcggctacaaagacaaaccgtatgccctgatgccgcgcctttccgccgattggcgcaaaaacaccggcagggcgcaaatcggcgtgtccgcacaatttacccgcttcagccacgacagccgccaagacggcagccgcctcgtcgtctatcccgacatcaaatgggatttcagcaacagctggggttacgtccgtcccaaactcggactgcacgccacctattacagcctcaaccgcttcggcagccaagaagcccgacgcgtcagccgcactctgcccattgtcaacatcgacagcggcgcaacttttgagcggaatacgcggatgttcggcggcggagtcctgcaaaccctcgagccgcgcctgttctacaactatattcctgccaaatcccaaaacgacctgcccaatttcgattcgtcggaaagcagcttcggctacgggcagctctttcgcgaaaacctctattacggcaacgacaggattaacaccgcaaacagcctttccgccgccgtgcaaagccgtattttggacggcgcgacgggggaagagcgtttccgcgccggcatcggtcagaaattctatttcaaggatgatgcggtgatgcttgacggcagcgtcggcaaaaaaccgcgcaaccgttccgactgggtggcatttgcctccggcagcatcggcagccgcttcatcctcgacagcagcatccactacaaccaaaacgacaaacgcgccgagaactacgccgtcggtgcaagctaccgtcccgcacagggcaaagtgctgaacgcccgctacaaatacgggcgcaacgaaaaaatctacctgaagtccgacggttcctatttttacgacaaactcagccagctcgacctgtccgcacaatggccgctgacgcgcaacctgtcggccgtcgtccgttacaactacggttttgaagccaaaaaaccgatagaggtgctggcgggtgcggaatacaaaagcagttgcggctgctggggcgcgggcgtgtacgcccaacgctacgttaccggcgaaaacacctacaaaaacgctgtctttttctcacttcagttgaaagacctcagcagtgtcggcagaaaccccgcagacaggatggatgtcgccgttcccggctacatccccgcccactctctttccgccggacgcaacaaacgaccctga

SEQ ID NO: 62164 - DNA, 198 bp, Neisseria meningitidis; identical to SEQ ID NO: 47961

SEQ ID NO: 62165 - DNA, 651 bp, Neisseria meningitidis; identical to SEQ ID NO: 43953

SEQ ID NO: 62166 - DNA, 1008 bp, Neisseria meningitidis
atgagcaccttcttccggcaaaccgcccaagccatgattgccaaacacatcgaccgtttcccgctattgaaattggaccgggtgattgattggcagccgatcgaacaatacctgaatcgtcaaaaaacccgttaccttagagaccaccgcggccgtcccgcctacccgctgttgtccatgttcaaagccgtcctgctcggacaatggcacagcctctccgatcccgaactcgaacacagcctcatcacccgcatcgatttcaacctgttttgccgttttgacgaactgagcatccctgattacagcaccttatgccgctaccgcaattggctggcgcaagacgacaccctgtccgaattgctcaaactgatcaaccgccaactgaccgaaaaaggtttaaaaatagagaaagcatccgctgccgtcgttgacgccaccattattcagaccgccggcagcaaacagcgtcaggccatagaagttgacgaataaggacaaatcaacggccaaaccacaccgagtaaggacagcgatgcccgttggatcaagaaaaacggcctctacaaactcggttacaaacaacatacccgtaccgatgcagaaggctatatcgagaaactgcacattacccccgccaatgcccatgagtgcaaacacctgtcgccgttgttggaagggttacccgaaggtacgaccgtctatgccgacaaaggctacgacagtgcggaaaaccggcaacatctggaagaacatcagttgttggacggcattatgcgcaaagcctgccgcaaccgcccgctgtcggaagtgcaaaccaaacgcaaccgatatttgtcgaagacccgttatgtggtcgaacaaagcttcggtacgctgcaccgtaaattccgctatgcgcggtcaacctatttcggactgattaaagtgagtgcgcaaagccacctgaaggcgatgtgtttgaacctgttgaaagccgccaacaggctaagtgcgcccgctgccgcctaa

SEQ ID NO: 62167 - DNA, 687 bp, Neisseria meningitidis; identical to SEQ ID NO: 36558

SEQ ID NO: 62168 - DNA, 969 bp, Neisseria meningitidis
atgaaaattttgcttgtccgcttgtctagtatgggcgatttaattcacactttgcccgcaatcgaagatttggcgcgacaatgtcctgatgtagaactgcattggctatgtgaggctggatttgcagatattgcgcgcctgcatccgtttgtaaaaaaaatccatgtgatgaaatggcggcaatggcgcaaacatctctttcgggctgaaacttggcgggaaatgggtcatctgaaacagactttgcggcaggaagtatttgatttcgtattggacagtcaaggtctgattaaaagcgcgtgtttcgctaaaatggcgaaatcccctatttatggtttggataaaaacagtgcgcgcgagggatgggctgctttggcgtatgtaaaaacatacgctgtaccgaagggaaaaaatgccgtttggcgcaaccgtgaactgtttgcccaagtatttgggtatgtaatgccggaaacgcaggtatttggcttgactgttcctgaagcaggccgtctgaaaaatttagcgcagccgtattatgcggctttgcatgcgaccagtcgggacagtaagttatggcctgtggaaaactggcggtcgttgctgcaaaagttgaatgaagaacagcaatgcaatatttacctgccttggggaaatgaagatgaaaaaacgcgtgccaaacaaattgcagacggactgccgtttgctattgtgtgcgacaaaataaatttattgcaggcagcgtatctgctgaaatacgcggtcggaattgtcggcgtggataccggtttgctgcatttggcaaatgccttggaaaaacctgtggtcggcatttataccgataccgatccgattaaaacaggcgttcaggtttcgccaattgcaaaaaatttgggcaatatcgggcagattccgaccgcagatttggtttatcaagcgctgatggattgtgttgcagcagacaaaggctaa

SEQ ID NO: 62169 - DNA, 207 bp, Neisseria meningitidis; identical to SEQ ID NO: 41992

SEQ ID NO: 62170 - DNA, 1107 bp, Neisseria meningitidis
atgtccttgacccgcctaatcttgaaattctatgcactgttgcgcctttttttgggcaaaaacgcccgcaccgcatggatttcgcatcccgcctgtgccgggcacgaacccggcgcaaaccatcccgattcgcccgaccgcatcctctgcatcgagcaggcattgcgccgcgccggtatttggcagcacctccaaaccatagaggcggaagaaatcagcgatacgcgcctcgcacttgtccactcgagcaaatatctgaaccgtttggaatcttgcctgccccaaaaaggcaagattttccgcctggataacgacactgcaatcagcacaggctcgctgtctgccgcacactttgccgccggttcggcagttcaggcagtcgacatggtcatgaaccgtaaagcatggcatgccttttgcgccgcccgcccgcccggacaccatgcgggcagcggcaaagccggcggattctgcctgctgaacaacgttgccgccggcgtcatgcatgccattgccgaataccgcctgaaacgcattgccgtcatcgatttcgatgtccactacggcgacggtacggcagaaatattcaaagacgatccgcgcatcctgtttttcaacctgtttgaaaccgaccttttccccttccccgaaaacaacgatatgcccgacggcggcaatatggtgcacctgcccttgccgccgggaacgggcagccgcacattccgcgaagccgtccgcaggcagtggctgccccgacttgccgcattcaaacccgaactggtgctgctgtcggcaggattcgacgcacaccgtctagacgaatcgggcaggctcaacctgcacgaggcggattttgcctggctgacacacaaaatcattcagacggcatcgggctgccccggcaaaatcgtatccgtactcgaaggcggctacacccttgaacctctggcacaatctgctgccgagcatatccgcgtgctggcagggctgggcaaatccgatgccgcaaccgcctatcagaaaacactggacccaacaaaaaaacggtttgccaaaccgaaaaccggacaggtgcgccaacctacccaatccgaccgttacgacata

SEQ ID NO: 62171 - DNA, 627 bp, Neisseria meningitidis
atgagatgttttatgattcaaaatgttgttacttcaataatcctgtattctgggacagccgtagacttacttattatcctaatgttattttttgccaaaagaaaaagcagaaaagacatcattaacatctatttaggacaatttctaggctctgttagcctgatattgctaagtttgctttttgcatttgtcttagattatattcctagtaaagagattttaggtttgctcggcttgattccaattttcctaggcatcaaagttttgctgttaggagattctgatggagaggctattgccaaagagggtttgcgcaaagataataaaaacctgatttttctagtcgctatgattacttttgcaagttgtggtgctgacaatattggtgtctttgtcccatattttactaccttaaatttagcgaatttgatagtggctttacttacctttctagtcatgatttatctcttggttttttctgcccaaaaattagcacaagtcccttctgttggagaaactttggaaaaatatagcagatggtttgttgctgttgtttatttaggattggggatatatatcctggttgaaaacaacagttttgatatgctatggactgtgttgggctag

SEQ ID NO: 62172 - DNA, 573 bp, Neisseria meningitidis; identical to SEQ ID NO: 47972

SEQ ID NO: 62173 - DNA, 543 bp, Neisseria meningitidis; identical to SEQ ID NO: 40003

SEQ ID NO: 62174 - DNA, 924 bp, Neisseria meningitidis; identical to SEQ ID NO: 56041

SEQ ID NO: 62175 - DNA, 315 bp, Neisseria meningitidis; identical to SEQ ID NO: 37950

SEQ ID NO: 62176 - DNA, 561 bp, Neisseria meningitidis; identical to SEQ ID NO: 36282

SEQ ID NO: 62177 - DNA, 819 bp, Neisseria meningitidis
ttgttaatccactatactttatgccgctaccgcaaccggctggcgcaagacgacaccctgtccgaattgctcaaactgattaactgccaactgaccgaaaaaggcctaaaagtagagaaagcatccgccgccgtcgttgacgccaccattattcagaccgccggcagcaaacagcgtcaggctatagaagtcgataacaaaggacaagtcagcggccaaaccacaccgagtaaggacagcgatgcccgttggatcaagaaaaacggcctctacaaactcggttacaaacaacatacccgtaccgatgcggaaggctatatcgagaaactgcacattacccccgccaatgcccatgagtgcaaacacctgccgccgttgttggaaggactgcccaaaggtacgaccgtctatgccgacaaaggctatgacagtgcggaaaaccggcaacatttggaagaacatcagttgcaggacggcattatgcgcaaagcctgccgcaaccgtccgctgacggaggcacaaaccaaacgcaaccgatatttgtcgaagacccgttatagtggattaaatttaaatcaggacaaggcgacgaagccgcagacagtacaaatagtacggcaaggcgaggcaacgccgtactggtttaaatttaatccactatatgtggtcgaacagagcttcggtacgctgcaccgcaaattccgctatgcgcgggcagcctatttcgggctgctcaaagtgagtgcgcaaagccacctgaaagcgatgtgtttgaacctgttgaaagcggccaacaggctaagtgcgcccgctgccgcc

SEQ ID NO: 62178 - DNA, 405 bp, Neisseria meningitidis; identical to SEQ ID NO: 43748

SEQ ID NO: 62179 - DNA, 411 bp, Neisseria meningitidis; identical to SEQ ID NO: 42958

SEQ ID NO: 62180 - DNA, 438 bp, Neisseria meningitidis; identical to SEQ ID NO: 42580

SEQ ID NO: 62181 - DNA, 393 bp, Neisseria meningitidis; identical to SEQ ID NO: 43975

SEQ ID NO: 62182 - DNA, 705 bp, Neisseria meningitidis; identical to SEQ ID NO: 56111

SEQ ID NO: 62183 - DNA, 321 bp, Neisseria meningitidis; identical to SEQ ID NO: 56112

SEQ ID NO: 62184 - DNA, 1197 bp, Neisseria meningitidis
ttgtccacttttccgaaccacaccatgcacaccatttcctttccaaaccgcacccgactcaccgccctgccgcccctgtcgctttacatccacatcccgtggtgcatcaaaaaatgcccgtattgcgactttaattcccacagcctgaaaaacggattgcccgaagccgcctatatcgacgcgctgctgaccgacttgcagctcgaattgcccaatatttggggcaggccggtggaaacgatctttttcggcggcggtacgcccagcctgtttcaggcggaatcgattgaccgtttattgagcggcgtgcgttcgctgttgcgcttgcagccggaagcggaaattaccttggaagccaatccggggacatttgaaatcgagaagtttcaaggatttaaagacgcaggcatcacgcggctttctattggtgtacagagtttcaacgacgatatgctctcaaggctggggcgcgtccacaacggcaaggaagccttaaccgctatcgataccgccttgaaattatttgataaagtcaatatcgacttgatgtatgccctgccgaaccaaaccgttcagacggcattggacgacgtacaaaccgctatcgctacgggcgcgacccacatcagcgcgtatcatctgacgatggaaccgaacacgccgttcggtcatacgccgccgaaaggtttgccgcaagacgaagccgccctcgacatcgaagacgcggtacacggcgcgctggaaagcgcgggttttgtccactacgaaacatcggcttttgcgaaaccagccatgcagtgccgccacaatttgaactactggcagttcggcgattatttaggcataggcgcgggcgcgcacggcaaaatttcctatcccgaccgcatcgagcgcaccgtccgccgccgccaccccaacgactacctcgccttaatgcaaaaccgaccgagcgaagccgtcgaacgcaaaaccgtcgccgccgaagatttgccgtttgagttcatgatgaacgccctgcgcctgaccgacggcgtacccgccgcgatgttgcaggaacgcacgggcgtaccgagtgccaaaatcatggcgcaaatcgaaacagcaaggcaaaaaggcctgctggaaaccgaccccgccgtattccgcccgaccgaaaaaggacgcttgtttttaaacgatttgctgcaatgtttttta

SEQ ID NO: 62185 - DNA, 318 bp, Neisseria meningitidis; identical to SEQ ID NO: 43381

SEQ ID NO: 62186 - DNA, 378 bp, Neisseria meningitidis
atgtgcgagttcaaggattttagaagaaacatcccttgttttaaggagtatgacgaaaattcatttattggcaaatggtatgatgacggggtgtgggatgatgaagaatattggaaattggagaatgctttaatcgaggttaggagaaaatatccttatccgatggatataccaagggatatcgtgattggaatcggtagcattattgagtttttaatggttccaaattggaaactttttacaattaaatcttccccttggttgcctaaaagtatcaaaattaatgagcgttatgaaaggttcagagtaatgctccgttatatttttaccgagaaagacatagtcaacgtacgatttgattattacaacaaaaaatag

SEQ ID NO: 62187 - DNA, 402 bp, Neisseria meningitidis
atgatgtgcgagttcaaggattttagaagaaacatcccttgttttaaggagtatgacgaaaattcatttattggcaaatggtatgatgacggggtgtgggatgatgaagaatattggaaattggagaatgatttaatcgaggttaggagaaaatatccttatccgatggatataccaagggacatcgtgattggaataggtagcattattgattttttaatggttcaaaattggaaactttttgaaattaaagcttccccttggttgcctaaaagtgtcaaaattaatgagcgttatgaaaggttcagagtaatgctccgttatatttttactgatctagatgtagaggactggaaatttttttactttccaatacaacatagtaaaggtagattgagatga

SEQ ID NO: 62188 - DNA, 390 bp, Neisseria meningitidis; identical to SEQ ID NO: 47854

SEQ ID NO: 62189 - DNA, 564 bp, Neisseria meningitidis
ttgagacctttgcaaaaaagcccttccccgacatccgaaacccaaacacaggatttcggctgttttcgtatcaaatacctcctaattttacccaaatacccccttaatcctcctcggacacccgataatcaggcatccgggctgccttttaggcggcagcgggcgcatttagcctgttggccgctttcaacaggttcaaacacatcgccttcaggtggtttgcgtactcactttgtcatttccaatgttccaagtacacctaatctgctaagaggaagacagcttgaaggaaaacttattttagaagttcctgctcaggtcaatccaattccacaatctgtattaagggcggcacaagaagaaaatgttatcattagagatacaacaggaaggatttacaataggtggtggtttagtattaggtggttgtgcaggtgcacatcttgcaagaaaagaaccattgatactaacagggaaaacaggggcaggtgcgtcagcaattgcaaatgcaagcattggatatcaatggactgtcaatttgtcagagccaaaagaaggagctaa

SEQ ID NO: 62190 - DNA, 435 bp, Neisseria meningitidis; identical to SEQ ID NO: 40438

SEQ ID NO: 62191 - DNA, 225 bp, Neisseria meningitidis; identical to SEQ ID NO: 60200

SEQ ID NO: 62192 - DNA, 282 bp, Neisseria meningitidis
atgcaaaacggcgggggaaagatttaccagacggcggacaatgtggaagggattatgctgttgaaggtagtacctgagcgtaccgtttcggcagatgcaaaaaccagagacccgatgtgggacaatgcggctttacagaccagcgaaggcgtaaattttattgctcgtttcctaggattttttagcgatggggaataccgctatgtggatgtcctgcaacccaaccattccgatattattcggtattcaggtaaagatttttccgctaaatcaaatacttaa

SEQ ID NO: 62193 - DNA, 981 bp, Neisseria meningitidis
atggcaatggcagaaaacggaaaatatctcgactgggcgcgcgaagtgttgcacaccgaagcggaaggcttgcgcgaaattgcagcggaattggacgaaaacttcgtccttgcggcagacgcgttgttgcactgcaagggcagggttgttatcacgggcatgggcaagtcgggacatatcgggcgcaaaatggcggcaaccatggcctcgaccggcacgcccgcgtttttcgtccaccctgcggaagcggcacacggcgatttgggcatgattgtggacaacgacgtggtcgtcgcgatttccaattccggcgaaagcgacgaaatcgccgccatcatccccgcgctcaaacgcaaagacatcacgcttgtctgcatcaccgcccgccccgattcaaccatggcgcgccatgccgacatccacatcacggcgtcggtttccaaagaagcctgcccgctggggcttgccccgaccaccagcaccaccgccgtcatggctttgggcgatgcgttggcggtcgtcctgctgcgcgcacgcgcgttcacgcccgacgatttcgccttgagccatcctgccggcagcctcggcaaacgcctacttttgcgcgttgccgacattatgcacaaaggcggcggcctgcctgccgtccgactcggcacgcccttgaaagaagccatcgtcagcatgagtgaaaaagggctggggatgctggcggtaacggacgggcaaggccgtctgaaaggcgtattcaccgacggcgatttgcgccgcctgtttcaagaatgcgacaattttaccggtctttcgatagacgaagtcatgcatacacaccctaaaaccatcgccgccgaacgcctcgccaccgaagccctgaaagtcatgcaggcaaaccatgtgaacgggcttctggttaccgatgcagacggcgtgctgatcggtgcgctgaatatgcacgaccttttggcggcgcggattgtataa

SEQ ID NO: 62194 - DNA, 318 bp, Neisseria meningitidis
atggtagtacgcggcggaatctatctggtctccttagacccgaccgtaggaagcgaaatcaaaaagacacgtccttgtgtcgtagtctctcctcctgaaatacacaactatctcaagactgtgctgatcgttcccatgacgagcggaagccgtcctgccccgttccgcgtcaatgtccgctttcaggataaagacggtttgcttttgcccgaacagattagggctgtggataaagccggattggtcaagcatcttggcaatttagacaacagtacggctgaaaaactgtttgcagtattgcaggagatgtttgcctga

SEQ ID NO: 62195 - DNA, 306 bp, Neisseria meningitidis; identical to SEQ ID NO: 36883

SEQ ID NO: 62196 - DNA, 369 bp, Neisseria meningitidis; identical to SEQ ID NO: 39932

SEQ ID NO: 62197 - DNA, 1503 bp, Neisseria meningitidis
atgagtcgtgaaatgttacagctggcagaagcactggcaagcgaaaaaaacgttgatgcggaagtcgtcttccaagcactggaattcgccctgtctaccgccgccaagaaaaaggcagaccgcgaacacatggatgtccgcgtccaaatcaaccgcgataccggcgaataccaaaccttccgccgctggctgattgtcgccgatgaagactatacctatcccgatgtcgaaaaaaccatcgaggaaatccaagaggaaattcccggcaccgccatccaaatcggcgaatactacgaagagcagctgcccaacgaaggcttcggccgccaagccgcgcaaaccgccaaacaaatcatcctgcaacgcatccgcgatgccgagcgcgagcagaatctgaacgagtttctcgccgtcaaagaagacatcgtgtccggcacggtcaaacgcgtcgaacgccacggcatcatcgtcgaagtcgttgccggcaaactggacgcgctgattccgcgcgaccaaatgattccgcgcgaaaacttccgcagcggcgaccgcatccgcgccctcttcctgcgcgtcgaagaaatcggcaacaccggccgcaaacaagtcatcctgagccgtacttccggcgatttcctcgtcaaactgtacgccaatgaagtacctgaaattgcagacggcatgcttgaaatccgcgctgtcgcccgcgacccgggccagcgtgccaaagtcgccgtcaaagccaacgaccagcgcatcgatccgcaaggcacctgtatcggcgttcgcggttcgcgtgtcaatgccgtcagcaacgaattgtccggcgagcgcatcgacgttgtcctttggtcgcccgagcctgcccaattcgtcatgagcgcgctctcacccgccgaagtcagccgcatcgtgattgacgaagacaaacacgccgttgacgtgattgttgatgaaaaccaactggcgctagccatcggacgcggcggtcaaaacgtgcgccttgcttccgacctgaccggctggcagctcaacatcatgacttccgccgaggcagacgaacgcaatgcggcagaagatgccgccatccgccgcctgtttatggatcacttgaacgtggacgaagaaaccgccgacgtactggttcaagaaggttttgcaaccttggaagaagtcgcctatgttcctgccgccgaactgcttgccattgaaggatttgacgaagaaatcgtcgatatgctccgcaaccgcgcccgcgatgccatcctgaccatggcgattgccgccgaagaaaaactgggcgaagtgtccgacgatatgcgcaacctcgaaggcatagatgccgatatgctccgcagccttgccgaagcaggcattaccacccgcgacgacttggcagagcttgctgtggacgaactgattgaaatcaccggtgtaaacgaagaaaccgcaaaagccgtcatcctgaccgcacgcgaacactggtttaccgaagacaaataa

SEQ ID NO: 62198 - DNA, 300 bp, Neisseria meningitidis; identical to SEQ ID NO: 55242

SEQ ID NO: 62199 - DNA, 261 bp, Neisseria meningitidis
atgtccaagtggcggggtttcaaccgaaaaggaaacacgatgaagaaaaacgccccgaaatcgtttgaagaagccttgtcgcgccttgaatcgctgacacaagctatgcagggcgaaatgcccttggaagacgcgcttgccgcctatcaggaaggcaacgagctggtcagatactgccaaaccaagctggcgcaagtcgaacagaaattacaggttttggacgcggacgggccgaaggagttgaaccttgaatccgacgaa

SEQ ID NO: 62200 - DNA, 354 bp, Neisseria meningitidis; identical to SEQ ID NO: 56118

SEQ ID NO: 62201 - DNA, 354 bp, Neisseria meningitidis; identical to SEQ ID NO: 56124

SEQ ID NO: 62202 - DNA, 1092 bp, Neisseria meningitidis
atgaacgcccaaaccctgattgccaacgttgccgaactcgtcaaaaccaagctcaaacccatagtggacgacatcgaccgcaaaggatactaccccgaagcatttatgcgcgaactcggcgcaatcggcggattcggcgcagtcggtacagaagccgaaggcggcaacggcttgggtttggcaacgcaaatcgccgtcttgcgcgaaatcggcaaagaatgcggcgcaacctccttcagcgcgtggtgtcaggcggcttgcgcgtggtatctgcaccaaacgcccaaccaagccgtcaaagacaaatacctcgccgacatcctgcaaggcaaagtattggcgggtacgggcatgtccaataccgtcaaacaccttgccggcatcgaaaaacacaacctccaagctgagcgagtggagggcggctacacagtcaacggcgcgctgccgtgggtgtccaacatcggcgaagaccacatctaggcgaataccgcccaaatcggcgacggttacgttatgtttatcaccggcggacaatgggaaggcgtaagcctgcaaaactgccccgaattttgcgccctcgaaggcacgcgcaccttcagcctgaacttcaaagacgtatttatccccgacgaagacatcatcgccgcgcccgaacagtttgccgactacatccaaagcatcaaagcaggctttatcctcctgcaaatcggcatcggcgcgggcgtgatagacggcagcctcggcatcatccgcctcgccaacatcgtcaatgcagaagtcaacagctatctcgacgacggctacgacagcctcaaagcaaggttggacggcgcgtgggcagaaaccgaacggctcgccggcttggcttggagcggcacgcccgacaaccttgctaccctcaagctgcgcgaagccgccgccgtactggcacttgccgccgcccaatccgccgcactgcattccggcgcaaaaggctacctgatgcgcagtcccgcccaaaggcgcgtccgcgaagcgatgtttgtcgccatcgtaacccccgcaatcaaacacctacgcaaagaaatagcggcaatcgaagccgcaaaataa

SEQ ID NO: 62203 - DNA, 411 bp, Neisseria meningitidis; identical to SEQ ID NO: 43989

SEQ ID NO: 62204 - DNA, 2078 bp, Neisseria meningitidis
atgcgccattttgcgaccgagtcaggcaaatccaaagggcagttttacacgcctgccgaagtctcccgcattatggcgaagattatcggaatcagcgcagattgccgtccagcaccagcgtttatgacccgacctgcggctcgggttcgctgttgctcaaagccgccgcccaagccggcagccaaatcagcctttacggtcaggaaaaagatgtggcaaccgcgtcccttgcccgtatgaatatgattttgcacaacaacgaaaccgccgaaatcaacaccgggaacaccttgtccgattcgtctttccgtgatgaaaacgacgggcttaagaccttcgattttgccgttgccaatccgccttatcccgcccgaaaaaaacggcgattacgcctttttgctgcatctgctcaaaagcctgaaaccaagcggcaaaggtgcgattattcttccgcacggtgtgctgtttcgcggcaatgccgaagcgcgtattcgcacggaattgcttaaccttgaccttattaaaggcattatcgggctgcctgccaacctgttttacggcacgggcattcctgcctgcatcatcgtcatcgacaaagaacacgcccaaaccgcccaatttgccgaagagggaacaaaccaagttatcagcggcggcagcgtgtttatgattgacgcatcgcgcggcttcattaaagacggcaacaaaaaccgtctgcgtgagcaagacattcacaaaatcatcgacactttcacaaacctcgttacagccgtatggtgcatttaagcgaaatcgcagcacaagattacaaccttaatctgcctcgctatatcgacagcggagaagtcgaagacctgcaaaatctcgccgcctatctatctttatggcggcatacctgcgcacgatatggacgcattggaagcctattggcaagttttaggccgtatgaaaaacgagttgtttgccgaacacgatggccactttaccactatacaacggaatcgattgcaaatctttcccactctcaacagcttaaaatcctgcgggattggtgtggaatttagggctaatctagtacagccccaaatttaatccactataaaatcgaaagcagccaaatcaaagcccatatattggcgcaccccgattacgccgccttcaaagccggacacctggcaaagtttgccgcgtggcacactcaaaacgaccttgccgccatccaaccgggcaggcttatccggaaatggagcgaaagcctgctggacgcgttcaaacccggcagcctgattgaagaatacgatttctaccaaatcctgacggactactgggcggaaaccctgcaagacgatgtttatctcatcgcccaagatggctggaaggcggttaaaaacctggccgaaatcaccaaagaaagcgatgaagccgcgaacctgaccgtcgtctttgaggaaaccgaaaccgacaaaaaaggcaaagccaaaaccaagcgcatcagcaaaaaataccgcagcgaagtcatcgcccccgagctggttgcccgccgctacttttcagacggcatcgccaagctggaagaaaaacaaagcgagctggaacgcctaagccaagaattggaaaaccacatagaagaacacggcggcgaagagggtgcgctgaacgacgtattggatgcaaaaggcaaactttccgccaaacttctgaaaaccgcattggaagaaagcggcatagaagaaggcgaacgggctgttttacaaaccacccaaacactgatgacgcaggaaaaagccgcgaaagacgcagtcaaaacccaaatcgaagccctgaaccttgccgtattcaaacaattcggccgactttccgaagccgaaatcaagcagcttgccgttcaagacaaatggcttgccgatttacaaagtcgaatcgaaaatcgcttggaaaacagtattcagcagcttatcagccgcttgaacacgctggaagaccgctaccgcagcccgatggccgagcttgcccgagaagtggaaaagtggcaaagcaaagtcaatgcccaccttgaaaatatgggttttggaggctga

SEQ ID NO: 62205 - DNA, 1224 bp, Neisseria meningitidis; identical to SEQ ID NO: 55268

SEQ ID NO: 62206 - DNA, 1332 bp, Neisseria meningitidis; identical to SEQ ID NO: 56134

SEQ ID NO: 62207 - DNA, 550 bp, Neisseria meningitidis
gtgaactattgcgaatttgccgcctcacttcccgaaaacaccgataacccgaacaaacattaccacgacacgcaatacggttttccgattgacagcgacaacggactgtttgaacggctggtgttggaaatcaatcaggcaggattaagctggacgctgatgctgaagaagcggcaggcgtttcagacggcatttgaaggtttcgacatcaataccgttgccgccttcgacgacaccgaccgcgaacgcctgcttgccgacgcgggcagtccgcaaccgcctgaaaatcgatgccgccattttcaatgcacggcaaatccaagcgttgcaacaagaatacggctcgttcaagaactggctcgacgcgcaccatccgcgaagcaaagacgaatgggttaaactctttaaaaaacatttcaaattcgtcggcggcgaaatcgtcggcgaatttctgatgagtaccggctacctcaaaggcgcgcacgccgaaagctgtccggtttaccgtgaaaccctgaaataccacccgaaatggctcgatgccatctga

SEQ ID NO: 62208 - DNA, 624 bp, Neisseria meningitidis
atgaacagaagaaccttcctcctcggcgcaggcgcgttgctccttaccgcctgcggcagaaaatccgcccgaacccacgccaaaattcccgaaggaagcaccgtacttgccttgggcgattcgcttaccttcggctacggcgcaaaccctggcgaatcctaccccgcgcaactgcaaaaactgacgggttggaatattgtcaacggcggcgtatcgggcgatacatccgcccaagccctgtcgcgcctgcccgcgctgttggcacgcaaacccaagcttgtgattgtcggcataggcggcaacgactttctgcgcaaagttcccaaggagcagacccgcgccaatatcgcgaaaatcatcgaaaccgtgcagaaggaaaacatccccgccgtcctcgtcggcgtgccgcacattaccttgggcgcgttgttcgggcatttgaacgatcatccgctgtatgaggatttgtccgaggaatacggcattccgctgttcggcggcgcgtgggcggaaattttgggcgataataatctgaaatccgaccaaatccacgccaacggcaaaggctatcggaaatttgccgaagatttgaatcaatttttgagaaaacaggggtttagataa

SEQ ID NO: 62209 - DNA, 1647 bp, Neisseria meningitidis; identical to SEQ ID NO: 55257

SEQ ID NO: 62210 - DNA, 998 bp, Neisseria meningitidis; identical to SEQ ID NO: 56135

SEQ ID NO: 62211 - DNA, 1071 bp, Neisseria meningitidis
atgaaaatcatcctgaccacttctatgtcgggcttgggcggcacggaaaccgccaccgtccgcctcgggcggctgctcaaacggcgcgggcacgacatcatccttgcttcttcggacgggccttttgtcggagaggcgcaagcatcgggcatccgttggcagccggttgatttttactggggcgggcttgccggctacctcaaaagcacctttgcctacgcccggatgctgcgccgcgaacaacccgacatcatcgactgccaaatggcgcgtgttgttccagcctgcgcccttgccgccaaaatcgtttcgccgaaaaccaaaatcatctaccactcgcacggtttggacgcggcaacctaccccaaaatcgccaaactcttcgacaagctgggcgtgtacatcatcggcaactgcaaacacgagcgcgaaaaactcatccgccacggcttccccgcaggccggattgcctacgcctacaacgcacccccccccccggaatttcatttccggaaaaccgaaaaagaatgcgccgtactcggcacgctttcccgtttggacaccgtccgcgccgtgcatctgatgttggatattttgaagaaaatggttgactgcggtatgcccgtccgcctcaacatagcgggcataggagaagaaatggacaatttgaaagcgcaggcggaacgtttgggcatagatgacaaagttaccttcctcggcggcatacgcgacttgaccggctacttcaaagaaatcgatattttggtgaacacgccgcattgcgtgggcgaccacggcgcaggtgtcggcaacaacatcttggaagccggcctttacgacacgcccgtcgttacctacgatatggcgggcatttccgaaatggtcattaccggccgaaccggctactgcatccccttcggcgacgaagaagcctttatcgccgccgtagacacgctcgtcagacaaccggagttgcgcgaagcaatgggcaaaaggctgcacgcacacgtcgccgcactctgttccgacgacgaaatctaccgtaccaccatggcggcgtatgccatgtaa

SEQ ID NO: 62212 - DNA, 774 bp, Neisseria meningitidis
atgaatagacccaagcaacctttcttccgccctgaagtcacagttgcccggcaaaccagcctgacgggtaaagtgattctgacacgaccgttgtcattttccctatggacgacatttgcatcgatatctgcgttactgattatcctgtttttgatatttggtaactatacgcgaaagacaacagtggagggacaaattttacctgcatcgggcgtaatcagggtgtatgcaccggatacggggacaattacaacgaaattcgtggaagatggagaaaaggtcaaggctggcgacaagctatttgcgctttcgacctcacgtttcggcgcaggaggtagcgtgcagcagcagttgaaaacggaggcagttttgaagaaaacgttggcagaacaggaactgggtcgtctgaagctgatacacgagaatgaaacgcgcagccttaaagcaactgtcgaacgtttggaaaaccagaaactccatattttgcaacagatagacggtcagaaaaggcgcattagacttgcggaatcagtggcaaaaacggcactgggcagacaggaattgtcgggattgggcatggtatcctccgatttggcgaagagcagcgaacctgtttatcttgtgaaaataaaacccgacaaatcaaccatcactgcatacggtgaggaaaaaccgctgcaaatcggcatgacgttggaagcagacatcctgcacgagaaacggcgattgtacgaatgggtattggagctgatttatagtatatcgggcaaactg

SEQ ID NO: 62213 - DNA, 903 bp, Neisseria meningitidis; identical to SEQ ID NO: 56139

SEQ ID NO: 62214 - DNA, 1575 bp, Neisseria meningitidis; identical to SEQ ID NO: 56143

SEQ ID NO: 62215 - DNA, 984 bp, Neisseria meningitidis
atggctgcgtacgacagtttgatggtatttacaggcaatgccaatcccgaattggcacaacgtgttgtcaggcatttggacatttctttgggcaatgcttccgtatccaagttttcagacggcgaagttgccgtcgaactgttggaaaacgtacgcgggcgcgatgttttcatccttcagccgacctgtgcgccgaccaatgacaacctgatggaaatcctgacgatggcggatgcactgaagcgtgcttcggcaggtcgtattaccacagccattccgtatttcggctatgcgcgccaagaccgccgtccgcgttccgtccgcgttccgatttctgccaaactggtggcaaatatgctgtattcggcagggatcgaccgtgttttgactgtcgatttgcatgccgaccagattcaaggtttcttcgatattccggtggacaatatttatgccaccccgattctgttgaacgacatcaaacaacagcggattgaaaatctgaccgtcgtcagcccggacatcggcggtgtcgtccgcgcccgcgccgtggcaaaatccttgaatgccgacttggcaatcatcgataaacgccgcccgaaagccaatgtggcagaagtcatgaacatcatcggcgatattcaaggcagaacctgtctgattgtggacgatatgattgacaccgcgaataccttgtgtaaagctgccgtcgccctgaaagagcggggggcggaacgtgttctagcctatgccagccacgctgtattctccggagaggcggtcagccgtatcgcctcatccgaaatcgaccaggtggtcgtaaccgataccattcctttgtctgaagcggctaaaaactgcgaccgtatccgtcaggtaacgattgccggtctgttggccgaaaccgtccgccgcattagcaatgaagaatccgtctcatatcttttcaatgaagaagtgatgacaggcagcatgttgctgccataa

SEQ ID NO: 62216 - DNA, 234 bp, Neisseria meningitidis
atggcacgagtttgcaaagtgaccggcaaacgcccgatgtccggcaacaacgtatcgcacgccaacaacaaaaccaaacgccgttttttgcccaacttgcaatcacgtcgtttttgggtagaaagtgaaaaccgctgggttcgcctgcgcgtttctaacgccgctctgcgtaccatcgacaaagtaggcattgatgtcgtattggctgatttgcgtgctcgcggcgaagcttaa

SEQ ID NO: 62217 - DNA, 492 bp, Neisseria meningitidis
atgcgtgcggtcatacagaaaacggtaggtgcaaaggtggatgtcgtgtccgaaaacggcacggaaacctgtggcaaaatcgacggcggattcgtcgtgctgctcggcgtaacgcatagtgacacagaaaaagatgcgcgctatatcgccgacaaaatcgcccatttgcgcgtgtttgaagacgaagcgggcaagctgaacctgtctttgaaagatgtcggcggcgcggtgctgctggtgtcgcagtttacgctttatgccgacgcgacaagcgggcggcggccttcgttttcgcaagccgcacctgcagaacaggcgcagcagctttacctgcgaacggcggaactgttgcgcggacacggaattcatgtcgaaacagggcgtttccgcacgcatatgcaggtgtcgctctgcaacgacgggccggtaaccatactgctggactctttcatgacgcggatttccccaaaaatgaaggttgttccggattga

SEQ ID NO: 62218 - DNA, 1533 bp, Neisseria meningitidis; identical to SEQ ID NO: 56150

SEQ ID NO: 62219 - DNA, 1368 bp, Neisseria meningitidis; identical to SEQ ID NO: 56155

SEQ ID NO: 62220 - DNA, 513 bp, Neisseria meningitidis
atgggatcaaaattctttttcctgctgctgcgttttgccggttcggtgttgccgccgtcacatatgcgcggcatcggcatcgtcggcagacgggtacgcggttttttggcgcggcgggtttctccgcatatcggacgcggggtcaatatcgaacgcggggcgtatgtgtttccggatacggttttgggcgacggctcgggcatcggggcaaactgtgaaatctgccgtgggccggtggtcggcaaaaatgtgatgatggagccggaatgtctgttttattcaaataaccacaagtttgaccgttaaaaacgctttgagggctacacggaaatccgtccgattacgttggaggacgatgtctggccggggcgcagggtgattgtaatggcgggcgtaaccgtcggacgcggttcggtcgtgggcgcaggcgcggtggttacaaaagacattccgccctactctttggcggcaggcaatccggcagtggtgaaaaagaatctgccggaaggttga

SEQ ID NO: 62221 - DNA, 978 bp, Neisseria meningitidis
atgcaagaaaacccgaccgtgtggctgttcgacctcgacaacacgctgcacaatgccgatgccggcctcttcacactcatcaaccgcgctatgacacgctatatgacacgccgcctcaaactctccgaatccgccgcgtccgacctgcgtcaagactattggcaccgctacggcgcaacgctcgccggactgcaaatccaccatcccgaaatcgacatcgccgaatttttacgcgaaagccatccgatcgatgcaatcctgaccaagctgcacggcatggcggatacggaacacaccctatgccgtctgaacgggcgcaaggcggttttttccaacggcccgtcgttttacgtccgtgccgttgtcggcgcactcggtttggaaaaccgtttcgacgcgcttttcggcacggatgatttcgggctgctgtacaaacccaatccgcaagcgtatctcaatgtctgccgcctgttggacgtaccgcccgaatgctgcattatggtggacgacagcgcggacaacctgcatcaggcaaaagcattgggcatgaaaaccgtccggttcggtgcaaaagtgcacgacctgccctttatcgatgcttccgtaagcgatatggcgcaactggctcggtatgcagaaactttgtcagaacaccgccaaaatcattacaatacccacaaccccccgaaaatacgaaagaatgttatgcgtaaaaccttccttatcctgatgactgccgccgcccttttgtcgggctgcgcgtgggaaacttatcaagacggcaacggcaagaccgccgtccgtcaaaaatatcccgccggcacgcccatttattaccaagacggcagctactcgaaaaatatgaactacaaccaataccgtcccgaacgccatgccgtgttacccaaccaaaccggcaacaacgccgacgaagagcatcgccaacactggcaaaagcccaaatttcaaaaccgataa

SEQ ID NO: 62222 - DNA, 283 bp, Neisseria meningitidis
atgattcacgaagaaatctccgccatgcctatgggctatgaaaccttgatcggcgatatgggcagcgcactgtcaggcggacaaaaacaacgcatcgtattggcgcgggccttaatattgcgaaccgaaaatcctatttttagatgcagcgaccagccatttggatattgccaatgaaaaagcagtcaatgcaaacttgaatggcttgtctatcataaaaattatggcggcacacagaaaggaaacggtggaatcagcagataggaaaatgtctttaggataa

SEQ ID NO: 62223 - DNA, 1311 bp, Neisseria meningitidis; identical to SEQ ID NO: 50021

SEQ ID NO: 62224 - DNA, 1041 bp, Neisseria meningitidis; identical to SEQ ID NO: 46051

SEQ ID NO: 62225 - DNA, 297 bp, Neisseria meningitidis; identical to SEQ ID NO: 37913

SEQ ID NO: 62226 - DNA, 426 bp, Neisseria meningitidis
atgtattgggaacgcggtctgcacatgtataaggcaagtgccgtcgtgccgacgggatatgtacgggttgggaataccgcgccgctggtcggcgaagacacgcaacggtatgcctctttttggggcgacggctacgacgtgtaccgtcagttgagatggcagcagatacccgaaaaacagagaaaggcattcaaaaaagccgccaaaagcaaaaagaccgtgatgtttgccggacgggaatacggcatatccaaacagaatttgagcgatgtttgggatgattttgaagacgcgatggaactgaaggcgtttccctgcctgtcttcgctgtttctgaccaaatggcataaaaatctatatgatagtggattaacaaaaaccagtacggcgttgcctcgccttagctcaaagagaacgattctctaa

SEQ ID NO: 62227 - DNA, 3033 bp, Neisseria meningitidis
atgttttggatagttttgatcgttattttgttgcttgcgcttgccggcttgttttttgtccgcgcacaatccgaacgcgagtggatgcgcgaggtttctgcgtggcaggaaaagaaaggggaaaaacaggcggagctgcctgaaatcaaagacggtatgcccgattttcccgaacttgccctgatgcttttccatgccgtcaaaacggcagtgtattggctgtttgtcggtgtcgtccgtttctgccgaaactatctggcgcacgaatccgaaccggacaggcccgttccgcctgcttctgcaaaccgtgcggatgttccgaccgcatccgacggatattcagacagtggaaacgggacggaagaagcggaaacggaagaagcagaagctgcggaggaagaggctgccgatacggaagacattgcaactgccgtaatcgacaaccgccgcatcccattcgaccggagtattgctgaagggttgatgccgtctgaaagcgaaatttcgcccgtccgtccggtttttaaggaaatcactttggaagaagcaacgcgtgctttaaacagcgcggctttaagggaaacgaaaaaacgctatatcgatgcatttgagaaaaacgaaacagcggtccccaaagtccgcgtgtccgataccccgatggaagggctacagattatcggtttggacgaccctgtgcttcaacgcacgtattcccgtatgttcgatgcggacaaagaagcgttttccgagtctgcggattacggatttgagccgtattttgagaagcagcatccgtctgccttttctgcagtcaaagccgaaaatgcacggaatgcgccgttccgccgtcatgcagggcaggcggaggcaaaatccccggatgtttcccaaggacagtccgtttcagacggcacagccgtccgcgatgcctgccgccgcgtttccgtcaatttgaaagaaccgaacaaggcaacggtttctgcggaggcgcggatttcgcgcctgattccggaaagtcggacggttgtcgggaaacgggatgtcgaaatgccgtctgaaaccgaaaatgttttcacggaaaccgtttcgtctgtgggatacggcggtccggtttatgatgaagctgccgatatctatattgaagaacctgctgcgcccgatgcttgggtggtcgaaccacccgaagtgccgaaagttcccatgcccgcaatcgatattccgccgccgcctcccgtatcggaaatctacaaccgtacctatgagccgccgacaggattcgagcaggcgcaacgcagccgcattgctgaaaccgaccatcttgccgatgatgttttgaatggaggttggcaggaggaaaccgccgctattgcagatgacggcagtgaaggtgcggcagagcggtcaaacgggcaatatctgtcggaaaccgaagcgttcgggcatgacagtcaggcggtttgtccgtttgaaaatgtgccgtctgaacgcccgtcctgccgggtatcggatacggaagcggatgaaggggcgttcccatctgaagaaaccggtgcggtatccgaacacctgccgacaaccgacctgcttctgccgccgctgttcaatcccgaggcgacgcaaaccgaagaagaactgttggaaaacagcatcaccatcgaagaaaaattggcggagttcaaagtcaaggtcaaggttgtcgattcttattccggccccgtgattacgcgttatgaaatcgaacccgatgtcggcgtgcgcggcaattccgttctaaatctggaaaaagacttggcgcgttcgctcggcgtggcttccatccgcgttgtcgaaaccatcctcggcaaaacctgtatgggtttggaacttccgaacccgaaacgccaaatgatacgcctgagcgaaatcttcaattcgcccgagtttgccgaatccaaatccaagctgacgctcgcgctcggtcaggacatcaccggacagcccgtcgtaaccgacttgggcaaagcaccgcatttgctggttgccggcacgaccggttcgggcaaatcggtgggtgtcaacgcgatgattctgtctatgcttttcaaagccgcgccggaagacgtgcgtatgattatgatcgatccgaaaatgctggaattgagcatttacgaaggcatcccgcacctgctcgcccctgtcgttaccgatatgaagctggcggcaaacgcgctgaactggtgtgttaacgaaatggaaaaacgctaccgcctgatgagctttatgggcgtgcgcaatcttgcgggtttcaatcaaaaaatcgccgaagccgcagcaaggggggagaaaatcggcaacccgttcagcctcacgcccgacgatcccgaacctttggaaaaactgccgtttatcgtggtggtggtcgatgagtttgccgatttgatgatgacggcaggcaagaaaatcgaggaactgattgcccgcctcgcccaaaaagcccgcgcggcaggcatccatcttatccttgccacacaacgccccagcgtcgatgtcatcacgggtctgattaaggcgaacatcccgacgcgtatcgcgttccaagtgtccagcaaaatcgacagccgcacgattctcgaccaaatgggcgcggaaaacctgctcggtcagggcgatatgctgttcctgccgccgggtactgcctatccgcagcgcgttcacggcgcgtttgcctcggatgaagaggtgcaccgcgtggtcgaatatctgaagcagtttggcgaaccggactatgttgacgatattttgagcggcggcggcagcgaagagctgcccggcatcgggcgcagcggcgacggcgaaaccgatccgatgtacgatgaggccgtgtccgttgttttgaaaacgcgcaaagccagcatttctggcgtgcagcgcgcattgcgtatcggctacaaccgcgccgcgcggctgattgaccagatggaggcggaaggcatcgtatccgcgccggaacacaacggcaaccgtacgattctcgtccccttggacaatgcttga

SEQ ID NO: 62228 - DNA, 1221 bp, Neisseria meningitidis
atggtatccgcaatccgaacaggacgtggacgggattttttttcaaaatcaggcactggcattgcagaggaaaggcatcaaaaccgccgtgcttgcaccgatgttccgctacttgcggaaagaaacagcaagcatcctgaccggccttacggttttgcaaaatatcggcaaagcggtttggacatctatgcatggcacggcatatatttcttcccccgctttccgttcatcgacatcgactgcatccgctgggtgtgtgcgggtttgaaagctttcaaacactacatccgcgaaaacgggctgcccgacctgattcacgcccactgtatgaactatgccggcatacttgccttcaagatttcccaaaaatacggcatcccctatgtcgtcacgaaacacagcagcaccatcacgcgcggtctgatccgtccccaccaatggcagcctatgaaaaatgcggcggcgcacgccgccgcacgtctcgccatcagccgccatttcgcacacgtcctgcaacacaaatacggctgcgaatggcagtacctccccaacatactgggcggaatattcaaccgaccgtttgaacaaagagaaaaaaacaacaaaccgcatttcgtgttctgcaccgtctcgcaccttcgccgtctcaaaggacacgatgtcctgctcactgcctttgcccgggcgttggcacaatgcccgcaactgcgtctaaacatcggcggcagcggacaggaagaacagcggctgaaacagcaggcggcagacttgggcattacccatgccgttacatttttgggcgcattgcagcccgaagcagtcttggatttgatgaggaacagcgacgcattcgtccttgccagccgcaccgaaaccttcggcgtggtctatatcgaagcactgtcccaaggattgcccgtcattgcaacacgctgcggcggtgcggaatctattgtttcagacggcaacggatatttggttcctgttgacgacgacgatgcccttgccgacgcactcatcaaaatgtatgaacaccactctgattttgaacctgcccgacttagggaaaactgtctgaacgaatttggcgaaaatgccgttataggcaggttgatcggcattttccgacaggcaatcgcagaatacggtaagaaaataccggtgaaatatagtggattaacaaaaatcaggacaaggcgacgaagccgcagacagtacaaa

SEQ ID NO: 62229 - DNA, 291 bp, Neisseria meningitidis
ttgcacaaacaagtgcaacatattactacaaagctattttatttcaaaataactgatatatcttttttcatagattttaaatttcatatttttaatattttaggaattttattccaaagaaaaagaaacagattgataaaaacaatacccgccattcattcggacaaaaccgcacggaacatccgttttcccgtttccacgacaatccggtacaggacaccccgctgccgattccgcctgcacatccggcaaaatttcatacgcaaggaaaatgttgaaaacaaaaagaac

SEQ ID NO: 62230 - DNA, 375 bp, Neisseria meningitidis; identical to SEQ ID NO: 40077

SEQ ID NO: 62231 - DNA, 384 bp, Neisseria meningitidis
ttgtactgtcttcggcttcgtcgccttgtcctgatttttgttaatccactatacatcatcgctactaccgttccggcacaacaaacattcctcgatgccgccgaactgatgcagtggagcagagaaaccgaatggctgggcttgaatgtcatcgcacaccgcaacttcggcaaacagcacgcccaagtcgaatttgaagcctacttccgagacggacaacaccgatctgcgcatcacgaactgtccggcttcgtcaacatcggcggacaatggtattttatcgatcccaccgttccgcatcctgcgatgaaacaaccctgcatttgcggatcgggcaaaaaattcaaagcctgctgcggcaaatatctgaaacctgtcgcataa

SEQ ID NO: 62232 - DNA, 204 bp, Neisseria meningitidis
atggcggcaccccccccgacaaaaaaaacaatccggaacgcatctgaccgttccggcttgttttcaggcgaatccgccgcatcagaacatactgcgcacgcccatattgacctgccaagtctggcgcatcgtgtgcatcgaagacctttgcgcctcaaaataaagctgccttccgttgtcggcattaccacgcaaaaaaaatga

SEQ ID NO: 62233 - DNA, 237 bp, Neisseria meningitidis
atgcgtattttggatatttttaaaaacccggcgacaggcaatgtgtcgcactcgaagctgtgggcaaacgtcgcctgcgcggcggggacgtttaaatttgtgatgttgcccgacccgtcggcggagatttgggcggtgtatttgggcattgtcggcggctatgccgtggcgcgctcgtttgtcagcgtcaaacgtcaggaggtcgagaatgaatctcgtgaaactgctggcgaataa

SEQ ID NO: 62234 - DNA, 201 bp, Neisseria meningitidis; identical to SEQ ID NO: 40425

SEQ ID NO: 62235 - DNA, 192 bp, Neisseria meningitidis; identical to SEQ ID NO: 48049

SEQ ID NO: 62236 - DNA, 465 bp, Neisseria meningitidis
atgttacatatacccccaacggaacctgatcgatatgttagcagtattgtagccttaaacgtgcatagttctaacggtacaggcgattggcacagtgcagcagcccttaatgatgatgcttacccccaagatttctatatttatggcaaagatcaaacacgtagcacgttacatttgcttggtaacgttggtgtgattgatggaacaaaccgcttcaatgagatgggctattatcctgaaaacatcccagtttggctcgcagatcacccccgtgcttgcgtggattatctttacacagcagtgttacaaactggctcaatcggtcgggtgattttagatgattggtttccaagcgatgaagacaagcaatcagtttatgacttacttaaccaaatcgaaccgcacttgaatactcaagaatgggagaatttacagctatggaaacgcaaaaacccaataatgtaa

SEQ ID NO: 62237 - DNA, 417 bp, Neisseria meningitidis; identical to SEQ ID NO: 44058

SEQ ID NO: 62238 - DNA, 258 bp, Neisseria meningitidis
ttggaaaggaaaaataacatcattgaactatccattgagaatctggagctaatttatggcggaggcttaggggagagaatccttgaaggaggagcaaatggtgcacaaataggaggatcaattggtgcaggtattggtctgggtgtcggtatagtttctggtggtattcctgccggaccggctattattctcggtggcacagttggtgctgctgttggtgctgtaactggtatgggtgttgcagcatatgagtattac

SEQ ID NO: 62239 - DNA, 255 bp, Neisseria meningitidis
ttgtttttgtatattcctttgccaaccgttattgctatccaatctaatattatggctatcgtatctacaccacaccccgctctttccgccctcatcatcctcgcccattatcacggcattgccgccaaatctttgggattgaaggcaaaggtagtacgccagcctgtcaaacgtttggctatggtgaccttacctgcattggtatggtgtgatgacggcaaccattttaaggaaaagtggttgttttcggcattc

SEQ ID NO: 62240 - DNA, 243 bp, Neisseria meningitidis; identical to SEQ ID NO: 44059

SEQ ID NO: 62241 - DNA, 237 bp, Neisseria meningitidis; identical to SEQ ID NO: 45833

SEQ ID NO: 62242 - DNA, 303 bp, Neisseria meningitidis; identical to SEQ ID NO: 54163

SEQ ID NO: 62243 - DNA, 201 bp, Neisseria meningitidis
atggatacgaccctgaagaataaagccgaagccatcttgggcgaaccgcttttagacgaacctatccgccccgagtcgtgggaatgctgcggcagcgactgcggcgaggcgtgcattcagacgatttattgggcggataaggcccgctacgacgcgcaacggcggaaattaaaagaagcgggttggtcggacgatgccgtc

SEQ ID NO: 62244 - DNA, 207 bp, Neisseria meningitidis; identical to SEQ ID NO: 44064

SEQ ID NO: 62245 - DNA, 195 bp, Neisseria meningitidis
gtgaagcataagctcgcgtcttggtggaaaaccatcaagctgacggcaaacttgatggcaggcgtgcctgattatgaaaactacgttgcacagcagcgcaaacataatcccaacgcccccgtgatgaccaagctgcaatttcaagactactgccgcaagcgccgttgcggcgcaaacggcggacgctgctgttaa

SEQ ID NO: 62246 - DNA, 441 bp, Neisseria meningitidis; identical to SEQ ID NO: 56183

SEQ ID NO: 62247 - DNA, 815 bp, Neisseria meningitidis
atggcagacatcctaccatccgacaagcggcggcaaccgccaaaaacgaaaggaagtacgatgaacataatcgaacaagaaatgaaacactccagtctgagaaaagtagatgccgaaatcgccaaaatcattgcagacgcgcacaaaatcaacgccgaatccgtaaaatagcccaagaatcccgatggtatcccatgatggcggccaccgggctggttaccgccatcgccgccgtgttggcactgatattcaaatttgcctgaccacaagccccgcgaggggctttatcccccgaacaacccgaacaaaatgaacagagccgcactattcaaccgctaccccgaatggattatcgggcaagacggcgcaagccgtttcattacccattgccgctatccccgcctgattgccaaaatccacaggcagacagacggcgaatgcccgggcgggcattaccgccattccgaaaacggcatcaccctttacgattttatttttttcgacggcaaaccggcagacgaagcccgatttgccgccgtccttaccgaaacctgccgcagggcagtcaaaaaaatatgcgaaacaaaataaaccgcaacgacatggaactcggctacacgccttacaaccttcgcacccttcgcaaccgctgcaaactgacacaggccgagttggcgcaaatcgtcggggtgaagcactacatacaggtaggccgctgggaagccgaacccgataccgaaacccgtcgggccgatatgccgctggaaaaatggcggcagttcctcgattggatagaaaaaacaaacgccgtctga

SEQ ID NO: 62248 - DNA, 270 bp, Neisseria meningitidis
ttgtactgtctgcggcttcgccgccttgtcctgatttttgttaatccactatatgctgatgccggagacgtatattgcgtctataacatcagactgaagcagtacactgcctgccaggttacccgagttgaagaacacggtggcaaaaaaacacgtgcgaccctgctggctttggactggcagggcaacaaaccgcttggggcggcggaactggcggatttgaaaccgctttacaaagacttaaagaataatattggaaatattgtatga

SEQ ID NO: 62249 - DNA, 303 bp, Neisseria meningitidis; identical to SEQ ID NO: 50054

SEQ ID NO: 62250 - DNA, 219 bp, Neisseria meningitidis
atgagtatgcccgaaatacccaaatggtacgacgatgacggacagatcgtgtcctgtaccgaaaagatcaaagtgatgtccgaaaatatggccgagctgtatcagacggcacaagacgcgtttgaagacgcgctgctgatgggttgcggcgaacgtcagttgcgcgattacctgctcgcgctgattgaaggtttggaaaatccctaccgcaaagtctga

SEQ ID NO: 62251 - DNA, 213 bp, Neisseria meningitidis
gtgtttaagctcggcgtttatgcctgtctcggactgtttgccggctgggtgctgctgctgattgtgcaactctggttttcttttctcaaagcggaattgtttttcaaaatcactctgactatggcgggactgtttgtcatcatcctcgctgccctgctggtattcggccagtatttttccgaaaagaaaatgaaagacgacgggtttatcaac

SEQ ID NO: 62252 - DNA, 186 bp, Neisseria meningitidis
gtgccggaacaggcacgcgcccgcccgattcaaaccgcgatgacgctttgccgccggttcggggcaggatggcggcacacgcgccgtctgccgcgtttcatttcacaccgctcttccgaaacccgaaacccgcccggtccgacgtgcggtatgaaacgcttaagctggcgcgaagtcttttactga

SEQ ID NO: 62253 - DNA, 657 bp, Neisseria meningitidis; identical to SEQ ID NO: 56200

SEQ ID NO: 62254 - DNA, 225 bp, Neisseria meningitidis
atgaatcaaaagtatattttatctgcaaacaataatagtttgatagaagaaattcacaatacagtacagcgtattggttattgtattgttcgcggtcttaatctaaaccatcttgatggcagccggagaaacaagaaattatttgactttctatctcaattaggaatgctgacaaaccacaaaggcgatggttttaaatctatattttgggatattaaatattga

SEQ ID NO: 62255 - DNA, 2076 bp, Neisseria meningitidis; identical to SEQ ID NO: 56202

SEQ ID NO: 62256 - DNA, 456 bp, Neisseria meningitidis
atggaatcaccgacactatgggcaatcgtcgacctgtccgagtttgtattcgtgccgcgctacaacgtagccgcagcagcagggtatggcgcaccagtcttcggcgaagaacctttattctgcttggctttccggaaatattggattgacaactatgtgaccaaacagccggaaaaactgtctgtaattaccgttaaaggcgattcaatggagggcgtgctcaatcatggggattccattctcatcaaccacgccgaaactgacccgcgtgacggcctatatgtcttgcgtataggcaatgacctctttgtcaaacgtgtgcaacgtataccgggcaaactgcttgtaacgtctgaaaatccacgttacgcaccgtttgaaatagatttgagcaatgcccaagacgacatcgccatcataggccgtgttgagtggtatggccggagtattgattaa

SEQ ID NO: 62257 - DNA, 402 bp, Neisseria meningitidis
ttgtttgtatgctttgaaaaatgtttgtttccggattttgccattcccatccggttttgcgctgtacgatgtgttttagcgcggacttgctcaaaatcggatgtggttccggtatttgaggctttgattagggatgcggactttcaatatatttttctcagctacaacaacgaaggcttgatgtctgtcgggcaggtaagggagatttttgagtgtttcggcaaatataatttggttcaaacggaataccggcgttttaaggcagataagacagaaaaccgtaatcataaggcaaattcgatattcgaatatctgcatattttagaaaagaccttttatagtggattaacaaaaaccagtacagcgttgcctcgccttagctcaaagagaacgattctctaa

SEQ ID NO: 62258 - DNA, 288 bp, Neisseria meningitidis; identical to SEQ ID NO: 56206

SEQ ID NO: 62259 - DNA, 204 bp, Neisseria meningitidis; identical to SEQ ID NO: 40102

SEQ ID NO: 62260 - DNA, 213 bp, Neisseria meningitidis; identical to SEQ ID NO: 40104

SEQ ID NO: 62261 - DNA, 141 bp, Neisseria meningitidis
atgtgcgtggctattatggcatattttggcggctttgttcgcgctttgttcgatcttggcgtgtttgaacgcggcgacgtgaaaggaagggggaaatggttttcccgcttttggcggcggtgtcggaggtgctgtgcctga

SEQ ID NO: 62262 - DNA, 114 bp, Neisseria meningitidis; identical to SEQ ID NO: 37148

SEQ ID NO: 62263 - DNA, 1002 bp, Neisseria meningitidis
atgcgcccgtttttcgtcggcgcgacagtgcttgccatactcggcgcgttggtgtttttcatcagccccggtgccgtcgtcctgcaccgccaaatcttcttagaactcatgctgcctgcagcatatggtggtttcctgactgcggctttgttggactggacgggtttttcgagtaacctgaaacctgtcgcgactttgatggcggcattattgctcgccgcatccgctatactgcccttttcgccgcaaactgcctcgtttttcgtcgccgcctattggctggtgttgctgctgttctgcgcccggctgatttggctagaccgaaacaccgacaacttcgccctcttaatgctgcttgccgcgttcactgtttttcagacggcatacgctgcaaccggcgatttgaacctgttgcgcgcgcaagtgcatttgaatatggcggcggtcatgttcgtatccgtccgcgtcagtgtccttctgggcgcggaagccctcaaaaaatgccgtctgaaagaccctgtattcatccccaacgttgtctataaaaacatcgccatcaccttcctgctgctgcacgccgccgccgaactttggctgcccgcgcaaaccgccggttttaccgcgctcgccgtcggcttcatcttgctcgccaagctgcgcgaactgcaccatcacgaactcttacgcaaacactacgtccgcacttattacctgctccaactttttgccgccgcaggctatttgtggacaggcgcggcgaaattgcaaaacctgcctgcctccgcgcccctgcacctgattaccctcggcggcatgatgggcggcgtgatgatggtgtggctgactgccggactgtggcacagcggctttaccaagctcgactacccgaaactctgccgcatcgccgtccccatccttttcgccgccgccgtgttcgtgctttacctgctgacattcgtaccgatctttcgggcgaacgcgtttacagacgatccggaataa

SEQ ID NO: 62264 - DNA, 1014 bp, Neisseria meningitidis
atgattttctccatcatcgtccctatttacaatgtggaaaaatacctccgctgctgcgtggattccgtgcttgccgaaaattttgccgattatgaaatgattttggtcgatgacggttcgccggacggctgcgggaagatttgcgacgaatatgcaggcaaatatccgcatataaaagtgattcatcaagaaaacggcgggctgtcggatgcccgcaacgccggtatccgggcggcaaaaggcgattacctaatctttttggacagcgacgattattgggccgataccaaccgttcaaaaaacggggggggggggattctctttgatttacaacaacttgcagacaaaaaggttgatttgatcctgcatccctcgtccctcaattaccacgtcatccccaaaggggcggacttttcggataatgattttgtccgccattttgaaacgttggtggaggggcggtactatatcgccaacgcgtggacaaaaatcgtcaggcgggaaataatcatcaaaaacaatctgtttttcccaaaaggatacattcacgaggatttcccgtacagtttgaaattggcgcgttttgtcaagacttttgccttttacgataaccctttttatcaataccgcgttctcggcaactctatcagccacaacgtcaaatacaaaaatttcagcgatatgctggcgcatctcgaccggggtgtggattttttagtcgaaaacaaaaattcccccatctacggcggtttgcaaaaatttgtcttcgacaatatcggctatctgaggtctatattggtaaggctttatttttccaaaaacattatcctcatctaccggaaatatttttcatttaaagaaaaatgcagaaagatattcggcgcgaagacaatccgtccggtttttatcgggaagaccgcattcatcataggattgccgatattgcgcctgctcgtaccgcctatgctgtacccggcaatcaaggccgtttatcagaaatttttttcggaataa

SEQ ID NO: 62265 - DNA, 518 bp, Neisseria meningitidis
atgataaaaaatctttataaattgataaattatgcggctttgattggtttcgccccaaatatagtttttgcttggcctatgtttgttgaccccccttcttaccaaaacatccatgtacgaagttggaaagcacggcgagattccggcatagtaaaacaagatttggatttttcttgcggcgcggcttcgattgccacgttactgaataatttttatggcagacattattctgaagcggaaatcttagacaaaatggataaaacccaaatgcgtgcttcttttgatgatatgcaacgcataatgcccgaactgggttttgaagcacaaggttatgctttgccatttgaacagttggtacaactaaaaattcctgtaattgtgtatttaaaataccgtaaaaacaaccatttttcggtattgaacggtattaacggagaaactgttttgctggctgatccatcgctggggcacgtctcaatgagcaaatcacaattcttgagcgcatggaaaacacgtga

SEQ ID NO: 62266 - DNA, 732 bp, Neisseria meningitidis; identical to SEQ ID NO: 56214

SEQ ID NO: 62267 - DNA, 3195 bp, Neisseria meningitidis
atgcgaacgaccccaaccttccctacaaaaactttcaaaccggctgccatggcgttagctgttgcaacaacactttctgcctgcttaggcggcggcacttctgcgcccgacttcaatgcaggcggcaccggtatcggcagcaacagcagggcaacaacagcgaaatcagcagcagtatcttacgccggtatcaagaacgaaatgtgcaaagacagaagcatgctctgtgccggtcgggatgacgttgcggttacagacagggatgccaaaatcaatgcccccccgaatctgcataccggagactttacaaacccaaatgacgcatacaagaatttgatcaacctcaaacctgcaattgaagcaggctatacaggacgcggggtagaggtaggtatcgtcgatacaggcgaatccgtcggcagcatatcctttcccgaactgtatggcagaaaagaacacggctataacgaaaattacaaaaactatacggcgtatatgcggaaggaagcgcctgaagacggaggcggtaaagacattgaagcttctttcgacgatgaggccgttatagagactgaagcaaagccgacggatatccgccacgtaaaagaaatcggacacatcgatgtggtctcccatattattggcgggcgttccgtggacggcagacctgcaggcggtattgcgcccgatgcgacgctacacataatgaatacgcatgatggaaccaagaacgaaataatgtctgcagccatccgcaatgcatgggtcaagctgggcgaacgtggcgtgcgcatcgtcaataacagttttggaacaacatcgagggcaggcactgccgaccatttccaaatagccaattcggaggagcagtaccgccaagcgttgctcgcctattccggcggtgataaaacagacgagggtatccgcctgatgcaacagagcgattacggcaacttgtcctaccacatccgtaataaaaacatgcttttcattttttcggcaagcaatgacgcacaagctcagcccaacacactgaccctattgccattttatgaaaaagacgctcaaaaaggcattatcacagtcgcaggcgtagaccgcagtggagaaaagttcaatggctccaaccattgcggaattactgccatgtggtgcctatcggcaccctatgaagcaagcgtccgtttcacccgtacaaacccgattcaaattgccggaacatccttttccgcacccatcgtaaccggcacggcggctctgctgctgcagaaatacccgtggatgagcaacgacaacctgcgtaccacgttgctgacgacggctcaggacatcggtgcagtcggcgtggacagcaagttcggctggggactgctggatgcgggtaaggccatgaacggacccgcgtcctttccgttcggcgactttaccgccgatacgaaaggtacatccgatattgcctactccttccgtaacgacatttcaggcacgggcggcctgatcaaaaaaggcggcagccaactgcaactgcacggcaacaacacctatacgggcaaaaccgttatcgaaggcggttcgctggtgttgtacggcaacaacgaatcggatatgcgcgtcgaaaccaaaggtgcgctgatttataacggggcggcatccggcggcagcctgaacagcgacggcattgtctatctggcagataccgaccgatccggcgcaaacgaaaccgtgcacatcaaaggcgatctgcagctgggcggcgaaggtacgctgtacacacgtttgggcaaactgctgaaagtggacggtacggcgattatcggcggcaagctgtacatgtcggcacgcggcaaaggggcaggctatctcaaccgtaccggacaacgtgttcccttcctgagtgccgccaaaatcgggcgggattattctttcttcacaaacatcgaaaccgacggcggtctgctggcttccctcgacagcgtcgaaaaaacagcgggcagtgaaggcgacacgctgtcctattatgtccgtcgcggcaatgcggcacggactgcttcggcagcggcacattccgcgcccgccggtctgaaacacgccgtagaacagggcggcagcaatctggaaaacctgatggtcgaactggatgcctccgaatcatccgcaacacccgagacggttgaaactgcggccgccgaccgcacagatatgccgggcatccgcccctacggcgcaactttccgcgcagcggcagccgtacagcatgcgaatgccgccgacggtgtacgcatcttcaacagtctcgccgctaccgtctatgccgacagtaccgccgcccatgccgatatgcagggacgccggctgaaagccgtatcggacgggttggaccacaacgctacgggtctgcgcgtcatcgcgcaaacccaacaggacggtggaacgtgggaacagggcggtgttgaaggcaaaatgcgcggcagtacccaaaccgtcggcattgccgcgaaaaccggcgaaaatacgacagcagccgccacactgggcatgggacacagcacatggagcgaaaacagtgcaaatgcaaaaaccgacagcattagtctgtttgcaggcatacggcacgatgcgggcgatatcggctatctcaaaggcctgttctcctacggacgctacaaaaacagcatcagccgcagcaccggtgcggacgaacatgcggaaggcagcgtcaacggcacgctgatgcagctgggcgcactgggcggtgtcaacgttccgtttgccgcaacgggagatttgacggtcgaaggcggtctgcgctacgacctgctcaaacaggatgcattcgccgaaaaaggcagtgctttgggctggagcggcaacagcctcactgaaggcacactggtcggactcgcgggtctgaagctgtcgcaacccttgagcgataaagccgtcctgtttgcaacggcgggcgtggaacgcgacctgaacggacgcgactacacggtaacgggcggctttaccggcgcgactgcagcaaccggcaagacgggggcacgcaatatgccgcacacccgcctggttgccggtctgggcgcggatgtcgaattcggcaacggctggaacggcttggcacgttacagctacgccggttccaaacagtacggcaaccacagcggacgagtcggcgtaggctaccggttctga

SEQ ID NO: 62268 - DNA, 1164 bp, Neisseria meningitidis
atggatatacaaagtaaagcgaaaaaattgattgagatgattcagacggcaccggtggagtggaagccgttgggggaagtggcaagtataggaaagggaaagcagcttaataaatcactacttagagaaaaagataagtatcccgtaatcaatggcggtattaatccatcaggttattggcatgaatacaataacgaagctggcacgattgttattagccaaggaggagcaagtgcggggtttgttaattggatggatatccctttttttgcaggagctcacgcatatactattaaagcgaacgaagacaaactattgcaacggtttgcatatttttttaaaaatgaagcaaattacattcatgcaatgtcaatacggagcagtataccagcacttgctaaaagtgaattgcaaaacttacttattcccatcccgcccctagaaacccaacaaaaaattgtaaaaatacttgacaaattcaccgagctggaagcggaattagccctgcgcaaacgccaataccggtattaccgcgactttcttttagattttgacaatcaaatcgggggggtagctgatggctatcaatgccgtctgaaagatgtggtttggaagacgttgggggagattgccgaatattcaaaaaaccgtatttgttcggataaactgaacgaacataattacgtgggcgtggataatctcttacaaaatagagaaggtaaaaagttatccggttatgttccaagtgagggaaaaatgacagaatatattgccaatgacatcttgattggaaatattcgtccgtatttgaaaaaaatctggcaggcagactgcacgggcggaacaaacggtgatgttttggttatccgggtaacagatgaaaaggttaatccaaaatatctgtatcaggtattggccgatgataaattttttgcctttaatatgaagcacgccaaaggtgcaaaaatgccgcgtggcagcaaagcagcgattatgcaatataaaatccccatcccaccactccccgaacaggaaaaaatcgtcgccatcctagacaaattcgacaccctgacccactccgtcagcgaaggcctgccgtacgaaatcgccctgcgccgcaaacaatacgaatattaccgcgaacagctgcttgcctttcggtag

SEQ ID NO: 62269 - DNA, 1164 bp, Neisseria meningitidis
atgaacatcaccatagtcgccccctactgctcgctgccgtccgaaccgtatttcaaccgcttttggtatctggcagaacgattgtcgcaatcgcacgacgtgttgctgattaccagccgtttccgccactacgacaaatccttcagacggcccgaagatgccgaggccgcctcgcaagaccgtctgaaagtcatgctgttggaagaaagcggctacggcaaaaacgtgtctttagaacgtgttgccagccattaccgcttcgtcaaaaattttgagcaatggctgaaaaactgccggccgggcgaacaagacatcgtctattccgcctatccgctgattgccaccaacctgctgttgggcaaacacaaagcgcgtttgggctacaaactgattgtcgatgtgcaggacgtatggccggagtctttctcctcggtcgtaccgtttttgaaaaaagtaccgcacaagctgctgccctttgcttcacgcgccaaccgtgcctaccgctgcgccgacgcgctggttgccgtatcgcagacttatctcgaccgcgccaaagaagccaatccgaacgtacccggcgaagccgtctatatcggtacggattttgccgccatcgcccccccccgattccgctccaaaaccgtccgccttttctacttgggcacgctcagttacagctacgacgtggaaaccgtgtgcaaaggtgttcggaaacttttagacgacggcgaaaacgtcgaattgcacattatgggcggaggacccgatttggagaaactcaaacaatatgaaaatcgcgccatcaagttttacggttatttaccctattctgaaatgatgtcgattgccaaaggctgcgacattgccgtcaacgccatccatagccacgccatgcagtcggttaccaacaaactctccgactatatggctttgcaaaaaccgattctgaacagtcagaacaatgccgaagtcctcgacctcatgaatctgctgccgcacgaaaactaccgttccggcgatgtggacggtttcgttcaagccgccaaagatattttgaagcgcaaaagcgatcctgttcagtccgacgaaatcgtccgccgcttcaaacgcgatgtggcgtatcagaaaatcgtcaacctgattgaaagattagctcatgaataa

SEQ ID NO: 62270 - DNA, 483 bp, Neisseria meningitidis; identical to SEQ ID NO: 36693

SEQ ID NO: 62271 - DNA, 357 bp, Neisseria meningitidis; identical to SEQ ID NO: 46100

SEQ ID NO: 62272 - DNA, 192 bp, Neisseria meningitidis; identical to SEQ ID NO: 48097

SEQ ID NO: 62273 - DNA, 1452 bp, Neisseria meningitidis
atgctttctttccttagcggcttattgagcttgggtatagaagtcttgtgggtaaggatgttttcgttcgcagcacagtccgtgcctcaggcattttcatttactcttgcctgttttctgaccggtatcgccgtcggcgcgtattttggcaaacggatttgccgcagccgctttgttgatattccctttatcgggcagtgcttcttgtgggcgggtattgccgactttttgattttgggtgctgcgtggttgttgacgggtttttccggcttcgtccaccacgccggtatcttcattaccctgtctgccgtcgtcagagggttgattttcccgctcgtacaccatgtgggtacggatggcaacaaatccggacgacaggtttccaatgtttatttcgccaacgttgccggcagtgcattgggtccggtccttatcggctttgtgatacttgatttcttgtccacccaacagatttacctgctcatctgtttgatttctgctgctgtccctttgttttgtacactgttccaaaaaagtctccgactgaatgcagtgtcggtagcagtttccctaatgttcggcatcctcatgttcctactgccggattctgtctttcaaaatattgctgaccgtccggataggctgattgaaaacaaacacggcattgttgcggtttaccatagagatggtgataaggttgtttatggggcgaatgtatacgacggcgcatacaataccgatgtattcaatagtgtcaacggcatcgaacgtgcctatctgctaccctccctgaagtctggcatacgccgcattttcgtcgttggattgagtacaggttcgtgggcgcgcgtcttggctgccattccggaaatgcagtcgatgattgttgcggaaatcaatccggcataccgtagccttatcgcggacgagccgcaaatcgccccgcttttgcaggacaaacgtgttgaaattgtattggatgacggtaggaaatggctgcgtcgccatcctgatgaaaaattcgacctgattttgatgaatacgacttggtactggcgtgcctattccaccaacctgttgagtgcggaatttttaaaacaggtgcaaagccaccttaccccggatggtattgtaatgtttaataccacgcacagcccgcatgcttttgctaccgccgtacacagtattccctatgcataccgctatgggcatatggtagtcggctcggcaaccccggtagttttccctaataaagaactgctcaagcaacgtctctcccggttgatttggccggaaagcggcaggcacgtatttgacagcagcaccgtggatgctgcagcacaaaaggttgtctctcgtatgctgattcagatgacggaaccttcggctggggcggaagtcattaccgacgataatatgattgtagaatacaaatacggcagagggatttaa

SEQ ID NO: 62274 - DNA, 273 bp, Neisseria meningitidis; identical to SEQ ID NO: 47986

SEQ ID NO: 62275 - DNA, 612 bp, Neisseria meningitidis
atgaactttacccgactgctcaaccaagtcttaagcacggttcaaaaaggcaacacattctccgacagcccgctcaattcattcggcggaggcgcgctggttgccggtgtcgcctccatgctgctgaacggtaaaaaccgcaaaaccatcaccaaaatcggttcgaccgccgctttgggctacctcgcctaccggggctatcagatgtggcagcaaaacaaagggcgggcaaccgtaacacaaagcgatttccaacctgccggagaaaccgaagaaacatacagccgcaccgtattgcgcaccatgatagccaccgccgcttcagacggcatgatagacgaagccgaacgccggactatcgaacaggaaagcggcacagaccccgaaactgctgcatggctcgccgccgaataccgcctgcccgcaagcatcgaagacatcgccgccgccgtcggcaacgatgaggcgttggcggcggaggcctatctggcggcaagactggtatgtgccgatttgtcgcggaaagaaaccgtcttcctcgcccgcctgtcgcaggctttggaactggatgacaatctggtggaaaacttggaaaggcaattggggttttga

SEQ ID NO: 62276 - DNA, 2034 bp, Neisseria meningitidis; identical to SEQ ID NO: 46107

SEQ ID NO: 62277 - DNA, 1953 bp, Neisseria meningitidis
atgctgccaacccaacccaacccaacccaacccaacccaacccaacccaacccacccaacccaagccctgatctaatcgacacagccggggtgaacaccgaggcaatctacacttcagacggcattaccgccaactctacccaactcgaacagctcaaaaaactgtttcccgcctgttttgacgcagacggaaatttccttatcgacagattacaagccgaaattgcgccacagaccgacatcggacgcgaattttacgaaatgaactggctgggcaaatcatatgctcgcctgcttcgcaacctgccgcccgaaaccctgataagtgaagacaagacgcacaacgccaaacccgaaaatgcaggcagccaaaacctactgattcgtggcgacaatctagaagtgttgaaacacttaaaaaacgcctacacaaacagcgtgaagatgatttacatcgacccgccctacaacaccggatcagacggctttgtctatcaggacgaccgcaaattcacaccagccgaacttgcctgcttagccaatattgacgaagacgaagccgcgcggattttagatttcaccgacaaaggctcaaactcgcacagtgcatggttgacctttatgtatccgcgcctgtatatcgcccgcgaactgttaaaggacgacggcgtgatttttatctcgattgacgataacgaagcggcgcagttgaagttgttgtgtgatgaagtgtttggggaagggaattttattaaagatttaattgttaatacatcagaaggtggtggtaatgcaaaatatgttgtaaatgggcatgaaactgttttagtttatgcgaaagatattactcattttgacaatctaaaaagaccaaaagatatacgcggcaaaaaaattgtaatcaatgatgaattatattggatacaggaagatgccgttcgcgaacagtttggcaaatatgggaacttgcattacgaagatattattgaaataaaaggaattgagtttaaaaacaaaattgataaagatattgaaaataatgaatatatcttaattccgaagtcttatgggaaaacaattattggaaaacttagaaaagtatccgatgatttttccaaatttcatagcatcttaaatattggaaatataagtaaaaatcttactaaagatggtattcgtgaattagaagagttgtttgaaactggaaaaggttattctccttttgaaacaccaaaaccattagatttattgaaaagattagttctttctgcaactttcaagggaaatcaaactgacctaatcctagacttcttcgcaggcagcggcacaaccgcccacgccgtgatgcagcttaacgccgaaggacaaaacggtaaccgccgctatatctgtgtacagcttcccgaaaaaaccgctgaaaaatccgaagcccgtaaagcaggctacccgaccatcttcgacatcaccaaagcccgcatagaaaaagccgccgccaaaatccgcgtcgaacatcccgattacacgggcgattcgggcttcaaaatctttcaaacggcagacaatttcaggcagcatccggacaaggatttttcgcccgaacaaccggatttgccgcttaacgatgaattaagcgaagaacagctgcaaacgcttctgaccacctggacgctgtatgacggggcggcactgaccacgccggttgagcctgtgcggttaggggcttacacggcgtatctgtgcgaaaaacggctgtatctgatgaatgccggttttacttccgccgatttgttggcgtttatccgcaagctggacgacgatgcggatttcaatcccaaccgcgtgattgtattcggcagcaatatggcaagcgccatgcagcacgaacttgaccaggcggttcgcggttatgccaataaaaaagaaattgagttaaacgtgattatcagggtttga

SEQ ID NO: 62278 - DNA, 2142 bp, Neisseria meningitidis
atgacactgaaagcaagcaagcaagcaagcaagcaagcaagcaagcaagcaagcaagcaagcaagcaagcaagcaagcaagcaagcaagcaagcaagcaagcaagcaagcaagcaagcaagcaagcaagcaagcaagcggtcgggttaatctattaacattatctgttttatcgctgttttgcacgccatatgtttgaggttcggatgcgtacgatcccgtcaaagaagccgagattaaaaacaaatttattttagaagcggcggaagacagaaattcccacgtttggcgcggcccgtgcagtgtgtcttttgattgcttcggtgctttcagttatcagcccggttcggatactcgttctacaaatattggcgatgctgccgatttttcattttcagacaagccggcaaacggcgtttcccattatttttccagcggtaaaaccgatccaaattcatctgaagccttgtatgacgaaatcaatatcacgggtaaaaactacaatagcggcatcctcgccgtcgataatatgcccgttgttaagaaatatgttacagagaattacggagctgatttaaagcaggcggttaaggatcaattaaaggatttatataaaacaagacccgaagattgggaaaaaaataaaaaaatagttgaggaagcgataataaaacaatatggaatacctagaaataaaattaataaatttagaaaagttattgatccaattatagaagaagctgtactcactcctcatagtaatacaacaccgaccaatctcgacaacatcttcaataaaaaattacacgtcaaaatcgaaaacaaatcccacgtcgctggacaggtgttggaactgaccaagatgacgctgaaagattccctttgggaaccgcgccgccattccgacatccatacgctggaaacttccgataatgcccgcatccgcctgaacacgaaagatgaaaaactgaccgtccataaggattatgcgggcggcgcggatttcctgttcggctacgacgtgcgggagtcggacgaacccgccctgacctttgaagacaaagtcagcggacaatccggcgtggttttggaacgccggccggaaaatctgaaaacgctcgacgggcgcaaactgattgcggcaaaaacggcggattccggttcgtttgcgtttaaacaaaattaccggcagggactgtacgaattattgctcaagcaatgcgaaggcggattttgcttgggcgtgcagcgtttggctatccccgaggcggaagcggttttatatgcccaacaggcttatgcggcaaatactttgtttgggctgcgtgccgccgacaggggcgacgacgtgtatgccgccgatccgtcccgtcaaaatatacggggtggcgcggctgcggacgggcggcgcaaaggcgtgcaaatcggcggcgaggtgtttgtacggcaaaatgaaggcagccggctggcaatcggcgtgatgggcggcagggtcggccagcacgcatcagttaacagcaaaggcggtgcggcaggcagtgatttgcatggttatggcgggggtgtttatgctgcgtggcatcagttgcgcgataaacaaacgggtgcgtatttggacggctggttgcaataccaacgtttcaaacaccgcatcaatgatgaaaaccgtgcggaacgctacaaaaccaaaggttggacggcttctgtcgaaggcggctacaacacgcttgtggcggaaggcgttgtcggaaaaggcaataatgtgcggttttacctgcaaccgcaggcgcagtttacctacttgggcgtaaacggcggctttaccgacagcgaggggacgggggtcggactgctcggcagcggtcagtggcaaagccgcgccggcattcgggcaaaaaaccgttttgctttgcgtaatggtgtcaatcttcagccttttgccgcttttaatgttttgcacaggtcaaaatctttcggcgtggaaatggacggcgaaaaacagacgctggcaggcaggacggcgctcgaagggcggttcggcattgaagccggttggaaaggtcatatgtccgcacgcatcggatacggcaaaaggacggacggcgacaaagaagccgcattgtcgctcaaatggctgttttga

SEQ ID NO: 62279 - DNA, 768 bp, Neisseria meningitidis
atggcactggcaaaacgcatcatcccctgtctcgacgtaaaagacgggcgcgtcgtcaaaggcgtgaacttcatcggtttgcgcgacgcgggcgaccccgtcgaagccgccaaacgctacaacggcgaaggcgcggacgaattgaccttcctcgacatcaccgcctcatccgacaaccgcgacaccatcctgcacatcatcgaagaagttgccggacaagtcttcatcccgctgaccgtcggcggcggcgtacgcaccgttgccgacatccgccgcctgctcaatgccggcgcggacaaagtcagcatcaacaccgccgccgttacccgtcccgacctgattgacgaagccgccggatttttcggttcgcaagccatcgtcgccgccgtcgatgccaaagccgccaaccccgaaaacacacgctgggaaatctttacccacggcgggcgaaatccgaccggtttggatgcggtggaatgggcggtcgaaatgcaaaaacgcggcgcgggcgaaatcctgctcaccggtatggacagggacggtacgaaacagggtttcaacctgccgctgacccgcgccgttgccgaagccgtcgacatccccgtcatcgcctccggcggggtcggcaatgtccggcacctgattgaaggcataaccgaaggcaaagccgatgccgtacttgccgccggcgttttccatttcggggaaatcgccatccgcgaagccaaacgcgctatgcgcgaagccggcatcgaagtgcgcctctga

SEQ ID NO: 62280 - DNA, 1494 bp, Neisseria meningitidis
atgttgtcaggactccccatccccaaagacatcgcgcgcccgcccgaaacgatattggtcaacatcacgccgcaggaaacgcgcgtagcggtgttggaggaaaacaatatctgcgagctgcacatcgagcgcaacagcgaacacagcctggtcggcaatatctatctgggcgtggtgcgccgcgtgctgcccgggatgcagagcgcgtttatcgacatcggcttggaacgcgcggcgtttttacacatcgtcgatgtcctcgaacaacgccgcaaccccgaagaaacccagcgcatcgaacatatgctgtttgaagggcagtctgttttggtgcaggtcatcaaagacccgatcaacaccaaaggcgcgcggctttccacccaaatctcgctggcggggcgtttcctcgtccatcttccgcaagaagaccacatcggcgtgtcccaacgcatcgaagacgatgccgaacgcagcagcctgcgcgaacgcctcgacaagctcctgccggaaaatgcctgccgaggctacatcatccgcaccaacgccgaaaacgccaccgacgaacagctccagtccgacatcgactacctgaccaaagtgtgggaacacatccaagaacaggcgaaaatccggccgccggaaaccctgctttatcaggatttgcccttgagtttgcgcgtattgcgcgatatggtcggctgcgacacgcaaaaaatcctcgtcgattccaccgtaaaccacggacggatgacgcgttttgccgaacaatacgtccacggcgcattgggcaggatagaattgttcaaaggcgaacgcccgctgtttgaaacccacaacgtcgagcaggaaatcagccgcgccctgcaaccgcgcgtcaacctcaacttcggcagctacctgattatcgagtccaccgaagcgatgaccacgatagacgtgaacaccggcggcttcgtcggcgcacgcaacttcgacgaaaccatcttccgcaccaacctcgaagcctgccacaccatcgcccgcgaattgaggctacgcaacctcggcggcatcatcatcatcgacttcatcgatatggcgcaggaaagccaccgcgaagccgtgttgcaggagcttgccaaagccctcgccttcgaccgtacccgcgttaccctgcacggttttaccagcctggggctggtcgagctgacgcgcaaacgctcgcgcgaaaacttaaaccaagtcctctgcgaaccctgcccttcctgccaaggcagaggccgtctgaaaacgccgcaaaccgtgtgctacgaaatccagcgcgaaatcgtccgcgaagcgcgccgttacgatgccgaaagtttccgcatcctcgccgcctccaacgtcatcgatttgtttttggacgaagaatcgcaatccttggcaatgctgatagatttcatcggcaaaccgatttctttggcagtcgaaaccgcttacacgcaggaacaatacgatatagtgctgatgtaa

SEQ ID NO: 62281 - DNA, 951 bp, Neisseria meningitidis; identical to SEQ ID NO: 39997

SEQ ID NO: 62282 - DNA, 390 bp, Neisseria meningitidis; identical to SEQ ID NO: 60493

SEQ ID NO: 62283 - DNA, 1374 bp, Neisseria meningitidis
atgagtaatccattttcctctttaggtttgggtacggaactcgtttccgcactgaccgcgcaaggttacgaaaacccgacgcccatccaagccgccgccattcccaaagcactcgccggtcatgatttgctagccgccgcgcaaaccggcacaggcaaaaccgccgcctttatgctgcccagtctggaacgcctcaaacgttacgccaccgccagcacctcgcccgcgatgcaccccgtgcgtatgctcgtccttacccccacgcgcgaacttgccgaccaaatcgaccaaaacgtgcagtcctacatcaaaaacctgccgcttcgccacaccgtcttgttcggcggtatgaatatggacaaacagaccgccgatttgcgtgccggctgcgaaatcgtcgtcgccaccgtcggacggctgctcgaccacgtcaaacaaaaaaacatcagtttgaacaaagtcgaaatcgtcgttctggacgaagcagaccgcatgttggatatggggtttatcgacgacatccgcaaaatcatgcagatgctgcccaaacaacgccaaaccctgctcttttccgccaccttctccgcaccgatacgcaaactggcgcaagacttcatgaacgcgcccgaaaccgtcgaagtcgccgcgcaaaacaccaccaacgccaacgtcgaacaacacatcatcgccgtcgataccttccaaaagcgcaacctgctcgaacggctgattgtcgatctgcatatgaaccaggtcatcgtgttctgcaaaaccaaacaaagcgtcgaccgcgtaacgcgcgaactggtgcgccgcaacctgtccgcacaggcgatacacggagaccgttcccaacaaagccggctcgaaacactcaacgccttcaaagacggcagcctgcgcgtcctcgtcgccaccgacatcgccgcgcgggggctggacattgccgaactgcctttcgtcatcaattacgaaatgcccgcccagcccgaagactacgtccaccgcatcgggcgcacggggcgcgcgggcgcggacggcgtggcgatttccctgatggacgaatccgaacagaaaatgtttgaatccattaaagagctgaccggcaacaagctgctcatcgagcgcatcgagggcttcgagccgcaatggtgggaacagggcggcgcaaaaccggaaaaaaccgaaacaagcgaaccgagacaacgcaaccgctacgaatccgccagggctcagcgcgaaaaaaatacccgaccggaaaccacggcaaacgatgcgggcgcggcttgcggaaaaattgccggacgcagccgccgaagccgtcgggaacaccggacgtgcgccctgctccaaccgcgttacggcgtaaaataa

SEQ ID NO: 62284 - DNA, 1887 bp, Neisseria meningitidis
atgccgtctgaagccgtttttcaaatgattgatatgaatacagaaaaccgttctccggaacaattcgacatcccgctcttcctcaaaaacctgcccaagctgccgggcgtgtaccgtttttttgacgaaggcggcaaagtcttatacgtcggcaaagcggtcaacctcaagcggcgcgtgtccggctatttccaaaaaaacgaccattcgccgcgcatcgcattgatggtaaaacaggttcatcatatcgaaaccaccatcacgcgttccgaagccgaagccctgattctcgaaaacaacttcatcaaagccctgtcgccgaaatacaatatccttttccgcgatgacaaaagctatccttatctgatgctcagcggccatcaatatccgcaaatggcgtattaccgcggcacgctgaaaaagcccaaccaatacttcggcccgtatcccaacagcaacgctgtgcgcgacagcatccaaatcctgcaaaaagtcttcatgctgcgtacctgcgaagacagcgtattcgagcatcgtgaccgcccttgcctgctgtatcaaatcaaacgctgtaccgcgccctgcgtcggacacatcagcgaagaagactaccgcgacagcgtgcgtcaagccgccacttttctcaacggcaaaaccgacgaactgacccgcaccctgcaacacaaaatgcaaactgccgccgcgaatctgcaatttgaagaagccgcccgctaccgcgaccaaatccaagcactcggcattatgcagagcaaccagttcatcgacagcaaaaacccgaacaaccccaacgatatcgatttgctcgcgctggcggtttcagacggcatcgtctgcgtacactgggtcagcatacgcggtgggcggcacgtcggagacaaaagtttcttccccgacaccaaaaacgatcccgagccaaacgggcaagactatgccgaagccttcgtcgcccaacactatctgggcaaaagcaaacccgacatcatcatcagcaacttccccatgcccgacgcattgaaagaagccctagagagcgaacacggcaaacaaatgcagttcgttaccaaaaccataggcgaacgcaaagtctggttgaaaatggcggagcaaaacgcacaaatggcgattgcccaacgccgcctgcaacaaagcagccaacaacaccgtattgatgaactggccaaaatcctcggcatggattcagacggcctcaaccgcctcgaatgtttcgacatcagccacacccaaggcgaagccactattgcgtcctgcgttgtgtacgatgagcaaaacatccagccttcgcaataccgccgctacaacatcacgaccgccaaacccggcgacgactacgccgccatgcgcgaagtgttgacgcgccgttacggcaaaatgcaggaagccgaagccaacggcgagaccgtcaaatggcccgatgtcgtattgattgacggcggcaaagggcaaatcggcatcgccgtgtccgtatgggaagaactcgggctgcacattcctttggtcggtatcgccaaaggccctgagcgcaaagccggtatggaagaacttatactgccttttaccggcgaagtcttccgcctgccacccaacagccctgccttgcatttattgcaaaccgtacgcgatgaatcgcaccgctttgcgattacaggccatcgcaaaaaacgcgacaaagcacgcgttacttcctcactcagcgaaatccccggtatcggcagcaaacgccgccaagccctactcacccgcttcggcggcctgcgtggcgtgattgccgccagccgcgaggacttggaaaaagtggaaggcatcagcaaggcattggcggaaaccatttacgagcatctgcattag

SEQ ID NO: 62285 - DNA, 594 bp, Neisseria meningitidis
atggcaagcattcaaaacttatatgagaccgtcgtcggcgtgcttggcgatcaggcaagcaaagtcatttcagctttgggcgagattaccgtcgagtgtctgcccgaacactatatttcagtcatgaccgcattgcgcgatcatgaagagctgcatttcgagcttctggtcgatttgtgcggtgtcgattacagcacttacaaaaacgaagtatggcagggcaaacgctttgccgtcgtcagtcagttgctttccgttaaaaacaatcaacgcatccgcgtacgcgtctgggtttcagacgacgacttccctgtagtcgaatccgtagtcgatatttacaacagcgcggattggtacgaacgcgaagccttcgatatgtacggcatcatgttcaacaaccacccggacttgcgccgcatcctgaccgattacggctttgtcggacatccgttccgcaaagacttcccgatttccggctatgtggaaatgcgttacgacgaagagcaaaaacgcgtgatttaccaacctgttaccattgagtcgcgcgagatcacgccgcgtatcgtccgtgaggagaactacggtggccaataa

SEQ ID NO: 62286 - DNA, 552 bp, Neisseria meningitidis
atgaaagttttgaacggttggtcggataggaagatgtggcgggttttgagtgctttgccgataggcgtggtgttttttgatttgatctacggttttgtgttgaatgtgttgcagggtttggatttgcagcgtgccgtgccggattcggaaggcgtgttggcggttacgcccgatattgcattcaacagtttgcagattgtcgccaacggcggtatggcggcggtggtctgtttcgggttggcggttgtgtttttgctcaaccgttcggtgcggcggcggcaggtgttggaaatcggggtgttccggatgttggggctggtggcggtattggcgttcagcgcgccgtcggtgtgggagtgggcgaacgcgctgccgctgctgctgaagggcgcggacgtggtcaatacggggaatgcgcgttatgtgctgacggctttgtgtatgccctttccggcggtgtcgtgcgtcatcgggctggtggggcggttcaggcttcagacggcatcgggcagggcggcaaagtcagggggtgcgggcaaggcggacggatag

SEQ ID NO: 62287 - DNA, 525 bp, Neisseria meningitidis
ttgaggtcgtctgaaatggatattttattgaaatactggaagccggtaggcgtattgctgctgatcgtcctgatttttaccgcatggcgtttcgaccgtgccgaaaaataccgcatgggacgggaggctgccgctgccgaaatctcgaatcgtctgaaagacggctatatcgagcaggcaaagcaggcgcgttctgccgagcagaaagccgccgccgcgtttgccgaacgacaaaccaaattagaagaggaaaaacaaaatgctgaaaaaactgttgccgctatgcgtcttgagcttaaccgcctgcgccactacgccgccgcccaaaatcgcagcagaaacctgcccgcaaccactaccgccgccaccgcatctgatggcgcgtcagattcccaaggctggctattattcggacagtgcgctgaaaaatatgcaggactggcagaaacagccgacggacatgcggccgatttaagggaatggcaggcatatggtcatgcagtaagcagtcagcgtgccgaataa

SEQ ID NO: 62288 - DNA, 360 bp, Neisseria meningitidis
atgtattttgttgaccgcaccgccgtcgtcctcaagccgaccgtccgctttttggaatggctcaaaagcaccgacgaaaatatgcccgacctgaccatagaacagcttcgtgccaactgttccgtcttcctcgttccgcagttcgacgaaccggaagccgtcgtttcctatttcgacgaacgctaccgccagattttcgaggcggagctggcaggttgggacatcgataaggataaatggccgcaagatatggggctgaaggcgttttgggaatttttcgacatcgaaatccacgatatggtgttggatatggaagaagcggatttgaacatcacgcccgtgttcgacaatatgatgtaa

SEQ ID NO: 62289 - DNA, 303 bp, Neisseria meningitidis; identical to SEQ ID NO: 43912

SEQ ID NO: 62290 - DNA, 939 bp, Neisseria meningitidis
atggatgcctaccccgaagccgaagccccgccgcaaagcatcgtcgagctggttcccgtattgattgccgttaccgacggcggcctgcgggtattaaccgtcgcccaaggcacactcctgcccaacggcccgctctcccctctgcgcaattccctgcaggcgggcgtgaagctgtgggttgccaagcagacttcgcagcctatgggctatgtggaacagctttacacctttgtcgatacccaccgccgcaacgaacacggcatgcccgtcttgtacgtcagctatttggggctggtgcgcgaggcagccgacagcatcctgcacccggatgcgaaatggcaggactgctacggctatttcccgtgggaagacttgcgcaccgacggcggacagcgcgacgccgtcgtcagccgcctgcgcatttgggcaaattcggcggacacggaggaagtgcgtcaaatgcggctcaagcgcattcatttgtgctggggggtcgaaccggaaaactggtcggaagaatacgttttacaacgctatgaaatgctgtatgaaagcggtctgatagtggaagccgccgagccgcaggcaaacttcgacttcgcgctcacggggcagcccatgcgccacgaccaccgccgcgtactggcgaccgccctgtctcgcctgcgcgccaaaatcaaataccgccccgtgatttttgaactgatgccgcccgaattcacgctgctgcaactgcaaaacagcgtcgaagccatcagcggcagattgctgcacaagcaaaacttccgccgccagattcagcagcaaaacctcatcgagccgtcggataccggcgtatcgggcagcaaaggccgtcccgcgcagctttgccgcttccgcgacgacgtcctgcccgacaggctgatttcggacatcggactgccgctgggcagccgttag

SEQ ID NO: 62291 - DNA, 792 bp, Neisseria meningitidis
atggcaagacatccctaccgccgcctgcgtcctgcaaaatccggctttcccgaagtcggcatttccgaagaaggcaatatccgttcgcttcacttgggcagcgacaccatccaaagctcaatgaacctcgaccacccgtccgagctggtactctcttacagccgtgccatgatgggatggctgctgtttaccgacgctcttccgcagcatatcacccaaatcggcttgggcggcggttcgtttgcacgctggatagacacctacctgcccgacacgcgccaaaccgccgtggacatcaacccgcaggtcatcgccattgcccgcagcctgttcgagttgcctttcgagggcgagaaatttgaaattatcgaagcagacggtgcagaatatatcaaagtcttccgccacaacaccgatgtgattttggtggacgggttcgacggcgaacaaatcatcgatgcgctggttgaagaaccgtttttccgagactgccgaaacgcactctcttcagacggcatattcgtaaccaactggtggagcggcgacaaacgctaccaacgcttcatcgaacggttgttgagcgtttttgaagggcgcgtcttggaacttcctgccgaaagccacggcaatgtcgcggtaatggccttccaaagcagccccaaagagcaaaacatagacaaactcaaaaaacgtgccgacaaactgagcaacgcatacggattggacttccaccgtatgcttgccggcctgaaagcgtccaaccccaacaacggcaagcatttccacctttaa

SEQ ID NO: 62292 - DNA, 483 bp, Neisseria meningitidis; identical to SEQ ID NO: 39611

SEQ ID NO: 62293 - DNA, 1233 bp, Neisseria meningitidis
atgccttctgcccattatcctgaaatgagcgaaaaactgatggcggttttgatggcgatgctggttacgctgatgccgttttccatcgatgcctacctgcccgcgattcccgaaatggcgcagtcgctgaacgcggatgtccaccgcatcgaacagagcctgagtttgtttatgttcggcacggcgttcggacaggtggtcggcggttcggtgtccgacatcaaagggcgcaaacccgtcgcgctgaccggtctgattgtatattgccttgccgttgccgccatcgtatttgcttcgagtgccgaacagctcctcaacctgcgcgtcgtgcaggcattcggtgcgggcatgactgtggtcatcgtcggcgcaatggtgcgcgattattattccggacgcaaagccgcccagatgtttgcccttatcggcatcattttgatggttgtgccgctggtcgcacccatggtcggcgcattgttgcagggcttgggtggctggcaggcgatttttgtttttctggcggcgtattcgctggtgctgctcggtttggtgcagcatttcctgcccaagcctgccgtcggcggcaaaatcggacgggacgtgttcgggctggtggcggggcggttcaagcgcgtattgaaaacccgtgccgccatggggtatctgtttttccaagcattcagtttcggctcgatgtttgcttttttgaccgaatcgtccttcgtgtaccagcaactttaccgcgttacgccgcatcaatacgcttgggcgtttgcgctcaacatcatcacgatgatgtttttcaaccgcgttactgcgtggcggctcaaaaccggcgcgcatccgcaaagcatcctgctgtgggggattgtcgtccagtttgccgccaacctgtcccaactcgccgccgtgctgtttttcgggttgcccccgttttggctgctggtcgcgtgcgtgatgttttccgtcggtacgcagggcttggtcggtgcaaacacgcaggcatgctttatgtcttatttcaaagaagagggcggcagcgcgaacgccgtgttgggcgtgttccagtccttaatcggcgcgggggtgggtatggcggcgaccttcttgcacgacggttcggcaaccgtgatggcggcaacgatgaccgcgtccacctcttgcggcattgcgcttctgtggctgtgttcgcaccgggcgtggaaggaaaacgaacagagcgaatacctttaa

SEQ ID NO: 62294 - DNA, 771 bp, Neisseria meningitidis
atgaaaatcaccacttggaacgtcaattcgctcaatgtgcggctgccgcaggtgcaaaacctgcttgccgacaatccgcccgatattttggttttgcaggaactcaaactcgatcaggacaaatttccggccgccgctttgcaaatgatgggctggcactgtgtttggagcgggcagaaaacctacaacggcgtggcaatcgtcagccgcaacgcgccggaagacgtgcatatcgtgctgcccgcgctgccggacgatccgcaacggcgcgtgattgcggcaaccgtcggcggtgtgcgcgtcatcaatgtctattgcgtcaacggcgaagccctcgacagcccgaaattcaaatataaagaacaatggtttgccgcgttaaccgaatttgtccgcgatgaaatgacccgctacggcaaactggtgctactgggcgatttcaatatcgcgcctgccgatgcggactgttacgaccctgaaaaatggcacgaaaaaatccactgttcgtccgtcgaacggcagtggttcaaaaacctgctggatttgggactgaccgacagcctgcgccaagtccatcccgaaggcgcgttctatacctggttcgactatcgcggcgcgatgttccaacgcaaactgggcctgcgtatcgaccatattttggtgtcgcctgcgatggcggcggcgttgaaggatgtccgcgttgatttggagacgcgcgcgctggagcgtccgagcgaccacgcgccggtgacggcagaattcgattggtaa

SEQ ID NO: 62295 - DNA, 120 bp, Neisseria meningitidis; identical to SEQ ID NO: 43584

SEQ ID NO: 62296 - DNA, 1176 bp, Neisseria meningitidis
atgcaaaatatttttgaccctttggttattcgtggaaaatcccttacccccatcgtgcaaggcggtatgggggtcggtgtttccgcatcgggtttatccagcgcggtggcacgtgaaaacggtatcggaacgattgccagtgtggatttgcgccaccttcacgaagacctactcgccgaatcacaaatcaatccgagtgaagagaaatatacatctttgaactgtaccgcattagacagggaaatccaaaaagccaaaagcgcttcagagggaaaaggactgattgcggtcaacgtgatgaaggcggtcaaagaccacgccgcgtatgtccgccaggcttgcgaatcaggggcggatgcggttgtaatgggtgccggcctgcctttagacctgccggaaatgaccgagggctatcataaagatgtcgcgctgctgccgattctgtccgaatcgcgcggtattaatatcgtcttgaaacgttggatgaaaaaaggcatattgcccgatgcgattgtagtcgaacatcctgcccacgcggccgggcatttgggcgcgtcaaccgtcgaaggcgtaaacgatgccaagttcgacttcaaacgcgtgattgaggaaacgtttgaagttttcaaaagtttagggctggaaagcgaaaaaatcccgcttattcttgcgggaggcatggcaaattttgaaaaagtcaaaaccgccctaaagaactggggagcatccgccgttcaaatcggtacggcttttgccgttaccgaagaaggagatgcacaccttaacttcaaaaaaacgctcgccggtgcggaaactgaaaaagtagtcgaatttatgtctgttgccggtttgccggcgcgcggtgtccgcaccaaattcctagacagctacatcaagcgtgaaagcaaacttcagacaaacgccaaagccgacccgcgccgctgtacccaaggtttaaactgcctaaccagttgcggtctgcgcgacgggctttccaaagccggacaattctgcattgatatccagcttgccgccgcattccgtggagaagtagataaaggcctgttcttcagaggtaaagacccgctgcccttcggcaatgccatccgcaccgtccgcgagacgatacaatatctgctgacggggagcgaacctgttgcaacgctcggacgctga

SEQ ID NO: 62297 - DNA, 1137 bp, Neisseria meningitidis
atgaaaaacatatctctttctccgcccgccatgctcggcattcttggcggcggacaattaggcagaatgtttactgttgctgccaaaaccatgggctacaaagtcaccgttctcgaccccgatccggacgcgccggcagcggaatttgccgaccgccatttgtgtgcgccgtttgacaaccaaaccgctttggaagaattggcaaaatgtgcggctgttacgaccgagttcgaaaacgtcaatgccgatgcgatgcgttttctcgccaaacataccaatgtttcccccagcggcgactgcgttgccatcgcgcaaaaccgcattcaggaaaagtcatggatacgcaaagcaggcctgcaaaccgcgccgtatcaagcaatttgcaaagccgaagacatcactgaagaaagcatacaatttctgcccggcatcctgaaaaccgctacattgggctatgacggcaaaggccaaatccgcgtcaaaacggtggatgaactcaaagccgcgtttgccgaacaccgcggcgtggattgcgttttggaaaaaatggtggacttgcgcggcgaaatttccgttatcgtatgccgtctgaacaatgacaacgtgcaaactttcgatcctgccgaaaacattcacgaaaacggtatcctcgcctactccatcgtcccagcccgactgagtgccgacattcagcaacaggcgcgacaaatggcgcagcgtttggccgatgaattgaactacgtcggcgtattggcggtagaaatgtttgttgtcggcgacacgcatgaattggtcgtcaacgaaatcgcgccgcgtccgcacaattccggccaccataccgtcgacgcctgcgcggcagaccaattccagcaacaggtccgcctgatgtgcaacctgccacctgctgacaccaaattgctgagttcttgctgtatggcgaatattttgggcgacgtttggcaggaagacggcggcgaaccggattggtttcccctgcaaagccggccggacgcgcacctgcacctttacggcaaaaaaaccgcgcacaaagggcggaaaatgggacactttaccgttttaaccaccgattcggacaccgcatttcaagaagcaaaaaaactgcatcagtccctataa

SEQ ID NO: 62298 - DNA, 1953 bp, Neisseria meningitidis
atgcgctttgcggtcgctttgctcagtctgctgggtattgcatcggttatcggtacggtgttgcagcaaaaccagccgcagacggattatttggtcaaattcggacctttttgggcgcagatttttggttttctgggactgtatgacgtctatgcttcggcatggtttgtcgttatcatgatgtttttggtggtttctaccagtttgtgcctgattcgcaatgtgccgccgttctggcgcgaaatgaagtcttttcgggaaaaggttaaagaaaaatctctggcggcgatgcgccattcttcgctgttggatgtaaaaattgcgcccgaggttgccaaacgttatctggaagtacaaggttttcagggaaaaaccattaaccgtgaagacgggtcggttctgattgccgccaaaaaaggcacaatgaacaaatggggctatatctttgcccatgttgctttgattgtcatttgcctgggcgggttgatagacagtaacctgctgttgaaactgggtatgctgaccggtcggattgttccggacaatcaggcggtttatgccaaggatttcaagcccgaaagtattttgggtgcgtccaatctctcatttaggggcaacgtcaatatttccgaggggcagagtgcggatgtggttttcctgaatgccgacaacgggatattggttcaggacttgccttttgaagtcaaactgaaaaaattccatatcgatttttacaatacgggtatgccgcgtgatttcgccagcgatattgaagtgacggacaaggcaaccggtgagaaactcgagcgcaccatccgcgtgaaccatcctttgaccttgcacggcatcacgatttatcaggcgagttttgccgacggcggttcggatttgacattcaaggcgtggaatttgggtgatgcttcgcgcgagcctgtcgtgttgaaggcaacatccatacaccagtttccgttggaaattggcaaacacaaatatcgtcttgagttcgatcagttcacttctatgaatgtggaggacatgagcgagggcgcggaacgggaaaaaagcctgaaatccacgctgaacgatgtccgcgccgttactcaggaaggtaaaaaatacaccaatatcggcccttccattgtttaccgtatccgtgatgcggcagggcaggcggtcgaatataaaaactatatgctgccggttttgcaggaacaggattatttttggattaccggcacgcgcagcggcttgcagcagcaataccgctggctgcgtatccccttggacaagcagttgaaagcggacacctttatggcattgcgtgagtttttgaaagatggggaagggcgcaaacgtctggttgccgacgcaaccaaaggcgcacctgccgaaatccgcgaacaattcatgctggctgcggaaaacacgctgaacatctttgcacaaaaaggctatttgggattggacgaatttattacgtccaatatcccgaaagagcagcaggataagatgcagggttatttctacgaaatgctttacggcgtgatgaacgctgctttggatgaaaccatacgccggtacggcttgcccgaatggcagcaggatgaagcgcggaaccgtttcctgctgcacagtatggatgcgtacacgggtttgaccgaatatcccgcgcctatgctgctgcaacttgacgggttttccgaggtgcgttcgtcgggtttgcagatgacccgttccccgggtgcgcttttggtctatctcggctcggtgctgttggtattgggtacggtattgatgttttatgtgcgcgaaaaacgggcgtgggtattgttttcagacggcaaaatccgttttgccatgtcttcggcccgcagtgaacgggatttgcagaaggaatttccaaaacacgtcgagagtctgcaacggctcggcaaggacttgaatcatgactga

SEQ ID NO: 62299 - DNA, 1041 bp, Neisseria meningitidis
atggatatttcagattttgattttaccctgcccgaaaagctgattgcccagcatccgcccgaagtgcgcggcagcagccgccttttggttgcgttgcccgatatgccgctgcaagaccgggtgttcggcgatttgcaggattatgttgaggcgggcgacgttttggtgttcaacaacaccaaagtcatgaaggcgcggctgtttgggcagaaagacagcggcggcaggatcgaagccctgattgagcgcgtgttggacaaccataccgcactggcgcacatccgttcgtccaaatcgcccaagcccggtatggggctggtgtttgaaggcggcatccgcgccgtgacggtcgggcgtgagggcgaactgttctgcctgcgttttgaaggcggtcaaaccgtttacgaacttttggaacagaacggacacctgcccctgccgccttatatcgaacgcgccgccgatgcggatgacgacagccgttatcaaaccgtttatgccaaatatcagggcgcggtcgccgcgccgacggcgggtctgcattttacggaagaacttttgcgccgcctgaaagacaaaggcgcggtaaccgcagaagtaactctgcacgtcggtgcggggacattccaacccgtgcgtgtggacaaaatcgaagagcataaaatgcacagcgaatggtttgaagtgccgtctgaaaccgccgccgccgttgaggcggcaaaagcccgggggaacaaagtctgggcggtcggcacgacttccatgcgcgccctcgaatctgccgcgcgtgcgacgggtcgtctgaaagcggggcagggcgacaccgatattttcatcacgccgggctaccgttttaatgttgtcgacaggctggttaccaattttcatttgccgaaatcgacgctgctgatgcttgtcagcgcgttttcgggtatgggtcatatccgcgccgcgtatcgttatgcggtcgaacgcgaataccgtttcttcagctacggcgatgcgatggttttggggcggaacgaaggggtggtacgttag

SEQ ID NO: 62300 - DNA, 231 bp, Neisseria meningitidis
gtggaagatttcagcgtggtgatcggctacgatgaaatcaaagcgaagaatcacagcttgtcggcggggcagtatttcgaggtaaagattgattatgtggatatttccgccgacgaatttgcgcaaaaaatggcgggattttcagcggatttggataaacttttcgccgaatctgccgaattggaaaaagagattaaggatagattggcgatgttgaaattcaattcataa

SEQ ID NO: 62301 - DNA, 1485 bp, Neisseria meningitidis; identical to SEQ ID NO: 43257

SEQ ID NO: 62302 - DNA, 1296 bp, Neisseria meningitidis
atgagcgtcatccaagacctgcaatcgcgcggccttatcgcgcaaaccaccgacatcgaagccttagacgctttgttgaacgaacaaaaaatttccctttattgcggcttcgacccgaccgccgacagcctgcacatcggacacctgctgcccgtattggcattgcgccgcttccaacaggcggggcatacgccgattgcactggtgggcggtgcgaccggtatgatcggcgaccccagcttcaaagccgccgaacgcagcttgaattccgccgaaaccgttgccggctgggtggaaagcatccgcagccaattaacccctttcttgagctttgaaggcggaaacgccgccattatggcgaacaacgccgactggttcggcaaaatgaactgcctcgacttcctgcgcgacatcggcaagcatttctccgtcaacgccatgctgaacaaagaatccgtcaaacagcgcattgaccgcgacggcgcaggcatttccttcaccgagttcgcctactccctgctgcaaggctacgacttcgccgagttgaacaaacgccacggcgcggttttggaaatcggcggctccgaccaatggggcaacatcaccgccggtatcgacctgacccgccgcctgaatcaaaaacaagtgttcggcctgaccctgcctttggttaccaaatcagacggcaccaaattcggcaaaaccgaaggcggcgcagtatggctgaacgcgaaaaaaacctcgccctatcagttctaccaattctggctgaaagtcgccgatgccgatgtgtataaattcctgaaatactttaccttcctgtccatcgaagaaatcgatgccgtcgaagccaaagaccaggcaagcggcagcaagcccgaagcgcaacgcatcctcgccgaagaaatgacccgcctgattcacggcgaagaagcccttgccgccgcacagcgcatttccgaaagcctgtttgccgaagaccaaagcagcctgaccgaaagcgacttcgagcagctcgccctcgacggtctgccgacttttgaagtttctgagagcctcaacgtggttgagactttggtgaaaaccggtttggcgtcttccaacaaagaagcgcgcggctttgtgaacaacaaagcggttttgctcaacggcaaacctgccgaagccaacaatccgaaccacgccgccgaacgccccgacgatgcctgcctgctgaccgacgaacacaaacgtttcggcaaatacaccatccttcggcgcggcaaacgcaaccacgcgcttttggtttggaaataa

SEQ ID NO: 62303 - DNA, 456 bp, Neisseria meningitidis; identical to SEQ ID NO: 40384

SEQ ID NO: 62304 - DNA, 618 bp, Neisseria meningitidis
atgaatatgaagaataatgattgcttccgcctgaaagattcccagtccggtatggcgctgatagaagtcttggttgctatgctcgttctgaccatcggtattttggcgttactgtctgtgcagttgcggacagtcgcttccgtcagggaggcggagacacaaaccatcgtcagccaaatcacgcaaaacctgatggaaggaatgttgatgaatccgaccattgattcggacagcaacaagaaaaactataatctttacatgggaaaccatcatacactatcagctgtggatggcgattttcaggttgatgccataaaaactaagacgcagttggcagaggcacaattgaagagatttagttatgagctgaaaaatgccttgccggatgcggcagccatccattacgccgtctgcaaggattcgtcgggtaacgcgccgacattctccggcaatgctttttcttcaaattgcgacaataaggcaaacggggatactttaattaaagtattgtgggtaaatgattcggcaggggattcggatatttcccgtacgaatcttgaggtgagcggcgacaatatcgtatatacttatcaggcaagggtcggaggtcgggaatga

SEQ ID NO: 62305 - DNA, 1389 bp, Neisseria meningitidis
atgagcacccgtaccgaacacgacaccatgggcaatgtcgaagtcccgtccgaagcctattggggcgcgcagacccagcgcagccgcaacaatttcaaaatcggcggcgaaaccctgccgcagccgctgatttatgctttggcgttggtgaaaaaagccgctgccgcgaccaatgtttccctcggcaggattaagccggaacaggcggatttgattacgcaggcggcggatgatgtgttgaacggcaggcttgacggacagtttcctttagtggtttggcagaccggctccggcacgcagtccaatatgaacatgaacgaagtgctggcaaaccgcgccaacgaaatcgccggtacgggtttggcggcttatcagcccgtccatcccaacgaccatgtgaaccacgcgcaatcgaccaacgacgcattcccgaccgctatccacgttgccgccgcgattgaaatcaaccgccacctcatccccgccgtaaaagccctgcgcgataccttggacaaaaaagcccaagctttcgcccctatcgtcaaaatcggccgcacccacttgcaagacgcgacgccgctgactttgggacaggaattttccggctacgtttcccagcttgatcacggcttaggccgtctgaacgatgcgcttaaagacttgtatgaacttgctttgggcggtacggcggtcggcacgggtttgaacagccatcccgaatacgccgaaaaagctgctgctaaactcgccgaactgtccggcttgccgtttgtcagcgcgccgaacaaatttgaagccttaggcggacgcgatgccgccgttgccgcttcgggcgcactgaaaacgctggcggcaagcctgaataaaatcgccaacgacatccgctggctggcaagcggcccgcgctgcggtttgggcgaaatcaaaatccccgaaaacgagccgggttcgtccatcatgccgggcaaagtcaatccaacccaatgcgaagcgatgaccatggtgtgctgccaagtgttcggcaacgacgttaccatcggtatggcgggcgcgtcgggcaatttcgagctgaacgtctatatgcccgtcatcgcctacaacctcttgcaatccatccgcctgttgggcgacgcgtgcaacagcttcaacgaacactgcgccgtcggcattgaacccgtaccggaaaaaatcgactatttcctgcaccattccctgatgctcgttaccgcgttaaaccgcaaaatcggttacgaaaacgccgccaaagtcgccaaaaccgcctacaaaaacaacaaatcgttgcgcgaaaccgccgttgagttgggcttgctgacgggcgaagaatttgacgaactggtcgttcctgccgatatggttcatccgcgctaa

SEQ ID NO: 62306 - DNA, 792 bp, Neisseria meningitidis
atgattactgtgaacacactgcaaaaaatgaaggcggcgggcgaaaaaatcgctatgctgaccgcttacgaatccagttttgccgcactgatggacgatgccggcgtggaaatgctgctggtcggcgactctttgggtatggcggttcaagggcggaaatcgacgctgcccgtcagcctgcgcgatatgtgctatcacaccgaatgtgtagcacgcggtgcaaaaaatgcgatgattgtcagcgatttgccgtttggtgcatatcagcagagtaaggagcaggcgtttgccgccgccgccgaactgatggcggcaggagcgcatatggtcaaactcgaaggcggtgtgtggatggcggaaacgaccgaatttctgcaaatgcgcggtattccggtctgtgcccacatcggtctgaccccgcaatccgtgtttgccttcggcggatacaaggttcaggggcgcggcggcaaggcgcaggcgttgcttaacgatgccaaggcgcatgatgatgcgggggcggcggtcgtgctgatggagtgtgttcctgcggaactggcaaaaaaggtaactgaatccgtttcctgtccgaccatcggcatcggcgcgggtgtcgattgcgacgggcaggttttggtgatgcacgatatgctcggcattttcccgggtaagacggcgaaattcgtcaaaaactttatgcacgggcaaagcagcattcaggcggcggttcgcgcgtatgttgccgaagtcaaagccaaaaccttccctgctgcggaacatatttttgcagactga

SEQ ID NO: 62307 - DNA, 969 bp, Neisseria meningitidis
atggcaaaaaaaactactaaaactattcattatttacgtgcgcagcaaaaccatagcttgttcgatttagaggtagcattaagaagggttttgtcagctgctcctactgttcaagatacacaaattgaacaatacaatcagcttacccaaatcatgcatagaactttggatcctaaagatgtaaaaggcaattcaattggtggattactgatacacattggcagcggtacaaaagatgaacatatccgcactatgagcaatagacctgtacagcaagatgatcatggtggaacacaagctcctccaagtggatattcctttttgcgtaaagaggcttttttgtatattgttggacaccatgtaattttttgcggacatggttttttgtcagcatcaacggttgcttcttatttaagtttacttagcaataaattgagagagaacaatccggatattgttcaatttaatattgaattcaaagcagtaggcaattgcgacaagttgtcattgatacaacaacatggggtaaaaagtattcttttagatgcttcggcatatcaattatccagaaacagactgtatcaagatagccgttcaaccattgctaaagcattagggaaagttggtagtgtatttacaagcgaattgagtgatgaggaattggaagcacaatccgaaattcatatcaatttagaagtcttgctaaacggtaattcgagagccagtattgaagcgcaatcgctgatgcaggagcaggcagaggaaattattgatgatgaaacggttaatcaaggattttccattaccacgcaacaaggtgaagtgattcagccctctgatgtaaaactgtctaaatctgttagaataggacgatacgatgaagccaactcgttactccctgactcggcatttacagcaatcagtgaatatttcctagaactccaaagcagaaacttaactgaacaatga

SEQ ID NO: 62308 - DNA, 1092 bp, Neisseria meningitidis
atgagtttgaaatgcggcatcgtcggtttgcccaacgtcggcaaatccaccctttttaacgcgctgacccaatcgggtatcgaagcggcaaactatcctttctgtaccatcgaacccaacgtcggcatcgtcgaagtccccgatccgcgtatggccgaattggcaaaaatcgtcaatccgcaaaaaatgcagcctgccatcgtcgaatttgtcgatattgccggtttggttgcaggcgcgagcaaaggcgagggcttgggcaaccagttccttgccaacatccgcgaaaccgatgcgattgtgaatgtcgtgcgctgctttgacgacgacaacatcgtccacgttgcaggccgcgtcgatccgattgccgacatcgaaaccatcggcacagagttggcacttgccgacctggcaagtgtggaaaaagccatcgtccgcgaagaaaaacgcgcccgttcaggcgacaaagacgcgcaaaagctggtcgatttgtgcaaaaaactgctgccgcatctggacgaaggcaaacccgtgcgttccttcggtttggacgcggaagaacgcgcgatgctcaaaccgctgttcctgctgacagccaaacctgcgatgtatgtgggcaacgtcgccgaagacggttttgaaaacaatccgcacctcgaccgcctgaaagaattggcggcaaaagaaaacgcccccgtcgtcgccgtatgcgccgcgatggaaagcgaaatcgccgaattggaagacgacgaaaaagccgaattcctcgccgaaatgggtttggaagaacccggcctgaaccgcctgatccgcgccggctacgacctcttgggcctgcaaacctacttcaccgccggcgtgaaagaagtccgcgcgtggacgatacacaaaggcgacaccgccccgcaagccgccggcgtgattcatacggattttgaacgcggcttcatccgcgcccaagtgattgcctacgatgattttgtctcgctcggcggcgaagccaaagccaaagaagccggcaaaatgcgtgtggaaggcaaagaatacgtcgtgcaggatggggatgtgatgcactttttgtttaacgtgtaa

SEQ ID NO: 62309 - DNA, 1185 bp, Neisseria meningitidis
atgagtttacacagcgacatcctcgtcgtcggcgcaggcccggcgggtttaagttttgcagccgaacttgccggcagcggtttgaaagttaccctgatcgaacgcagcccactgactgttctgcaaaatcctccatatgacggacgcgaaatcgccctgacccatttttcccgcgaaatcatgcagcgtttgggtatgtgggacaaaattcccgaaaacgaaatctaccctttgcgcgatgccaaagtgctgaacggacgttccgactaccagctccactttccccaaccgactgaagcgcgcggcgaacctgccgactgtttgggctatctgatttccaaccacaatatccgccgcgccgcctatgaagtcgtatcacaactcgacaatgtcagcattctgaccgatacggttgtcaaagaagtcaaaacatctgacaacgaagcacaagtcattttggaaaacggcaaaatcctgactgcacgcctgcttttggcggcagacagccgtttctcacaaacccgccgacaactcggtatctcctccgatatgcacgattacagccgaaccatgttcgtctgccgtatgaaacataccctttccaaccaacataccgcttacgaatgcttccattacggacgcaccatcgcactgctgccgctggaagagcacctgaccaataccgtcattaccgtcgataccgataaaatcaacagcgttcaaaacctttcgcccgaagaattggcggcaagcgtaaaagaacaactcaagggtaggcttggcgacatggaactggtcagcagcatccaccattacccccttgtcggtatgattgccaaacgtttctacggcaaacgcagcgcgctgatcggcgatgcggctgtcggtatgcaccccgttaccgcacacggtttcaacttgggtctgtccagcgcagatattttggcaaaactgatactcgaagccgagcagcgcggtcaggacatcggcgcggcttccttgttggaaaaatacagcagcaaacatatgctgcacgcccatccgctttatcacgggaccaatatgatgctgaagctgtttaccaacgaaaccgcaccggcaaaactgctgcgcggtttggtattgcgtgccggcaacaacttcccgccgctgaaaaagctgattaccaaacaactgaccggttga

SEQ ID NO: 62310 - DNA, 1977 bp, Neisseria meningitidis
atgcaccccatcgaaacccccgacaagaccttccacgacggcgacggcgtgtccgaattgggcaccatcctgcccgcgtggtggctcaaccaagtgcaatccgagctgctggccgtgctgactgcggccggtatccagccggataagtcgcagcctaatcaattactggcagcactaaataggctggctgtagttaccaccggcgaccaaaccatcaccggccaaaaaacctttaccgcccaaacccaattccaaagcggcatccatttatccgccaaccagacgaactggaacggcggccacaaagcctacatcggcgcggatgccgacaacgcccacatcgtcttcggcgacgacaccctccgcctgcacggcgcaaacaaccgcatttcctacaacaaccacgacatcttccacaaagccaacaaaccgcgttttgccgaagacatcgaaggtaagccgaacacactgtccggatacggcatcggcaatttcaaagtcgaaaccttccggggcgatttgaacaccctcaaaacagacggcatctattccctgccgacggcgggcggcagctccaacctgcccgttgaaaacaccgcctgccatatccaagtcatcgccggcacgaaacacggctggtgcaggcagttgggttatcccgcctacacgtccgacgtgtacgaacgccaccaaacgagcagcgcaaacgacaactggtccgcatggaaaaaactcaattcggacggcatccccgtcggcgcgatcgtatcctttcccaaagccgtccgaaaccccgcaggctatctcaaagccaacggcacgacctttgcacaaaacaccttccccgacctctaccgcgccctgggcaacagcaaccgcctgcccgatttaagccgtaccgacatcggcatcaccgcatggtttccgtccgaccaaatcccgaccggctggctggcgtttgacgacatccgcacgcgcgtaaccgaaaccgcttatcccgagctgtaccgtctgctgaccggaaaatacggcagcatccaaaacgtcccgcaggcggaagaccgctttatccgcaacgccgccaacggcttggcagtcggaacgaagcaggaagacgaaatcaaacggcacgtccacaaagtattttcacactgggtaaaccacccgcacgcggcagccctcggttacgaagaccacaacgaaaggcagagaagcgcgctcgtatcgacttggacggacgaaaatttaaacgacaacggctttttaaccccgcgcccggacagcaaaatggcgacaggcggcgacgaaaaccgccccaaagccctggttttaaaactgtgcatcaaagccgccgacaccttgggcgaagccgtgttctggataaagtcccacggcgaaaccgtcaacgccggcgcgctggacgcgggcacgctggcgcaaaacctccaagacaaagcagaccgcgcccacacccacaccgccgcccaaatccaagggctggacgaaaaaatcagcaccgccgttgccgcgcaattcacacgccaaaccatcggcggcgtggatattgtcagattccccgacggcacaatgatacagaccggcagttacaggttcacacgaagcggcagccccatagaaaacgaagtcgtcttccccgtcgcctttgccgacggcaacgtcaaatgcttcgtatccgaacgccattcgggacgcgtcaccggcgatcgaaggcaacacaactggctgtttatccgcgcaaaaaaccacgccgccgccattattaccaactggtacgaaggcagttgcgactggatggccatcggcaaagccgcctcgggaaacgccgccagctccctgatagtccccgaaatacctgaaaccaacgaagaaccgcaaagagagagtggaagaacatcaaccggaccccgaaaccgccgccgccaccgagacggcttgctcgaggcactgcaagactag

SEQ ID NO: 62311 - DNA, 357 bp, Neisseria meningitidis
atgaatgaacacaacctgttaattttctgtttaaaagacaatgtttcaattagtgaatatactgaaatgattgattgggcttataaaaacattcaatctgaaacagttgtagaaattacggaaaatcaaattattgaatatcaaaatcgtggattatggagacttgtttctgaaattaccgataattggttatttggaccaagtgagggggattggctaatagataaggaaagtattttggctgtaaaagaaaaattacaaaattcagatttttctacagagcccttagtgaaaaatattattcatgtacttgaatatgctataaaaaataaaaaaacagtaatttttcatttttga

SEQ ID NO: 62312 - DNA, 906 bp, Neisseria meningitidis; identical to SEQ ID NO: 45408

SEQ ID NO: 62313 - DNA, 1044 bp, Neisseria meningitidis
atgagtaaaaaaatcaaagtcggcattgtcggcgcgacgggctacacgggcgtggaactgctgcgcctgcttgccgcccatcccgatgtcgaagtcgccgccgtaaccagccgcagcgaagcgggaactgcagttgccgattactttccgagtttgcgcggcgtgtacggcctcgccttccaaacgcccgacgaggcaggtttggaacaatgcgacatcgtcttcttcgccacgcccaacggcatcgccatgaaagacgcgccgcgcctgattgaacagggcgtgcgcgtcatcgacctttccgccgacttccgcatacgggacattccgacctgggaacactggtacggcatgacccacgccgcccccggcctcgtttcccaagccgtgtacggattgagcgaactcaaccgcgaagccgtcgcacaggcgcgcctcgtcgccaaccccggctgctacccgacctgcgtatccctgccgctcgtgccgctgttgcggcaatgccgtctgaagcccggtatgccgctgattgccgactgcaaatccggcgtgtccggcgcgggcaggaaaggcaatgtcggttcgctgttgtgcgaagtcggcgacaacttcaaagcctacggcatagctggacaccgccacctgcccgaaatcaggcagaccatcgccgggcttcaggacggcatcgccgaaggattcgtgttcacgccgcacctcgtgccgatgatacgcggtatgcacgccaccgtttacctccacctttcagacggcatctgccccgaaaccgtcctgcgcgactactaccgcgacagcccgttcgtggacatcctgcctgccggttcgacacccgaaacccgcagcgtgcgcggcgcaaacctctgccgcatcagcatccaacaggcggcgcaatccgatgtgtgggtcgtcctttccgtcatcgacaacctcgtcaaaggcgcggcgggtcaggcagtccaaaatatgaacatcatgttcggactgaaggaaacacacggcttagacgcaatccccctgctcccctga

SEQ ID NO: 62314 - DNA, 693 bp, Neisseria meningitidis
atgaaacgcttcacctatactctttccgacggcttgtgcatcgaaatcgaactcaaacgcagtgccaagaaaaatctgattctgcgccccgtcaatatgcagacggtcagcatcaacgtcccacccttttttcaagaccacgcgttagcaaactggctggcggcaaacgaaacgattttgcggaacacgcttgccaaaacgcccgtgcatcctgtttcccacccaaacttacccgagtggatttggtatcggggaataaagaccaagctggatacccacagccaaagccatatccgtatcacgtcgtctgaaatcctgcttccccgaaaagaaaccgccgcacaaatcgaccacctgcgccgcctgttgaacgaacgcgcccgcgaatacctgctgccccgccttgaaaaacacgcagccgaaacaggactgacgcccaccgccacagacctgagcaacgccaaaaccttttggggcgtatgccgcccgcacaccggcatccgcctcaactggcggctgatcggcacgcccgaatacgtcgccgactatgtctgcatccacgaactctgccacctccgccaccccgaccacagtccgcgcttttggcatttggtgaacacgctgacgccgcataccgacaatgctaaaagttggctgaaggcgcacgggcgggaattgtttgtgctggggtaa

SEQ ID NO: 62315 - DNA, 966 bp, Neisseria meningitidis; identical to SEQ ID NO: 44673

SEQ ID NO: 62316 - DNA, 417 bp, Neisseria meningitidis; identical to SEQ ID NO: 55659

SEQ ID NO: 62317 - DNA, 159 bp, Neisseria meningitidis
atgaaaaccttcgaaaaaacatggtctgcacaatatcgggatatggaaatttcagtacggattttttggaatttggagcggacaggggcggaagtctatatcaacggaaggcgggtttatcataacgaagccgaaatggcgtctgcttctttgcgttag

SEQ ID NO: 62318 - DNA, 1260 bp, Neisseria meningitidis
atgcacgtctccgaattacaaaccctgcacatttccaaactcttagaattggcggaagaacacggcatcgaaaacgccaaccgattccgcaaacaagacctcgtatttgccatcgtccgccagatgatgaaaaaaggcgagggtttcacctgctccggcacgcttgaaatcctgcccgacggcttcggcttcctccgcagcgcggacacgtcctatcttgccggccccgacgacatctatgtctcacccacccaaatccgccgcttcaacctgcatacgggcgacaccatcgaaggaagcgtgcgcgtcccaaaagacaacgaacgctattttgccctagtcaggcttgataccatcaacggcgaccacccggaagtatgccgccataaaatcctgtttgaaaacctgaccccgctgtttccgaccgaacagttgaagctggaacgcgacttaaagtccgaagaaaacctgaccggacgtgccatcgacctgatttcccctatcggcaaaggtcagcgcgccctcttggttgccccgcccaaaagcggtaaaaccgtgatgctgcaaaacattgcccacgccgttacctcaaactatcccgaagtcgaactcatcgtcctcttgattgacgagcgtcccgaagaagtaaccgaaatgagccgttccgtccgcggcgaagtggtttcctccacctttgacgaaccggcgcaacgccacgtccaagttgccgaaatggtgcttgaaaaagccaagcgtatggtagaacacaaaaaagacgtggtcatcctgctggattcgattacccgccttgcccgcgcctacaataccgtcgtgcctacctcgggcaaaatcctaaccggcggtgtcgatgccaacgcactgcaccgccccaaacgtttcttcggcgcggcgcgcaacgtggaagaaggcggttcgctgaccatcatcgccaccgcattggttgaaaccggcagccgtatggacgatgtgatttacgaagaattcaaaggcaccggcaatatggaattgcaccttgaccgccgtatggcggaaaaacgcctcttccccgccatcaacatcaacaaatccggcacgcgccgcgaagagctgcttgtcccaaacgaccagttacaacgtatgtggctcttacgcaagttcctgcacccgatggacgaaatcgaggcagccgaatttttaatcgggaaaatcaaagcctctaaaaacaacgacgatttctttgaactgatgcgcggcaaataa

SEQ ID NO: 62319 - DNA, 1650 bp, Neisseria meningitidis
atgaaacaatccgcccgaataaaaaatatggatcagacattaaaaaatacattgggcatttgcgcgcttttagccttttgttttggcgcggccatcgcatcaggttatcacttggaatatgaatacggctaccgttattctgccgtgggtgctttggcttcggttgtatttttattattattggcacgcggtttcccgcgcgtttcttcagttgttttactgatttacgtcggcacaaccgccctatatttgccggtcggctggctgtatggtgcgccgtcttatcagatagtcggttcgatattggaaagcaatcctgccgaggcgcgtgaatttgtcggcaatcttcccgggtcgctttattttgtgcaggcattatttttcatttttggcttgacagtttggaaatattgtgtatcgggggggggggtatttgctgacgtaaaaaactataaacgccgcagcaaaatatggctgactatattattgactttgattttgtcctgcgcggtgatggataaaatcgccagcgataaagatttgcgagaacctgatgccggcctgttgttgaatattttcgacctgtattacgatttggcttccgcgccggcacaatatgccgccaagcgcgcccacattttggaagcagcaaaaaaagcgtcaacatggcatatccgtcatgttgcgcccaagtataaaaattatgttgtggttatcggtgagagcgcgcgttcggattatatgaatgtttacggtttcccattgcccgatacgccttttttgagtcagaccaaagggctgttgataaacggttaccaatcgaccgcccacgcgacgaatctttcgctgccgcagactttggggctgccgggagaaccgaacaataacatcgtcagcttggcgaagcaggcgggttttcggacggcgtggctgtctaatcaaggaatgttggggcattttgccaacgaaatttccacctatgccttacgcagcgattatccgtggtttacccaaaggggtgattatggcaaaagcgcggggttgagcgaccgccttttgttgccggcgttcaaacgggttttgataggaaatgcaggcacgaagcctcggctgattgtgatgcacctgatgggttcgcacagtgatttttgcacacgtttggataaggatgcgcggcggtttcagtatcaaactgaaaaaatatcctgctatgtttccaccatcgcgcaaaccgataaatttttagaagatacagttaagatattgaatgaaaataaagaaagctggtctttggtttacttttccgaccacggtttgatgcatgtcggtaaaggcggcgagagaacgttgacacatggtgcgtggaagcgtcaaagctacggcgtgccgctggttaaaatttcgtccgatgacacgcggcgcgaaatgattaaagtgaggcgcagcgcgtttaattttttacgcggattcggcagttggacgggtatcgaaaccgacgagttgcccgatgacggctatgatttttgggggaatgttcccgatgtgcagggcgaaggcaataaccttgcctttatcgacggactgcccgacgaccccgcgccgtggtatgcgggaaaaggcaaatcgactaaaaatacgtctaaaaaatga

SEQ ID NO: 62320 - DNA, 474 bp, Neisseria meningitidis
atgaaaaaacaaatcactgaagccacgatgatgctgtctataatcgcccccgcaatggcaaacggcttggacaatcaggcatttgaagaccaagtgttccacacgcgggcagatgcgccgatgcagttggcggagctttctcaaaaggagatgaaggagactgagggggcgtttcttcctattgtggcaggtgctttgatgggaggggcaattagtgcttgggctaatcacggcatttctaaaattaaaacagggcaatttgcttcaacaagaagtaccttggctgcaaccgctggtggtatgataggaggcggatatagcagtgcgatgttgcgcggtgcagggattactactagtgtttttgcccgttctgcttggaaagggggaaatgctattcctaatgcagttattcgtgcaaatggtgcagcattaaatcagtcttctagcgccgcaatgggaaaacatagaagataa

SEQ ID NO: 62321 - DNA, 2262 bp, Neisseria meningitidis
ttgaaagtaaccaaacgagacggaagattagaagccattgatttggataagattcaccgtgtcgttacttgggcggcggaaggattggaaaatgtttccgtgtcgcaggtcgagttgaaatcgcacatccagttctacaacggcatccgcaccgacgacatccacgaaaccatcatcaaggccgctgccgatttaatttcggaagatactccggactaccaataccttgccgcgcgtttggcgattttccatctgcgtaaaatagcctacggcgaatacgagccgccgcacctttacgaccacgttaaaaagctcaccgatgccggaaaatacgacaggcatatccttgaggattacagccgcgaagaatttgatgaactgaacgcctatatcgaccacgaacgcgatatgtccttttcctatgccgctgtcaaacagctcgaaggcaaatatctggtacagaaccgcgttacccgccagatttatgaaacaccgcagttcttatatgttctggtggcgatgtgtcttttcagcaaatatcccaaagaaacacgcctcgattacgtcaaacggttttacgatgccgtttccacatttaaagtatcgctgccgaccccgattatgagcggcgtgcgtacgcctacgcgccagttctcaagctgcgtattgatcgaatgcgacgacagcctggattccatcaacgccaccaccagcgcgattgtgaaatacgtttcccagcgtgcgggcatcggcatcaatgccggacgtatccgcggactggacagcgaaatccggggcggcgaagcacggcataccggctgcattcccttctttaaaatgtttcaggcggcagtcaaatcctgttcgcaaggtggcgtgcgcggcggagcggcaactttgttctaccccttgtggcatatcgaagccgaaagcctgctggtgttgaaaaacaaccgcggtgtggaagacaaccgtatccgtcagcttgattacggcgtgcaaatcaaccgcctgctgtacatccgcctgattaagggcggcaacattacgctgttttcgcccaacgaggttccgggattgtacgaagcgttttttgccgaccaagacgaatttgagcggctctatacgaaatacgagcaagaccctgatatccgcaagcgcatcattccggctgccgacctgttttccacgctgatgcaggagcgtgccggaaccgggcgcatctacattcaaaacgtcgatcactgcaatacgcacagcccgttcgatccgcgcgtcgcgcctgttcatcagtccaacttgtgtatggaaatcgctctgccgaccaaaccgctggacaatatcaacgatccgaacggcgaaatcgccttgtgtacactgtctgcctttaacttgggcgcattaaacagcttggacgaattggaagggcttgccgacttgaccgttcgcgcgctcgatgcacttttagattatcagggatatccggtagaagccgcgcgtacctctactatgggtcgccgttcgctcggcatcggcgtcatcaactatgcttattatctggcgaaaaacggtgtccgctacagcgacggctccgcgctcggtctgacccaccgtacctttgaagccatacagtattatctgctcaaagcatcggcaaaccttgccaaagaatacggtgcgtgtacgctctttaaccaaaccgtttattcgcaaggcaaactgcccatcgacacttacaaaaaagacttggacgctgtgtgtaacgagcctttgcactacgattgggaaagcctgcgtgccgacatcgtcaaatacggcctgcgtaactctactctaaccgcactcatgccgtctgaaaccagttcgcaaatcgccaacgccaccaacggtatcgagccgccgcgcggattggtaacggtaaaagcatcgaaagacggcattttgaaacaagtcgtgccggagtttgaaaccctgaaaaatgcctatgaaaccctgtggcagcttcccggcaacgaaggctatctgaaacttgttggcgtgatgcaaaaattcgtcgatcaggcgatttccgccaacaccgcctacgacccgggcaaattcgaaggcggcaaagtttctatgaaacaaatgctcaaagacctgctgaccgcctacaaatacggcgtcaaaaccctgtactaccataacacccgcgacggcgcggacgatacgcagaccgatattcaggatgacggctgcgcgggcggggcttgtaagatttaa

SEQ ID NO: 62322 - DNA, 783 bp, Neisseria meningitidis
atgaaaatttatactaaagagactttgattgctgctctgaaagaaattagagatttaaattgggtaaaaagtgctcgccctggtaatgatggttccgtaggaaataccttagaagatttattaggtattgaagaaaataatttacctatacctaatgctgctgaatgggaacttaaggcgcaaagaaaagatagttcctcattattgacattatttcatatggagccttcccctacctccttaaaactggtacctaatttattgttacctaactatggttggccacataaaaatgctggggaaaaatacccaaatacagaaaaaagtttcagacaaacgattaatgcaaaaaattattcaaatcgtggttttaaagtccatgtaaatagagacgaagaaaaggttgaagtctctttcaatcaacagttcattacagaggaaaatattttatggaaacaatatgtaaatgaaaaaataggattaaatgagttatctcctcaaccttactggggttttaatgacttatttcataaggctggtactaagttgcataattgcttttacattcaagctgcaagaaaaagagcaaacggggaagagtattttcattatcaagacatttttatgttgaaagagctgtcaaaagaaaagtttattcaagctatcgaagatggtcatgtctatgttgattttgatgctcggactggccacaaccatggaacaaagttcagaataaaaccttctttaattccttctttgtattctgaagtcatcattttataa

SEQ ID NO: 62323 - DNA, 168 bp, Neisseria meningitidis
atgaatgaaaaagatttgatcgaatggctcgaagaccgtggcgagctgatggtcatgaagaaggacggcgaaggctttgtgattgcagcgcgtgcgccggacgggatgtggaagactgccgaggcggaaactttggctcaggcgataactttatgggaggaagtgtga

SEQ ID NO: 62324 - DNA, 864 bp, Neisseria meningitidis
atgaaaaccttcttcaaaaccctttccgccgccgcactcgcgctcatcctcgccgcctgcggcggtcaaaaagacagcgcgcccgccgcatccgcttctgccgccgccgacaacggcgcggagaaaaaagaaatcgtcttcggcacgaccgtcggcgacttcggcgatatggtcaaagaacaaatccaagccgagctggagaaaaaaggctacaccgtcaaactggtcgagtttaccgactatgtacgcccgaatctggcattggctgagggcgagttggacatcaacgtcttccaacacaaaccctatcttgacgacttcaaaaaagaacacaatctggacatcaccgaagtcttccaagtgccgaccgcgcctttgggactgtacccgggcaagctgaaatcgctggaagaagtcaaagacggcagcaccgtatccgcgcccaacgacccgtccaacttcgcccgcgtcttggtgatgctcgatgaactgggttggatcaaactcaaagacggcatcaatccgctgaccgcatccaaagcggacattgccgaaaacctgaaaaacatcaaaatcgtcgagcttgaagccgcgcaactgccgcgcagccgcgccgacgtggattttgccgtcgtcaacggcaactacgccataagcagcggcatgaagctgaccgaagccctgttccaagaaccgagctttgcctatgtcaactggtctgccgtcaaaaccgccgacaaagacagccaatggcttaaagacgtaaccgaggcctataactccgacgcgttcaaagcctacgcgcacaaacgcttcgagggctacaaatcccctgccgcatggaatgaaggcgcagccaaataa

SEQ ID NO: 62325 - DNA, 465 bp, Neisseria meningitidis
atgaaatgcccgttttgcgcccaccccgacacccgcgtcgccgattcgcgcctgatggaagaacgcaacgccgtgcgccgccgccgccactgccccagctgcggcaaacgcttcggcacgctcgaaaccgccgaactcaaaatgcccgccgtcatcggtccggacaaaaaacgttcgccctttaatgcacaacgcctccgcaacgacctgaccgccgccgcccgaaaatccgccctgacacccgaacagatcgacgaaaccgtccgcctgacggaacacaggctctacacttcgggtcttcgcgacatcccctctgccgaacttgccgacatggtgctaaaagagctgcttgagcacaacacggaagccgccgtccgtttcgccgcactgcacaaacgcttcgacaatccggcagactttgcctcgtggctggcgcaagccgtcaaaacaggcggcaaagcctga

SEQ ID NO: 62326 - DNA, 897 bp, Neisseria meningitidis
atgtttcgtttacaattcgggctgtttccccctttgcgaaccgccatgcacatcctgttgaccgccctgctcaaatgcctctccctgctgccgctttcctgtctgcacacgctgggaaaccggctcggacatctggcgttttaccttttaaaggaagaccgcgcgcgcatcgtcgccaatatgcgtcaggcaggcatgaatcccgaccccaaaacggtcaaagccgtttttgcggaaacggcaaaaggcggtttggaacttgccctcgcatttttcaaaaaaccggaagacatagaaacaatgttcaagtcggtacacggctgggaacacgtgcagcaggctttggacaagggcgaagggctgctgtttatcacgccgcacatcggcagctacgacttaggggggcgatatatcagccaacggctgccattccccttaaccgccatgtataaaccgccgaaaatcaaagcgatagacaaaatcatgcaggcaggcagggttcgcggcaaaggaaaaaccgcgcctaccagcatacaaggggtcaaacaaatcatcaaagccctgcgttcgggcgaagcaaccatcgtcctgcccgaccacgtcccctcccctcaagaaggcggggaaggcgtatgggtggatttcttcggcaaacctgcctataccatgacgctggcggcaaaattggcacacgtcaaaggcgtgaaaaccctgtttttctgctgcgaacgcctgcctggcgggcagggtttcgatttgcacatccgccccgtccaaggggaattgaacggcgacaaagcccatgatgccgccgtgttcaaccgcaatgccgaatattggatacgccgttttccgacgcagtatctgtttatgtacaaccgctacaaaatgccgtaa

SEQ ID NO: 62327 - DNA, 489 bp, Neisseria meningitidis
ttgacacagccggccgaattttccgactaccaacgtgtttatttggatgaaacaggatttgaccgctacctgttccgtccctatgcccgcagcctgaaagggcaaatagtgaaagcgcagataagtggaaaaagataccaacgcttatctttggtgtccgcacaagtcggcaaccggctgattgctccgatggtttatcaaaatacgatgaccggagtcttttttgaagcgtggtttcagcaatgcctactgcccgcattgactcaaaaatcggtaattattttagataatgcgcgatttcaccgtatgggtgtcttacgggaaatggcggaaaaattgggacataaggtattgcctcttgcaccttattcacctgagctcaacccgattgagaaagtgtgggcgaatattaagcggtatctgcgaaccgttttgtctgattacgcccgatttgacgatgcactactgtcctattttgattttaattga

SEQ ID NO: 62328 - DNA, 864 bp, Neisseria meningitidis; identical to SEQ ID NO: 51099

SEQ ID NO: 62329 - DNA, 1155 bp, Neisseria meningitidis
atgactgaaactactcaaaccccgactttcaaacctaaaaaatccgttgcgctttcaggcgttgcggccggtaataccgctttgtgtaccgttggccgtaccggcaacgatttgagctatcgcggttacgacatcttggatttggcacaaaaatgcgagtttgaagaagtcgcccacctgctgattcacggtcatctgcccaacaaattcgagctggccgcttataaaaccaagctcaaatccatgcgcggcctgcctatccgtgtgattaaagttttggaaagcctgcctgcacatacccatccgatggacgtaatgcgtaccggcgtatccatgctgggctgcgttcatcctgaacgtgaaagccatccggaaagtgaagcgcgcgacatcgccgacaaactgatcgccagcctcggcagcatcctcttgtactggtatcaatattcgcacaacggcaaacgcattgaggttgaaagcgacgaagagaccatcggcggtcatttcctgcaactgttgcacggcaaacgcccaagcgaatcacacatcaaagccatgcacgtttcactgattctgtatgccgaacacgagttcaacgcttctacctttaccgcccgcgtgatcgccggtacaggctctgatatgtactccagcattaccggagcaatcggcgcgttgaaaggtccgaaacacggcggcgcgaacgaagtggcttacgatattcaaaaacgctaccgcaatgccgacgaagctgaagccgacatccgcgaacgcatcggccgcaaagaaatcgtgatcggtttcggtcatccggtgtacaccatttccgaccctcgcaacgttgtcattaaagaagtggcacgcggtttgagcaaagaaaccggcgatatgcgcctctttgacattgccgaacgtttggaaagcgtgatgtgggaagagaaaaaaatgttcccgaatctggactggttctctgccgtttcctaccaaaaattgggcgtaccgaccgctatgttcacaccgctgttcgtaatttcccgtacaaccggttggagcgcacacgttcttgagcaacgcaaagacggcaaaatcatccgtccgagcgcaaactacacaggccctgaagatttggcgtttgtggagattgaagaacgctga

SEQ ID NO: 62330 - DNA, 483 bp, Neisseria meningitidis; identical to SEQ ID NO: 36693

SEQ ID NO: 62331 - DNA, 1065 bp, Neisseria meningitidis; identical to SEQ ID NO: 40707

SEQ ID NO: 62332 - DNA, 642 bp, Neisseria meningitidis
atgccgtctgaaaaaccaatgaacagaagaatcttcctcctcggtgcaggcgcgttgctgcttaccgcctgcggcagaaaatccgcccgaacccacgccaaaattcccgaaggaagcaccgtacttgccttgggcgattcgcttaccttcggctacggcgcaaaccctggcgaatcctaccccgcgcaactgcaaaaactgacgggttggaatattgtcaacggcggcgtatcgggcgatacatccgcccaagccctgtcgcgcctgcccgcgctgttggcacgcaaacccaagcttgtgcttgtcggcataggcggcaacgactttctgcgcaaagttcccgaggagcagacccgcgccaatatcgcgaaaatcatcgaaaccgtgcagaaggaaaacatccccgccgtcctcgtcggcgtgccgcacatcacactgggcgcgttgttcggacatttgagcgaccatccgctgtatgaggatttgtccgaggaatacggcattccgctgttcggcggcgcgtgggcggaaattttgggcgataataatctgaaatccgaccaaatccacgccaacggcaaaggctatcggaaatttgccgaagatttgaatcaatttttgagaaaacaggggtttagataa

SEQ ID NO: 62333 - DNA, 744 bp, Neisseria meningitidis
atgcctgatgccgtcaaaaaagtttacctgatacacggttggggggcgaaccgccacgtgtttgacgatttgatgccgcgcctgcctgcaacgtgggcggtgtccgccgtcgatttgcccggacacggcgacgcgcccttcgtgcaacccttcgatattgaggcagccgccgacgctgttgccgcgcaaatcgatacgcccgccgacattctcggctggtcgctcggcggattggtcgcgctgtatctggcggcgcgccatcccgacaaagtccgttcgctctgcctgacagcgagtttcgcacggctgacggctgccgaagattatcccgaagggcttgccgcgcctgcattgggcaaaatggtcggcgcgttccgttcggattatgccaaacatatcaaacagtttctacaactccagcttctgcacacgcctgatgcggacggaatcataggcagaatcctgcccgatttggcgcgctgcggcacgccctccgccttacaggaagctttggacgcggcggaaagggcggatgcgcggcatttgttggacaagatagatgttccggtactgctggtgttcggcggcaaagacgcgattacgccgccgcgtatgggtgaatatctgcaccgccgtttgaagggcagcaggttggttgtgatggaaaaggcggcgcatgcgccgtttttgagccatgcggaagcgtttgccgcgctgtaccgcgactttgtcgaaggggtttga

SEQ ID NO: 62334 - DNA, 747 bp, Neisseria meningitidis
gtgcagcctgaaacctccgcccaataccagcaccgtttcgcccaagccatacgcgggggcgaagccgcagacggtctgccgcaagaccgactgaacgtctatatccgcctgatacgcaacaatatccacagctttatcgaccgctgctataccgaaacgcggcaatactttgacagcgaagaatggagccgtctgaaagaaggtttcgtccgcgacgcgcacgcccaaacgccctattttcaagaaatccccggcgagttcctacaatattgccaaagcctgccgctttcagacggcattttggcactgatggattttgaatatacccaattgctggcagaagttgctcaaattccggatattcccgacattcattattcaaatgacagcaaatacacaccttcccctgcggcctttatccggcaatatcgatatgatgttaccgatgatttgcatgaagcggaaacagccttgttaatatggcgaaacgccgaagatgatgtgatgtaccaaacattggacagcttcgatatgatgctgctagaaataatgggttcctccgcgctttcgtttgacaccctcgcccaaacccttgtcgaatttatgcctgaggacgataattggaaaaatattttgcttgggaaatggtcaggctggactgaacaaaggattatcatcccctccttgtccgctatatccgaaaatatggaaggcaattccccgggccaaaaccatctatccgcataa

SEQ ID NO: 62335 - DNA, 837 bp, Neisseria meningitidis
atgatagacctgcactgccattccaccgtttccgacggtatgctctcccccgccgaagttgtgcgcctcgcgcatcaaaacggctgcacgctgctggcgttgaccgaccacgaccacaccggcggcatcgccgaagcgcgtgccgaagccgacaggctcggtttgcgcctgattaacggcgtggaaatctccgtaacgtggcgcgggcgtaccatacacgttgtcggcttagactttgacgaacaagacgaaaacctgcaaaacctgttggcgcaagtgcggcaaggccgtctgaaacgcctcgaagccatcgccgccaagctggaaaaacgcggcatttcgggcgcatacgacggcgcgctcgcgctggcggcaaacaaagaaatggtcagccgcacacacgtcgccgagttcctcattcgggtgggacacgtcaaaaacaagcagcaggcgttcaccaaatacttgggcgacggcaaatcctgcgccgtccgacacgaatgggcgacgctggaagactgcgtctccgccgtcaacggcgcgggcggcatggcagtcatcgcccatccgatgcgctatgatttgtccgctaccgccaagcgcaatctgtttgaagaatttaaaaacctcggcggcgcgggcatcgaagtccacagcggcaactgctgcaaaaacgaccgcctcaactacgcatttttggcagaacgcttcggcatgctcgccagtgcgggcagcgacttccaccgtttaaacgacttcagcggcggcatcctcggcgcgtgtcccgaactgccggaaaactgcaggccagtgtgggcgcatttttcccgacattga

SEQ ID NO: 62336 - DNA, 1128 bp, Neisseria meningitidis; identical to SEQ ID NO: 53259

SEQ ID NO: 62337 - DNA, 840 bp, Neisseria meningitidis
atgaaacaactccgcgacaataaagcccaaggctctgcactgtttacccttgtgagcggtatcgttattgttattgcagtcctttatttcctgattaagctggcgggcagcggctcgttcggcgatgtcgatgccactacggaagcggcaacgcagacccgtatccagcccgtcggacaattgacgatgggcgacggcatccccgtcggcgaacgccaaggcgaacagattttcggcaaaatctgtatccaatgccacgcggcggacagcaatgtgccgaacgctccgaaactggaacacaacggcgattgggcaccgcgtatcgcgcaaggcttcgataccttgttccaacacgcgctgaacggctttaacgccatgcctgccaaaggcggtgcggcagacctgaccgatcaggaactcaaacgggcgattacttacatggcgaacaaaagcggcggttctttcccgaatcctgatgaggctacgcctgccgacaatgccgcttcaggaacagcttctgctcctgccgatagtgcagctccggcagaagcgaaggcagaagacaagggtgcggcagcccctgcggtcggcgttgacggtaaaaaagtcttcgaagcaacctgtcaggtgtgccacggcggttcgattcccggtattcccggcataggcaaaaaagacgattgggcaccgcgtatcaaaaaaggcaaagaaaccttgcacaaacacgcccttgaaggctttaacgcgatgccggccaaaggcggcaatgccggtttgagcgatgacgaagtcaaagcggctgttgactatatggcaaaccaatccggtgcaaaattctaa

SEQ ID NO: 62338 - DNA, 609 bp, Neisseria meningitidis
atgaaacccaaaccgcacaccgtccgcaccctgattgccgccattttcagccttgcccttagcggctgcgtcagcgcagtaatcggaagcgccgccgtcggcgcgaaatccgccgtcgaccgccgaaccaccggcgcgcaaaccgatgacaacgttatggcgttgcgtatcgaaaccaccgcccgctcctatctgcgccaaaacaaccaaaccaaaggctacacgccccaaatctccgttgtcggctacaaccgccacctgctgctgctcggacaagtcgccaccgaaggcgagaaacagttcgtcggtcagattgcacgttccgaacaggccgccgaaggcgtatacaactacattaccgtcgcctccctgccgcgcactgccggcgacatcgccggcgacacttggaacacatccaaagtccgcgccacgctgttgggcatcagccccgccacacaggcgcgcgtcaaaatcgttacctacggcaacgtaacctacgttatgggcatcctcacccccgaagaacaggcgcagattacccaaaaagtcagcaccaccgtcggcgtacaaaaagtcatcaccctctaccaaaactacgtccaacgctga

SEQ ID NO: 62339 - DNA, 303 bp, Neisseria meningitidis; identical to SEQ ID NO: 37201

SEQ ID NO: 62340 - DNA, 1458 bp, Neisseria meningitidis
atgaaacccaccatcgcgcttgtcggccgccccaacgtcggcaaatctactttattcaaccgtttgacgcgcaccaaagacgcgctcgtacacgacctgcccggcctgacccgcgaccgccattacggacacggcaaagtcggcagcaaaccttatttggtcatcgataccggaggtttcgagccggttgtggacagcggcattttgcacgaaatggcaaaacaaaccttgcaggctgtcgatgaagctgatgcggttgtgtttttggtggacggccgtaccggcctgaccccgcaagacaaaatcattgccgaccgcctgcgccaaagcccgcgccctgtttatctggcggtaaacaaaggcgaaggcggcaacagggccgtgcttgccgccgagttctacgaacttgctttgggcgacccttatgttatttcaggtgcgcacggcgatggcgtgtattatctgattgaagatattttggaaaccttcccagagccggaagccgaagaagccgatgcaaaacatcccgtctttgccgtcatcggccgtccgaacgtcggcaaatccacactggttaacgccatcctcggcgaagagcgcgtgattgctttcgatatggcaggcacgacacgcgacagcatccacatcgatttcgaacgcgaaggcaaaccgtttaccatcatcgataccgcaggcgtgcgccgtcgcggcaaagtggatgaagcagtagaaaaattctccgttatcaaagcgatgcaggcggttgaagcggcaaacgtcgctgttttggtattggacgcgcagcaggacatcgccgaccaagatgcgacgattgccggttttgctttggaagcaggccgcgccttggtggttgccgtcaacaaatgggacggcatcagcgaagagcgtcgcgagcaagtgaaacgcgatatcaaccgcaaactgtatttcctcgattttgccaagttccactttatttccgcattgaaagagcgcggtatagacggtttgtttgacagcattcaggctgcctacaacgcggcgatgattaagatgccgacgccgaaaatcacgcgcgtattacaaagcgcgatcgagcgtcagcaaccgccgcgtgccggcttggtgcgtccgaaaatgcgttatgcccaccaaggcggcatgaaccctcccgtaattgtggtacacggcaattcgctgcacgcgatttccgacagctatacgcgctatctgacccaaacgttccgcaaagccttcaatctgcaaggcacgccgctcagaattcaatacaatgtttcggaaaacccgtatgaaaatgcggaagacaaaccgaagaaaaaaccgctgcgccgcgtcagcctgagcaaccgtattgagaaacgcgaaggccgaaaggaagagaaaaaccgcttcaagaagaaaaccaaagtcagtgtgaaaaaacaattcagcaaataa

SEQ ID NO: 62341 - DNA, 1311 bp, Neisseria meningitidis
atgaacacgccgcatccgcgcccgaaaatcgccgtcatcggcgcaggctgggcaggactgtccgccgccgtcaccttggcgcggcacgccgacgttaccctgtttgaagccggccggcaggcgggcggcagggcgcgcacactggccggaaataccgacggtttcggttttttggacaacgggcagcacattttgctcggcgcataccggggcgtgttgcgcctgatgaaaaccatcggttcggatccccgtgccgcctttttgcgcgtaccgctgcactggcatatgcacggcggtttgcagttccgcgccctccccctgcccgcaccgctgcatattttgggcggcgtgctgcttgcccggcgcgtaccgtccgcattcaaagccaaactgcttgccgatatgtccgatttgcagaagtccgcacgcctcggacagcccgacacgacagttgcacaatggctgaaacagcggaacgtgccgcgtgccgccgtgatgcagttttggcagccgctggtgtggggcgcgctcaacacgcctttggaaaccgcaagcctgcgcgtgttgtgcaacgttttgtccgacggcgtgctgacgaaaaaatccggcagcgactatctcctacccaagcaggatttgggcgcaatcgtcgccgaacccgccttggcggagcttcaacggctcggcgcggacatccgcctcgaaacgcgcgtatgccgtctgaacaccatcccggacgggaaagtgctcgtcaacggcgaagctttcgatgccgccgtccccgccaccgcgccctaccacgccgccgcgctcctgcccgaaggcacgcccgaacacgttcagacggcatatcaaaaccttcgctatcacgccatcaccaccgtctatctgcgctacgccgaacccgtccgcctgcccgccccgctgaccggccttgccgacggcacggcacaatggctgctttgccggggcaggctcggactgcctgaaaacgaagtgtccgccgtcatcagcgtttccgaccgcgtcggcgcgtttacaaaccgagcgtgggcggacaaagttcacgccgacctcaaacgcatccttccgcatttgggcgaacccgaagccgtgcgcgtcatcaccgaaaaacgcgccacaaccgcagccgatgccccgccgccggatttgtcgtggctgcaccggcaccgcatcttccccgccggcgactacctccacccggactaccccgccacgctcgaagccgccgtacaatcaggtttcgcggcggcggaaacctgcctgcaaagcctgagcgatgccgtctga

SEQ ID NO: 62342 - DNA, 1392 bp, Neisseria meningitidis
atgaccccttccgcactgaaaaaaaccgtcctgctgctcggcactgcctttgccgccgcatccgcacaagcctccggctaccacttcggcacacagtcggtcaacgcgcaaagcacggcaaatgccgccgccgcagaagccgccgacgcatcgaccatcttctacaaccctgccggcctgaccaaactcgacagcagccagatttccgtcaacgccaacatcgtgctgcccagcattcattatgaggcggattccgccaccgactttaccgggcttcccgtccaaggttcgaaaagcggcaaaatcaccaaaaccacggtcgcgccccacatctacggcgcatacaaagtcaacgacaatctgaccgtgggcttgggcgtgtacgtccccttcggttctgccaccgaatacgaaaaagattccgtgttgcgccacaacatcaacaaactcggtctgaccagcatcgccgtcgaacctgtcgccgcgtggaaactcaacgaccgccattccttcggcgcaggcatcatcgcccaacatacttccgccgagctgcgcaaatatgccgactgggggattatggaaaaagcgaaagcactaaaagaaacaccccccaatccaactaaagccgcccaaatcaaagccgacggacacgccgatgtcaaaggcagcgattggggcttcggctaccaactggcgtggatgtgggacatcaacgaccgtgcgcgcgtgggcgtgaactaccgttccaaagtctcgcacacgctcaaaggcgatgccgaatgggcggcagacggcgcggcggcgaaagcaatgtggagtacgatgcttgcagcaaacggctacacggcgaatgaaaaagcccgcgttaaaatcgttacgcctgagtctttgtccgtacacggtatgtacaaagtgtccgataaagccgacctgttcggcgacgtaacttggacgcgccacagccgcttcgataaggcggaactggtttttgaaaaagaaaaaaccgtcgtcaaaggcaaatccgaccgcaccaccatcacccccaactggcgcaacacctacaaagtcggcttcggcggttcttatcaaatcagcgaaccgctgcaactgcgcgccggcatcgcttttgacaaatcgcccgtccgcaacgccgactaccgcatgaacagcctgcccgacggcaaccgcatctggttctccgccggtatgaaataccatatcggtaaaaaccacgtcgtcgatgccgcctacacccacatccacatcaacgacaccacctaccgcacggcgaaggcaagcggcaacgatgtggacagcaaaggcgcgtcttccgcacgtttcaaaaaccacgccgacatcatcggcctgcaatacacctacaaattcaaataa

SEQ ID NO: 62343 - DNA, 966 bp, Neisseria meningitidis
atgagctacacgcaactgacccaaggcgaacgataccacatccaatacctgtcccgccactgcaccgtcaccgaaatcgccaaacagctgaaccgccacaaaagcaccatcagccgcgaaatcagacggcaccgcacccaagggcagcaatacagcgccgaaaaagcccagcggcaaagccagactatcaaacagcgtaagcgacaaccctataagctcgattcgcagctgattcagcacatcgacacccttatccgccgcaaactcagtcccgaacaagtatgcgcctacctgtgcaaacaccaccggatcacgctccaccacagcaccatttaccgctaccttcgccaagacaaaagcaacggcagcacgttgtggcaacatctcagaatatgcagcaaaccctaccgcaaacgctacggcagcacatggaccagaggcaaagtccccaaccgtgtcggcatagaaaaccgacccgctatcgtcgaccagaaatcccgtatcggcgattgggaagccgacaccattgtcggcaaaggacagaaaagcgcattattgaccttggtcgaacgcgttacccgctacaccatcatctgcaaattggatagcctcaaagccgaagacactgcccgggcagctgttagggcattaaaggcacataaagacagggtgcacaccattaccatggataacggcaaagagttctaccaacacaccaaaataaccaaagcattgaaagcggagacttatttttgtcgcccttatcattcttgggagaaagggctgaatgagaacaccaacggactcatccggcaatacttccccaaacaaaccgatttccgtaacatcagtgatcgggagatacgcagggttcaagatgagttgaaccaccgaccaagaaaaacacttggctacgaaacgccaagtgttttattcttgaatctgttccaaccactaatacactag

SEQ ID NO: 62344 - DNA, 498 bp, Neisseria meningitidis
gtgtttcagacggcctttaatctacaaaaatataccatgattaccgacaccataagcaatgccacccgctacgctgccttgcatcccgactttgccgaggccttccatctgttacagaccttggattttgccaagctgcccgacggtcaggtgccatgcaagaatcccaatatccgtatttttatcggtagcgagccgatgaggacgaagggagaagccaagcctgaagcgcacttaaaacatattgatattcaaacgccgattgatggcagcgaaacatatggctggatagacagaggccgtctgaaaaacggtttgggctacaacgaaaagcgcgatatcgagtttttcaactgcgagccagaaacttggctgaccttggaaccaggcgaatttgcgctattttttccaaatgatgcgcatgcaccattagtcggtgacaaggcaaacatacgcaaagcggtatttaaaatccgtatcgaaacagagcgtctataa

SEQ ID NO: 62345 - DNA, 795 bp, Neisseria meningitidis
atgaaggcctatttggacttgatgcgccacgtcctcgacaacggtacggacaaatcagaccgcaccggtacgggcacgcgctccgtattcggttatcagatgcgttttgacttgggcaaaggttttccgctgctgacgaccaaaaagctgcatttgcgctcgattatccacgagctgctttggtttctcaaaggcgataccaatatcaaatacctgaaggacaacaatgtttccatttgggacgagtgggcggacgagaacggcgacttgggcccggtttacggctaccagtggcgtaactggcccgcgcccgacggcaggcatatcgaccaaatcgccaatgtgctggaacaaatcaagaagaatcccgactcgcgccgcctgattgtatcggcgtggaatccggctttggtcgatgaaatggccttgccgccctgccacgcgctgtttcagttttacgttgccgacggcaaactgtcctgccagctttaccagcgtagtgcagatattttccttggtgtgccgtttaatattgccagctacgcgctgttgacgatgatgatggcgcaagtgtgcgggctggaggcgggcgagtttgtccatacgtttggcgacgcgcatttgtaccgcaaccatttcgagcaggccgcattgcagttggaacgcgaaccgcgcgccttgccagtgatgaaaatcaatcctgaagtcaaagatttgttttccttcaagtttgaagatttcgagttggaaggctacgacccccatccgcacatcaaggcggcagtgtcggtttag

SEQ ID NO: 62346 - DNA, 537 bp, Neisseria meningitidis
atgtcggcaaccgtccgtatcttaggtatcgacccgggcagccgcgtaacgggtttcggcatcatcgatgtcagggggcgcgatcatttttacgtcgcctccggctgcatcaaaacgcctcccgatgcgcctctggcagacaggattgccgtgattgtgcggcacatcggcgaagtcgttgccgtttacaagccgcagcaggcggcggtggaacaggtgttcgtcaacgtcaatccggcatcgacgctgatgctgggtcaggctaggggcgcggcattggcggcattggtcagccataagctgcccgtttcggaatacacggccttgcaggtcaaacaggcggtagtcggcaaaggcaaggcggcgaaagaacaggtgcagcatatggtggtgcagatgctggggctttcgggaacgccgcaggcggatgcggcggacggtcttgccgtcgcgctgacccacgccttacgcaaccacgggcttgccgccaaactcaatccttcagggatgcaggtcaagcgcggaaggtttcaatag

SEQ ID NO: 62347 - DNA, 1776 bp, Neisseria meningitidis
atgagtatcgtgctgcacggcgtggcggcgggcaaaggtattgccgtcggttgcgcccacctgattgcgcgcggtacggaggaagtgccgcagtatgatgttgcggaggcggacaccgatgccgaagccgaacgtttcgatgccgccgtcaaagccacgcgcaaagagttggaacagctccgcagcgcgattcccgaaaacgccccgaccgagttgggcgcgttcatctcgctgcacctgatgctcttgaccgatgttaccttgtcgcgcgaacccgtcgatattttaagggaacaaaaaatcaacgccgagtgggcattgaagcagcagagcgacaaactcgccgcccaattcgacaatatggacgatgcctatttgcgcgaacgcaagcaggatatgctgcaagtcgtccgccgcatccacaacaacctgatcgggcagggcaacgagttggaagttgccgacaacctgtttgacgaaaccgttctgattgcaaacgacctttcgcccgccgacacggttttgtttaaagagcagcgcattgccgccttcgttaccgatgccggcggccccaccgggcatacggcgattttgggcaggagcttggacatcccgtccgtcgtcgggctgcacaacgcgcgcaaactgattaccgaaggcgaaacggtcattgtggacggtatcaacggcgtgttgattatcgcgccggatgagtcggtgttgaacgaataccgccgccgtgcccgcgaataccgcagccacaaacgcgatttgaacaagctcaaaaaaaccgccgccgccaccgccgacggggtctgcatcgagcttgtgggcaatatagaatccgccgaagacgtgaaaccgctgcacaacctcggcgcagacggcatcgggctgttccgcagcgagtttctttacctgaaccgcgatacgatgccgtctgaagacgagcagtacgaagtgtacagcgcgattgtcaaaaaaatgaaaggcaaaagcgtaacgatacggacagtcgatttgggtgtggacaaaaacccgcgctggttcgggaaaaacagcacgcccaacggcagcctcaaccccgcgctgggcatgaccggcatccgcctgtgccttgccgaaccggtcatgttccgcacccagatgcgcgccatcctccgtgcggcggtacacggtcccgtccgcatgatgtggccgatgattacctccgtatccgaagtgcgccagtgcctcatccacctcgacaccgcgcaacgccagcttgccgaacgcggcgatgccttcggtaaagtcggcatcggctgtatgattgaaattccgtctgccgcgctgaccgtcggcagtattttgaaactggtcgatttcatctccgtcggtaccaacgacctgattcaatacatcttgtccgtcgatcgcggcgacgacagcgtcagccatctctaccagcccggccatcccgccgtgctgaaaatgctgcaacacgtcatccgtaccgccaaccgcatggacaaagacgtatccgtatgcggcgagatggcgggcgataccgcgtttacccgcgttttattgggtatggggctgcgccgtttttccatgaaccccaacaacatcctgcccgtcaaaaacatcattctgcacagcaatgtcggacagctcgaaagcgatattgcgaaagtcatccgctgcgaagacgaagagaagtcggaaaagctgatcaaacagatgaacagcgtgtctgtcgaggaagaagccgacttcaaggggcggaaataa

SEQ ID NO: 62348 - DNA, 582 bp, Neisseria meningitidis; identical to SEQ ID NO: 37778

SEQ ID NO: 62349 - DNA, 375 bp, Neisseria meningitidis
atgttcttggaggggcagttgaactggaaagacgatgatgtgaaggtgttgctggtcaatacgacttcttacacggtcaatgtggcgacgcataagtttttatcggatatttcgtcttcggcgcgtgtgacgcaacctgcgctgctgactgccaagacgacgacgggtggcgcggcggatgcgaacgatgtgacgtttacttcggtttcgggcgagacggtgggggcgattgtcgggtttaaggatacggggacggaatcgacaagcccgctgctgttctttatcgatacggcgacgggtctgccgctgacgccgaacggcggcgatgtgatcgtgacttgggacaacggcatcaataagattttccgtttgtga

SEQ ID NO: 62350 - DNA, 903 bp, Neisseria meningitidis
atggataccgcaaaaaaagacattttaggatcgggctggatgctggtggcggcggcctgcttcaccattatgaacgtattgattaaagaggcatcggcaaaatttgccctcggcagcggcgaattggtcttttggcgcatgctgttttcaaccgttgcgctcggggctgccgccgtattgcgtcgggacaccttccgcacgccccattggaaaaaccacttaaaccgcagtatggtcgggacgggggcgatgctgctgctgttttacgcggtaacgcatctgcctttggccaccggcgttaccctgagttacacctcgtcgatttttttggcggtattttccttcctgattttgaaagaacggatttccgtttacacgcaggcggtgctgctccttggttttgccggcgtggtattgctgcttaatccctcgttccgcagcggtcaggaaacggcggcactcgccgggctggcgggcggcgcgatgtccggctgggcgtatttgaaagtgcgcgaactgtctttggcgggcgaacccggctggcgcgtcgtgttttacctttccgtgacaggtgtggcgatgtcgtcggtttgggcgacgctgaccggctggcacaccctgtccctctcatcggcggtttatctgtcgggcatcggcgtatccgcgctgattgcccaactgtcgatgacgcgcgcctacaaagtcggcgacaaattcacggttgcctcgctttcctatatgaccgtcgttttttccgccctgtctgccgcattttttctgggcgaagagcttttctggcaggaaatactcggtatgtgcatcatcatcctcagcggtattttgagcagcatccgccccactgccttcaaacagcggctgcaatccctgttccgccaaagataa

SEQ ID NO: 62351 - DNA, 1185 bp, Neisseria meningitidis
atgacaccacaagtcctgaccatattaggcagtaccggcagcataggcgaaagcacgctggacgttgtctcccgccaccccgaaaaattccgcgtattcgcgctggcagggcataagcaggtcgagaaactggcggctcaatgtcaaacgtttcgccccgaatatgccgtcgttgccgatgccgaatacgccgcccggcttgaagccctgttgaaacgcgacggcacggcgactcaggttttacacggcgcgcaggcattggttgacgttgcctctgccgacgaagtcagcggtgtcatgtgcgccatcgtcggggcggtggggctgccttccgcgctcgcagcggcgcaaaaaggcaaaaccatttatctggcgaacaaagagacgctggtggtttccggcgcgttgtttatggaaaccgcccgtgcaaacggcgcggcagtgctgcccgtcgacagcgaacacaacgccgttttccaagttttgccgcgcgattacacaggtcgcctgaacgaacacggcatcgcttcgattatcctgaccgcttccggcggcccgtttctgaccgccgatttaaacacgttcgacagcattacgcccgaccaagcggtcaaacaccccaattggcgtatgggacgcaaaatctccgtcgattccgccaccatgatgaacaaaggtttggagctgattgaagcgcattggctgttcaactgtccgcccgacaaactcgaagtcgtcatccatccgcaatccgtgatacacagcatggtgcgctaccgcgacagctccgtgttggcgcaactgggcaatcccgatatgcgaacgcccatcgcttattgtttgggtttgcccgagcgcatcgattcgggtgtcggcgacctggatttcgacgcattgtccgcgctgaccttccaaaagcccgactttgaccgcttcccctgcctgaagctcgcctatgaagccatgaacgcaggcggagccgcgccctgcgtattgaacgccgccaacgaagccgccgtcgccgcctttttggacggacagattaagtttaccgacattgccaaaaccgtcgcccattgtctttcacaagacttttcagacggcataggcgacataggggggctcttggcgcaagatgcccggacacgcgcacaagcgcgggcatttatcggcacactgcgctga

SEQ ID NO: 62352 - DNA, 363 bp, Neisseria meningitidis
atggatatccgatatttcggcacaacgccccgctattccgaagccgtcggcgcaaacggcttgattttcctctccggcatggttcccgaaaacggtgaaacggctgccgaacagactgccgacgtgcttgcccaaatcgaccgctggctggcggaatgcggctcggacaaagcgcacgttttggatgcggtcatctatctgcgcgatatgggcgactacgcggaaatgaacggcgtgtgggacgcttgggttgccgccggcagaacgcccgcccgcgcctgcgtggaagcgcggctcgcccgtccggagtggcgcgtcgaaatcaaaataaccgccgtgaagagagacgcggcaactgcataa

SEQ ID NO: 62353 - DNA, 693 bp, Neisseria meningitidis; identical to SEQ ID NO: 40219

SEQ ID NO: 62354 - DNA, 471 bp, Neisseria meningitidis; identical to SEQ ID NO: 42963

SEQ ID NO: 62355 - DNA, 498 bp, Neisseria meningitidis
atgaataacctccccgttgccgacctcctcgtcttcgccatcatcgccgcctgcatcgtgctatccgcgatgcgcggcgtgattgcggaggcaggttcgatggcggcatgggtggtttccttcttttttgccaaactctttgccgcacccttcgccgacctcgcctttgcctcgttccaaccccgcctgtttgcattggctctgtcgttcatttccctgttcgtcattgcctgtctgatccagaaaatgctccgttcgctgctgaccggcgcagtttcggcggtcggtttgggctttgccaaccgcattttgggcggcgtattcggtgcattgaaaggcgttttgattgttaccctgctggtcatgcttgcttcaaaaaccgacctgcccgataccgaagagtggcagcagtcctataccataccgtttttcgtatcgctttccgaagccgtgttgaaccatagcggcggcacggcggaaactccggaagacgattga

SEQ ID NO: 62356 - DNA, 432 bp, Neisseria meningitidis
atgagcagcaacgcatggctgttttgggcattggcatcggcaggcttcgcctcattgaccgccatcttcgccaaaatgggtttacagggtatagattcagatttcgctaccttcatccgcaccttggtcatcctcgccgctttgttattgtttttgacctacaccggcaaatggcagggtgtgaacggctttacggggcgcaactggacattccttatcctatccggtcttgctaccggcgcatcttggctcgcctattttaaagccctgcaactgggtaacgcctcgcaagtcgcccccgtcgacaaattcagcctggtcttggtcgcgctgatggcggtggttttcttggacgaacgcccgaacacgcaggaatggataggcttggggctggtaacggcgggcgtgttggtgctggcgttgaaacgttaa

SEQ ID NO: 62357 - DNA, 462 bp, Neisseria meningitidis; identical to SEQ ID NO: 55947

SEQ ID NO: 62358 - DNA, 741 bp, Neisseria meningitidis; identical to SEQ ID NO: 60308

SEQ ID NO: 62359 - DNA, 252 bp, Neisseria meningitidis
atgtcgctttttattaccgacgagtgcatcaactgcgacgtatgcgaacccgaatgccccaatgatgccatctcgcaaggcgaggaaatttacgaaatcaaccccaacctctgcacgcagtgcgtcggacactacgatgaaccgcagtgccagcaggtttgcccggtggactgcatcctgattgacgaagaacatcccgaaacccatgacgagttgatggcgaaatacgaaaagattatccagtttaaataa

SEQ ID NO: 62360 - DNA, 357 bp, Neisseria meningitidis
atgttgtccgcttactttcccgtctttgtctttatcctcgtcggcctcgcggccggcgtgctgtttatcctgctcggcacgattttaggcccgaaacgccactacgccgaaaaagacgcgccttacgaatgcggttttgaagcctttgaaaacgcaaggatgaagttcgacgtgcgctattacctcgtcgccatcctcttcatcctgtttgatttggaggtcgcgttcatgttgccgtgggcagttgtgttcaaagatttgggcgcgtacggcttctggtctatgctggtgtttatcgtcgtcctgacggtaggctttgtttacgaatggaaaaaaggtgcgctggaatgggaatag

SEQ ID NO: 62361 - DNA, 1509 bp, Neisseria meningitidis
atgaccaccacccccgcaaacatccttgcctccgtcgatttgggttccaacagtttccgcctccagatttgcgaaaacaacaacggacaattaaaagtcatcgattcgttcaaacagatggtgcgcttcgccgccggactggacgaacagaaaaacctgagtgccgcctcccaagaacaggctttggactgtctggcaaaattcggcgaacgcctgcgcggcttccgccctgaacaggtacgcgccgtggcaaccaatacattccgcgtcgccaaaaacatcgcagatttccttcccaaagccgaagcggcactgggtttccccatcgaaatcatcgccgggcgcgaagaggcgcggctgatttataccggcgtgatccacaccctccccccggtcggcggcaaaatgctggttatcgacatcggcggcggttcgacagaatttgtcatcggttcgacgctgaatcccgacattaccgaaagcctgcccttgggctgcgtaacctacagcctgcgcttcttccaaaacaaaatcaccgccaaagacttccaatctgccatttccgccgcccgcaacgaaatccagcgcatcagcaaaaatatgaggcgcgaaggttgggattccgccgtcggcacatcgggttcggcaaaatccatccgcgacgtgcttgccgccgaaatgccccaagaggcggacattacctacaaaggcatgcgcgccctcgccgaacgcatcatcgaagccggttcggtcaaaaaagccaaatttgaaaacctgaaaccggaacgcatcgaagtttttgccggcggacttgccgtgatgatggcggcgtttgaggaaatgaaactcgacaggatgaccgtaaccgaagccgccctgcgcgacggcgtgttttacgatttgatcgggcgcggtttaaacgaagatatgcgcggacaaacggttgccgagttccaacaccgctaccacgtcagcctcaatcaggcgaaacgcaccgccgagaccgcgcaaacctttatggacagcctctgccacgctaaaaatgttacggttcaagagcttgccttgtggcaacagtatctcggacgcgccgccgcgttgcacgaaatcggtttggacatcgcccacaccggctatcacaagcattccgcctacatcctcgaaaacgccgatatgccgggcttttcacgcaaggaacaaaccatacttgcccaactggtcatcggtcatcgcggcgatatgaaaaaaatgagcggcatcatcggcaccaacgaaatgttgtggtatgccgttttgtccctgcgccttgccgcactgttctgccgttcgcgccaagacctgtctttcccgaaaaatatgcagttgcgcacggatacggaaagctgcggcttcatcctgcgtattgacagggaatggctggaacgccatcccctgattgccgacgcattggaatatgaaagcgtccaatggcaaaaaatcaatatgccgtttaaagtcgaggtcgtctga

SEQ ID NO: 62362 - DNA, 312 bp, Neisseria meningitidis; identical to SEQ ID NO: 36570

SEQ ID NO: 62363 - DNA, 381 bp, Neisseria meningitidis
atgcctttaaaattccaaccacaggaacgttcggtcgtcatgtgcgactttcgcggctatgaagaaccggaaatggtcaagaaacgccctgttgtcgtcatagcgcgaaacaggcacaacggcaaactggtaacggtcgtacccttaagcagcacagaacctgtccctttggcggactaccaccacaaaatgagtggaaaccccttaccggacaagccgcacatccaatgttgggcaaaatgcgatatgacggcaacagtcggattggcacggttagaccgatacaaacccaaagggcgcgaccgctgcattccaataatcagtgaagaggattttcaggcgattaaaacagccgttgccaaggcattcaaactgtactag

SEQ ID NO: 62364 - DNA, 948 bp, Neisseria meningitidis
atgaccgacatcacaccgtttgccaaccgcttgggcaaaaacatcaaacaccttatgaaatgggcgaaacgcaacggcatcgaagcctggcgcatttacgaccgcgacattccccaattcccttttgccgccgatgtttacggtgatcgaatccaccttcaggaatacgataccggctggctgatgcagcccgaagaatacgaagcgtggcttgccgaagtattggaagccgtcgttttcgttaccggttttgcgcccgaacaaatccacctcaaacgccgcgaacgtcaaaaaggtttgcagcaatacgagaaaaccggcaaaaccggcgatgattttgtcatcaccgaaaacggccgcaagttttgggtcaacctcgacaaatacctcgataccggccttttcctcgaccaccgcaacacgcgcaaaaaagtcggcgaaaccgcagcgggcaaacgcttcctcaacctgttttcctacacaggcagcttcaccgtctacgccgccaccggcggcgcggcatccagtgaaaccgtcgatttgtccaacacttatctcgattgggcgaagcgcaattttgaattgaacggcatcgatacggaacggcacaaaatcgtccgcgccgacgtgttccaatatcttcagacggcatatggggaaggcaggcagttcgacctcattgtgatggatccgcccagtttttccaacagcaagaaaatgtccgacatcctcgacattcagcgcgatcacaaaaagctgattgacggcgcggtgaagctgctcgcttcagacggcattttgtacttttccaacaacctgcgcagcttcgtcttagacgacttggtatcggaacaatacgccgtcaaagacatttccaaacaatccgttcccgaagatttccgcaacaaaaaaatccatcggtgctgggaaatccgccacaaatcttaa

SEQ ID NO: 62365 - DNA, 222 bp, Neisseria meningitidis; identical to SEQ ID NO: 41463

SEQ ID NO: 62366 - DNA, 666 bp, Neisseria meningitidis; identical to SEQ ID NO: 51000

SEQ ID NO: 62367 - DNA, 1017 bp, Neisseria meningitidis
atgattttctccatcatcgtccctatttacaatgtggaaaaatatctccgctgctgcgtggattccgtgcttgccgaaaattttgccgattatgaaatgattttggtcgatgacggttcgccggacggctgcgggaagatttgcgacgaatatgcaggcaaatatccgcatataaaagtgattcatcaagaaaacggcgggctgtcggatgcccgcaacgccggtatccgggcggcaaaaggcgattacctaatctttttggacagcgacgactattgggccgacaccaatcgttcaaaaaacgcgcgggggggggggattctctttgatttacaacaacttgcagacaaaaaggttgatttgatcctgcatccctcgtccttcaattaccgcgacatccccaaaggggcggacttttcggataatgattttgtccgccattttgaaacgctggtggaggggcggtactatatcgccaacgcgtggacaaagattgtcaggcgggaaataatcatcaaaaacaatctgtttttcccaaaaggatacattcacgaggatttcccgtacagtttgcaattggcgcgttttatcaagacttttgccttttacgataaccctttttaccagtaccgcgttctcggcaactctatcagccacaacatcaaatacaaaaatttcagcgatatgctgacgcatctcgaccggggcgtggattttttagtcgaaaacaaaaattcccccatctacggcggtttgcaaaaatttgtcttcgacaatatcggctatctgagatctatatcggtaaggctttatttttccaaaaacattatcgttgtctaccgagaatatttttcatttaaagagaaatgcagaaagatattcggcgcgaaggcaatccatccggtttttatcgggaagaccgcattcatcataggattgccgatattgcgcctgctcgtaccgcctatgctgtacccggcaatcaaggccgtttatcagaaatttttttcggaataa

SEQ ID NO: 62368 - DNA, 1497 bp, Neisseria meningitidis
atgttttccaactacctactcagcttggcaatatggatacccatcgccgcaggtgtgctggttttggcgaccggtaaagacagccgtgcgccgctggcgcgtgtgcttgccttcatgggtgcgcttgccggtttcttggtaacgctgcccttgtttaccggtttcgaccgtttgagcggcggctatcagtttaccgagttccacgagtggattccgcttctgaaaatcaactacgcattgggtgtggacggtatttcagtgctctttattatcttgaatgcgtttattacgctgttggtggtattggccggttgggaagttattcagaaacgtccggcgcagtatatggcggcattcctgatgatgtcgggtttgattaacggcgcgtttgccgcacaggatgcgattctgttttatgtgttcttcgagggtatgctgattccgttgtacctgattatcggtgtatggggcggcccgcgccgtgtctatgcgtcggtcaagctgtttctctatacgctgatgggttcgctcctgatgctggttgccatggtttacctgtactatcaaacaggcagcttctctattgtcgatttccaaaacatcaaacagattccgttgggcgtacagcagcttttgtttgcggcattcttcctgtcatttgccgtaaaagtgccgatgttccccgtacacacttggctgccggatgcccacgttgaagcgccgaccggcggttcgatggtgttggcggcgattacgctgaaactgggtgcgtatggtttcttgcgctttatcttgccgattatgccggacgcggcacgctattttgcccctgtgatcatcgtattgagtctgattgccgtgatttacatcggtatggtggctttggtgcaaaccgatatgaaaaaactggtggcgtattcgtccatcagccatatgggttttgtaacgcttgggatgtttttgtttgttgacgggcagttggacgactgggcgttgaaaggcgcggtcattcaaatgatttcccacggtttcgtgtctgccgcgatgtttatgtgtatcggcgtgatgtacgaccgcctgcacacgcgcaatattgccgattatggcggcgtggtcaatgtgatgcccaagtttgcggcgtttatgatgttgttcggtatggcgaacgccggtttgcctgcaacttccggcttcgtgggcgagtttatggtgattatgggcgcggttaaagtgaatttctgggtaggcgctttggccgccatgaccctgatttacggtgcgtcttataccctgtggatgtacaagcgcgtgattttcggcgcgattcacaatccgcacgttgccgaaatgaaagacatcaactgccgcgaatttgcgattctggcggtgttggcggttgctgttttgggtatgggcctgtatccgaacgcatttatcgaagtggtgcatcaggcggcaaacgatttgattgcccatgtggcacaaagcaagatgtga

SEQ ID NO: 62369 - DNA, 996 bp, Neisseria meningitidis
atgaaaaaatccctgattgccctgactttggcagcccttcctgttgcagcaatggctgacgttaccctgtacggcaccatcaaagccggcgtagaaacttcccgctccgtagctcacaatggagctcaggcggctagcgttgaaaccggtaccggcatcgttgatttgggttcgaaaatcggcttcaaaggccaagaagacctcggtaacggcctgaaagccatttggcaggttgagcaaaaagcatctatcgccggtactgactccggttggggcaaccgccaatccttcatcggcttgaaaggcggcttcggtaaattgcgcgtcggccgtttgaacagcgtcctgaaagataccggcgacatcaatccttgggatagcaaaagcgactatttgggtgtaaacaaaattgccgaacccgaagcacgcctcatttccgtacgctacgattctcccgaatttgccggcctcagcggcagcgtacaatacgcgcttaacgacaatgcaggcagacataacagcgaatcttaccacgccggcttcaactacaaaaacggcggcttcttcgtgcaatatggcggtgcctataaaagacatcatcaagtgcaagagaacgtgaatattgagaaataccagattcaccgtttggtcagcggttacgacaatgatgccctgtacgcctccgtagccgtacaacaacaagatgccaaattggttaaagaaaattattcgcacaactctcaaaccgaagttgccgctaccttggcataccgcttcggcaacgtaacgccccgcgtttcttacgcccacggcttcaaaggctcgtttgatgctacaaactacaacaacgattacgaccaagtggttgtcggtgcggaatacgacttctccaaacgcacttctgccttggtttctgccggttggttgcaagaaggcaaaggcgaaagcaaattcgtatcgactgccggcggtgtcggtctgcgccacaaattctaa

SEQ ID NO: 62370 - DNA, 1065 bp, Neisseria meningitidis
atgattaaatcattttggcttgaaaatttcgggccgattagcttattgaaggctgataatttagggaaaataaatttaattattgcagaaaatagcaaagggaaaacttttattttaaaggcattatatagtgttttaaaaagtcatgaggaagctcataaaggaaagaatattcgtgatttttctgaggaattgcgagataagctatattggacgttccaagtagaggaaattggtgatttagttacaagaggaaaagaaaatccaaacgaacggcctcttaagttaagtatgactttagaagatagttcttcagttttgttttcttttggtagaactaccaaaaagctaattaaaccggagctatacgaactttctcccagaataaacgctaactctatttttttaccacccaaagaagttctatcactatttgatgtaattaaaaaatcagaggaagaaaagagatttggttttgatgctacttacattgatttggtaaaagcattggatattaaaccaacaaaagggaggaattaccctgaggcagcggaagctagaaaggatctagaagcattgtttggcggttatgttagctacaatgataaaaagaaggcatgggtatatgaaaaagatagacaaactttctctatcaattctacagcagagggggtaaaaaagattgggatattagacactctattaggaaatcggtttttgagtcctggatcaatcttatttattgatgagccagaagctaatctacatccgaaagcaattaatcaatttctagaaattctgttttccttatctaaatccaaattgggaatacagatttttatgagtacgcattcatattttgttatcaagaagctgtgtttattagctagaaagcatagtgaaagtattcctgtttttatgcctggcaaagaaaagggacagactacttgggtgcaggaaaatttacaaaatagcatgccggataatgaaattattggtgagtctattcgattgttcagagaagaaataggtgttttatctccggaaacagcatggattggttag

SEQ ID NO: 62371 - DNA, 1584 bp, Neisseria meningitidis
atgaatgcttttacccgtgcatggcatgcgctcgaacgccattatcaggatacgcgtcatgtccttttgcgcgaccgctttgcctgcgaacccgaccgttttgagcgtatgcacgagcgtttggacgggatgttgttcgattacagcaaaaaccgtttgggcgaagatacgctgcaactgctctgcaatcttgccgatgcggcggatttggaagggaaaatgcgtgctttgcggacgggtgcgaaggtcaacaacagtgaggggcgtgccgcgctgcatacggctttgcgcctgcccgacggtgcgggtgccgtttatgcggacggcagggacgtgttgcccgaaatccgccgcgagttaaatcgtgcgttgaagtttgcacacagtttggacgacggttcgtatcaggggacaaccggaaaacggattacggattttgtccacatcggcataggcggatccgacctcgggccggcaatgtgcgtgcaggcacttgagccgttcagacggcatatcgccgtccattttgccgccaacgccgatcctgcctgcctggatgcggttttatgccgtctgaaccccgaaacgacagtgttttgcgttgccagcaagtccttcaaaacaccggaaaccctgctcaatgcacaggcagtcaaggcgtggtatcgcggtgcggggttctcggaatccgaaacggcgtgccatttttgcgcggtgtctgccgacactgcggcagctgcggctttcggtatcgcggcggaacgcgtgtttgcgatgtacgactgggtgggcggacgctattccgtctggtcgtccgtcggtttgcccgtgatggttgcggtcggcggggcgcgtttccgcgagttgttggcgggggcgcacgcgatggacagccattttttccacacgccgccgcgccgcaacattcccgttctgatggcactgattgccgtgtggtataacaatttccagcacgcggacgggcagaccgccgttccgtacagccacaacctgcgcctgctgccggcgtggctgaaccagctcgatatggagagtttgggcaaaagccgcgcttcagacggcagtcccgccgtgtgcaaaacgggcggcatcgtgttcggcggtgaaggggtcaactgccagcacgcctatttccaactgcttcatcaaggcacgcgcctgattccctgcgactttatcgtcccgatgacggcgcagggcgtggaggaaggaagcagccgttttaccgttgccaacgcctttgcacaggctgaagccctgatgaagggcaaaaccttggacgaagcacgcgccgaactggcagatttgcccgaagcggaacgcgaacgcctcacgccctacaatctgggtatgctgatggcggcttacgaacacaaaaccttcgtccaaggcgcgatatggaacgtcaaccccttcgatcagtggggggttgagtacggcaaacagttggcgaaaaccatcatcggcgaactggaaggcggcacgtccgtacacgatgcctcgaccgaagggctgatggcgttttaccgcgaatgccgtctgaaaggcggcggcgcggcataa

SEQ ID NO: 62372 - DNA, 1794 bp, Neisseria meningitidis
atgaaaaatatccgaaatttctccattatcgcccacatcgaccacggcaaatcgacgcttgccgaccgttttatccaatattgcggcggcttggatttgcgcgaaatgagtacgcaggtgctcgattccatggacatcgaaaaagagcgcggcattaccatcaaagcgcaaaccgccgcgctcaactacaaagcacgcgacgggcaggtgtatcaactcaacctgattgacacgccgggacacgtcgacttctcttacgaagtttcccgttcgctgtcggcttgcgaaggcgcgcttttggtcgttgacgcgtcgcagggcgtggaagcgcaaaccgtggcgaactgctataccgcgattgatttgggcgttgaagtcgtgcctgttttgaacaaaatcgacctgcccgccgccgaccccgagcgtgtggaacaggaaatcgaagacatcatcggcatcgatgccgtcggtgcagtacagtgttccgccaaaagcggtatcggcgtggaagatgttttggaagaaattgttgccaaaatccctgcgccgaccggcgacgaaaacgcgccgctgcaagcggttatcgtcgattcgtggtttgacaactatgtcggcgtggttatgctgattcgagtgaaaaacggcaccatcaaactgaaagacaaagtgcgctttatgagcaccaaggcggaaacgcaggtcgagcagctgggcgtattcacaccgaaatcagttcaaaaacaagaactaaaagccggcgaagtgggctttttgattaccggcgtaaaagaattgggacaggcgaaagtcggcgatacggttactttggttgccaaccctgccactgagccgctgcccggtttccaagaggtgcaaagccaggtattcgccggactttatcccgtagaaagccacgactacgaagctttgcgcgatgctttggaaaaattgcagcttaacgatgcttcgttgaaatttgagcctgaggtttcccaagcattgggtttcggcttccgttgcggcttcttgggtctgttgcacttggaaatcgtgcaggaacgcttggagcgcgagttcgatatggatttgattaccaccgcgccgacggtgatttatgaagtcgtgttgaaaagcggcgaaaaaatcgaagtcgaaaatccgtccaaactgcccgacatcggcagcatcgaaaccatactcgagccgattattaccgcaaccatccttgtgccgcaggaatatgtcggcaacgtcatgactttgtgtaaccaaaagcgcggcgttcaggtcaatatgcaatatatgggccgccaagtcatgctgacttatgatttgccgatgaacgaagtggtgatggactttttcgacaaactcaaatccacttcgcgcggttatgcttcgttggactaccatttcaaagagttccaaccgtctgatttgattaagctggatattatggtcaacggcgaaaaagtcgatgccttaagcctgattgtgcaccgtcaaagcgcggttcaccgaggccgcgagctggcatcgaaaatgcgcgagctgattccgcgccaaatgttcgacattgccgtccaagccgccatcggcagccagattatcgcccgcgaaaacgtcaaagcactgcgtaaaaacgtcttagcgaaatgttacggcggcgatattacgcgtaagaaaaaactgcttgaaaaacaaaaggcaggtaaacgccgtatgaaacaagtgggcaatgtggaaattccgcaaagcgcgttcttggcgattttgcaggtgagcgacaaataa

SEQ ID NO: 62373 - DNA, 939 bp, Neisseria meningitidis
atgtccatccatactctgaaacgcctgccctcatcgctgctgctcggtctctgcctttccctgccgtcagcccacctttttgccgacaacgacattttagggcaatttttagaacagaacatgcttacctcctccgatccgatagaaatattcgccgaaagcacgatacaccccaccaacacccaagccattacaggcggtctgattctctcctcacagtctgccctggtcgtcaacaacaaaaccggacagatactgtatcagaaaaacgccgacaggattatgcccatcgcctccatttccaaactgatgagcgcgatggtcgttttggatgcaaacttggacatgaacgaaaccgttaccattacgcccgacgaaatcgaccgcctcaaagggaccggcagccgtcttgccataggtacggcacttacacgcaaagaactgctgcacctgagcctgatgagcagcgaaaaccgcgccacccatgcattgggcagaacctaccccggcggcatgggcgcatttgtcgccgccatgaaccgcaaagcccaaagcctgggcatgtacagcagccgcttttacgaaccgaccggactcaacttccaaaacgtttccaccgccaaagacctgagccttatggtcaacgccgccgcccaatatccgcaaatccgcaccaactcgacttccaactacgcctcggtacagaccaaaaacgggcagcagaactacaaaaactccaatgcgctggtcagggaaggcatgtggaacatcgaattgcagaaaaccggctacatacgcgaagcaggcaggtctatggttgtcaaagccaacattcaaaatcaacccgttaccatcgtattgctgaactcgcccacatccgccacacgcgtcaacgacgcccgcaaaatcgaatcgtggatgctgcagcaacgctcctga

SEQ ID NO: 62374 - DNA, 810 bp, Neisseria meningitidis
atggcaaaaattggggattttgccgccaaatccatgatagagatacggagcaaacgaatgattaccctgctttccttaaacaatctgccgtcaaaatgggatgaaatccgctattggctcgaaacccgggtttgtgagtgcggcgttatgccgcatcccaatttgacggaatgcgaagccgggcagttcgagcgggatttttgggacaatatcggctgtgcgcctgaagaatatgtccgtatccgccgcgccatccgtctgctggaagcgagttatcccgacagtttgaacgagctggtgtgtgccgccattgccacgcctttgggcgagatgctggcggtgttcggcagtaaaggcttgtgtctgctggagtttgtcggacagaagcatttggaacaggaaattgccgccgtccaaaaagccttgcgcggacggtttgtgtttcgggaggatgagcggacgcaacttttgcggcaggaattggacttatacttcaagggtcgtctgaaaacctttgccacgcctttggagcagattggcaccgagtttcaaaagcaggcatgggacgcgctcttggcgattccttacggcgaaacgcgcagctacaaagagcaggcgcagcgtttgggcaaccccaacgccgtccgcgccgttgccgccgccaacgggcagaacaaggtgtctatcttgattccctgccaccgcgtcatcggcagcgacggcaaactgaccggctacgcgggcgggttgaaccgcaaacagtttttactggctttggaacgcggcgaagttcagacggcattgttttaa

SEQ ID NO: 62375 - DNA, 1011 bp, Neisseria meningitidis
atgagcgatacccccgctacccgcgatttcggcctgatcgacgggcgtgccgtaaccggctatgtgctgtccaaccggcgtggtacgcgtgtctgcgtgctggacttgggcgggattgtgcaggaattttccgttttggcagacggcgtgcgcgaaaacctcgtggtgtcgttcgacgatgcggcttcctatgcggacaatccgtttcagattaacaagcagatagggcgcgtggccggacgcatccgcggtgcggcgttcgacatcaacggcaggacttaccgcgtggaggccaacgaaggcaggaacgcgctgcacggcggttcgcacgggctggccgttacccgtttcaacgcggtggcggcagacggccgttcggtggtgctgcgcagccgcctgcaacagtcggccgacggttatcccaacgatttggatttggatatttcctaccgcttggacgaggacgaccggcttaccgttagctatcgcgccaccgcgctcggcgacacggtgttcgacccgacgctgcacatttactggcggctggacgcgggcctgcacgatgcggttctgcatattccgcagggcggacatattccggccgatgccgaaaaactgcccgtctcaacggtttcagacgacctcgaagtatttgatttcagccggcccaagccgctggatgccgccgttgccgccctgcgccgcgaaacgggtcgggccggttttgacgacgcttaccgcgtgccgtccgatataggccgtcccgccgctgtgttgcaagccggacgccgccgtcgtatcagcatatacagcgaccgcaacggcttggtcatctttaccgccgccccgcaggatttcgcgcggcacgatgcgggcgtttacgacgcgctggcgaccgaggcgcagacgctgcccgacagcctgaattggcccgagttcggcaatattcgtctgaacaagggtgatactagggaggcgacgattgcttacggcatcgaatccctttcttag

SEQ ID NO: 62376 - DNA, 915 bp, Neisseria meningitidis
atgcagaattttggcaaagtggccgtattgatgggcggtttttccagcgaacgagaaatctcgctggacagcggcaccgccattttgaatgctttaaaaagcaaaggcatagacgcatacgccttcgatcctaaagaaaccccattgtctgaattgaaggcacaaggttttcagacggcattcaacatccttcacggtacttacggcgaagacggggcggttcagggtgcattggaactgttgggcatttcctataccggcagcggtgtcgccgcatccgccatcggcatggacaaataccgctgcaaactgatttggcaggcattgggattgcccgttcccgagttcgccgtcctgcacgacgacactgatttcgatgccgtcgaagaaaaattgggcctgccgatgtttgtgaaaccggcggccgaaggcagcagcgtcggtgtggtaaaagtcaaagaaaaaggccgtctgaaaagcgtttacgaagaattgaaacaccttcagggcgaaatcattgccgaacgttttatcggcggcggcgaatattcctgccccgtcctgaacggcaaagggctgcccggcatacacatcattcccgcaaccgagttttacgactacgaagccaagtacaaccgcaacgacaccatttatcaatgtccttcggaagatttgaccgaagccgaagaaagcctgatgcgcgaactggcggttcgcggcgcgcaggcaatcggtgcggaaggctgcgtgcgcgtcgatttcctcaaagataccgacggcaaactctatctgttggaaatcaacaccctgcccggtatgacgagccatagtttagtaccgaaatccgctgccgttacgggcgtgggttttgccgatttatgtattgaaattttgaagaccgcacatgtgggataa

SEQ ID NO: 62377 - DNA, 1635 bp, Neisseria meningitidis
atgaccaaattcattttcgtcaccggcggcgttgtctcctcactgggtaaaggtatcgccgccgcttctattgccgctatcctcgaatcgcgcggcttgaacgttaccatgctcaagcttgatccttatatcaacgtcgatcccggcacgatgagcccgtttcaacacggcgaagtgttcgtaaccgacgacggcgcggaaaccgacctcgacttaggacactacgaacgtttcatcgattccacgatgacccgccgcaacagcttcagcacggggcaggtgtacgaaaacgttatcgccaaagaacgacggggcgactatttgggcggcacggttcaagtcattccgcacattaccgacgaaatcaaacgccgcatccatgaaggcgcagcaggttacgatgtggcgattgtcgaaatcggcggcacggtcggcgacatcgaatcgctgccgtttttggaagccatccgccagatgcgaagccagttggggcgcaacaacaccctgttcgcccacttgagctacgtcccctacatcgccgctgcaggcgaaatcaaaaccaagccgacccagcacaccgttaaagaaatgttgagcatcggtttgcaacccgacatcctgatttgccgtatggacaggacaatgcctgcggacgaacgccgcaaaatcgccttgttctgcaacgtggaagaacgcgcgattgtcggcagctacgatgtggacagcatctacgaatgccccgaaatgctgcacgaccaaggcatcgacaacatcattaccgagcagttgcagcttaatgtgcagcaggcggatttgaccgcgtggaaaaaaatcgtccacgccatccaaaacccgaaacacaccgtcaaaatcgcgatggtcggcaaatacgttgatttgaccgaatcctacaaatcactgattgaagccttgaaacacgcaggcattcacaccgaaaccgacgtacaaattacctttgttgacagcgaaagcatcgagaaaaacaagggcgacgtttctatgctcaaagatatggacgccatcctcgttcccggcggttttggttcgcgcggcgtggaaggcaaaatcgccgctgtgcgctatgcccgcgaaaacaacgtgccatacttgggcatctgcctcggtatgcagattgcgctgatcgaatacgcccgcgacgtggcaggtttgaaaggtgcgaattccaccgagttcgacctcaaatgcgccgcccccgtcgttgccctgattgacgaatggcaaactgccgacggcagcgtcgaaacccgcgacgaatccgccgatttgggcggcaccatgcgtttgggcgcgcaagaagtcgaattgaaagcaggcagcctcgccgccaaaatctacggcagcggacatatccgcgaacgccaccgccaccgctacgaagtcaacaacaactacgttcctacactggaacaggcaggtttggtcatcggcggtgtatctgccggacgcgaacgcttggtcgaaaccatcgaactgccgaaccatccttggttcttcgcctgccagttccaccccgagtttacctccaatccgcgcaaagggcatcctttgttcaccgcgtttgtcaaagctgcgttgaacaataaaaaagcctga

SEQ ID NO: 62378 - DNA, 1467 bp, Neisseria meningitidis
atggctgaagcgacagacgttgtcttggtgggcggcggcattatgagcgcgactttgggcgttttgctcaaagaactcgaaccgtcttgggaaatcaccctgattgaacgcttggaagatgtggcgttggaatcgtcaaacgcgtggaacaacgccggcacggggcattccgcgctgtgcgaattgaactatgcgccgttgggtgcaaatgggattatcgatccggcgcgcgccctcaatattgccgaacagtttcatgtcagccgccagttttgggcgacgttggtcgcggaaggcaagttggaagacaattccttcatcaatgccgtgccgcatatgtctttggtgatgaatgaagaccattgttcttatcttcaaaaacgttatgacgcgtttaaaacccaaaaactttttgaaaatatggaattttccaccgatcggaacaaaatttccgattgggctccgctgatgatgcgcggccgggacgaaaaccaacccgtcgccgccaactactccgccgaaggcacggatgtcgatttcggacggctgacgcgccaaatggtgaaatatttgcagggcaagggcgtaaaaaccgagttcaaccgccacgtcgaagacatcaaacgcgaatccgacggcgcgtgggtgctcaaaaccgccgatacccgcaaccccgacgggcagctcaccctccgtacccgcttcctcttcctcggcgcgggcggcggcgcgctgaccctgctgcaaaaatccggcatccccgaaggcaaaggctacggcggcttccccgtgtccggcctgttcttccgcaacagcacccctgaaaccgccgaacaacacaacgccaaagtgtacgggcaggcttccgtcggcgcgccgccgatgtccgtcccgcacctcgacacacgcaacgtggacggcaaacgccaccttatgttcggcccttatgcaggcttccgttccaacttcctcaagcaaggctcgcttatggatttgccgctgtccatccatatggacaacctctatcctatgctgtgcgccggctgggcgaatatgccgctgaccaaatacctgctgggcgaattgcgtaaaaccaaagaagaacgcttcgcctccctgctggaatactaccccgaggcaaaccccgacgactgggaactcatcaccgcagggcaacgcgtccaaatcattaaaaaagactccgaaaaaggcggcgtgctccagtttggtacggagattgtcgcccacgccgacggctcgctcgccgcattgctgggcgcgtcgccgggcgcatcgaccgctgtgccgctgatgatccggctgatgcaccaatgcttccccgagcgcgccccgtcgtgggaaggccgtctgaaagagctggtaccgggttacggcatcaagttgaacgaaaaccctgaaagggcggatgaaattatcgcctataccgcgaaagtattggatatttaa

SEQ ID NO: 62379 - DNA, 1893 bp, Neisseria meningitidis
atgcctatccttaccatccgtgaagtgtgcaacattaatcattggggcataggttattatgatgttgacgattccggcgaaatcatcgtccgccccaatccggcgcaacacaatcaaactgcttcactgcaaaaactgactgaagccgtgcaacaaaaacatcaggcgcgcctgcctgttttgttttgttttccgcaaatcctcgaacaccgcctccgcgacattaaccgcgcctttcagacggcacgggaagagtgcggctataagggcggttattgtttggtttaccctatcaaggtcaaccaacaccgccgcgtcatcgaatcgcttatgtcaagcggacaaccgcatggtttggaagctggttctaaagccgaactgatggcggttttggcacacgccggcacccggcaaacattaatcgtctgcaacggctataaagaccgtgaatatatccgtttcgccttgatgggcgaaaaactggggcatcaggtttatttggtgattgagaagctgtccgaaatacaaatggtattggaagaggcggaaaaactcggcatcaagccccgtttgggtgtgcgcgccagactggcttcccaaggttcgggaaaatggcagtcttcgggtggggaaaaatcaaaattcggcttgtcggcttcccaagttttgcaactggtcgatattttgaaacaaaaaaacaggctggattgcctgcagcttttgcatttccatttgggctcgcagcttgggaacatccgtgatgttgccacaggtgtacacgaatcggctcggttttatgttgagttgcacaaactgggggtaaatatccgctgttttgatgtaggcggcgggcttggcgtggattacgaaggaaaccgcacacaatcggattgttccgttaattacagcctcaacgaatatgccgccacagtcgtatggggcatcagtcaggcttgtctcgaacacgggctgccgcatccgacaatcatcaccgagagcgggcgcggcattaccgcacatcacgccgttttggttgccaatgttataggcgttgaacgttacaaaccgcgccggctggatgcgccatcgcccgaagcgccgcgtgtgttgcacagtatgtgggaaacttggacggatatttccgcctcgcgggaaaaacgttccttacgcagctggatacacgaagggcagtttgatcttgccgatgtgcataatcagtataatgtcgggctgttgagtttggcgcaacgtgcgtgggcggagcaactgtatttaaatatctgtcatgaagtcggcgaattgtttaatgaaaaacaccggtctcaccgaaccattattgacgaattgcaagaacgttttgccgataagctgtatgtcaatttctcactcttccaatctttgcccgatgcttggggcatagatcaacttttccctgtttgtcccattaccggtttgaatgaaccgattgcgcgccgcgccgtgttgttggacattacctgcgattcagacggtacgattgaccactacatcgacggcgacggcatcgccggtacgatgcctatgcctgattatcccgaagaagagccgccgcttttaggcttttttatggtgggagcatatcaggaaatactcggcaatatgcacaatcttttcggcgacactgccactgccgatgttgttgtaggggaagacggacaatttaccgtcatcgattacgatgaaggaaacaccgttgccgatatgctcgaatacgtttatcaagatccgaaagagctgatgaaacgctatcgcgaacaaatcgaacattcagaccttcctgcctcgcaggctatgtctttcttaaaagaactcgaagcggggcttaatggttatacctatttggaagacgaatag

SEQ ID NO: 62380 - DNA, 846 bp, Neisseria meningitidis
atgaatattgcggacggacggcaggcgtttcccgcacctgcaaaactgaatctcgatttgaggattactggaaagcgggaagacggttatcacaatatcgaaagcatattctgcctgatagatttgcaggataccgtatatttgaaactaagggacgacggcaaaatcatcctgcacaatccggttgatggaatgccgcaggaagtagatttaagctaccgtgccgcatcgttgctgcaaaaatatgcgcgcaaccccgccggcgtggaaatatggctggacaaaaaaatcccgacaggggcgggtttgggcggcggaagctcggatgcggcaaccgttttgctggtgttgaaccgttggtggcagtgcggtctgacgcagcggcagctcattgattcgggcgcggctctgggggcggacgtaccgttttttattttcggcaaaaatgcgtttgcgcggggtataggcgacaggctggacgaaatggatattccgaaacagtggtatgtcatcgtcaaaccgcccgtccacgtttccactgcaaaaattttcacacacgaaggcttgacacgaaattccgcctcaagcataatgccgactttccaaaatctgcaaccgtttagaaatgatatgcaggcagttgtatttaaagaataccctgaagtttggaaagcctattccgagttgtcccgatatggatttgccttaatgacaggttctggtgcgtgtgtattcacggcgtgtcaagataggaatagcgcatacaatatataccgacaagtttcagatttgtacgaggcatatttggcagagggtctttcaaaacatccttggttgtccgtataa

SEQ ID NO: 62381 - DNA, 780 bp, Neisseria meningitidis
atgttttttgtcctttcccctgcgaagaaccttaatgaaaaagaccctgcctctgtcagcgagtttacccaacccgacctgctggcagagtccgaaattctaatgcagcagctgcgcgagcttgcgttgcaacagattgccgaactgatgcacgtttccgacaaaattgccctcttaaacgcgcagcgcaatgcagaatggcacacgccgtttacgccggaaaacgccaaacaggcggtctttatgttcaacggcgatgtttacgaaggtatggatgcaaacacattggatattggacagatacgctatctgcaaaaccatgtccgcctgctgtccggtctgtacggtcttcttcgcccgttagacctgatacagccctaccgtttggaaatggggacggcatttgccaatttgcgcggcaagaatttgtatgagttttggggagacatcattaccaaccttttaaatgacacgcttgcccaagcaggcagcaatacgcttgtcaaccttgcctcacaggaatatttcaagtccgtcaacacgaaaaaacttcggacgcggctgattaccccgatatttaaagacgaaaaaaacggcaaatataaaattatcagtttctatgccaagcgtgcacgcggattaatggtgcgctatgcggcagaacatcatattaccgaccctgaaatgctgaaaaattttaattacgaaggctacgcattcaatgacgcggcttccaatgaaagcgaatgggtgtttatgcgctcggaacaaataaagtga

SEQ ID NO: 62382 - DNA, 1422 bp, Neisseria meningitidis
atgaccaccatctacaacacccttacccgtcaaaaagaaccctttgcccccatcgaccctgaaaacgtgcgtatgtacgtttgcggcatgactgtttacgactattgccacttaggccatgcccgtgtgatggttgtgttcgacatgattgcccgctggctgcgcgagtgcggttatccgctcacttatgtgcgcaacatcaccgacatcgacgacaaaatcattgcccgcgcggctgaaaacggcgagaccatcggcgaactgaccgcgcgtttcattcaggctatgcacgaagatgccgatgctttgggtgtgttgcgtcccgatatcgagccgaaggcgacggaaaacatcccacaaatgattgccatgattgaaaccctgattcaaaacggcaaggcatatcctgccgcaaatggcgacgtttactacgccgtgcgcgagtttgccgcttacggccaattgtcgggcaaatcgttggacgacctgcgcgcgggcgaacgtgtggaagtggacggtttcaaacgcgatccgcttgattttgtgttgtggaaagcggcgaaagcaggcgagccggcatgggaaagcccgtggggcaggggacggccgggctggcacatcgaatgttctgcgatgagtgaaaacctgttcggcgatacgttcgacattcacggcggcggcgcggatttgcaattcccgcatcatgaaaacgaaatcgcccaaagcgtcggtgccagcggtcatacctgcggccacaaccacgcgcaaacccaccacggtcaaagcattgccagccacgtcaaatactggctgcacaacggctttatccgcgtggatggcgaaaaaatgtccaaatcgttgggcaacttcttcaccatacgcgaagtgttgaaacaatacgacctcgaagtcgtgcgtttctttattttgcgcgcccactaccgcagcccgttgaactattccgacgcgcatttggatgatgcaaaaggcgcgctgacccgtctgtacaccaccttgaaaaacacgccggcggctgagtttgatttatccgaaaacgccaacggctacacccgccgcttctacgccgccatgaacgacgatttcggtacggtcgaagcggttgccgtgttgtttgagctggcaggcgaagtgaacaaaaccaatgacgcacagctcgccggctgcctgaaagccttgggcggcatcatcggactgctgcaacgcgatccgaccgcgttcctgcaaggcagcgcggcttcagacggcctctccaacgaagaaatcgaagacttgatcgcccggcggaaacaggcgcgcgccgataaaaactgggcggaatccgaccgcatccgcgaccttctgaacgaacacaaaatcattttggaagacaacgccggcggcacgacttggcggcgcggttga

SEQ ID NO: 62383 - DNA, 5334 bp, Neisseria meningitidis
atgaaaaccaaacgttttaaaattaacgccatatccttatccatctttcttgcctatgcccttacgccatactcagaagcggcattggtcagagacgatgtcgattatcaaatattccgtgactttgcagaaaacaaaggcaaattttttgtcggcgcaaccgatttatcagtgaaaaacaaacaaggtcaaaacatcggcaacgcattatccaacgtaccgatgattgattttagcgttgcagatgtcaacaaacgcatagcaacggtagtcgatccccaatatgctgtcagcgtcaaacacgccaaagcagaagtccatactttttattacggtcaatacaacggtcataatgatgtagccgacaaagaaaatgaataccgcgttgtcgaacaaaataactataaaccccataaagcttggaatgcgagcaacttaggccgtctcgaagattataatatggcgcgttttaacaagtttgtaactgaagttgcgccaattgcaccaactgatgccggcggcggattggatacctacaaagataaaaaccgtttttcctcttttgtcagagtcggtgcaggcaggcaattagtttatgaaaaaggggcttatcatcaagaaggaaaggaaaaaggctacgatttgcgcgatctttcacaagcctatcgttatgccattgcaggtacaccttataaagatattaatattgaccaaacaatgaataccgaaggtttgattggctttggtaatcataataaacagtattcagcagaagaacttaaacaagcactctcgcaagatgcgttaacaaattacggcgtgttgggcgatagcggctctccgttatttgcttttgacaaacaaaaaaatcaatgggtctttttgggaacttatgattattgggcagggtacggaaaaaaatcttggcaagaatggaatatctataaaaaagaatttgcagataaaatcaaacaacgcgataacgccggcaccatcaaaggtaatggagaacatcattggaacattacttctggcacaaacagcaagattggttcgacagcggtaaggcttgccggcaatgaaaaggatgcaaacaacggacagaatgttacctttgaaaacaacggcactttggtattggatcaaaacatcaaccaaggcgcgggcggtctgtttttcaaaggcgattacacagtcaaaggtgcaaataatggcatcacttggctaggtgcagggattgatgttgccgacggcaaaaaagtcgtttggcaagtcaaaaatccgaatggcgacagattggcaaaaatcggcaaaggcacattagaaataaacggcacaggcgttaaccaagggcaattaaaagtcggcgacggtacggttattctgaatcaacaagccgatgccgacaaaaaagtccaggctttctcccaagtcggcattgtgagcgggcgcggtacattggtgctgaacagtccggaccagattaacccgaataatctgtatttcggtttccgtggcggtcgtttggatgccaatggcaatgacttgacttttgaacacatccgcaacgtggatgaaggcgcgcgcattgtcaaccacaacacagaccgcgcctccacaatcacgctaacgggtaaatctttaattaccaatccgaacagcctttcggtacatagtatacaaaatgactatgatgaagatgattatagttattattaccgaccaaggcgacccatcccacaaggtaaagatctttattacaaaaactatcgttattacgccctaaaatccggcggcagcgtgaacgcaccgatgcccgagaacggtgtaacagaaaataacgactgggtctttatgggatatacgcaagaagaagccaagaaaaacgcgatgaaccacaaaaacaatcagcgtattagcggttttagcggtttctttggcgaagaaaacggaaaaggacataacggcgcattaaaccttaatttcaacggcaaaagcgcgcaaaaccgtttcttgttaacaggtggtgccaatttaaacggaaaaataagcgtaactcaaggcaatgtcttgttatcaggtcgtccaacaccacacgcaagagattttgtgaacaaatcttcagcccgaaaagacgcacgtttctccaaaaacaatgaagtcgtatttgaagacgactggataaaccgtacattcaaagccacagaaattacggttaatcaatccgcatcgttatcttccggcagaaatgtatccaacattaccgccaacatcaccgcaacagacaacgccaaagtaaatttgggttacaaaaacggcgatgaagtttgcgtgcgctcggactataccggttatgttacctgcaacacaggcaacttatccgataaggctttaaacagctttggagcgacacagattaacggcaatgtgaatttgagtcagaatgcggcattgactttgggcaaggctgcattatgggggcaaattcaagggcaaggaaacagcagcgtcagcctgaaccaacatagcaaatggcatttgaccggcgacagccaagtgcacaatctgtcattggcggatagccatattcatttgaacaacgcttccgacgcgcaaagtgcaaataaataccacacgctcaaaatcaatcatttatccggtaacgggcattttcattatctgacgcacttggcaaaaaatcttggggataaagtgcttgtgaaggaatccgcatccggtcattatcagctccatgttcaagataaaacaggcgaacccaatcaggaagggctgaatctctttgatgcatcatccgtacgagaccgatcgcacctttccgtttccttggcgaataaccatgtagatttaggcgcattgcgttatacaatcaaaacagaaaacggtattacccgattgtacaatccttatgccgagaaccgccgccgagtcaaaccggccccgtctcctgccacaaacacggcttctcaagcacaaacggacagtgcacaaattgccaagcctcaaaatatcgtcgtcgcaccgcctagcccgcaggcaaatcaagccgaagaagcaaaacgccaacaagcaaaagcggagcaagtgaagcgtcagcaagcagaagcagagcgtaaatcggcagagttagcaaaacaaaaagcagaagccgaacgcgaagcaagagagctggcgacccgccaaaaagcagaacaagaacgcagcagcgccgaacttgcacgtcgacataaaaaagaacgcgaagcggcagagttgtcggcaaaacaaaaagcagaagccgaacgtgaggctcaagcattggcggtacgccgaaaagcagaagccgaagaggcaaaacgccaagctgcagagcttgcacgccggcatgaaaaagaacgcgaagcggcagagttgtcggcaaaacaaagggtcggggaagaggaacgccgtcaaacagcccaatcccagccgcaacgccgcaaacgccgtgccgcaccgcaggattatatggcagcttcccaagaccgtcctaaacgccgcggacaccgttcggtacagcaaaacaatgtggaaattgcccaagcccaagcagaacttgcgcgccgacagcaggaagaacgcaaagcggcagagttgttggcaaaacaaagggcagaagccgaacgtgaggctcaagcattggctgcgcaccgaaaagcagaagccgaagaggcaaaacgccaagctgccgaacttgcacatcgccaggaagcagaacgcaaagcggcagaattgtcggcaaaccaaaaagccgcagctgaagcccaagcattggcggcacgccaacaaaaagcccttgcgcgtcaacaggaagaagcacgaaaagctgcagagttagccgtcaaacaaaaagcggaaaccgaacgcaaaaccgccgaacttgccaagcaaagggcagcagccgaagcagcaaaacgccagcaagaagctcgccagaccgccgaacttgcacgtcgtcaagaagcggaacgccaagcagcagagttgtcggcaaaacaaaaagccgaaacagatcgagaagcggcagaatcggcgaaacgaaaagctgaggaagaagagcaccgtcaagcagcccaatcccagccgcaacgccgaaaacgccgtgccgcacctcaggattatatggcagcttcccaaaatcgtccgaaacgtcgcggacgcagatctactctgccggcaccgccctcgccatcatttgattcgtcagcttacgcagcacccagggccttgcataatccggactggtatgaaaatgactatgaagaaatccccttggatgcgttggaagatgaagatgtatctgaatcagttgacacatcagacaaacagcctcaagacaatacggaacttcatgaaaaagttgagacagtgagtttgcaaccaagagccgctcagccgcgagcccaagccgccgcgcaagccgatgcagtcagcaccaataccaactcggctttatctgacgcaatggcaagcacgcaatctatcttgttggatacaggtgcttcattaacacggcacattgcacaaaaatcacgcgctgatgccgaaaaaaacagcgtttggatgtcgaacatcggttatggccgtgattatgcttccgcacaatatcgccggtttagttcgaaacgcacgcaaacacaaatcggcattgaccgcagcttgtccgaaaatatgcagataggcggcgtattgacttactctgacagtcagcatacttttgatcaggcgagcggcaaaaatacttttgtgcaagccaacctttatggtaagtattatttaaatgatgcttggtatgtggccggcgatattggtgcaggcagcttgagaagccggttacaaacgcagcaaaaagcaaactttaaccgaacaagcatccaaaccggccttactttgggcaatacactgaaaatcaatcaattcgagattgtccccagtgcggggatccgttacagccgcctgtcatctgcagattacaagttgggtaacgacagtgttaaagtaagttctatgtcagtgaaaacactgacggccggactggattttgcttatcggtttaaagtcggcaaccttaccgtaaaacccttgttatctgcagcttactttgccaattatggcaaaggcggcgtgaatgtgggcggtaattccttcgtctataaagcagataatcaacagcaatattcagcaggtgccgcgttactgtaccgtaatgttacattaaacgtaaatggcagtattacaaaaggaaaacaattggaaaaacaaaaatccggacaaattaaaatacagattcgtttctaa

SEQ ID NO: 62384 - DNA, 291 bp, Neisseria meningitidis; identical to SEQ ID NO: 54579

SEQ ID NO: 62385 - DNA, 516 bp, Neisseria meningitidis; identical to SEQ ID NO: 54969

SEQ ID NO: 62386 - DNA, 120 bp, Neisseria meningitidis; identical to SEQ ID NO: 42469

SEQ ID NO: 62387 - DNA, 1011 bp, Neisseria meningitidis; identical to SEQ ID NO: 61790

SEQ ID NO: 62388 - DNA, 324 bp, Neisseria meningitidis; identical to SEQ ID NO: 41034

SEQ ID NO: 62389 - DNA, 987 bp, Neisseria meningitidis; identical to SEQ ID NO: 38696

SEQ ID NO: 62390 - DNA, 657 bp, Neisseria meningitidis
atggattttgaaaaagcgcggttcaatatggtcgaacagcaaatccgtccttgggatgtattggattttgatgtgttggacgctttggcggagattccgcgcgagcgtttcgtggatgcgtctttgcagggtttggcgtatgcggatacggagctgccgcttgccaacgggcataagatgctcgagccgaaagtcgtggcgcggttggcgcaaggcttgaagctgacgaaaaacgatacggttttggaaatcggcacgggatcgggctatgctgccgcgctgttggcgaagctggcgggcagggtggtgtcggacgatatcgatgcggaacagcaaaaccgcgccaaagcggtgttggacggtttgggtttggacaatatcgattatgtgcaaaacaacgggctgaccgaactttccgcaggtgcgccgtttgatgcggtttatgtcggcggtgcggtcaatattgtgcctgatgtgttgaaagaacagttgaaagatggcggacgcatggtggttatcgtaggccgcaagcctgttcagcgcgcgcttttgattacgcgcaagggcgatgtgtttgaagagaaggtgctgttcgataccttggtggcgcatttggatgataaggatgccgatccgtttggcggtttcgatttttaa

SEQ ID NO: 62391 - DNA, 1158 bp, Neisseria meningitidis; identical to SEQ ID NO: 41990

SEQ ID NO: 62392 - DNA, 1410 bp, Neisseria meningitidis; identical to SEQ ID NO: 44203

SEQ ID NO: 62393 - DNA, 927 bp, Neisseria meningitidis
atgtcttttgccttcttttttcccggacaaggttcccaaagcctcggtatgatgaacggctttgccggacacgccgtcgttaaaaacacctttgccgaagcctccgccatattggggcaggacttgtgggcgatgataaacggcagcgatgccgaaatcatcggtcaaaccgtcaacacccagcccattatgctcgccgccggcgttgccgtttaccgcgcctatttagaagcgggcggcaaaacgcctgccgccgttgccggacacagcctcggcgaatacaccgcactcgttgccgccggcgcattgatttttgccgacgcggtcaaactcgtgcgcctgcgcgccgaactgatgcagtccgccgtaccgcaaggcgtgggcgcaatggcggcgattctcggcttggaagatgagcaggttaaagccatttgtgccgaagccgcccaaagcgaagtggtcgaagccgtcaacttcaactcacccggacaaatcgtgattgcaggcaacgccgccgccgtcggacgcgccatggctgccgccaaagaagccggtgccaaacgcgccctgccgctgcccgtgtccgtaccttcccattgcagcctgatgaaacccgccgccgacaaacttgccgaagccctgaaaaccgttgaaatcaagcagccgcaaatccgcgttatccacaacgccgacgttgccgcctacgatgatgccgacaaaatcaaagacgcgctcgtccgccagctttacagccccgtacgctggacggaaaccgtcaacgccctcgtttcagacggcattgccgaatccgccgaatgcggcccgggcaaagtgttggcgggcttggcaaaacgcatcaacaaagccgccgcgtgcagcgcactgaccgatgccggacaggttgccgcctttatcgaaacgcactga

SEQ ID NO: 62394 - DNA, 693 bp, Neisseria meningitidis
atgaacgaaatcctcaggcagcccagcgttctgcttttcctcacgcttgccgtgtacgcgcttgcgattatcgtgcgcacgcgcacgggcaatatcttctgcaaccccgtactcgtcagcaccgtggtgctgattgcctacctgaaaatcctcgacatcgattatgcggtgtaccacaacgccgcgcaattcattgatttttggctgaaacccgccgtcgtcgtgcttgccgtgccgctctaccaaaaccgccgtaaaatcttcaaccagtggctgcccgtcatcgtttcacagcttgcgggcagcgttacgggcattgttacggggatgtattttgccaaatggctgggcgcggaacgcgaagtcgtcctctcgctcgcgtccaaatctgttaccaaccccatcgccattgaaattacccgctccatcggcggcattcccgccattaccgccgccaccgtcatcattgccggtctggtcggacagattgccggttacaaaatgctgaagaacacagtcgtcatgccctcgtccgtgggtatgtcgctcggcacggcttcgcacgcgatggggattgccgcctcgctcgaacgcagccgccgcatggcggcatacgcgggactggggctgacgttcaacggcgtactgaccgcgctgattgcgccgctgctcatccccgttttgggattttga

SEQ ID NO: 62395 - DNA, 474 bp, Neisseria meningitidis
atggaacaaaaagggtttacattgattgagatgatgatagtcgtcgcgatactcggcatcatcagcgtcattgccataccttcttatcaaagttatattgaaaaaggctatcagtcccagctttatacggagatggtcggtatcaacaatatttccaaacagtttattttgaaaaatcccctggacgataatcagaacatcaagagcaaactggaaatatttgtctcaggctataagatgaatccgaaaattgccgaaaaatataatgtttcggtgcattttgtcaataaggaaaaaccaagggcatacagcttggtcggcgttccaaagacggggacgggttatactttgtcggtatggatgaacagcgtgggcgacggatacaaatgccgtgatgccgcttctgcccgagcccatttgaagaccttgtccgcagatgccggctgtgaagccttctctaatcgtaaaaaataa

SEQ ID NO: 62396 - DNA, 951 bp, Neisseria meningitidis
ttgctgaatgaggcggtggatgcgcttgccgtgcgcgaagacggtgtctatgtggacggtacgttcggcaggggagggcattcccggctgattttgtcgcgtttgggcgatgcggggcggttgattgttttcgacaaagaccctcaggcgattgctgtggcagaagagctggcgcgttcggacaaacgggtcggtgtcgtgcatggcggttttgcttcgtttcagacggcattggacggtttgggtatcggcaaggtggacggtgcgctgtttgatttggggatttcgtccccgcaaatcgatgacggcagccgcggtttcagcttccgtttcgatgcccctttggatatgcgtatggatacgacgcgcggtatgtctgccgcagagtggatagcggttgcgtcggaacaggatttgcacgaggtaatcaagaattatggtgaagagcggtttagccgccagattgcgcgcgccattgttgcgcaacgggcggaaagtccaatcgatacaacccgcaagctggcgcagatcgtggcacaaaacgtccgtactcgcgagcgggggcaggatcctgcgacgcgcaccttccaggcggtccgcatctttattaaccgcgagcttgaagaagtaggggcagtattgccgcaggtcatgtgtcgtctgaaagagggcggacgtttggcggtcattgctttccattcgttggaagaccgcattgtgaagcagtttgtcaaaaaatattcgcaacacgcgcccctgccgcgctgggcggcggtcagggaagcggatttgcccgagccgcccctgaaaatcgcgggcagggcattaaagccgggtgaggcggaaattgccgccaatccgagggcgagaagtgcggttttgcgtgtggcggagcggactgccggtccgataccggaacaatcacagagaaaaacgtctgaatggcaatga

SEQ ID NO: 62397 - DNA, 483 bp, Neisseria meningitidis; identical to SEQ ID NO: 59760

SEQ ID NO: 62398 - DNA, 372 bp, Neisseria meningitidis; identical to SEQ ID NO: 36308

SEQ ID NO: 62399 - DNA, 222 bp, Neisseria meningitidis; identical to SEQ ID NO: 50201

SEQ ID NO: 62400 - DNA, 1179 bp, Neisseria meningitidis; identical to SEQ ID NO: 61246

SEQ ID NO: 62401 - DNA, 855 bp, Neisseria meningitidis
atgccgcccatccctgccccatccgcaccatccgagcacactgtcgcatgggtattcggccaacccgttaccgatttgccgcaggatttgtttatcccacccgacgcgctgaaagtcgtattgggcagttttcaaggccctttggatctactgctgtatctgatccgcaagcagaacatcgatgttctcgatattccgatggtgaagattaccgagcagtatctgcactacatcgcccaaatagaaacctatcagtttgatttggcggcggaatatcttttgatggcagcaatgctgattgaaatcaaatcgcgcctgctgctgccgcgtaccgaagccgtcgaagacgaagaagccgacccgcgtgccgagttggtgcgccgcctgttggcttatgaacagatgaagctggcggcacaagggttggatgcgcttcctcgtgcgggccgggatttcgcatgggcgtacctacctctggaaattgccgtcgaagccaagctgcccgaagtctatattaccgacttgacgcaagcgtggctgggtattttgtctcgggcaaaacatacgcgcagccacgaagttatcaaagaaaccatctccgtgcgcgcgcaaatgacggcaatcctgcgccgtttgaacggacacgggatatgcaggtttcacgacctgttcaatcccgaacagggcgcggcttacgtggtcgtcaacttcatctcactgttggagcttgccaaagaaggattggtcagaatcgtgcaggaagtcggtttcggagaaatccgaatcagcctcaatcatgagggggcgcattcagacggcatttccggcacacgaggcgggcgcgatgtgttctaa

SEQ ID NO: 62402 - DNA, 735 bp, Neisseria meningitidis
atggcttcgcataatactacacatcagatgaaaacgctgtgttcttcctgttctttgcgggaactctgcctgcctgtcgggctgctgcccaacgagctcagccaactcgatgccgtcatccgtcaaagccgccgcctgaaaaagggcgaatacctgttctgtgtcggcgaagcctttacctcgctctttgccatccgttcgggcttcttcaaaacaaccgtcgccagtcaggacggccgcgatcaggtaacgggtttctttatgtcgggcgaactcatcggcatggacggcatctgttcccatgtgcacagttgcgacgcggtcgccttggaagacagcgaagtgtgcgaactgccgtttacccacatcgaagaactggggcaaaacatccccagcctgcgtacgcacttcttccgcatgatgagccgtgaaatcgtgcgcgaccaaggtgttatgctgctgttgggcaatatgcgcgccgaagagcggattgccgccttcctgctgaacctctcccaacgcctttattcccgtggttttgctgccaacgatttcatcctgcgcatgtctcgtgaagaaatcggcagttatctcgggctgaaacttgaaaccgtcagccgcacattatccaagttccatcaggaaggattgatttccgtcgagcataagcacatcaaaatcctcaatctgcaggtgttgaaaaaaatggtgtccggctgctcgcacgccatttga

SEQ ID NO: 62403 - DNA, 747 bp, Neisseria meningitidis
atgaacgttttgatttccaacgacgacggctacctctccgaaggcattgccgttttggcgcgcgttacggcggaatttgccaacgtcagggtggttgcgcccgaacgcgacaggagcggggtcagcaattcgctgacgctggaacgccctttgcagttgaaacaggcgcaaaacgggttctactatgtcaacggcacgccgaccgactgcatccacatcgggcagtctgtattttcggattttcaggccgattttgtcttttcgggcatcaaccggggcgcgaatatgggggacgacacgctttattcggggacggttgcggcggcaaccgaagcctaccttatgggcatacccgccgtggcgttttccttaaacgacgcttccggacgctattgggcgaccgcagaacaggcactgtggacattgttggcgcattttttcaaaaaccccccgcagtcccctattttatggaacatcaatatccccgccgtcgcgccggaagatgtgcggggcattaaaatcgcccgtttgggcaggagacaccacggtcagaacgtcatccccgcgcgcaatccgcgcggcgaacagatttattggataggaccggtcggcgaagtttccgatcgggaagagggaacggatttcggtgaatgcggcgcaggtttcattaccgtaacgccgctgcaaatcgacctgaccgcctatccggacatggcggaaacagcggcgttctggcatgcggactga

SEQ ID NO: 62404 - DNA, 3126 bp, Neisseria meningitidis
atgcaaaatatgaaaaaccaagtacgcggatcaggcatggatgcacgatccaatccggccaatgtttcagacggcctgcaaaacagttcgggtcatatcggtaccaacacgcgttaccgcctgaccaaactcggcgaacaaatggcgcgcctgcccatcgacccgaaaatcgcgcgcattttgttggcggcgaagaaacacgactgcatggcggaaatattggtgatcgcgtccgcactgtcgattcaagacccgcgcgagcggccgctggaagcgcgcgatgccgccgccaaggcgcacgagcgttttaccgacaagcagtccgatttccttgcctatctgaacatttgggacagcttccagcgcgagcgcgacaagggcttgtccaacaagcagttggtgcagtggtgccgtcaatatttcctgtcgcacctgcggatgcgcgagtggcgcgagctgcaccaccagcttgcccaaaccgcgattgaaatgggtttgaccaccaaggaagccgctttcagacgacctcccgaaatcaggcagctcacgtcgtctgaaaaccaaggcgaccaagacctatccgccaaactcaagcaaaaacaactggataagaaacaacaccgcgcccaaatccgcgctgccaaagaagcgggctacgaacaaatccaccgcgccctgctcaccggcctcatcgccaacgtcggcatgaaatcgcccgacggcaacgactacaccggcgcgcgcggcagccgcttccaccttttccccgcctccgccctgttcaaagccaaacccaaatgggtgatggcggcagaactcgttgaaacgacaagactttatgctcgcgacgtggccgccatccagcccgaatggatcgagcaggaagcgccgcacctcgtccgctaccactatttcgagccgcactgggagcaaaaacgcggcgaagttgtcgccggcgaacgcgtgacgctttacggcctgaccgtattgccgcgccgccccgtgtcttacggcaaagttgcgcccgaagaagcgcgcgaaatctttatccgcagtgcgctggtggcgcaggaatgcgatttgaaagcggacttttttgtccacaacaaaaagctgattaaagaaattaccgaactcgaacacaaatcgcgcaagcaagacgtattggtcgacgacgaagccctgtttgcgttttatcacgaacggctgcccgatttttatacggcggatgcggtttcagacggtctgcgtcctgcaaatccccaacaaaccgccccctcccccgtgggggagggtcggggagagggcaaaacagttgcctctcaaaccaacttctccgcaaccacagcaaaccctctccctaaccctctcccgcaggagagggaacagagtgccgcagcttcaacgttttcagacgacctgcgtcctgcaaatctgcagcaaaccgccccctcccccgtgggggagggtcggggagagggcaaaacagttgcctctcaaaccaacttctccgcaaccacagcaaaccctctccctaaccctctcccacaggagggggaacagagtgccgcagcttcagcggtttcaaacgaccctcaaccccaaaagcagccagcaccccaaaaagaccgtctgaaacccctccccctcgccgacatccgcaccttccaagcctggctcaaaaccgccgaacgcgagaacccgcgcctgctgttcctcagccgcgacgatttgatgcaacacgccgccgcacacattaccgaagaacagttccccaaattctggcaaaccgcagacggcaagttcaaactttcctaccgctttgagccacaccatccgctcgacggggtgaccatgaccgtgccgctgaccgtcctcaaccgcctgcatgcgccgtcgctcgaatggctggtgcccggtatgttgcgcgaaaaaatccagctgctgattaaagcactgccgaagcaaatccgccgcatttgcgtgcccgtacccgatttcatcaccaaattcctcgaaaacaatcccgaccgccaagcggccatcattccccagttggcgcactttatcgccaaaagcgccagcgatatgcggattctcgagcaaatcgaccaagacgcatgggcggcgcaagacttgcccgaacactgctatctgaatctgcgcattatcgacgacggcggacaagagcttgccggcggccgcaaactgcacgaattgcaacaacagctcggcaaagccgccgccaccaccttccgcgacaacacccaagaattcgagcgcgacaacgtaaccacatgggacatcggcatcctgcccgaatccatcaaattcgcccgcggcaaacaacagcttaccggctatctcggcctgcaaaaagaaaaagacggccgcatcgccctgcgcctatttgacaccaccgaagccgccgaacaggcacaccgtcaaggtgtcatcgaattaatgaagctgcaattaaaagagcaggtgaaagatttgaacaaaggcatccagggcttcacccaagccgccatgctgctcaaacacatcaacgccgacaccctgcgcgacgacctcacccaagccgtttgtgaccgcgcctttatcggcgaagacgagctgccgcgcaacgaaaaagccttcaaagaacaaatcaaacgcgcccgcagccgcctgcccgccgtcaaagaagccctcagccgctacctgcaggaaaccgccgccgcctacgccgaactgaacggcaaactcggcaaacacccattgacccaccttctaagactacgcctgcaaaccctgctcgccgccggcttcgccacccgcaccccgtgggcacaatggccgcgcctccccatctacctcaaagccatgaccctgcgcctcgaaaaatacagcagcaaccccgcccgcgacgcagcccgcgaagccgatatacaggaattggaacaaatgtggcaggaaaaaaacgacggtttggtgaaacaaggactacccgtttcagacgacctcaccgcgtttaaatggatgatcgaagaattgagggtgtcgctgttcgcgcaggaattgaagacgccttatccggtgtcggtgaagcggttgttgaagatgtgggaggatcttaattaa

SEQ ID NO: 62405 - DNA, 474 bp, Neisseria meningitidis; identical to SEQ ID NO: 36318

SEQ ID NO: 62406 - DNA, 279 bp, Neisseria meningitidis
atgtactaccaagtcggaaataaatgtcttgagaagcaccaggctgaaaacctttatttcagcttggtagtaccaagaatcaaagaaaacggacagattgtcaggccggaatataacggcagcctgtggaagatgtcggacggtcagccgctaaggcttttattggcggaatgcagtccgaaagacaacctgcaaagcggtcttgaaacaggttggatagtattcggcatcctcgcgtccgtttactttgtttccctgctgaaaaaggttttgaaatga

SEQ ID NO: 62407 - DNA, 1089 bp, Neisseria meningitidis
ttgacagctaaagaacgcgaacagattttggcatacagcaaactggttgccggtacggtaagcggtgtggttggcggcgatgtaaatgcggcggcgaaggcggctgaggtagcggtgaaaaataatcagcttagcgacaaagagggtagagaatttgataacgaaatgactgcatgcgccaaacagaataatcctcaactgtgcagaaaaaatactgtaaaaaagtatcaaaatgttgctgataaaagacttgctgcttcgattgcaatatgtacggatatatcccgtagtactgaatgtagaacaatcagaaaacaacatttgatcgatagtagaagccttcattcatcttgggaagcaggtctaattggtaaagatgatgaatggtataaattattcagcaaatcttacacccaagcagatttggctttacagtcttatcatttgaatactgctgctaaatcttggcttcaatcgggcaatacaaagcctttatccgaatggatggccgaccaaggttatacacttatttcaggagttaatcctagattcattccaataccaagagggtttgtaaaacaaaatacacctattactaatgtcaaatacccggaaagcatcagtttcgatacaaacctaaaaagacatctggcaaatgctgatggttttagtcaaaaacagggcattaaaggagcccataaccgcaccaattttatggcagaactaaattcacgaggaggacgcgtaaaatctgaaacccaaactgatattgaaggcattacccgaattaaatatgggattcctacactagacaggacaggtaaacctgatggtggatttaaggaaatttcaagtataaaaactgtttatgatcctaaaaaattttctgatgataaaatacttcaaatggctcaaaaagctgcttcacaaggatattcaacagcctctaaaattgctcaaaatgaaagaactaaatcaatatcggaaagaaaaaatgtcattcaattctcagaaacctttgacggaatcaaatttagatcatattttgatgtaaatacaggaagaattacaaacattcacccagaataa

SEQ ID NO: 62408 - DNA, 534 bp, Neisseria meningitidis
atggcagacttcaaccaaatcctgaccaccggcgacgtggacggcggcatcatcaacgtcgtcaacgaaatccccgccggcagcaaccacaaaatcgagtggaaccgcaaactcgccgcattccaactcgaccgcgtcgaacccgccatcttcgccaaaccgaccaactacggcttcattccccaaactttggacgaagacggcgacgaattggacgtgctgctcgttaccgaacaacctctggcaaccggcgtattcttggaagcgcgcgttatcggcgtgatgaaattcgttgacgacggcgaagtagacgacaaaatcgtctgcgttcctgccgacgaccgcaacaacggcaacgcctacaaaactttgtccgatttgccgcaacagctcatcaaacaaatcgagttccacttcaaccattacaaagacctgaaaaaagcaggtacgaccaaagtcgaatcttggggcgatgcggaagaagcgaaaaaagtcatcaaagaatccatcgaacgttggaacaaacaggcataa

SEQ ID NO: 62409 - DNA, 1512 bp, Neisseria meningitidis
atgaaatggttgaaacgcctgacggtcattgtcgggactttttaccgctatcggctggcaggtctgtgtgcttcgctgatgggtagcggttggatatgcgctctgctgaaaatgatgccgcagtcgtccaaattgaaaaacgaaccgcctgctgtccgtctgcgccttgccttggaaagcctggggccgattttcatcaagttcgggcaggtattatctacgcgccccgatttgattccgcacgattacgccgtcgaactggcaaagctgcaagacaaagtgccgccttttgacgcgcggctttcgcgtgaacaaatcgaaaaatcgctgggtcagcccatcgaaaagctgtatgcggaatttgaaaccgagcccgtcgccagcgcgtccatcgcccaagtacacaaagcccgcctgcattcgggcgaacgagtggcggtcaaagtcttgcgccccaaccttttgcccgtgatcgaacaggatttgtcgctgatgcgctttggtgcaggctgggtcgagcgtctgtttgccgacggcaagcgtctgaagccgctcgaagtggtggcggagttcgacaaatacctgcacgacgagttggatttgatgcgcgaagccgccaatgccggacagctcgggcgcaatttccaaaacagcaatatgctgattgtgcccaaggtgttttacgactactgcaccagcgacgtgctgacaatcgaatggatggacggcacgccggttgccgacatcgccaaactcaaagcagacggcatcgatttgcacaaactcgccgattacggcgtggaaatctttttcacgcaggtcttccgcgacggctttttccacgcggatatgcaccccggcaatattttggttgccgccgacaaccgctacatcgccctcgatttcggcatcgtcggcacgctgaccgattacgacaaacgttatctcgccatcaatttcctcgcctttttcaaccgcgattaccggcgcgtcgccaccgcccacatcgaatcgggctgggtgcctgccgacacgcgtgcggaagaattggaagccgccgtccgcgccgtgtgcgaaccggtgttcaacaaaccgatttcgcagatttccttcggcttggtgctgatgcgcctgtttgaagtcagccgccgcttcaatgtcgaaatccaaccgcagcttgtgctgctgcaaaaaacgctgctcaacatcgaaggcttgggccgccagctcgatcccgatttggacttgtggaaaaccgccaaaccgtttttggtgaaatggatgaacgggcaggtcggccctaaagccctttggcgcaacctcaaaaacgaagcccccgactgggcgcaaatcattccttcattgccgcgcaaaatcagtgcgttgattgatgaaaaccgccagcaggaaatgcgtgatgcctatatccatttggtcaaagtgcagcagcggcaaagcctgtggctggctgtgattgcggttgttttgctgctgattttgcttttgaaatag

SEQ ID NO: 62410 - DNA, 450 bp, Neisseria meningitidis
atggacgtacaactccccatcgaagccaaagacatccaaaaactcatcccccaccgctatccgtttctccagctcgaccgcatcaccgccttcgagccgatgaaaaccctgaccgcgattaaaaacgtcaccataaacgagccgcagttccaaggccatttccccgacctgcccgtgatgcccggcgtactcatcatcgaagcgatggcgcaggcgtgcggcacgttggcgattttgagcgaaggcggacgcaaagaaaacgaattcttcttcttcgccggcatagacgaagcccgtttcaaacgccaagtcatccctggcgaccaactcgtctttgaagtcgagctgctgaccagtcggcgcggcatcggcaaattcaacgccgttgccaaagtaaacgggcaagttgccgtcgaagccgtgattatgtgcgccaaacgcgtggtttga

SEQ ID NO: 62411 - DNA, 330 bp, Neisseria meningitidis
ttgcaagcgttggcaaacagcaggactttcgtttatgacagtccagaagaccaagatttttttgataccgaaaaatttcggcaacgctatgaggattgggttgccaacctatgcaggaacttgggctataaaaccagacgcgccctatttaaaaacatgatgagcgtggatatttggctgcacaacggctgcctgaaaatcagcccgagccgccatgtcaagctggaagcgtgggatgccattgatgcagacgatgtaattttatcattggataacagccctgaagaaatcggagcaggtttaaagttggcattgagccgctgccgataa

SEQ ID NO: 62412 - DNA, 258 bp, Neisseria meningitidis
atgatgaagcatgattgtatcaacgacaagcccaaaacaccaaaccaaagacagcgcattttagcccgattgaggcagggcagcgttacctcatgggagcttacccaaatggggatactttgctacaacacgcgcattatggagcttcgccaacaggggcataacatcgttaccacaatggaggaaatccaaaaccaatttggcgaaaccgtgaagcgcgggcggttttcgctggtgtcggagggcaggcaatcatag

SEQ ID NO: 62413 - DNA, 552 bp, Neisseria meningitidis
gtgaactattgcgaatttgccgcctcacttcccgaaaacaccgacaacccgaacaaacattaccacgacacgcaatacggttttccgattgaggacgacaatgaattgtttgagcggctggtgttggaaatcaatcaggcaggattaaactggacgctgatgctgaagaagcagcaggcgtttcagacagcatttgaagggttcgacatcaataccgttgccgccttcgacgacaccgaccgcgaacgcctgcttgccgacgcgggcatcgtccgcaaccgcctgaaaatcgatgccgccattttcaatgcacggcaaatccaagcgttgcaacaagaatacggctcgttcaagaactggctcgacgcgcaccatccgcgaagcaaagacgaatgggtcaaactctttaaaaaacatttcaaatttgtcggcggcgaaatcgtcggcgaatttctgatgagtaccggctacctcaaaggcgcgcacgccgaaagctgtccggtttaccgtaaaaccctgaaataccacccgaaatggctcgatgccgtctga

SEQ ID NO: 62414 - DNA, 150 bp, Neisseria meningitidis; identical to SEQ ID NO: 41322

SEQ ID NO: 62415 - DNA, 864 bp, Neisseria meningitidis
atgaaaaccttactgccctttttcggcgtggtgcgcgtcagcggcgaagaccgccaaaccttcctgcacggacagctttccaacgacatcaaccaccttcagaccgggcaggcgtgttatgcgacttacaacacgcccaaaggccgcgtcatcgccaatatgattgtcgtcaaccgaggcggcgatttactgctgattatggcgcaagacctgcttgaagcaaccgtcaaacgcctgcggatgtttgtcctgcgtgccaaagccgtttttgaaatccttgaagattacgccgtcggcgcggaattggaagcatccgccgaaccgcttgccgcgcaagaacccaaccttgcctttgccacacaacaagattcagacggcatctgctctatcgctctgcctcatggcggcatccttcgcatcgcacccgaaaccgccctgcccccttatgatgccgctgccgaaagcgcgtggcggctgcacgaaatccgcagcggttatccgtggatatgcgcggctaccaaagaaaccgccgtcgcccaaatgctcaaccagcacatcatcggcggcgtacacttcaaaaaaggctgctatccgggacaggaaatcattgcccgtgcccagtatcgggggcaggtcaaacgcggcttggcggtattgtcgggaaattcggccgtcgaagcaggaaccctgctgacggcggacggcgaagaggccggcatcgtactcgacagcgttcaagattcggaaaactttaccgcccttaccgtgattaaattctccgccgcacaaaaagaactgaccgccccaaacggcagtatcttcaaagcggttcatcccttctttaaaaccgaaaatgcagaataa

SEQ ID NO: 62416 - DNA, 789 bp, Neisseria meningitidis; identical to SEQ ID NO: 36434

SEQ ID NO: 62417 - DNA, 1008 bp, Neisseria meningitidis
atgagcaccttcttccggcaaaccgcccaagccatgattgccaaacacatcgaccgtttcccgctattgaagttggatcaagtgattgattggcagccgatcgaacaatacctgaaccgtcaaaaaacccgttaccttagagaccaccgcggtcgtcccgcctgtcccctgttgtccatgttcaaagccgtcctgctcggacaatggcacagcctctccgatcccgaactcgaacacagcctcatcacccgcatcgatttcaacctgttttgccgttttgacgaactgagcatccccgattacagcaccttatgccgctaccgcaactggctggcgcaagacgacaccctgtccgaactgttggaactgattaactgccaactgaccgaaaaaggcttaaaagtagagaaagcatccgccgccgtcattgacgccaccattattcagaccgctggcagcaaacagcgtcaggccatagaagttgacgaagaaggacaaatcagcggccaaaccacaccgagtaaggacagcgatgcccgttggatcaagaaaaacggcctctacaaactcggttacaaacaacatacccgtaccgatgcggaaggctatatcgagaaactgcacatcacccccgccaatgcccatgagtgcaaacacctgtcgccgttgttggaaggactgcccaaaggtacgaccgtctatgccgacaaaggctatgacagtgcggaaaaccggcaacatctggaagaacatcagttgcaggacggcattatgcgcaaagcctgccgcaaccgtccgctgtcggaaacgcaaaccaaacgcaaccggtatttatcgaagacccgttatgtggtcgaacaaagcttcggtacgctgcaccgtaaattccgctatgcgcgggcagcctatttcgggctgctcaaagtgagtgcgcaaagccacctgaaggcgatgtgtttgaacctgttgaaagccgccaacaggctaagtgcgcccgctgccgcctaa

SEQ ID NO: 62418 - DNA, 1677 bp, Neisseria meningitidis
atgagcttcaaaaccgatgccgaaatcgcccaatcctccaccatgcgcccgattggcgaaattgccgccaagctgggtctgaatgccgacaacattgagccttacggtcattacaaggcgaaaatcaatcctgccgaagcgttcaaactgccgcaaaaacagggcaggctgattttggttaccgccatcaacccgactccggcgggcgaaggcaaaaccaccgtaaccatcggtttggcggacgcgttgcgccacatcggcaaagatgccgtgattgccctgcgcgaaccttctctggggccggtgttcggcgtgaaaggcggcgcggcaggcggcggctatgcccaagttttgccgatggaagacatcaacctgcacttcaccggagattttcacgccatcggtgcggcaaataatctgcttgccgcgatgctcgacaaccatatctatcagggcaacgagttggacatcgaccccaaacgcgtgctgtggcggcgcgtggtcgatatgaacgaccgccagttgcgcaacatcatcgacggcatgggtaaacccgttgacggtgtgatgcgccccgacggttttgatatcaccgttgcctccgaagtgatggcggtattctgccttgccaaagacatcagcgatttgaaagagcgtttgggcaacatcctcgtcgcctacgccaaagacggcagccccgtttacgccaaagatttgaaggcacacggcgcgatggcggtcctgctcaaagatgcgattaagcccaatttggtgcaaaccatcgaaggcacgcccgccttcgtacacggcggcccgttcgccaacatcgcccacggctgcaactccgtaaccgcaacccgtctggcgaaacaccttgccgattacgccgtaaccgaagcaggcttcggcgcggatttgggcgcggaaaaattctgcgacatcaaatgccgccttgccggtttgaaacctgatgcggcggtcgtcgtggcgactgtccgcgctttgaaatacaacggcggcgtggaacgtgccaacctcggtgaagaaaacctcgaagccttggcaaaaggtttgcccaacctgctgaaacacatttccaacctgaaaaacgtattcggactgcccgtcgtcgttgcgctcaaccgcttcgtgtccgactccgatgccgagttggcgatgattgaaaaagcctgtgccgaacacggcgttgaagtttccttgaccgaagtgtggggcaaaggcggcgtgggcggtgcagacttggcgcgcaaagtcgtcaacgccatcgaaaaccaaccgaacaacttcaatttttcctacgatgttgagctgagtattaaagacaaaatccgtgcgattgcccaaaaagtgtacggcgcggaagatgttgatttcagcgcggaagcgtctgccgaaatcgcctcgctggaaaaactgggcttggacaaaatgccgatttgcatggcgaaaacccaatattctttgagcgacaacgccaaactcttgggctgccctgaaggcttccgcattaccgtgcgcggcattaccgtttcttccggtgctggtttcatcgttgcgttgtgcggcaatatgatgaaaatgccgggtctgcccaaagttcccgccgccgagaaaatcgacgtggacgcagaaggcgtgattcacggcttgttctga

SEQ ID NO: 62419 - DNA, 660 bp, Neisseria meningitidis
atgtcaaaccaaaaagccttggtcatcttttcgggcggtcaggattcgaccacctgcctgattcaggcaatccaaatctacgggcgcgaaaacgtccaagccattactttccaatacgggcaacgccatgccgtcgagctggaacgtgcccgctggattgcgcaggatttgggcgtcaaacaaaccgtactcgacttgagcctgatgcggcagattacgcacaatgccctgatggacgacaccgccgccatcgaaactgccgaaaacggcgttccgaatacctttgtagacggccgcaacgcgcttttcctgctttacgccgcgatttacgccaaagggcaggggatacggcacatcatcgcgggcgtgtgcgaaaccgacttctccggctatcccgactgccgcgacgtgtttgtcaaatcgatgaacgttacccttaatttggcgatggactatgattttcaaatccacacgccgctgatgtatctgaccaaggcgcaaacgtgggcgttggcggacgaaatgggcgcgctggactatatccgcgagcaaacccacacctgctacaagggcatcgtcggcggctgccgcgaatgcccgagctgtatcttgcgcgaacgcgggctggcggaatatctggaaagtaaaaaggccgtctga

SEQ ID NO: 62420 - DNA, 558 bp, Neisseria meningitidis
ttggaagttttgaaaaacagggcattgaaggaaggtttggataaggataaggatgtccaaaaccgctttaaaatcgccgaagcgtctttttatgccgaggagtacgtccgttttctggaacgttcggaaacggtttccgaaagcgcactgcgtcaattttatgagcggcaaatccgcatgatcaaattgcagcaggtcagcttcgcaaccgaagaggaggcgcgtcaggcgcagcagctcctgctcaaagggctgtcttttgaagggctgatgaagcgttatccgaacgacgagcaggcttttgacggtttcattatggcgcagcagcttctcgagccgctggcttcgcagtttgcagcgatgaatcggggcgacgttacccgcgatccggtcaaattgggcgaacgctattatctgttcaaactcagcgaggtcgggaaaaaccccgacgcgcagcctttcgagttggtcagaaaccagttggaacaaggtttgagacaggaaaaagcccgcttgaaaatcgatgccattttggaagaaaacggtgtcaaaccgtaa

SEQ ID NO: 62421 - DNA, 321 bp, Neisseria meningitidis
atgattacccttaccgagaatgccgcaaaacacatcaatgactatctcgccaaacgcggcaaaggcttgggcgtacgcttgggtgtgaaaaccagcggctgctcggggatggcgtacaaccttgaatttgtcgatgaagccgatggcgacgacctgatttttgaaggacacggcgcacgcatttatatcgacccgaaaagcctggtttatctggacggcacacaagtcgattacaccaaagaaggtttgcaggaaggtttcaaatttgaaaaccccaatgtcaaagactcctgcggctgcggcgaaagcttccatgtttaa

SEQ ID NO: 62422 - DNA, 1128 bp, Neisseria meningitidis
atgttagaatgcacgataaattactgttcaggcgaaattatgtcccaaactatcgacgaactcctccttccccaccgcaacgccatcgacaccatcgatgccgaaatcctgcgcctgctcaacgaacgtgcgcaacacgcccacgccatcggcgagctgaaaggcacgggcgcagtgtaccgccccgaacgcgaagtcgccgtgttgcgccgcattcaggatttgaacaaaggcccgctgcccgacgaatcggtagcacgcctgtttcgggaagtgatgagcgagtgcctcgccgtcgaacgcccgctgaccatcgcctatctggggccgcagggcacgtttacccaacaggcggcgattaagcatttcggacacgccgcgcacaccatggcgtgtccgaccatagacaactgcttcaagcaggttgaaacccgtcaggcagactatctggtcgcccctgtggaaaactcgaccgaaggctcggtcgggcgcacgttggatttgcttgccgttaccgcgttgcaggcgtgcggcgaagtcgttttgcgcatccaccacaaccttttgcgtaaaaacaacggcagcaccgaaggcatcaccaaagtcttttcccacgcgcaggcgttggcgcaatgcaacgactggttgggcagacaccttcccaacgccgaacggattgccgtgtccagcaatgccgaagccgcaaggctggttgccgaatcggacgacggtacggttgccgccatcgccggacgcacggcggcggaaatctacggactcgatatggttgccgagtgcatcgaagacgagccgaacaacaccacgcgcttcttggtgatgggacatcacgaaaccggtgcaagcagcagcgacaagacttcgctggccgtttccgcgcccaaccgcgccggtgcggttgcctcgctgctgcaaccgctgaccgagtcgggtatttccatgaccaagtttgagagccgtccgagcaaatccgttttgtgggaatacctgttcttcatcgacatcgaaggacaccgccaggacgcgcagattcagacggcattggaacgcttgggcgaacgcgcttcgttcgtcaaagtcatcggttcgtacccgaccgccgttttgtag

SEQ ID NO: 62423 - DNA, 1086 bp, Neisseria meningitidis
atgactgttccccatattccgcgcggccccgtcatggcagacattgccgccttccgcctgaccgaagaggaaaagcaacgcctgctcgatcccgccgtaggcggcatcatcctcttccgccgcaacttccaaaacatcgagcagctcaaaacactcaccgccgaaatcaaagccctgcgcacacccgaactcattatcgccgtcgatcacgaaggcggcagggtgcaacgtttcatcgaaggcttcacccgcctgcccgcaatgaacgttttagggcaaatttgggacaaagacggcgcgtccgccgccgaaaccgccgccggacaagtcggccgggtgttggcaaccgagctttccgcctgcggcatcgatttgtccttcacgccagtcttagatttggactggggaaactgccccgtcatcggcaaccgcagtttccaccacaatcccgaagcggtcgcccacctcgccctcgcccttcaaaaaggtttggcaaaaggcggtatgaaatcctgcggcaaacattttcccggacacggatttgtcgaaggagacagccatctggtcttgccggaagacaggcgcagcctgtccgaactcgaagccgccgacctcgcccccttccacattatgagccgcgaaggtatggcggcggttatgcccgcccacgtcgtttatccacaagtggacacaaagcccgcagggttttccgaaatctggctcaaacaaattttgcgccgcgatatcggattcaaaggcgtgattttctcggacgatttgactatggagggcgcgtgcggtgtcggcggcctcaaagaacgcgcccgcatttcctttgaggcaggttgcgacatcgtcctcgtctgcaaccgtcccgaccttgtggacgaactgcgcgaagatttccgcattcctgacaatcccgctttggcgcaacgttggcaatatatggccaacacgctcggcagtgccgccgcgcaagccgttatacagacggcggatttccaagcggcgcaagcctttgttgccggccttgcctcgccgcaggacacggcgggcggcgtgaaagtcggagaggccttttaa

SEQ ID NO: 62424 - DNA, 657 bp, Neisseria meningitidis
atgaaaaacaaaaccaaagtctgggacttccccacccgccttttccactggctgcttgccgcatccctaccctttatgtggtatagcgcgaaaaccggcggcgatatgctgcaatggcacacgcgcgtcgggctgtttatccttttcctgctcgtattccgcctctgctggggcatttggggcagcgataccgcccgtttctcccgtttcgtccgcggatggtcgggtatcagggattatctgaaaaacggtattcccgaacatatccagcccggacacaaccccttgggcgcactgatggtcgtcgcgcttttggccgccgtctcatttcaagtcggcacggggctttttgccgccgatgaaaacaccttcagcaccaacggctacctcaaccatttggtttccgaacatacaggcagccttatgcggaaaatccacctcaactttttcaagctgctcgccgttttttccgccattcatatcgccgccgtcgccgcataccgcgtgttcaaaaagaaaaacctcgtcctcccgatgataaccggcttcaaatacatcgaaggcaaaacctcaatccgctttgccggcaaaaccgcgcttgccgccgcattatcggttgccgcgcttgtcgcagccgccatcctgctcctgtcctga

SEQ ID NO: 62425 - DNA, 1272 bp, Neisseria meningitidis
atgttccaatggctttatgatgcattgtggctgcttgcgccgatatggatacggcgttatttggacaaacgctccggaagtgcccctgcatatcgggcgcatcgggacgagcgtttcggcaagccgtatccgaatcccgttaccggcgcggtttggatacacgccgtttcggtcggagaaacgcgtgccgcccagcccttgatacgcgagttgcggcagcgttttcccgatgcgccgctgctgatgacgcagatgaccccgacgggacgggaaaccgcgcaagttctgtttcccgatgcgcaatgccgctatcttccgtatgacaaaaaaacgtgggtacggcagtttttgcgcgaacaccgcccgatgttcggcattttgatggaaaccgaaatctggcccaatctgatgaaggaatgccggcgcgcgggtgtgccgctgtttttggcgaatgcgcggctgtcggaaaaatcgctgaacggttatctgaaagtccgccgcctgatccgtcctgccgccgcttcgctgacgggctgtctggcacagacggaggcggatgcggcgcggttggcgaaattgggcgcggcatccgtgcaggtgtgcggcaataccaaatacgacctgatgccgtcggaacagatgaaaacgctggcggggcagtttgaaaaacgcatcggaggccggccggttgccgtgtgcggcagcacgcgcgtttatcggggcgaagacgaggcggaaaaactgctggcggcgtggcaacaatatcgcggcgatgcgctgctggtcgtcgtgccgcgccatcccgagcattttcagacggtatttgaaacggcacaacgcttcgggtttaaggttcagcggcgcagcgacggtttgccggtcgaacccgatacgcaggtgtggataggcgacagtatgggcgagctgtatgcgtattacctgtgcgccgatgtcgcttttgtcggcggcagtctggtcgattcgggctgtcagaacatcatcgaaccgctttcttgcggcgttccgacgatattcggcttttcgacctacaatttttccgaagcctgtcggcacgccttggcatcgggggcggcggttcaagtcgaatcggcggatgcgtggcgtgaagccgttgaaaaaaccttatctgccgaggggggcggaatgcagatgcaggcgcgcgtggacggctttatcgcacaacatcgcggagcgggcgcgagaattgccaaggcggtacgagaagcggtatgcggacatcgggggcgatag

SEQ ID NO: 62426 - DNA, 897 bp, Neisseria meningitidis
atggagtctgaaaacattatttccgccgccgacaaagcgcgtatccttgccgaagcgctgccttacatccgccggttttccggttcggtcgccgtcatcaagtacggcggcaacgcgatgaccgaacctgccttgaaagaagggtttgcccgcgatgtcgtgctgctgaagctggtcggcattcatcccgtcatcgttcacggcggcgggccgcagatcaatgcgatgcttgaaaaagtcggcaaaaagggtgagtttgtccaaggaatgcgcgttaccgacaaagaggcgatggatattgtcgaaatggtgttgggcgggcatgtcaataaagaaatcgtgtcgatgattaacacatatggcggacacgcggtcggcgtaagcggacgcgacgaccatttcattaaggcgaagaaacttttgatcgatacgcccgaacagaatggcgtggacatcggacaggtcggtacggtggaaagcatcgataccggtttggttaaagggctgatagaacgtggctgcattcccgtcgtcgcccccgtcggcgtaggtgaaaaaggcgaagcgttcaacatcaacgccgatttggtagcaggcaaattggcggaagaattgaacgccgaaaaactcttgatgatgacgaatatcgccggtgtgatggacaaaacgggcaatctgctgaccaaactcacgccgaaacggattgatgaactgattgccgacggcacgctgtatggcggtatgctgccgaaaatcgcttctgcggtcgaagccgccgtcaacggcgtgaaagccacgcacatcatcgacggcagggtgcccaacgcgcttttgctggaaatctttaccgatgccggtatcggttcgatgattttgggcggtggggaagatgcctga

SEQ ID NO: 62427 - DNA, 621 bp, Neisseria meningitidis
atgaattcgaccgcaagtaaaaccctgaaaggattgtcgctggtgtttttcgcctctggattctgcgccctgatttaccaggtcagctggcagaggcttctattcagtcacataggtatcgatttgagttcgattactgtcattatttctgtatttatggtcggcttgggtgtaggtgcgtatttcggtggacgcattgctgaccgttttcctgaaagtatcatccctctgttttgcatcgctgaagcatccatcggtctgttcggtttggtaagcaggggtctgatttccggcttggggcatcttttagttgaggctgatttgcccatcatcgctgctgccaatttcctcttattgctgcttcctacctttatgatgggcgcgaccttgcccttgctgacctgtttttttaaccggaaaatacataatgttggcgagtctatcggtaccttatattttttcaacactttgggtgcggcactcggatcgcttgccgccgccgaatttttctacgtcttttttaccctctcccaaaccattgcgctgacagcctgctttaaccttctgattgctgcttcagtatggctgcgttacagaaaggatggatatagtgaacactaa

SEQ ID NO: 62428 - DNA, 1392 bp, Neisseria meningitidis
atgcaagtgtttttagacaatcccaaagccttttttgaaaccgtcagcggctgggtttggggacctttgatgctgatgctgctggtcggcacgggtattttgctgactgttttattaaaaggtttgcagttcacgatgttgggttatgcgctgaaacaggcgtttatgccgccaaagaagcataaaagcggcgaaggccacgaaggcgatatttcccattttgcggcgttgatgaccgcgctgtccgccaccatcggcacgggtaacatcgccggcgtggcgactgcggtggtaaccggcggcccgggcgcggtattttggatgtggatgaccgccattttcggcatggccaccaaatacggcgaaggcgtgttggcggtgaaataccgcgtcaacaattccaaaggcgaaatgtccggcggcccgatgtattacatcgaaaaaggcttgggcaaaaactggaaatggatggccgtcgcgtttgcgctgttcggcacattcgcttccttcggtatcggcagctcggtgcagtccaactcggttgcacaggcggtgcaaaccagcttcggtatcgaacctgcctataccggcattacgttgaccgttctgactgccgttgtcgttttaggtggtattaaaggcatcgccaaagccgcttctttcatcgtgcctgctatggcggtgttttatgtgttgggcggtctttccattatcgcgattaattccgatgcactgatgcctgccgtcaagctgattttctccgatgcgttcagcgcgcaggcagtggcgggcggtgctatcggtacggtcatccgctacggcgtggcgcgcggcgtgttctccaatgaggcaggtatgggttctgcaccgattgccgccgcagccgcgaaaaccgaccatcccgtccgtcaggccttggtttctatgaccggtacgtttttggataccatcgtcgtttgctcgattaccggcatcgtgttggtaatgggactgctcggcgcgggcggcgagtttgtcaaacctgaagtgagcggcgcggcactgacaaccgtcacattccaaaaaatgctgcccggcatcggcggctggattgttaccatcggcctgattttctttgcctactcaaccattttgggctggtgctattacggcgaaaaatgcgcggtgtatgttttcggcgagaaatttgccggtttgtaccgcgtcggttatgtttcttccgttatgctgggtaccgtgttgagccttgatttggtgtggctggcttcggacacattcaacggcttgatggcattgcccaacctgattgcacttttattgatggcgaaagtcatcgtcaatgaaacgcgcgacttcaaacaaaaaatcacaaacggcgaattgccgcattaa

SEQ ID NO: 62429 - DNA, 954 bp, Neisseria meningitidis; identical to SEQ ID NO: 49722

SEQ ID NO: 62430 - DNA, 786 bp, Neisseria meningitidis
atgagcagaatccggcaggcttttgccgctttaaacggtgaaaaggcattgattccttatattacggttggagacccggatattggggcgactttggcaataatgcacagtatggttgcaaacggtgcggatattttagagttgggcgtgccgttttccgatccgatggcggacgggccggtgattcagcgtgcggcggagcgggcgttggcaaacgggatttcgctgcgcgatgtcttggatgtcgtcagaaaattccgtgaaaccgacacgcaaacgccggttgttttgatgggatatttgaaccctgtacataagatgggttatcgggagtttgctcaggaagccgcaaaggcgggtgtggacggcgtgttgacggtggattcccctgtcgaaaccatcgatccgctctatcgcgagctgaaggataacggggtcgactgtattttcctgattgcgccgacgacgacggaagaccgtattaaaaccattgccgagctggcaggcggatttgtctattatgtttcgctcaagggcgtaacgggcgcggcaagtttggatacggatgaggtttcgcgtaaaatagagtatttgcatcagtatatcgatattcccatcggtgtcggtttcggcatcagcaatgcggaaagcgcgcgcaaaatcggccgggttgccgacgcggtcattgtcggcagccggattgtgaaagagattgaaaacaatgcgggcaacgaggctgcggccgtcggtgctttggtcaaagagttgaaggatgccgtgcgctga

SEQ ID NO: 62431 - DNA, 2130 bp, Neisseria meningitidis; identical to SEQ ID NO: 45199

SEQ ID NO: 62432 - DNA, 1185 bp, Neisseria meningitidis
atgaccgaaccgacctcccgccgccgttttctgaaaacctgcaccgccgctgccggcgcggggctgcttcaggcttgcggcacatccgccacatccgttccgccccttccctcttcccattccgttgtgaaagcccgaaccgtgcctctccaaacgccacgccgtcaaagttcggacggcaaccttctgcgcgttgtcgcttcgtcaggatttgccgaagacaccaaccgcgtcaacacagccttaacccgcctttacaatgtcggttttaccgtaaccaaccaacaggcgggcagccgccgtttccaacggtttgccggcacggacacgcaacgtgccgccgatttccaagaggtcgcttccggccgcgtcgccacgcctaaagtgctgatgggcttgcgcggcggttacggtgcggcgcggattctgccgcatatcgattttgcttcgctcggcgcaaggatgcgcgaacacggcacgctgtttttcggattcagcgacgtatgcgccgtccagctggcattgttggcaaaaggcaatatgatgagttttgccggcccgatggcttatagcgattttggcaaacccgcccccggtgcgtttacgatggatgcctttatcaagggtgcaacccaaaaccgcctgaccgttgatgttccttatatccaacgcgccgatgtcgaaaccgaaggcatattgtggggcggcaacttaagcgtcctcgcctcgctcgccggcacgccttatatgcccgacatcgacggcggcattttgttcctcgaagatgtcggcgaacagccctaccgcatcgaacgtatgctcaatacgctgtatctttcgggtattttgaagaaacagcgcgccatcgtgttcggcaatttccgtatggaaaaaattcgagatgtctatgatccgtcttatgatttttctgccgttgccaaccatgtttcgcgcacggcgaaaatccccgtgctgacgggcttcccgttcggacacattgccgacaaaatcactttccctctaggcgcgcacgcccgaatccgtatgaacggaaacagcggttattcggtcgcgtttgaaggctacccgacactcgatgcgtccgccctgactttggataccctgctcccgccgccggatttgcctatcttccccgaaagcggtgttgccgatatttcggaataa

SEQ ID NO: 62433 - DNA, 1371 bp, Neisseria meningitidis
atgttagacaatttaaccggccgcttcagcaatgtcttcaaaaacatccgggggcaggtcaaactgaccgaagacaatattaaagaggccttgcgcgaagtccgcctcgccctgcttgaggcggatgtcgccctgcctgtcgtcaaagagttcgtcaacaacgtcaaagaaaaggccctcggtcaggaagtggcgggcagcctgacgcctgaccaagcctttatcggcgtggtcaaccaagccttgaccgaactgatgggcagggaaaacaaaacgctggatttgtcggtttcaccgcctgccattgttttgatggccggtttgcagggtgccggtaagacaacaaccgtcggcaaactcgcccgcctgctgaaaaacgatcagaagaaaaaagttttggtggtatccgccgacgtttaccgccctgccgcgattgaacaactgcgtctgttggccgaacaggtcggcgtggactttttcccatccgataccaaccaaaaaccggttgagattgcaactgccgccgtcgattacgccaaaaaacatttttacgatgtattgatggtcgataccgccggccgtttggcaatcgatgaggagatgatgaacgaaatcaaagcccttcacgcggcggttaacccggtggaaactttgttcgtcatcgatgcgatgctgggtcaggatgcggtgaacactgctcaggcatttaatgaagccctgccgctgaccggtgtcgtattgaccaagatggacggcgactcgcgcggcggtgcggcattgtccgtacgccatgtgaccggcaaaccgattaaatttatcggcgtcggcgagaaaatcaacggcctcgaacctttccaccccgaccgtcttgccagccgtatcctcggcatgggcgacgtattgaccctgattgaagacgttcaaaaaggtatagacgaagaagccgccgccaaaatggcgaaaaagctgcacaaaggcaaaggcttcgacctcaacgactttaaagaacaaatccaacagatgcgcaatatgggcggtttggaaaacctgatgtcgaaaatgccgggcgaactgggtcaaatatcgaaacaaattcccgaaggcacggctgaaaaagcgatgggcaaagtagaagccatcatcaactcgatgacccctaaagaacgcgccaaccctgccctgctcaaagccggccgcaaacgccgtattgcaatgggtgcgggcacaaccgtgcaggaagtgaacaaattgctcaaacagtttgaacaaatgcaacagatgatgaagatgttcagcggcaacggcttgggcaaactgatgcgtatggcgaaaggaatgagggggataaaagggatgttcccgggtttgtaa

SEQ ID NO: 62434 - DNA, 1257 bp, Neisseria meningitidis
atgaacgccgcacaactcgaccataccgccaaagttttggctgaaatgctgactttcaaacagccttccgatgccgtcctctccgcctatttccgcgaacacaaaaagctcggccgccaagaccgccacgaaatcgccgaaaccgcctttgccgcgctgcgccactatcaaaaaatcagtaccgccctgcgccgtccgcacgcgcagccgcgcaaagccgcactcgccgcactggttctcggcagaagcaccaacatcagccaaatcaaagacctgcttgatgaagaagaaatagagtttctcggcaatttgaaagcccgtaaaaccgagttttcagacggcctgaataccgccgcagaattgccgcaatggctggtcgaacaactgcagcagcattggcgcgaagaagaaatcctcgccttcggccgcagcatcaaccaagctgcgccgctcgatatacgcgtcaataccttgaaaggcaaacgcgataaagtgctgccattgttgcaagccgaaagtgccgatgcagaggcaacgccttattcgccttggggcatccgcctgaaaaacaaaatcgcgcttaacaaacacgagctgtttttggacggtacgctggaagttcaagacgaaggcagccagctgcttgctttattggtgggcgcaaaacgcggcgaaatcattgtcgatttctgtgccggtgccggcggcaaaaccttggctgtcggtgcgcaaatggccaataaaggcagaatctacgccttcgacatcgccgaaaaacgccttgccaacctcaaaccgcgtatgacccgcgccggactgaccaatatccaccccgaacgcatcagcagcgaacacgacagccgtatcgcccgactggcaggcaaagccgaccgtgtgttggtggacgcgccctgctccggtttgggtactttacgccgcaatcccgacctcaaataccgccaatctgccgagaccgtggccaaccttttggaacagcaacacagcatcctcgatgctgcctccaaactggtaaaaccgcaaggccgcttggtttacgccacttgcagcatcctgcccgaagaaaacgagctgcaagtcgaacgtttcctgtccgaacatcccgaatttgaacccgtcaactgcgtcgaactgctgcaaaacctgaagattgatttggataccggaaaatacctgcgcctcgattcggcaaagcaccaaaccgacggcttcttcgccgccgtattgcaacgcaaataa

SEQ ID NO: 62435 - DNA, 1017 bp, Neisseria meningitidis
atgtatcggaaactcattgcgctgccgtttgccctgctgcttgccgcttgcggcagggaagaaccgcccaaggcattggaatgcgccaaccccgccgtgttgcaaggcatacgcggcaatattcaggaaacgctcacgcaggaagcgcgttctttcgcgcacgaagacggcaggcagtttgtcgatgccgacaaaattatcgccgccgcctacggtttggcgttttctttggaacacgcttcggaaacgcaggaaggcgggcgcacgttctgtatcgccgatttgaacattaccgtgccgtctgaaacgcttgccgatgccaaggcaaacagccccctgctgtacggggaaaccgctttgtcggatattgtgcggcagaagacgggcggcaatgtcgagtttaaagacggcgtattgacggcagccgtccgcttcctacccgtcaaagacggtcagacggcatttgtcgacaacacggtcggtatggcggcgcaaacgctgtctgccgcgttgctgccttacggcgtgaagagcatcgtgatgatagacggcaaggcggtgaaaaaagaagacgcggtcaggattttgagcggaaaagcccgtgaagaagaaccgtccaaacccacgcccgaagacattttggaacacaatgccgccggcggcgatgcgggcgtaccccaagccgcagaaggcgcgcccgaaccggaaatcctgcatcccgacgacggcgagcgtgccgataccgttaccgtatcacggggcgaagtggaagaggcgcgcgtacaaaaccagcgtgcggaatccgaaattaccaaactttggggaggactcgataccgacgtgcaaaaagagttggtcggcgaacaacgcaagtgggcgcaggaaaaaatcagcaactgccgacaagccgccgcgcaggcagaccggcaggaatacgccgaatacctcaagctgcaatgcgacacgcggatgacgcgcgaacggatacagtatcttcgcggctattccatcgattag

SEQ ID NO: 62436 - DNA, 672 bp, Neisseria meningitidis
atgacgacacaagacgaactcaagcgcatcgccgccgaaaaagcagtcgaattcgtacccgaaaacgaatacatcggcatcggtaccggctcgaccatcaactttttcatcgaagccttgggtaagagcggcaaaaaaatcaaaggcgcggtatctacttccaaaaaatccagtgaactgcttgcccaatatgatattcccgtcgtttccctgaacgaagtatcggggttggcggtctatattgacggtgcggatgaagtgaaccacgccctgcaaatgattaaaggcggcggcggcgcacacctcaacgaaaaaatcgtcgccagcgcatcagaaaaattcgtctgcattgcggacgaaagcaaatatgtttcacgtttgggcaaattccctctgcccgtggaagtcgtcgaaagcgcgcgttcccttgtttcgcgcaaactgctcgctatgggcggacagcccgaactgcgtatcggctacaccacgttttacggcaaccaaatcgtcgatgtccacggcttgaatatcgacaaaccgctgacgatggaagacgaaatcaacaaaatcaccggcgtactcgaaaacggaatattcgcccgcgatgccgccgatgtgttgattttggggacggaagagggtgcgaaagtcatctatccctgccaagggtaa

SEQ ID NO: 62437 - DNA, 441 bp, Neisseria meningitidis
atgatgcagactttccgaaaaatcagcctgtatgccgcaaccttgtggctcggtatgcagattatggcgggttatatcgtcgcgccggtgctgttcaaaatgctgcccaaaatgcaggcgggcgaaattgccagcgtattgttcgacatcctctcttggagcgggcttgccgtttggggcgcggtactggctgccgcctttgccgccctaacccggcggcaaaccgccctgctgctttttttattgtccgcccttgccgccaaccgattcttgattacacccgttatcgaggcgctgaaatacgggcatgagaattggctgttgtcgtttgtaggcggatccttcggaatgtggcacggcatttccagtattgtttttatggcaaccgccctactttcagcagttttaagttggcagctttccggcaaagaggccgtctga

SEQ ID NO: 62438 - DNA, 1023 bp, Neisseria meningitidis; identical to SEQ ID NO: 38224

SEQ ID NO: 62439 - DNA, 606 bp, Neisseria meningitidis
atgacccgtcaatctctgcaacaggctgccgaaagccgccgttccatttattcgttaaataaaaatctgcccgtcggcaaagatgaagttgtccaaatcgtcgaacacgccgttttgcacacaccttcttcgttcaattcccaatctgcccgcgtggtcgtgctgtttggcgaagagcatgataaggtgtggcaatttgtcgaagacgcgctgcgtgccgccgtgcctgccgacagttttgaaccgaccgcgcaaaaattgaacctgtttaaggcgggtgcggcaaccattttgttttatgaagatcaaaatgtcgtcaaaggtttgcaggagcagttccctgcttatgccgccaactttcccgtttgggcggaccaggcgaacgcgatggtgcagtatgccgtttggacgacacttgccgcggtcggcgtaggtgcaaacctgcaacattacaatcccttgcccgatgcggcgattgccaaagcgtggaatatccccgaaaactggttgttgcgcgcgcaaatggttatcggcggtattgaaggggcggcaggtgaaaagacctttgaaccagttgcagaacgtttgaaagtgttcggcgcataa

SEQ ID NO: 62440 - DNA, 1011 bp, Neisseria meningitidis
atgaaccacaccgttaccctgcccgaccaaaccacctttgccgccaacgacggcgaaaccgttttggccgctgccgcccgtcaaaacctcaatctgccccattcctgcaaaagcggcgtatgcgggcaatgcaaagccgaactggtcagcggcgatattcaaatgggcggacactcggaacaggctttatccgaagcagaaaaagcgcaaggcaagattttgatgtgctgcaccactgcgcaaagcgatatcagcatcaacatccccggctacaaagccgatgccctacccgtccgcactctgcccgcacgcatcgaaaatattattttcaaacacgatgtcgccctcctgaaacttgccctgcccaaagccccgccgtttgccttctacgctgggcaatacattgatttactgctgccgggcaacgtcagccgcagctactccatcgccaatccgcccgaccaagaaggcattttggaactgcacatccgcaggcgcgaaaacggtgtctgttcggaaatgattttcggcagcgaacccaaagtcaaagaaaaaggcatcgtccgcattaaaggcccgctcggttcgtttaccttgcaggaagacagcggcaaacccgttatcctgctggcaaccggcacaggctacgcccccatccgcagcatcctgctcgaccttatccgccaagacagcggccgcgccgtccatttctactggggcgcgcgtcatcaagatgatttgtatgccctcgaagaagcacaagggttggcatgccgtctgaaaaacgcctgcttcacccccgtattgtcccgccccggagagggctggcagggaagaaaaggtcacgtacaagacatcgcggcacaagaccatcccgacctgtcggaatacgaagtatttgcctgcggctctccggctatgaccgaacaagcaaagaatctgtttgtgcaacagcataagctgccggaaaacttgtttttctccgacgcattcacgccgtccgcatcataa

SEQ ID NO: 62441 - DNA, 408 bp, Neisseria meningitidis; identical to SEQ ID NO: 49698

SEQ ID NO: 62442 - DNA, 762 bp, Neisseria meningitidis; identical to SEQ ID NO: 51423

SEQ ID NO: 62443 - DNA, 564 bp, Neisseria meningitidis
ttgtcattgggcggcgttcggctcgaaccgttggatgtgcatcatgaaacgggtttgcgcgaggcggtttgcgatggggaagtttggaagctgggagtaacgtccgcgccccatccggatagggtggcagactatatcgggacagcattggcaacgcgtttggcgtttgcggttgtcgatgaagaggcgggcagggtggtcgggacaacggcgtattatcattttgaaccgcagattccgcgtttggatatcggattcacatggtatgcggcatcggcacggcggacacggataaacacctgttgcaaaatcatgctgttggattacgcatttgatgttttggcttgccgttgcgtgggatggcgcacggatattctgaaccttgcctcgcaacgtgccatcgaacggctgggtgcggaaaaagacggcgtgctgcgtatgcatatgctccgtaaagacggcagtgtgcgcgatacggtcgtgtacagtatgctgagggaagattggtgcaaaaacagggaaatcctgaccggcaggttggcagggtatggcgtgcaggtgtga

SEQ ID NO: 62444 - DNA, 1197 bp, Neisseria meningitidis
atgtcccaaaaattgatcttggttttgaactgcggcagctcgtccctcaaaggcgcggtcctggataacggcagcggcgaagtcctgctcagctgccttgccgaaaaactcaacctgcccgatgcctacatcacattcaaagtaaacggcgaaaaacacaaagtcgatctgtccgcacatcccgaccacaccggcgcggtcgaagccctgatggaagaactcaaagcccacggcctcgacagccgcatcggcgccatcggccaccgcgtcgtcagcggcggcgaactgtacagcgaatccatcctcgttgacgacgaagtcattgccggcatcgaaaaatgcatcccgctcgcccccctgcacaaccccgcccacctcttgggcctgcgtgccgcgcaaagcattttcaaaggcctgcccaacgtcgtcgtattcgatacctccttccaccaaaccatgcccgaagtcgcctacaaatacgccgttccgcaggagttgtatgaaaaatacggcctgcgccgttacggcgcgcacggtaccagctaccgcttcgtcgccgacgaaaccgcgcgcttcctcggcaaagacaaaaaagacctgcgtatggtcattgcccacttgggcaacggcgcgtccatcaccgccgtcgccaacggcgaatcgcgcgacaccagtatgggcctgaccccgctggaagggctggtaatgggtacgcgcagcggcgacatcgatccttccgtattcggcttcctcgccgaaaacgccaatatgaccatcgcccaaatcactgaaatgctgaataaaaaatccggtctgctcggcatttccggcctgtccaacgactgccgcaccattgaagaagaagccgccaaggggcataaaggcgcgaaattggccttggatatgtttatctaccgccttgccaaatacatcggcagtatggcggttgccgcaggcggtttggacgcactggtctttaccggcggcatcggcgaaaactccgacatcatccgcgaacgcgtgatcggctacttgggcttcctcggtctgaacatcgaccaagaagccaacctgaaagcccgcttcggcaacgccggcgtgattaccactgccgacagcaaagccgttgccgtggtcattccgaccaacgaagagctgatgattgcccacgacactgcccgtttgagcggtctgtaa

SEQ ID NO: 62445 - DNA, 2889 bp, Neisseria meningitidis
atgagtaacacaaccgtagaacaatttgccgccgagctgaaacgccccgtcgaagacctgttgaaacagttgaaagaagccggcgtcagcaaaaacagcggcagcgattccctgacgctggacgacaaacagcttctgaacgcctacctgaccaagaaaaacggcagcaacggcggcaccatcagcatccgccgcaccaaaaccgaagtcagcaccgttgacggcgtaaaagtcgaaacacgcaaacgcggacgcactgtcaacattccttctgccgaagaattggcagcacaggtaaaagccgcccaaacccaagccgcacctgtccggccggagcagacggcagaagacgcggcaaaagcccgagccgaagctgccgcacgtgcagaagcccgtgccaaggcagaagcggaagcggcaaaactgaaagcggcaaaagcaggcaacaaagccaaacctgccgcgcagaaacccaccgaagcaaaagccgaaaccgcacccgttgcggcggaaaccaaacccgccgaagaaagcaaagcggaaaaagcccaagccgacaaaatgccgtctaaaaaacccgccgagcccaaagaaaaagccgccaagccgaaacacgagcgaaacggcaaaggcaaagatgccaaaaaaccggcgaaacctgccgcacctgccgtgccgcaacccgtggtcagcgcggaagaacaggcgcaacgcgatgaagaagcacgccgtgccgccgcacttcgcgcccaccaggaagccctgttgaaagagaaacaggaacgccaggcacgccgcgaagccatgaaacaacaggcagaacaacaggcaaaagccgcacaggaagccaaaaacggcagacagcgtcccgccaaacctgccgagaaaccgcaggcagccgcgccggccgtcgaaaacaaacctgtcaatccggcaaaagcgaaaaaagaagaccgccgcaaccgcgatgacgaaggtcaaggccgcaacgccaaaggcaaaggcggaaaaggcggacgcgaccgcaacaatgcacgcaatggcgacgacgagcgcgtacgcggcggcaaaaaaggcaaaaaactcaaactcgagccgaaccaacacgccttccaagcaccgaccgaacctgtcgtacacgaagttttggtgcctgaaaccattaccgttgccgacttggcacacaaaatggcagtcaaaggcgtggaagtggtcaaagccctgatgaagatgggcatgatggttaccatcaaccaatccatcgaccaagacaccgccctgattgtcgtcgaagaactcggacacatcggcaaacccgccgcagcggacgatcccgaagccttcttggacgagggcgcagaagcagtggaagccgaagcattgccgcgtccgcccgttgttaccgtcatgggacacgtcgaccacggcaaaacctcgctgctggactacatccgccgcgccaaagtggtacagggcgaagcgggcggcattacgcagcacatcggcgcgtaccacgtcaaaacgccgcgcggcgtgattaccttcttggacaccccgggtcacgaagcctttaccgctatgcgcgcacgcggtgcgaaagcaaccgacatcgtgattcttatggtcgccgccgacgacggcgtgatgccgcaaaccatcgaagcgattgcccacgccaaagcggcaggcgtaccgatggtggttgccgtcaacaaaatcgataaagaagccgccaacccagagcgtatccgccaagagctgaccgcacacgaagtcgtgcctgacgaatggggcggcgatgtacagtttatcgacgtttccgctaaaaaaggcctgaacatcgatgcattgctcgaggcagtcttgctcgaagccgaagttttggaactgaccgcacctgtcgatgcgcccgccaaaggcatcatcgtcgaggcgcgcttggacaaaggccgcggcgcggttgccacattgctggttcaaagcggtacgctgaaaaaaggcgacatgctgctggccggtacggcattcggcaaaatccgcgcgatggtcgatgaaaacggcaaatccattaccgaagccggcccgtccatcccggtcgaaatcctcggcttgtccgacgtacccaatgcgggcgaagacgcgatggtattggcggacgagaaaaaagcgcgcgaaatcgccctcttccgccaaggcaaataccgcgacgtgcgccttgccaaacagcaggcggcgaagctggaaaatatgttcaacaatatgggcgaaacccaggcccaatctttgtcggtcatcatcaaggcagacgtgcagggctcttacgaggctttggcgggcagcctgaaaaaactgtccacagacgaagtgaaagtgaacgtgttgcacagcggcgtgggcggcattaccgaatcggatgtcaaccttgccatcgcttcgggcgcattcattatcggctttaacgtgcgtgcagatgcctcttcgcgcaaacttgccgaaaatgaaaacgtggaaatccgctactacaacatcatctacgatgccatcgacgacgtgaaggcggcgatgagcggtatgctttccccggaagagaaagaacaggttaccggtacggtcgaaatccgtcaggtcatctccgtttccaaagtcggcaacattgcaggctgtatggttaccgacggcgtggtcaaacgcgattcccatgtccgcctcatccgcaacaacgtggttatccacacgggcgaactggcttcgttgaaacgctataaagacgatgtaaaagaagtccgcatgggcttcgagtgcggtctgatgctcaaaggctacaacgaaatcatggaaggcgaccaactggaatgcttcgacatcgtcgaagttgcccgcagcctgtaa

SEQ ID NO: 62446 - DNA, 687 bp, Neisseria meningitidis
atgacggtgttgcaagaacgttattgtgaggtgtccgaccgtatcggaaaattggttctgcaggcgggaaggaagccgcattccgtcagcctgattgccgtcggtaagactttcccttcagacggcatccgcgaagtttacgccgccggacagcgtgatttcggcgagaactatattcaggagtggtacggcaaaacggaagagttggcggatttgaccgacatcgtgtggcacgtcatcggcgatgtgcagtccaacaaaaccaagtttgtcgccgaacgcgcgcattgggtgcataccgtatgccgtctgaaaaccgctgtccggttgagcgaacagcgtccttcctcaatgccgcccttgcaggtgtgtatcgaggtgaatattgcgggcgaggcggtgaagcacggtgtcgcgcccgaagaagcagtcgcgcttgctgtggaagtggcgaagctgccgaatatcgtcgtacgcggactgatgtgtgttgccaaagccaacagcagtgaaacggagttgaaggtgcaatttcaaacgatgcggaaactgcttgccgacctcaatacggctggcgttaaggctgacgtgctgtctatggggatgtcggacgatatgcctgccgccattgagtgcggtgcgacacacgtccgtatcggcagcgcgattttcgggaaaaggggctga

SEQ ID NO: 62447 - DNA, 999 bp, Neisseria meningitidis
atgtccgaaaacaaacaaaacgaagtcctgagcggttacgaacaactcaaacggcgcaaccgccgccgcctcgtaacggcaagttgcctggttgccgcctcctgcatcctgctggcagccgccctcagttccggccctgccgaacagactgccggcgaaacaagcggcgtagaaaacaaagcggcaggtgcggcacaaacccctgccttgaaatccgccgccgacaaaccgcaggacttggcaggcgaagacaagccttctgccgccgacagcgaaatcagcgagcctgaaaacgtaggcgcgccgctggtgctgattaacgaccgcctcgaagacagcaacatcaaaggtttggaagcatccgagaaactgcaacaggcagaaaccgccaaaaccgcaccgaagcaggcaaaacaacgcgctgccgaaaaagtgccggcaactgccgacagtacggatacggtagcggttgaaaaaccgaaacgcactgccgaaacaaaaccgcaaaaagcggaacgcactgccaaagccaagcccaaagccaaagaaaccaaaaccgccgaaaaagttgccgacaaaccgaaaactgccgccgaaaaaaccaaaccggatacggcaaaatccgacagcgcggtaaaagaagcgaaaaaagccgacaaggctgaaagcagaaaaacagccgaaaaagaccgttcggacggcaaaaaacacgaaacggcacaaaaaaccgacaaagcggacaagaccaaaaccgccgagaaggaaaaatccggtaaaaaagccgccattcaggcaggttatgccgaaaaagaacgcgccttaagcctccagcgcaaaatgaaggcggtgggtatcgattcgaccatcaccgaaattatgaccgacaacggcaaagtttaccgcgtcaaatcaagcaactataaaaacgcaagggatgccgaacgcgatttgaacaaattgcgtgtacacggtatcgccggtcaggtaacgaatgaataa

SEQ ID NO: 62448 - DNA, 906 bp, Neisseria meningitidis
atggacattctggacaaactggtcgatttcgcccaattgacgggcagtgtggatgtgcagtgccttttgggcggacaatggtcggtacggcatgaaaccttgcaacgcgaaggactggtacacattgttacatcgggcagcggctatctctgcatcgacggcgaaacttccccgcgtccggtcagtacaggggatattgtatttttcccgcgcggcttgggtcatgtgttgagccacgacggaaaatgcggagaaagtttacaaccggatatgcggcagcacggtgcgtttacggtcaagcagtgcggcaacggacaggatatgagcctgttttgcgcccgtttccgctacgacacccacgccgatttgatgaacgggctgcctgaaaccgtttttctgaacattgcccatccgagtttacagtatgtggtttcaatgctgcaactggaaagcaaaaaacctttgacggggacggtttccatggtcaacgcattgtcgtccgtcctgctggtgcttatcctgcgcgcctatctcgaacaggataaggatgtcgaactctcgggcgtattgaaaggttggcaggacaaacgtttgggacatttaatccaaaaggtgatagacaaaccggaagacgaatggaatgtcgacaaaatggtggcggctgccaatatgtcgcgcgcgcaactgatgcgccgtttcaaaagccgggtcggactcagcccgcacgcctttgtgaaccatatccgcctgcaaaaaggcgcgttgctgctgaaaaaaaacccagattcggttttgtcggtcgcactgtcggtaggctttcagtcggaaacgcacttcggcaaggcgttcaaacggcaatatcacgtttcgccgggtcaataccggaaagaaggcgggcaaaaataa

SEQ ID NO: 62449 - DNA, 231 bp, Neisseria meningitidis
atggctcgtcaatcattcaaacgtagaaaattctgccgtttcacggctgaaaaaattcaagaagtcgattacaaacaagttgatttgctgaaagactttatctctgaaaacggtaaaatcattcctgcccgcatcacaggaacgaaggcattctaccaacgccaattggctgttgccgtaaaacgcgcgcgcttcttggctctgctgccttacaccgaccaacacaaataa

SEQ ID NO: 62450 - DNA, 624 bp, Neisseria meningitidis
atgaaacgattgactttattggcctttgttttggctgccggtgcggtttccgcatctcccaaagcagacgtggaaaaaggcaaacaggttgccgcaacggtttgtgcggcttgccatgcagcagacggtaacagcggcattgcgatgtatccgcgtttggcggcacagcatactgcttacatctatcatcaaactatcggcatccgcgacggtaaacgcacccacggttcggcagctgtgatgaaaccggtggtaatgaatttgagcgatcaggatattttgaacgtatccgcattctatgccaaacagcagcccaaatccggtgaagccaatcctaaggaaaatcccgaattgggtgcgaaaatctatcgcggcggtttgagcgataaaaaagtgccggcgtgtatgtcctgccacggtccgagcggtgcgggtatgccgggaggcggaagcgaaattcaggcttatccgcgtttgggcggtcagcatcaggcatatattgttgaacagatgaatgcctacaagtccggtcagcgtaaaaataccatcatggaagatattgcaaaccgtatgtctgaagaagatttgaaagcggtcgccaactttatccaaggtttgcgttaa

SEQ ID NO: 62451 - DNA, 126 bp, Neisseria meningitidis; identical to SEQ ID NO: 42720

SEQ ID NO: 62452 - DNA, 861 bp, Neisseria meningitidis
atggcaaaagtaaaaggcggattggggcgcggtttggattcgctgctcgccaacggcgcagacaacagcagcggcgaccgattgaccacggttgcggttaaagatatccggcccggccgctatcaggcgcgtgttcaaatcgatgacgaagccttgcaggagctggcagattcgattaaggcgcaaggcgtgatacagcccgtcatcgtgcgcgaacacggactgtcccgatacgaactgattgcgggggagcggcgttggcgtgccgcacagattgccggcctgaccgaaatccccgccgttatcaaaaccatcagcgacgaaaccgcgttggcaatgggtttgatcgaaaacctccagcgcgaaaacctcaaccccatcgaagaagcacaaggcttgaaacgccttgccgacgagttcgggctgacccacgaaaccatcgcccaagccgtcggtaaaagccgaagcgcgatttccaacagcctgcgccttttaagcctgcccgaacccgtgcaggaaatgctttaccaacgccgcctcgaaatggggcacgcccgcgcactgctgaccctgcccgtcgtcgaacagctcgagttggcgcaaaaggccgtcaaaaacggctggtcggttcgcgaagtcgagcgccgcagccaagccgcccttcaaaacaaacgtcccgagcccaaaaaaactgccgccgccgacatcggccgcctgaatgatttgctgactgaaaaactgggtgtcaacgccgaaatcaaaaccgccaaccataaaaaaggcagaatcatcctgcatttcgacacgcccgaaaccttcgaccatatcttgaagcagttgggcatagattaccgaccttaa

SEQ ID NO: 62453 - DNA, 471 bp, Neisseria meningitidis
atgtacgatgtcaatacccacgatgtccgccgctttttcgcccgcgtgtggcagcagcggctcaatccgctgcaactgagcgcactggaacagaaagccctccgcattatcgaagcccatcccgaataccaccgttatctcgaacgcatcgaagaccatctggacaccgactggctacccgaaaacggcgaaagcaaccccttcctgcatatgtcgctgcatttgtccgtccaagaacaggcgggcatagaccagccgcacggcatacgcgcaatccacgacaccctgtgcgccaaacgcggctggctggaagccgaacacgaaatgatggaggcactggcggaaacactgtggacggcgcaacgctacggcaccggtttggatgtcaatttctacatgacccgactgcgcaaactcatcggcttgggtgcagaagatcaagccaggttgaacccgcatgaaatcgcctga

SEQ ID NO: 62454 - DNA, 5928 bp, Neisseria meningitidis
atgaataaaggtttacatcgcattatctttagtaaaaagcacagcaccatggttgcagtagccgaaactgccaacagccagggcaaaggtaaacaggcaggcagttcggtttctgtttcactgaaaacttcaggcgacctttgcggcaaactcaaaaccacccttaaaaccttggtctgctctttggtttccctgagtatggtattgcctgcccatgcccaaattaccaccgacaaatcagcacctaaaaaccagcaggtcgttatccttaaaaccaacactggtgcccccttggtgaatatccaaactccgaatggacgcggattgagccacaaccgctatacgcagtttgatgttgacaacaaaggggcagtgttaaacaacgaccgtaacaataatccgtttctggtcaaaggcagtgcgcaattgattttgaacgaggtacgcggtacggctagcaaactcaacggcatcgttaccgtaggcggtcaaaaggccgatgtgattatcgccaaccccaacggcattaccgtgaacggcggcggctttaaaaacgtcggccgcggtatcttaaccaccggtacgcctcaaatcggcaaagacggtgccttgacgggatttgacgtgcgccaaggcacattgaccgtcggtacgtcaggttggaacgacaaaggcggagccgattacaccgaagtgcttgcccgtgcagttgctttgcaggggaaattacagggtaaaaacctggcggtttctatcggtcctcagaaagtagattacgccagcggcgaaatcagtgcaggtacggcagcgggtacgaaaccgactattgcccttgatactgccgcactgggcggtatgtacgcagacagcatcacactgattgccaatgaaaaaggcgtaggcgtcaaaaatgccggcacactcgaagcggccaagcaattgattgtgacttcgtcaggccgcattgaaaacagcggccgcatcgccaccactgccgacggcaccgaagcttcaccgacttatctctccatcgaaaccaccgaaaaaggagcggcaggcacatttatctccaatggtggtcggatcgagagcaaaggcttattggttattgagacgggagaagatatcagcttgcgtaacggagccgtggtgcagaataacggcagtcgcccagctaccacggtattaaatgctggtcataatttggtgattgagagtaaaactaatgtgaacaatgccaaaggctcggctaatctgtcggccggcggtcgtactacgatcaatgatgctactattcaagcgggcagttccgtgtacagctccaccaaaggcgatactgaattgggtgaaaatacccgtattattgctgaaaacgtaaccgtattgtccaacggcagtattggcagtgctgctgtaattgaggctaaagacactgcacacattgaagcgggtaaaccgctttctttagagacttcaaacgttgcttctaacatccgtttgaacaacggtagcattaaaggcggaaagcaggtggtattgatggctgatgacgacattcaggcaaaagcctcccacctgaatgcgtccggcaatctgtatgttcatacaggtaaagatctgaatttgaatgttgataaagatttgtctgccgccagcatccatttgaaatcggataacgctgcccatattaccggcaccagtaaaaccctcactgcctcaaaagacatgggtgtggaggcaggctcgctgaatgttaccaataccaatctgcgtaccaactcgggtaatctgcacattcaggcagccaaaggcaatattcagcttcgcaataccaagctgaacgcagccaaggctctcgaaaccaccgcattgcagggcaatatcgtttcagacggccttcatgctgtttctgcagacggtcatgtatccttattggccaacggtaatgccgactttaccggtcacaataccctgacagccaaggccgatgtcaatgcaggatcggttggtaaaggccgtctgaaagcagacaataccaatatcacttcatcttcaggagatattacgttggttgccggcaacggtattcagcttggtgacggaaaacaacgcaattcaatcaacggaaaacacatcagcatcaaaaacaacggtggtaatgccgacttaaaaaaccttaacgtccatgccaaaagcggggcattgaacattcattccgaccgggcattgagcatagaaaataccaagctggagtctacccataatacgcatcttaatgcacaacacgagcgggtaacgctcaaccaagtagatgcctacgcacaccgtcatctaagcattaccggcagccagatttggcaaaacgacaaactgccttctgccaacaagctggtggctaacggtgtattggcactcaatgcgcgctattcccaaattgccgacaacaccacgctgagagcgggtgcaatcaaccttactgccggtaccgccctagtcaagcgcggcaacatcaattggagtaccgtttcgaccaaaactttggaagataatgccgaattaaaaccattggccggacggctgaatattgaagcaggtagcggcacattaaccatcgaacctgccaaccgcatcagtgcgcataccgacctgagcatcaaaacaggcggaaaattgctgttgtctgcaaaaggaggaaatgcaggtgcgcctagtgctcaagtttcctcattggaagcaaaaggcaatatccgtctggttacaggagaaacagatttaagaggttctaaaattacagcaggtaaaaacttggttgtcgccaccaccaaaggcaagttgaatatcgaagccgtaaacaactcattcagcaattattttcctacacaaaaagcggctgaactcaaccaaaaatccaaagaattggaacagcagattgcgcagttgaaaaaaagctcgcctaagagcaagctgattccaaccttgcaagaagaacgcgaccgtctcgctttctatattcaagccatcaacaaggaagttaaaggtaaaaaacccaaaggcaaagaatatctgcaagccaagctttctgcacaaaatattgacttgatttccgcacaaggcatcgaaatcagcggttccgatattaccgcttccaaaaaactgaaccttcacgccgcaggcgtattgccaaaggcagcagattcagagtcggctgctattctgattgacggcataaccgaccaatatgaaattggcaagcccacctacaagagtcactacgacaaagctgctctgaacaagccttcacgtttgaccggacgtacgggggtaagtattcatgcagctgcggcactcgatgatgcacgtattattatcggtgcatccgaaatcaaagctccctcaggcagcatagacatcaaagcccatagtgatattgtactggaggctggacaaaacgatgcctataccttcttaaaaaccaaaggtaaaagcggcaaaatcatcagaaaaaccaagtttaccagcacccgcgaccacctgattatgccagcccccgtcgagctgaccgccaacggtatcacgcttcaggcaggcggcaacatcgaagctaataccacccgcttcaatgcccctgcaggtaaagttaccctggttgcgggtgaagagctgcaactgctggcagaagaaggcatccacaagcacgagttggatgtccaaaaaagccgccgctttatcggcatcaaggtaggtaagagcaattacagtaaaaacgaactgaacgaaaccaaattgcctgtccgcgtcgtcgcccaaactgcagccacccgttcaggctgggataccgtgctcgaaggtaccgaattcaaaaccacgctggccggtgccgacattcaggcaggtgtaggcgaaaaagcccgtgccgatgcgaaaattatcctcaaaggcattgtgaaccgtatccagtcggaagaaaaattagaaaccaactcaaccgtatggcagaaacaggccggacgcggcagcactatcgaaacgctaaaactgcccagcttcgaaagccctactccgcccaaactgtccgcacccggcggctacattgtcgacatccccaaaggcaatctgaaaaccgaaatcgaaaagctggccaaacagcccgaatacgcctacctgaaacagcttcagacggccaagaacgtcgattggaaacaggtgcagctggcctacgacaaatgggactataaacaggaaggcttgaccggagccggtgcagcgattgtggtgattattgtaaccgctctaacttatggatacggagcggctgcagcgggtagcgtaactgccgcaggaagtagtacagccgcagctgcaacaacgacagcggcagcaactaccactgtttctactgcagctgccatgcaaaccgcagctttagcctccttgtatagccaagcagctgtagccatcatcaataataaaggcgatgtaggcaaagcattaaaagatctcggcaccagtgatacggtcaagcagattgttacttccgcactgacggcgggtgcattaaaccagatgggagcagatattgcccaattgaacagcaaggtaagaaccgaactgttcagcagtacgggcaatcaaaccattgccaaccttggaggcagattggccaccaacctcagcaatgcaggtatctcagctggtatcaataccgccgttaacggcggcagcttgaaagacaacttaggcaatgccgcattgggagcattggttaatagcttccaaggggaagccgccagcaaaatcaaaacaaccttcagcgacgattatgttgccaaacagttcgcccacgctttggcgggttgtgttagcggactggtacagggaaaatgtaaagatggggcaattggcgcagcagttggggaaatcgtagctgaatccatacttggcggcagaaaccctgctacactcagcgatgcagaaaagcataaagttatcagttactcgaagattattgcgggcagcgtggcggcactcaacggcggcgatgtgaatactgcggcgaatgcggctgaggtagctgtggtgaataatgctttgaattttgacagcacccctaccaatgcgaaaaagcatcaaccgcagaagcccgacaaaaccgcactggaaaaaatcatccaaagtattatgcctgcacatgcggcaggtgcgatgactaatccgcaggataaggatgctgccatttggataagcaatatccgtaatggcatcacaggcccgattgtgattaccagctatggagtttatgcagcaggttggacagctccgctgatcggtacagctggtaaagcagctatcagcacctgtatggctaatccttctggttgtactgtcatggttacgcaggctgctgaagcgggcgcgggaatcgccacgggtgcggtaacggtaggcaacgcttgggaagctccagtaggagcgttgtcgaaagcgaaggcggctaagcaggctataccaacccagacagttaaagaacttgatggcttactacaagaatcaaaaaatataggtgctgtaaatacacgaattaatatagcgaatagtactactcgatatacaccaatgagacaaacgggacaaccggtatctgctggctttgagcatgttcttgaggggcacttccataggcctattgcgaataaccgttcagtttttaccatctccccaaatgaattgaaggttatacttcaaagtaataaagtagtttcttctcccgtatcgatgactcctgatggccaatatatgcggactgtcgatgtaggaaaagttattggtactacttctattaaagaaggtggacaacccacaactacaattaaagtatttacagataagtcaggaaatttgattactacatacccagtaaaaggaaactaa

SEQ ID NO: 62455 - DNA, 720 bp, Neisseria meningitidis; identical to SEQ ID NO: 44190

SEQ ID NO: 62456 - DNA, 1170 bp, Neisseria meningitidis
atgacagcacataaaatcctgcccgtcctgctttccatcatcttaggcgtttctcacgcaacggccgcatcgcccgcgcccaacaaaccggcggtacacgccgcccccacgttccaaacacccgaaaccctcacagcggcacacatcgttatcgaccttcaaagcagacagactttatccgccaaaaacatcaatacccctgtcgaaccggcggcactaacccaactgatgaccgcatatttggttttcaaaaacatgaaatcgggaaatatccaatctgaagaaaacttaaaaatacccgaatccgcatgggcttcagaaggaagcagaatgtttgtacgtcccggcgatacggtcagcaccgacaaactcttaaaaggcatgattgcactatccgcaaacgatgccgccctaacccttgccggccggctgggcaacggctcgattgaaaattttgtgcaacaaatgaacaaagaagcccgacgcttgggcatgaagaacactgtattcaaaaacccgacaggcttgagtagagaaggacaggtttccaccgccaaagacctcgcccagctgtctgaagcattgatgcgcgactttccggaatattacccgctgttttccatcaaatctttcaaattcaaaaatatagagcaaaacaaccgcaatatccttttatatagggacaacaatgtaaacggtctgaaagccggacacacagaaagcggcggctacaaccttgccgtgtcatactccggcaacggcaggcacatccttgtcatcacattaggttcggaatcggcggaaacacgcgcctcagacaacagcaagctgctgaactgggcattgcaagccttcgatacgcccaaaatatatccgaaaggcaaaaccgttgcccaaatccaaatttccggaggcagcaaaaaaaccgtccgcgcaggcttcctcaaagaagcctacatcactctgccacataaggaagcgaaaatggcagaacagattttggaaaccatacagccgattcccgccccggtaaaaaaagggcaaattttaggaaaaatcaaaatcagacaaaacggatacaccattgccgaaaaagaaatcgtcgcactggaaaatgtagaaaaaagaagccggtggcaaaggctttgggtgcgtctgacagggcagtaa

SEQ ID NO: 62457 - DNA, 492 bp, Neisseria meningitidis; identical to SEQ ID NO: 39850

SEQ ID NO: 62458 - DNA, 843 bp, Neisseria meningitidis
atggatattaaaatcaacgacatcaccctcggcaacaacttgcccttcgtcctattcggcggcatcaacgttttggaaagcttggattccaccctccaaacctgcgcgcattacgtcgaagtaacccgcaaactcggtattccctatatctttaaagcctctttcgacaaggcaaaccgttcctccatccattcttatcgcggcgtaggcttggaagaaggcttaaagatttttgaaaaagtcaaagcagagttcggcatccccgtcattaccgacgtacacgaaccccatcagtgccaacccgtcgccgaagtgtgcgatgtcatccagcttcccgcctttcttgcgcggcagaccgatttggtggccgcaatggcggaaacgggcaatgtcatcaacatcaaaaaacctcagttcctcagcccctctcaaatgaaaaacattgtggaaaaattccacgaagccggcaacgggaaactgattttatgcgaacgcggcagcagcttcggctacgacaacctcgttgtcgatatgctcggtttcggcgtgatgaaacaaacctgcggcaacctgccggttattttcgacgttacccattccctgcaaacccgcgatgccggttctgccgcatccggcggtcgtcgcgcacaggctttggatttggcacttgcaggcatggcaacccgccttgccggcctgttcctcgaatcgcaccccgatccgaaactggcaaaatgcgacggccccagcgcgctgccgctgcaccttttagaagattttttaatccgcatcaaagcattggacgatttaatcaaatcacaaccgattttaacaatcgagtaa

SEQ ID NO: 62459 - DNA, 660 bp, Neisseria meningitidis
atgaccccgcccaaactcatcatcttcgactgggacggcacgcttgccgatacgacccaacccatcatcgacacgatgcgccgcagcttcgccgaatgcggttttccgccgcccgaagcggagcgcgtccgcaggctgatcggatacagcctgcccgaaatcatccgcgccctgctcgaaatgccgtctgaaaccgccgttgccgacatcgcgcgcacttattccgcacattacctcaatcccaacaaccgcaatatgacgctctttcccgatgccctgccctgtctggacaagctcaaagcacaaggatactggcttgccgtcgccacgggcaaagggcgggcgggtttggacaacgccatcagccaaaccgccaccggcagctattggctcgccaccgcctgcgcgggggaacatccctccaaaccctcgcccgaaatggtattcggaatctgcggcgaactgggactcaatccgaaagaagcattggtcgtcggcgatacggcgcacgacctgcatatggcggcaaacgcgggggcggcggcagtcggcgtgaccaccggcgcacattcgcgcgaacagctccgcaccgcaccgcatctcgccgtattggacggtttgtccgaactgcccggttttcttgcacaacattacgcctga

SEQ ID NO: 62460 - DNA, 1464 bp, Neisseria meningitidis
atgcgtatcgtagaaaaagcctatactttcgacgatgttttgttggttcccgcacactcaaccgtgctgccgcgagacgttaaacttcaaaccaagctcacccgcgaaatcacactcaacctccccctgctttccgccgcgatggacactgttaccgaggcgcgcctcgccatttcgatggcacaagaaggcggcatcggcatcatccataaaaacatgccgcccgaaatgcaggcgcgcgccgtttccaaagtgaaacgccacgaaagcggcgtggtcaaagaccccgtaaccgttgcaccgacaacgctcatccgcgaagtcttggaaatgcgtgcgcagcgcaaacgcaaaatgtccggcctgcccgtcgttgaaaacggcaaagtcgtcggcatcgtaaccaaccgcgacctgcgttttgaaaaccgcgtcgatttgcccgtttccgccattatgaccccgcgcgaacgcttggttaccgtccccgaaggcacaagcatagacgaagcgcgcgaactgatgcacacgcataaagtcgaacgcgttttggttctgaacgaaaaagacgaactcaaaggtctgattaccgtcaaagatattttaaaaaccaccgaatttcccaatgccaacaaagactccgagggccgtctgcgcgtcggtgcggcagtcggcaccggcggcgataccgaagagcgcgtcaaagccttggtcgaagccggcgtggacgtgattgtcgtcgatactgcccacgggcacagccaaggcgtgatcgaccgcgtgaaatgggtgaaagaaacctatccgcacatccaagtcatcggcggcaacatcgccactgccaaagccgcattggatttggtcgccgccggcgcggatgccgtcaaagtcggtatcggtccgggatcgatttgcaccacccgtatcgtggcaggtgtcggcgtgccgcaactgaccgccattcacaacgttgccgaagccctcaaaggcacgggcgttccgctgattgccgacggcggcatccgcttctccggcgacatcgccaaagccctcgccgcaggcgcgtacagcgtcatgctcggcggtatgtttgcaggcacggaagaagcgccgggcgaaatcgaactctaccaaggccgctcgtacaaatcctatcgcggtatgggttccttgggcgcgatgagccaaggttctgccgaccgctacttccaagacaaaaccgacagcaccgacaaatacgtccctgaaggtatcgaaggccgcgtgccttacaaaggcccgatcgtgaatatcatccaccaactgaccggcggactgcgctccagcatggggtatttgggttgcgccaatattgctgaaatgcacgaaaaagccgaatttgtggaaatcacttccgcaggtatgagcgaatcgcacgttcacgacgttcaaattaccaaagaagcaccgaactaccatcgctga

SEQ ID NO: 62461 - DNA, 567 bp, Neisseria meningitidis
atgtccgccctcctccccatcatcaaccgcctgattctgcaaagcccggacagccgctcggaacttgccgcctttgcaggcaaaacactgaccctgaacattgctgggctgaaactggcgggacgcatcacggaagacggtttgctctcggcgggaaacggctttgcagacaccgaaattaccttccgcaacagcgcggtacagaaaatcctccaaggcggcgaacccggggcgggcgacatcgggctcgaaggcgacctcatcctcggcatcgcggtactgtccctgctcggcagcctgcgttcccgcgcatcggacgaattggcacggattttcggcacgcaggcagacatcggcagccgtgccgccgacatcggacacggcatcaaacaaatcggcaggaacatcgccgaacaaatcggcggattttcccgcgaatccgagtccgcaaacatcggcaacgaagcccttgccgactgcctcgacgaaataagcagactgcgcgacggcgtggaacgcctcaacgaacgcctcgaccggctcgaacgcgacatttggatagactaa

SEQ ID NO: 62462 - DNA, 2019 bp, Neisseria meningitidis
atgaataaatctttatccgggtcggtagaagaataccgcgaactgacgctccgaggcatgatactcggtgcattgatcactgtaatttttactgcgtccaacgtttacctcggtttgaaagtcgggctgacctttgcctcgtcgattccggcggcggtaatttcgatggcggttttaaagtttttcaaaggcagcaatattttggaaaacaacatggtgcagacccaagcttcggcggcgggtacgctttcgaccatcatcttcgtcctgcccggtttgctgatggcgggctactggagcggtttcccgttctggcagacgacgcttttatgtattgccggcgggattttgggggtaatttttaccattccgctgcgttacgcgatggtggtgaaaagcgatttgccttatccggaaggtgtggcggctgctgaaattttgaaagtgggcggtcatgaagaaggggataaccgtcagggaggcagcggcatcaaagagctggcggccggcggtgcgttggcgggattgatgagcttttgcgccggaggtctgcgcgtgattgccgacagcgcgagttattggtttaaaagcggtacggcgattttccaactgccgatgggcttttcactggcattgttgggcgcgggctatttggtcggactgacgggcggtatcgccatcctgttgggcatttcgattgcttggggcattgccgtgccgtatttctcctcacacattccgcaaccttccgatatggaaatggcggcgtttgcgatgaagctgtggaaggagaaagtgcgttttatcggtgcggggactattggcattgcggcggtttggacgctgttgatgctgctcaagccgatggtggaaggcatgaagatgtcgttcaagagttttggcggcggtgcgcccgctgcggaacgcgccgaacaggatttgtcgcctaaagccatgattttttgggtgctggcgatgatgtttgttttaggcgtgtcgttttaccactttatcggcgattcgcacattacgggcggcatggcttggcttttggtggtcgtttgcacgcttttggcttccgtcatcggctttttggtcgccgccgcctgcggttatatggcaggtttggtcggctcgtcttccagcccgatttccggcgtgggcatcgtgtccgtcgtcgttatttcactggttttgctgctggtaggcgaatccggaggtttgttggcggatgaggctaaccgcaaatttttgctggcactgactttgttttgcggctcggcagtaatctgcgtggcttcgatttccaatgacaacctgcaagacttgaaaaccggctacctgctcaaagccacgccttggcggcagcaagtcgccctgattatcggctgtatcgttggtgcgctggttatttcgcccgtgttggaactgctttacgaagcctacggctttaccggcgcaatgccgcgcgaaggcatggatgcggcgcaggctttggcagcacctcaagcgactttgatgacgaccatcgcgtcgggcattttcgcccacaacctcgaatgggtctacatctttaccggcatcgcgattggcgcggtgttgattgccgccgatttggtgttgaaaaaatcatcaggcggcaaacttgccctgcccgtccttgcggtcggtatgggtatttatctgccgccgtccgtcaatatgcccatcgtggcaggcgcggtgttggcggcggtgttgaaacacatcatcggtaaaaaagcggaaaaccgcgaaggccgtctgaaaaacgccgagcgcatcggaaccttgttctccgccggcctgattgtcggtgaaagcctgatcggtgtgattatggcgtttattattgccttctccgtgaccaacggcggctcggatgcgccgcttgcgttgaatctgcaaaactgggatgccgccgcttcttggttgggtttggcgttcttcgttaccgggatgtttttctttgcacagcgcgtactgaaggcgggtaggtag

SEQ ID NO: 62463 - DNA, 372 bp, Neisseria meningitidis; identical to SEQ ID NO: 36794

SEQ ID NO: 62464 - DNA, 528 bp, Neisseria meningitidis; identical to SEQ ID NO: 36183

SEQ ID NO: 62465 - DNA, 1065 bp, Neisseria meningitidis
atggaaaaagaattcaggatattaaatatcgtatcggccaagatttggggtggaggcgaacaatatgtctatgatgtttcaaaagcattggggcttcgggactgcacaatgtttaccgccgtcaataaaaataatgaattgatgcacaggcgattttccgaagtttcttccgttttcacgacacgccttcacacgctcaacgggctgttttcgctctacgcacttacccgctttatccggaaaaaccgcatttcccacctgatgatacacaccggcaaaattgccgccttatccatacttttgaaaaaactgaccggggtgcgcctgatatttgtcaaacataatgttgtcgccaacaaaactgatttttatcaccgcctgatacagaaaaacaccgaccgctttatttgcgtttcccgtctggtttacgatgtgcaaaccgccgacaatccctttaaagaaaaataccggattgttcataacggtatcgataccggccgtttccctccctctcaagaaaaacccgacagccgtttttttaccgtcgcctacgccggcaggatcagtccagaaaaaggattggaaaacctgattgaagcctgtgtgatactgcatcggaaatatcctcaaatcaggctcaaattggcagggcacggacatccggattatatgtgccgcctgaagcgggacgtatctgcttcaggagcagaaccatttgtttcttttgaagggtttaccgaaaaacttgcttcgttttaccgccaaagcgatgtcgtggttttgcccagcctcgtcccggaggcattcggtttgtcattatgcgaggcgatgtactgccgaacggcggtgatttccaatactttgggggcgcaaaaggaaattatcgaacatcatcaatcggggattctgctggacaggctgacacctgaatctttggcggacgaaatcgaacgcctcgtcttgaaccctgaaacgaaaaacgcactggcaacggcaggacatcaatgcgtcgccaaccgttttaccatcaaccataccgccgacaaattattggatgcaatataa

SEQ ID NO: 62466 - DNA, 1266 bp, Neisseria meningitidis
atgaacacactccaacgccgcaagacgcatcaagtccgcatcgatcatattaccgtcggttcagaagcacccgtcgttatccaatctatgaccaacaccgacactgccgatgcaaaagccaccgcattgcagattaaggaattgagcgatgccggatccgaaatggtgcgtattaccgtcaacagccccgaagccgcgtccaaagttgccgaaatccgccgccgcttggacgatatgggctatgccacaccacttatcggcgatttccacttcaacggcgaacgcctgttggcggaatttcccgaatgcggcaaagcattgtccaaataccgcatcaatcccggcaatgtcggcaaaggcgtaaaaggcgatgaaaaatttgcctttatgattcggaccgctgctgaaaacgataaagccgtccgcatcggcgtaaactggggttctttggatcaaagcctcgccaaacgtatgatggatgccaacctcgcttcttccgcgccgaaaccgcccgaagaagtgacgaaggaagcactgattgtctccgctttggaatctgccgaaaaagccgttctattgggactgcccgaagacaaaatcatcctgtcgtgcaaagtcagcgcggttcaggatttgattcaggtttaccgcgaactgggcagccgttgcgcctatccgctgcatttgggtttgaccgaagccggtatgggcagcaaaggcattgtcgcatcaacggcggcattatccgtcttgcttcaagaaggaatcggcgacaccatccgcatttcactgactccggaacctggcagcccgcgtactcaggaggtcgtcgtcgggcaagagattttacaaactatgggattgcgttcgtttacgccgatggttaccgcctgccccggctgcgggcgtaccaccagtaccgtatttcaagagctggcacaagatgttcaaaattacctgcgccaaaaaatgtctatatggcgtaccctttatcctggggttgaatccctgaacgttgccgtaatgggctgcgttgtcaatgggcccggagaaagcaaattggccgacatcggcatcagcctgcccggtacgggagaaacacccgtcgcgccggtttatgtggacggggagcgcaaagtcacactgaaaggcgacaacattgcaacggaattcctagctattgtagaggaatatgttaaaaccaattatggcgaaaacggctccaaacgcaaccagaacaaaatcatccctatacagtccctataa

SEQ ID NO: 62467 - DNA, 984 bp, Neisseria meningitidis
atgaaacactttctttcccttttcacttccatattgatgtctgccctgattgccgtgtggttcagccaaaaccccatcaacgcctactggcagcagacctaccaccgcaacagtccgctcgaaccgcttgccgcctacggatggtggcggagcggtgcggcgttgcaagaaaacgcctacgccttttcagacggcatcaaaacattcctgtccggcgaaacgccgccgacggctcaagacggcggctcggcagatatgccgtctgaagccgccacatccgaagccgtccctcaaaccggtgaaacagaatggaaacaggacaccgacaccgccgccgtccgcagcggcgacaaagtcttttttgtcggcgactcgctgatgcagggcgttgcccccttcgtgcaaaaaagcctgaaacagcaatacggcatcgaatccgtcaacctcagcaaacaaagcacggggctgtcctacccctcattcttcgactggccgaaaacgattgaagaaaccctgcaaaaacatcccgaaatcagcgtgctcgccgtcttcctcggcccgaacgacccgtgggatttccccgtcggcaaacgctacctcaaattcgcttccgacgaatgggcgcaagaatacctgaaacgcgtcgaccgcatccttgaagccgcacacacgcaccgcgtccaagtcgtctggctcggcatcccctacatgaaaaaagccaagctcgacgggcagatgcgctacctcgacaaactgctttcggaacatttgaaaggcaaaatcatcctgattcccaccgcgcacaccctgagcggcgggaaagaccgctacacggactccgtcaacgtcaacggcaaacccgtccgctaccgcagcaaggacggcatacactttaccgccgaaggacaaaaactgctggcggcaaaaataatggaaaaaatcgtttttgaaccaagtacgcaaccatcaagtacacagccatga

SEQ ID NO: 62468 - DNA, 450 bp, Neisseria meningitidis; identical to SEQ ID NO: 44603

SEQ ID NO: 62469 - DNA, 747 bp, Neisseria meningitidis; identical to SEQ ID NO: 59579

SEQ ID NO: 62470 - DNA, 828 bp, Neisseria meningitidis
atgaaaaaaaccgcctatgccttcctcctgctgatcgggttcgcttccgcccctgcatttgccgaaacccgccccgccgacccttatgaaggctacaaccgcgccgttttcaaattcaacgaccaagccgaccgctacattttcgcccctgccgcgcgcggctaccgcaaagttgcgccgaaacccgtccgcgccggcgtgtccaatttttttaacaacctgtgcgacgtggtcagcttcggtagcaatatcttgcgcttggacatcaaacgcgcaagcgaagaccttgtccgcgtcggcatcaacaccactttcggtttgggcgggcttatcgacatcgccggcgcgggcggcattcccgacaataaaaacaccttgggcgacacgtttgcttcgtggggatggaaaaacagcaattatttcgtgttgcccgtcttagggccgtccaccgtccgcgacgcgctcggcacgggtattacctccgtttattcgcccaagaatatcgtcttccgcacccctgtcggacgctggggcacgactgccgtatccgccgtcagtacgcgcgaaggtctgctcgatttgaccgacagtctggacgaagccgccatcgacaaatacagctacacgcgcgacctctatatgaaagtccgtgcgcggcagaccggtgcaacacctgccgaaggtacggaagataacatcgacatcgacgaattggtcgaaagtgccgaaaccggcgcggcggaaactgccgttcaagaagattccgtatccgaaacacaggcagaagcagcaggggaagccgaaacgcaacctggaacacaaccttaa

SEQ ID NO: 62471 - DNA, 267 bp, Neisseria meningitidis
atggattttgaatttggatttaggaccctgtggccgattgcgacagcggcgttttggttttgggtcaacggtatttcaggccgtctgaaagaagcggacaagcgtatcgacgacctgaaagaggagctgcacgcggtcaagctctcgtaccacaccaagcaggatgcccaagccgaccgcaaaaatatcgcagcgtctttggagcgcatcgaaaacaagttggaaaaagtaaacgaaaaactggacaggaaagcagacaaatcatga

SEQ ID NO: 62472 - DNA, 342 bp, Neisseria meningitidis; identical to SEQ ID NO: 45956

SEQ ID NO: 62473 - DNA, 1458 bp, Neisseria meningitidis
atgcacaaaatcctgcccatcgcccacgtcctctcccgactgggtatgctgttttcctttatcctgctgatacccgccgccctctcctacgccttttcggacggcgcgtacaccgccttcgccaccaccgcgaccgttaccctttccggctcgtgcatcgtccggctcgccaccctccggttcaggcgcgaactgcgcccgcgcgacggctttaccctcgtcctgatgttgtggctggcgtttgccgctatggctgcgatgccgatgtacctgtatttcccgaatatgggctttaccgacgcattttttgaatcgatgtcgggactgaccaccaccggcgcgaccgtcatcccccacgtcgacgggctcgccccctccgtcaacttttggcggcatatgctcaactggctgggcgggatgggcatcatcgtccttgccgtcgccatcctgcctatgctcggcgtaggcggcacgcagttattcaaagccgaaatccccggcattgacaaagaaagcaaaatgtcgccgcgcatttcccaagtggcgaaaaaactttggttcggctacaccctgatcaccatcctcgcggcagcctgcctgcattttgccgggatgggctggttcgatgccgtctgtcacgcgatggcgaccctctcgctgggcgggttttccacccacgatgccagcatagcttattacaactcccccctcatcgaagcggtcatcatcgttttcaccattgtcggcggcatcaattttgccaaccatttcgccgccctcaacagccgcagcctcaaaacctattggaaagacgaagaatgccggacgatgctgctgctgctctccggcagcatccttgccgccgccctgtacctgtggcacaccggctattacgccggttttaccgaatccctgcgctacaccgccttcaacttcgtctccatcggactggcaaacgggctggccaacaccgacttcgcacaatggccgctcctgatttccctgtggatgtttttcctcgccaacatcctcgccaactccggctcgaccggcggcggcatcaaaaccatacgcgccctcgtcctgttcaaattcagcctgcgcgaaatgatggtgctgctgcaccccaaagccgtccgcaccgtcaaaatcagcggcaaggccatacccgaccgcctcgcgctgaccgttatgtccttcatcttcatctactttatgatcgtcgtcctcttcagcttcctgctgatggcgagcggtatggaatttaccaccgccttcaccgccgtcatcgcctgcatcaccaacgccggccccggcctgggcgaagtcgggcccgccggcaattacgccggtttggacgtgatgcagaaatggatctgcgttaccgccatgctcttgggcaggctggaaatcttcaccgtcttcatcctcttcacccccgcctactggaagaaataa

SEQ ID NO: 62474 - DNA, 192 bp, Neisseria meningitidis; identical to SEQ ID NO: 37615

SEQ ID NO: 62475 - DNA, 900 bp, Neisseria meningitidis; identical to SEQ ID NO: 41621

SEQ ID NO: 62476 - DNA, 693 bp, Neisseria meningitidis
atgaaacttatcaaatacctgcaatatcaaggcataggaagccgcaagcagtgccaatggctgattaggggcggctacgtctccatcaacggaacctgtatggacgacaccgatgcagacatcgattcctcatctgtcgaaacgttggatattgacggggaagcagtaaccgtcgttcccgaaccctatttctacatcatgctcaacaagcctgaagattacgaaacttcgcacaaaccgaaacactaccgcagcgtattcagcctgttccccgacaatatgcgaaacatcgatatgcaggcggtcggcaggctggatgcagatacgaccggcgtattgctgattaccaacgacggcaaactgaaccacaacctgacttcgccgagcagaaaaattcccaagctgtacgaagtaacgctcaaacaccccacaggagaaacgctctgcgaaaccttgaaaaacggcgtgctgctccacgacgaaaacgaaaccgtttgtgccgccgatgccgttttgaaaaacccgaccaccctgctgctgaccattaccgaaggaaaataccaccaagtcaaacgcatgatcgccgccgccggcaaccgcgtgcaacaccttcatcgccggcgattcgcacatctggaaacagaaaacctcaaacccggggaatggaaatttatcgaatgtccaaaattctga

SEQ ID NO: 62477 - DNA, 1116 bp, Neisseria meningitidis
atgcgcttgtttaaaagcttgaaaaaccctaaaaaaacagatgccaagctccctaaaaaatcttcgggactcaataaccgcgcggcaatcggcatcgatatcgaccagcattccatcaaaatggtccaattgtcaggacgtagtttaaaccaaattcaattggaaaaatacgtcattgccaaattaccaaagaatatcattcaaggcaataaagtccaaaattacgatcaacttgttacatatttgcaacaagcctatgccaaactgggtacttcgtgcaaaaacatcatcgcgtccgtcccgcaaaatctggcaaccatcgaacaattgacctacacagacaaagatgcagaattagacctgcaggggttcgtggagtcctccatctccgaagtcagctcgatatcgctcgaagaagccaattacgactatcaggtcttgtcccaatcggccgccggcgaagctgtgttggccgtcgcatcgagaaaggatgaaatcgaacccctgattgacgcattcaacgccgccggtatgaaattatccgcgcttgatgtggacattttcggacaatacaacgcctacgcgctatggataaaccatttcgcccccgagcttgcagccgaaaaagtcgccattttcggcgtatatgccgcacagacctacgccttggtcatccaagacggaaaaatcctatacaaacaggaaacctccgtcagcgaagaacagctcaaccaactcatccagcgcacctatcaggtaacagaagaaaaagcggaagaaatcatcaactccccgcaaaaaccttccgattaccaagaaagcgtggcaaactatttcaaccagcagattacccaagaaatacaaagggtcttgcagttttattacaccacgcagaccgcagacgatatgaccgacatcaagcatatcctgctgaccggggaagcggcgcgccaggaaggcatcgcccaaaccgtcgcctcacaaaccaatgcagatgtacaatgcgtccatcctgcgcgttattttgcggacaacctcaaaacagacaaacaacaattcgaacttgatgcgccgacactgaccagggcgttcggtttggcggtacggggattataa

SEQ ID NO: 62478 - DNA, 666 bp, Neisseria meningitidis
gtggacaatatgatgaagttcaaatatgtttttctgttggcgtgtgttgtcgtttctttatcttatcgtttgaatgctgcaccgatgtttaacgataatcctgttgtttacggaaaaatcaaagtgcagagttggaaagcgcggcgggatttcaatattgtaaagcaggatttggatttttcctgcggggcggcttcggtggcgacgcttttgaacaatttttacgggcaaacgctgacggaagaagaagtgttggaaaaactggataaggagcagatgcgcgcgtcgtttgaggatatgcggcgcattatgccagatttgggttttgaagcgaaaggctatgccctgtctttcgagcagctcgcacagttgaaaatccccgtcatcgtgtatctgaaataccgcaaggatgatcatttctcggtattgcgcgggatagacggcaatacggttttgcttgccgacccgtcgctgggtcatgtttcaatgagcagggcgcagtttttggatgcttggcaaacccgtgagggaaatttggcaggtaagattttggcggtcgtgccgaaaaaagccgagacaatttcaaataaattgtttttcacacatcatcccaagcggcagacagagtttgcagtcggacaaatcaggcaagcacgtgcagagtaa

SEQ ID NO: 62479 - DNA, 423 bp, Neisseria meningitidis; identical to SEQ ID NO: 38773

SEQ ID NO: 62480 - DNA, 291 bp, Neisseria meningitidis
atggcagaaagtaaaagggtacaacggctattgagggtctttatcgcgcttgacgagcatccgattatcggtctgagcaataaggatttatcggtcggactggggctgacgccatcgcaagtcagcagggatattgatgatttggttgcatcgggattggtcatcaagcttgaaaacggcaactacgcctacggtatcaaaaccctgcaaatcgccgagcggttcaggcggcagcatgaacggctgcaaagcaagattgccgaaatcggcaagcgggtgaatgcagattaa

SEQ ID NO: 62481 - DNA, 669 bp, Neisseria meningitidis
atgaaaaacctcgccatcttcgacctcgacaacaccctcatcaacaccgattccgaccacgcctggccgcaatacctcatcaaaaaaggcttggttgacgctgccgaaaccgaagcgcaaaacgaaaaattctaccgcgactaccaaaacggttgcctcgacatcgacgcattcctcaaattccaccttgccccgctcgctcgttacagcaaagaagagctggcagagtttcaccgcgaatttatggcggaatacatcatcccccacatctcgcctatgcagcgtatgctggtgcagagccaccaaatggcaggcgacgaaacccttgtgatttcctcaaccaacgagtttatcatcacccccgtctgccgccttttcggcatcaccaacatcatcggcacccaactcgaaaccgggcccgacggccgctacaccggcaactacgtcggcacgcccagcctcaaagaaggcaaaatcacccgcctgaaccaatggctcgccgaacgcggcgaaacgctcgaaagctacggcaaaacctatttttacagcgactccaaaaacgacctgccgctgctgcgcctcgtcgacgaacccgtcgccgtcaaccccgatgccgagctggaaaaagaagccaaagaaaaaggctggccggttttgaatttcaaatga

SEQ ID NO: 62482 - DNA, 1008 bp, Neisseria meningitidis
atgagcaccttcttccagcaaaccgcccaagccatgattgccaaacacatcgaccggttcccactattgaagttggaccgggtaattgattggcagccgatcgaacagtacctgaatcgtcaaagaacccgttacctccgagaccaccgcggccgtcccgcctacccgctgttgtccatgttcaaagccgtcctgctcggacaatggcacagcctctccgatcccgaactcgaacacagcctcatcacccgcatcgatttcaacctgttttgccgttttgacgaactgagcatccccgattacagcaccttatgccgctaccgcaactggctggcgcaagataataccctgtccgaattgctcaaactgattaaccgacaactgaccgaaaaaggtttaaaaatagagaaagcatccgccgccgtcattgacgccaccattattcagaccgccggcagcaaacagcgtcaggctatagaagtcgatgaggaaggacaaatcagcggccaaaccacaccgagtaaggacagcgatgcccgttggataaagaaaaacggcctctacaaactcggttacaaacaacatacccgtaccgatgcagaaggctatatcgagaaactgcacatcacccccgccaatgcccatgagtgcaaccacctgttgcctttgctggaaggtatagccgaaggcacgaccgtctatgccgacaaaggctatgacagtgcggaaaaccggcaacatctggaagagcgtcagttgttagacggcattatgcgcaaagcctgccgcaaccgtccgctgtcggaaacgcaaaccaaacataaccagtatttgtcgaagacccgttatgtggtcgaacaaagcttcggtacgctgcaccgtaagttctgctatgttcgggcagcctatttcggactgattaaagtgagtgctcaaagccacctgaaagcgatgtgtttgaacctgttgaaagcggccaacaggttaagtgcgcccgctgccgcctaa

SEQ ID NO: 62483 - DNA, 2025 bp, Neisseria meningitidis
atgaacgacatgactttatatctcatcattgcccttgtgcctttggcaggctcactgatcgcgggtttgttcggcaacaaaatcggacgtgccggtgcgcatacggttacgatactcggcgtggcggtgtccgccgtgctgtcggcttatgtgttgtggggctttattgacggcagccgcgccaagtttgacgaaaacgtctatacctggctgacaatgggcggcttggatttctccgtcggctttttggtcgatacgatgacggcgatgatgatggtcgtggtaacgggcgtgtcgttgatggtgcatatctacaccatcggttatatgcacgacgaaaaagtcggctaccaacgcttcttcagctatatctctttgtttacattcagtatgttgatgctgattatgagcaacaacttcatccagctcttcttcggctgggaggctgtgggcttagtgtcgtaccttttgatcggtttctatttcaaacgtccaagcgcaacatttgccaacctgaaagcctttttgatcaaccgcgtcggcgactttggctttttgctcggtatcggcttggtgcttgcctatttcggcggcagcctgcgctatcaggacgtattcgcttatctgcctaatgttcagacggccactatccaactgttccccggtgtggaatggtctttgattaccgtaacctgtttgctcctgtttgtcggtgcgatgggtaaatcggcacaattcccactgcacgtttggctgcctgattcgatggaaggcccgaccccgatttctgcattgattcacgccgcaaccatggttaccgccggtttgttcatggtatcgcgtatgtcgccgatttacgaaatgagcagcactgcgctgtcggtcattatggtaatcggcgcgattaccgccctgtttatgggtttcttgggcgtgattcaaaacgacatcaaacgtgtggttgcgtattctaccctgtcgcaactgggctacatgaccgtggctctgggcgcgtctgcctattccgtggcgatgttccacgtcatgactcacgctttctttaaagccttgttgttcttggccgcaggtagcgcgattatcggtatgcaccatgaccaagacatgcgccatatgggcaacctgaaaaaatatatgccggttacttggctgactatgctgatcggcaatttgtcgctgatcggtacgccgttcttctccggcttctattctaaagattcgattatcgaagcagcgaaatacagcaccctgccgggcagcggctttgcttattttgccgtccttgccagcgtgttcgttaccgcgttttacgcgttccgccaatactttatggtgttccacggcgaagagaaatggcgcagcctgcctgaacatcatgacgatcatcatggtgaagaacatcacggcttgggcaaaaacgacaatccgcacgaaagcccgctggttgttaccctgccgctgattttgcttgccatcccgtccgtcatcatcggctatgttgccatcgagcctatgctttacggcgatttctttaaagacgtgattttcgtcaataccgacgcgcatccgaccatgcacatcatgaaggaagagttccacggcgcattggcaatggtgtcgcacagcctgcattcgcctgtactctaccttgctattgcaggtgtcttaagcgcatggcttttgtacgtcaaactgccgcacctgcctgcgaaaattgcacagacgttccgtccgatttacgttttgtttgaaaacaaatactacctcgacgccctgtatttcaacgtcttcgccaaaggcacacgcgcattgggtaccttcttctggaaagtcggcgataccgccattatcgacaacggcatcgtcaacggctccgccaaactggtcggcgcgattgccgcgcaagtgcgtaaagcccaaaccggctttatctacacttacgctgccgctatggtattcggcgtattggtactgctcggcatgaccttctggggattgttcagataa

SEQ ID NO: 62484 - DNA, 780 bp, Neisseria meningitidis
atgcttaaaatcatttccgccaacgtcaacggcatccgctccgcctacaaaaaaggtttttacgaatacatcgccgcatcgggcgcggacattgtctgcgtgcaggaactcaaagcgcaggaggctgatttgtctgccgatatgaaaaatccgcacgggatgcacggccattggcattgcgccgagaagcgcggttacagcggcgtggcggtgtacagcaaacgcaaacccgacaatgtgcaaatcggtatgggcattgaagaattcgacagggaagggcggtttgtgcgttgcgatttcggcaggttgagcgttatttcgctttatttgcccagcggcagcagcgcggaagaacgtcagcaggtgaaatactgtttcctcgatgcgttttatcctatgctcgaagcgatgaaaaacgaagggcgcgacatcgtcgtctgcggcgactggaacgtcgcacaccaaaacatcgacctgaaaaactggaaaggcaaccagaaaaattcaggtttcctgcctgaagagcgcgagtggataggcaaggttatccacaagctcggttggacggatatgtggcgcacgctttatcccgatgtgccgggctacacttggtggagcaaccgagggcaggcgtatgcgaaagatgtcgggtggcgcatcgattatcagatggttacgcccgaacttgctgccaaagccgtgtccgcacacgtttataaagatgaaaaattttccgaccatgcgccgctggtcgtggagtatgactatgctgccgaataa

SEQ ID NO: 62485 - DNA, 1635 bp, Neisseria meningitidis
atggcagcaaaagacgtacaattcggcaatgaagtccgccaaaaaatggtaaacggcgtgaacattttggcaaacgccgtgcgcgtaaccttgggtcccaaaggccgcaacgtggtggttgaccgcgctttcggcggcccgcacatcaccaaagacggcgtaaccgtcgccaaagaaatcgaactgaaagacaagtttgaaaatatgggcgcgcaaatggtgaaagaagtcgcgtccaaaaccaacgacgtggcgggcgacggtacgactaccgccaccgtattggcgcaatccatcgttgccgaaggtatgaaatacgttaccgccggtatgaacccgaccgacctgaaacgcggtatcgacaaagccgttgccgctttggttgacgagctgaaaaacatcgccaaaccttgcgacacttctaaagaaatcgcccaagtcggctcgatttccgccaactctgacgaacaagtcggcgcgattatcgccgaagcgatggaaaaagtcggcaaagaaggcgtgattaccgttgaagacggcaaatctttggaaaacgagctggatgtggttgaaggtatgcaattcgaccgcggctacctgtctccttacttcatcaacgatgcggaaaaacaaatcgccggcttggacaatccgtttgtattgctgttcgacaaaaaaatcagcaatatccgcgacctgctgcctgttttggaacaagtggccaaagccagccgtccgctgttgattatcgctgaagacgtagaaggcgaagccttggcgactttggtcgtgaacaacatccgcggcattctgaaaaccgttgccgttaaagctccgggcttcggcgaccgccgcaaagccatgttgcaagacatcgccattttgaccggtggccaagtgatttcggaagaagtgggcttgtctttggaaaaagccactttggaagatttgggtcaagccaaacgcatcgaaatcggtaaagaaaacaccaccatcatcgacggcttcggcgacgctgcccaaatcgaagcgcgtgttgccgaaatccgccaacaaatcgaaaccgcaaccagcgattacgacaaagaaaaactgcaagagcgcgttgccaaactggcaggcggcgtggcagtaatcaaggtcggtgccgctaccgaagtcgaaatgaaagagaaaaaagaccgcgtggaagacgcgctgcacgctacccgcgcagccgttgaagaaggcgtggttgcaggcggcggcgtagccctgttgcgcgcccgtgccgctctggaaaacctgcacaccggcaatgccgaccaagacgcaggcgtacaaatcgtcttgcgcgccgttgagtctccgctgcgccaaatcgttgccaacgcaggcggcgaacctagcgtggtggtgaacaaagtgttggaaggcaaaggcaactacggttacaacgcaggctccggcgaatacggcgacatgatcgaaatgggcgtactcgaccccgccaaagtaacccgttccgcgctgcaacacgccgcgtccatcgccggcctgatgctgacgaccgattgcatgattgccgaaatccctgaagaaaaacctgctatgcccgatatgggcggcatgggcggtatgggtggcatgatgtaa

SEQ ID NO: 62486 - DNA, 666 bp, Neisseria meningitidis
atgaacctttttcaaaacgccaaattcttcacgacggtcaaccaccttaaagacctgccggacacaccgctcgaaattgcctttgtcggcaggagcaatgccggaaaatccagtgccatcaataccctgaccaaccatgtccgtcttgcctacgtttcaaaaacaccgggacggacgcagcatatcaactttttcgagctgcagaacggcaattttatggtcgatttgcccggctacggttatgcccaagtccccgaagcagtacgcgcacattgggtcaatctgctcggcgactacctccgccatcggaaacagcttatcgggctggttttgattatggatgcccgccatcctttaaaagaactcgacatccgtatgctggattttttccacacgaccggcagaccggttcacatcctgctgtcaaaagccgacaaattatccaaaaacgaacagataaaaaccctgtcccaagtcaaaaaactgctcaaaccttattccgacaggcaaaacatcagcgtacagctgttttccagcctgaaaaaacaaggtattgacgaggccaaccgaactgtcggaagctggtttgacgcagcagatgccgccgcttcctctccaaaggaaaacttaccccaattatacggaaaccgtatttcccccacttga

SEQ ID NO: 62487 - DNA, 1179 bp, Neisseria meningitidis
atggcatttttaaaactgaccgaacaaaacgtgcagggcaaaaccgtcctcatccgcgccgatatgaacgtgccgttcaaagacggcaaaatcagcgacgacacccgtatccgcgcctcgattgcgtccgttaaatactgcgtggacaacggcgcgtccgtcatcgtgatgacccacttgggccgcccgaccgaaggcgagtttcaccccgaagacgatgtcgcgcccgttgcagcacacttgggcagcctgttgggcaaagacgtgaaagtattgaacgactggcgcgaaaacaaaccggctttgaacgcgggcgatgtcgtcatgctgcaaaacgtgcgtatcaacaaaggcgagaagaaaaacgatttggaactgggcaaagcctacgccgccttgtgcgacgtgttcgtcaatgacgcgttcggcaccgcgcaccgcgcccaagcctcgaccgaagccgtcgcccaagccgcgcccgttgcctgcgccggcgtattgatggcgggcgaactcgacgctttgggcaaagccttgaaacagcccgcgcgcccgatggttgccatcgttgccggcagcaaagtgtccaccaagctgaccatcctcgaatcgctggcggacaaagtcgaccaactcatcgtcggcggcggtatcgccaacaccttcctgttggcggaaggtaaagccatcggcaaatctttggcggaacacgatttggtggaagaatccaaaaaaattatggcgaaaatggcggccaaaggaggttctgtgccgctgccgaccgatgtcgtcgttgccaaagcctttgccgccgatgccgaagcggtggtaaaagacattgccgacgttgccgaagacgagatgattttggacatcggcccgaaatctgccgccgcgcttgccgatttgcttaaagccgccgacacggtcgtttggaacggaccggtcggcgtgttcgagtttgaccagttcgcaggcggtacgaaagcccttaccgaagccattgcccaaagcaaagcgttctccattgctggcggcggcgacacgctggcggcgattgctaaattcggcgttaccgaccaaatcggctatatttctaccggcggaggcgcgtttcttgagttcttggaaggtaaagagttgcctgccgtagccgctttggaaaaacgcggcgcgtaa

SEQ ID NO: 62488 - DNA, 423 bp, Neisseria meningitidis; identical to SEQ ID NO: 37313

SEQ ID NO: 62489 - DNA, 6759 bp, Neisseria meningitidis
ttggggaattttgcaaaggtttcgggcggtatgtatgccggtaagatcaccctgatcagcactgatcgtgatgcatccgtgcgcaatcaggggcaatggtttgcctcagccggcaatgtggcagtgaatgctgagggtaaactggtcaacacaggcatgattgcagcgacgggagaaaatcatgcggtttcacttcatgcccgcaatgttcataatagcggtacggttgcctcacaggatgatgccaatattcacagccagacgctggacaattcaggtacggtcttatcctcaggtcaattaactgtccgtaatttaggccgtctgaaaaaccataacaacggtacgatccaggctgcccgcttagatatatcaacaggtggtttggataacacaggtaatattactcaaacaggttcacaagcattggatttggtatctgccggcaaattcgataacagtggcaagattggtgtgagcgacgttccacagaccggtttgaatcccaatccatcagtcataccacagattccgagtactgcaacaggttcaggcagcagcactatctcggcatctaagcctggttcaaacaatcccgtttcacctacagcacctgcaaaaaactacgccggaggacgcattcaaacaacaggagcatttgacaatgcaggatcaatcaatgcgggtgggcaaattgacattgccgcccaaaacggtttggaaaattcgggtagtctgaatgcggctaaactacgagtatcaggcgattcatttaacaatacggtaaaaggcaaactccaggcacacgatctggctgttaacactcaaactgctaaaaacagcggtcacttattaactctaaccggcaagattgacaaccgtgaactgcataatgccggagaaattgccgccaacaatctgacactcattcattcgggccgcttgagcaatgataaaaaaggcaatattcgagctgcatatttacagcttgataccgccggtttacataatgcaggtaacattcttgccgatagtggaaccgttaccaccaagaataatcttcacaatacaggaaaagtttctgttgcacgactgaataccgaaggtcagactctagataatacgcacggacatatagaggctgaaacggttaacatccaaagtcagcaactgactaaccaaagcggccatattactgctaccgaacaactgactatcaatagtcgaaatgtagacaaccaaaacggcaaactcctatctgcaaaccaagcacaattagctgtttcagacggcctatacaaccaacatggtgaaattgccaccaaccggcagttgtctattcacgataaaaatcaaaacactttggcgttaaacaatgcggatggcacgattcaatctgccggtaatgtatcgctacaagccaaatcactcgccaacaatggcacattaacagccggtaacaaactggatattgctttgacggacgatttcgtcgtagagcgcgacctcactgcaggcaaacaattaaatctaagcataaaaggccgtctgaaaaatacccataccctacaagcaggccatacgctcaaactcaatgccggcaatatagataaccaagttacaggcaaaattattggcggagaacaaacggacatcacatccgaacagcatgttgacaacaggggcttgatcaacagcgacggtttgacccacatcggtgcaggtcaaaccctgaccaacaccgggacaggcaaaatctatggcaaccatattgccctggacgcgcaaatactgcttaaccgggaagaaacgacggaaggcagtaccaaagcgggggcaatagctgcaaggaaacgtttggatattggagcgaaagagattcataaccaagaaggtgccctactatccagcgaaggtatttttgccgtaggtaatcgactggatgaacaacatcatgcggcaggcatggccgatacctttgttaatggcagtgccggtttggaagtacaaggtgatgcattgatgtccgttcggaatatgcagaatatcaataatcactttaaaacagagacatacttagccaaagcagaaaagcaagttcgtgactacaccgtactggggcaaaatacctactatcaggcaggaaaagacggtttattcgacaactcgcaaggacaaaaagaccaaactactgctacgttccatttaaaaaatggttctcgtattgaggccaaccaatggcatgtccgagactaccacatcgagacttataaagaacgcatcatcgaaaaccggccggcacacattactgtgggcggtaatttgactgcctcaggtcaaaattggctgaacaaagacagccggattgtagtaggcgggcgtattatcactgatgatttaaaccagaaagaaattaccaatcaaagtacaacaggcaaaggtcgcacagatgctgtcggcacacagtgggattcagttacaaaaaaaggatggtacagcggtagaaaaagacaacgccgtactgaaagaaaccatactccttaccatgatacccaactatttacccacgacttcgacacgcctgtatccgtcatccaacagaatgccgcctccccttcctttcaacccgctgcatctgcaatcaaactgattgacggagtatccacggcagccgtcaatggtcagcgcatccataccggtaatgtggtctcgttaaataacgctactgttactctgcctaacagcagcctctataccacccatcctgacaataaaggctggttggttgaaaccgatcctcaatttgcagactaccgccgctggttgggcagcgactacatgttgcaacaactgaaattggacaccaatcatctacacaaacggcttggcgacggctactacgaacaaaaacttgttaatgaacaaatccatcagttaacaggctaccgccgactcgacggctacaggagtgatgaagaacaattcaaagctctgatggacaacggccttactgctgccaaaacattcggtctcaccccaggtatcgccttgagtgcagagcaagttgcccgcttaacttcagatatcgtttggatggaaaatcaaaccgtcaccctgtctgacggttcgactcaaaccgtactggttcctaaagtctatgccctggcgcgcaaaggtgatctcaatacctccggtggcctgattagtgccgaacaagtcttacttaaactgcaaaacggcaacctgactaacagcggtaccattgcggggcgacaggccgtactcatccaggcacggaatattaacagcaacggtaacattcaagccgaccaaatcggcttaaaagctgaaaaaagtatcaatatcgacggcgggcaggtacaagcaggcagactgctgactgcccaagcgcaaaatatcaaccttaacggtacaacccaaacttccggtaatgaacgtaacggcaataccgccatcgatcgtatggccggcattaacgtggtcggaagccatactgaacaagtagataacagagcttcagacggcatcctatccctgcatgccgacaacgatatcaaccttaatgcagccaccgtctctaaccaagttaaaggcggcaccacccaaattaccgctggtaataatctcaacctcgacaccatccgtaccgaacatcgcgaagcctatggtgcattagatgataaaaatcatcgtcatgtccgccaaagtgccgaagtcggcagcagtatccgcacgcaaaacggcgcaatgcttagagccggcaacgacttaaaaatccgtcaaggtgaactggaggccgacgagggtaaaaccgtccttgccgcgggacgtgatgtcaatattagcgaaggacgccaaataaccgaattggacgcctctgtaagcgggaaaagcaaaggcatcctttccagtaccaaaacacacgaccgctaccgcttcagtcatgatgaagcagtcggcagcaacatcggcggcggcaaaatgattgttgcagccgggcaggatatcaatgtacgcggcagcaaccttatttctgataagggcactgtcttaaaagcaggaaacgacatcgatatttctactgcccataatcgctacaccggcaatgaataccacgagagcaaaaaatcaggcgtcatgggcacaggcggattgggctttactatcggtaaccgaaaaactaccgatgacactgatcgtaccaatattgtccatacaggcagcattataggcagcctgaatggagacaccgttacagttgccggaaaccgctaccgacaaaccggcagtaccgtctccagccccgaggggcgcaatactgtcactgccaaaagcatagatgtagagtccgcaaacaaccggtatgccactgactacgtccatacccgggaacaaaaaggcctcaccgtcgccctcaatgtcccggttgtccaagctgcacaaaacttcgtacaagcagcccaaaatgtgggcaaaagtaaaaataaacgcgttaatgccatggctgcagccaatgctgcatggcagggttatcaagcagcccaacaaatgcaacaatttgctccaagcagcagtgcgggacaaggtcaaaacaacaatcaaagctccggtatcagtgtgtccgttacctacggcgaacagaaaagccgtaacgagcaaaaaagccgttacaccgaagcggcagcaagtcaaattatcggcaaagggcaaaccacacttgcggcaacaggaagtggggagcagtccaatatcaatattacaggttccgatgtcatcggccatgcaggtactgccctcattgccgacaaccatatcagactccaatctgccaaacaggacggcagcgagcaaagcaaaaacaaaagcagtggttggaatgcaggcgtagccgtcaaaataggcaacggcatcaggtttggaattaccgccggaggaaatatcggtaaaggtaaagagcaagggggaaatactacccaccgccacacccatgtcggcagcacagccggacaaaccaccatccgaagcggcggggataccaccctcaaaggtgcgcagctcatcggcaaaggcatacaggcagatacgcgcaacctgcatatagaaagtgttcaagatactgaaacctatcagagcaaacagcaaaacggcaatgtccaagttactgtcggttacggattcagtgcaagcggcagttaccgccaaagcaaagtcaaagcagaccatgcctccgtaaccgagcaaagcggtatttataccggagaagacggctatcaaatcaaagtcagagacaacacagacctcaagggcggtatcatcacctccacccgaagtgccgaaagcaaagggaaaaaccgctttcagacggccaccctcacccatcgcgacattcaaaaccacagccgctacgaaggcagaagcttcggcataggcggcagtttcgacctgaacggcggctgggacggcacggttaccgacaaacaaggcaggcctaccgacaggataagcccggcagccggctacggcagcgacggagacagcaaaaacagcaccacccgcagcggcatcaacacccgcaacatacacatcaccgacgaagcgggacaacttgcccgaacaggcaggactgcaaaagaaaccgaagcgcgtatctacaccggcatcgacacagaaactgcggatcaacacacaggccgtctgaaaaacagcttcgacaaagacgcggtcgccaaagagatcaacctgcaaagggaagtaacgaaggagttcggcagaaacgccgcccaagccgtagcggccgttgccgacaaactcggcaatacccaaagttacgaacggtatcaggaagcccgaaccctgctggaggacgaactgcaaaacacggacagcgaagccgaaaaagccgccatccgcgcatccctcggccaagtaaacgcctatcttgccgaaaaccaaagccgctacgacacctggaaagaaggcggcataggcaggagtatcctgcacggggcggcaggcggactgacgaccggcagcctcggcggcatactggccggcggcggcacttcccttgctgcaccgtatttggacaaagcggcggaaaacctcggcccggcaggcaaagcggcggtcaacgcactgggcggtgcggccatcggctatgcaactggtggtagtggtggtgctgtggtgggtgcgaatgtagattggaacaataggcagctgcatccgagtgaatataaattagcagaacaatatgcagatatagtggcttctcgtctaaacatttcaaaagaagaagcacttgggcgaattattcggcatatgcaacgaaccgtagattacgcaacggctaaagcggataatttccgtactgatgacgccattatttcaattttaggagcaaacaatttacccaagcaagatcaacattacactaatccgaactacaacaaacaatacattcaaaattatgttcgtgatttcaatttagccaataaatacaattattttgggaaaactcctactcaatcaagggattataaagttggagttgttacagatattggtaaggctgcattaaatagcggtataggtatatttgaatcggctgcgaatttagcgacaggggagatagatccgaactcatgggcttatgtacacatggggcgtataggttatacacatcctgaatatggaaatgcttggattcggatttcaagtgcaacactagtgtattag

SEQ ID NO: 62490 - DNA, 609 bp, Neisseria meningitidis
ttgaataccctctatttaggttcaaacagcccgcgccgaatggaaatcctgacacagttgggctatcaggtcgtcaagctgcctgccaacatcgacgaaacggtcagacagaacgaagaccctgcccgttacgttcaaaggatggcagaagaaaaaaaccgaaccgccctgaccctcttttgcgaaaccaacggcacaatgcccgatttccccctgattaccgccgacacctgcgtcgtttcagacggcatcatattaggcaaaccccactcccaagccgaagcaatcgaatttttaaaccgattgtccggcaaacaacataccgtcctgactgccgtctgcattcattatcgcggcaatgcggaaaaccgcgtccaaaccaaccgcgttgtttttaagcccctgagttcggaagaaatttccgcctatgtgcaaagcggcgaaccgatggacaaagccggtgcctacgccgtacaaggcataggcggcatctttatccaatctatcgaaggcagcttcagcggcattatgggactgcccgtttatgaaaccgtttcgatgttgcaggatttgggataccgctcccccttgtccgcccttaaaccgtaa

SEQ ID NO: 62491 - DNA, 1233 bp, Neisseria meningitidis; identical to SEQ ID NO: 55238

SEQ ID NO: 62492 - DNA, 873 bp, Neisseria meningitidis
atgagctggttagataaaatcctgccacccaaaatcaaaaaccgcagcaaagacggttcttccaatgttcccgagggtttgtggcacaaatgtccgtcttgttcggcaaccgtttattcgaccgagttgcagcagaacaatcaggtttgtccgaaatgcaaccaccacaatccgttgtcggcacgacaacgcctgaatctgcttttggatgaggatggcagagaggaggttgccggaaatgtcaaaccgacagatcctttgaagtttaaagacggcaaaaaatatccggatcgtttgagtgcggcacgcaagctgaccggggaagatgatgctttggtggtaatgaaaggcaagatgaacggtctgcccgttgtggttgctgcgtttgagttccgctttatcggcggttcgatgggttcggttgtgggcgaacgattcgtacaaggtatccgtcgggcggttgccgacaattgtccgttcgtctgtgtggcggcttccggcggtgcgcgtatgcaggagggtgtgaactcgttgatgcagatgacgaaaaccagtgccgcgctgcatttgctgacggaaaaacgcctgccgtttatatcggtattgaccgatccgactatgggcggcgtatccgccagcttcgcatttttgggcgatgtcgtgcttgccgaacccaatgcattaatcggctttgccggtccgcgcgtgattgagcagacggtgcgcgaaacgctgccggaaggcttccaacgcgccgagttcctgctggaaaaaggcgcaatcgaccagattgtcgaccgccgcgatatgaagcggcgcatcagtgatttgattacgctgttgtgccgtcaggacaaagtttccgccgcttga

SEQ ID NO: 62493 - DNA, 1815 bp, Neisseria meningitidis
atgcccgctgaaacgaccgtatccggcgcgcgccccgccgccaaactgccgatttacatcctgccctgcttcctttggataggcatcatcccctttaccttcgcgctcaggctgcaaccgtcgcccgacttttaccacgatgccgccgccgcagccggcctgattgtcctgttgttccttacggcaggaaaaaagctgtttgatgtcaaaatcccacccatcagcttccttctgtttgcaatggcggcgttttggtatcttcaggcacgcctgatgaacctgatttaccccggtatgaacgacatcgtctcttggattttcatcttactcgccgtcagcgcgtgggcctgccggagcttggtcgcacactacggacaagaacgcatcgtgaccctgtttgcctggtccctgcttatcggctccctgcttcaatcctgtatcgtcgtcatccagtttgccggctgggaagacacccctctgtttcaaaacatcatcgtttacagcgggcaaggcgtaatcggacacatcgggcagcgcaacaacctcggacactacctcatgtggggcatactcgcctccgcctacctcaacggacaacgaaaaatccccgccgccctcggcgtaatctgcctgattatgcagaccgccgttttaggtttggtcaactcgcgcaccatcttgacctacatagccgccatcgccctcatccttcccttctggtatttccgttcggacaaatccaacaggcggacgatgctcggcatagccgcagccgtactcctaaccgcgctgttccaattttccatgaacaccattctggaaacctttaccggcatccgctacgaaactgccgtcgaacgcgtcgccaacggcggtttcacagacttgccgcgccaaatcgaatggaataaagcccttgccgccttccagtccgccccgatattcgggcacggctggaacagttttgcccaacaaaccttcctcatcaatgccgaacagcacaacatatacgacaacctcctcagcaacttgttcacccattcccacaacatcgtcctccaactccttgcagagatgggaatcagcggcacgcttctagttgccgcaaccctgctgacgggcattgccgggctgctgaaacgccccctgacccccgcatcgcttttcctgatctgcacgcttgccgtcagtatgtgccacagtatgctcgaatatcctttgtggtatgtctatttcctcatccctttcggactgatgctcttcctgtcccccgcagaggcttcagacggcatcgccttcaaaaaagccgccaatctcggcatactgaccgcctccgccgccatattcgcaggattgctgcacttggactggacatacacccggctggttaacgccttttcccccgcccctgacgacagtgccaaaaccctcaaccggaaaatcaacgagttgcgctatatttccgcaaacagtccgatgctgtccttttatgccgacttctccctcgtaaacttcgccctgccggaataccccgaaacccagacttgggcggaagaagcaaccctcaaatcactaaaataccgcccccactccgccacctaccgcatcgccctctacctgatgcggcaaggcaaagttgcagaagcaaaacaatggatgcgggcgacacagtcctattacccctacctgatgccccgatacgccgacgaaatccgcaaactgcccgtatgggcgccgctgctacccgaactgctcaaagactgcaaagccttcgccgccgcgcccggtcatccggaagcaaaaccctgcaaatga

SEQ ID NO: 62494 - DNA, 1569 bp, Neisseria meningitidis
atgaaacaccgtactttcttttccctttgcgccaagttcggctgcctgcttgcgctgggtgcttgttcgcccaaaatcgtcgatgccggagccgcgaccgtgccgcacactttatccactttgaaaaccgcagacaaccgccccgccagtgtttacttgaaaaaagacaaaccgacgctgattaaattttgggcgagctggtgtcctttgtgtctgtccgaattgggacagaccgaaaaatgggcgcaagatgcaaaattcagctccgccaacctgattaccgtcgcgtctccgggctttttgcacgagaaaaaagacggcgacttccaaaaatggtatgccggtttgaattatcccaagctgcccgtcgtaaccgacaacggcggcacgatcgcccaaagcctgaatatcagcgtttacccctcgtgggcgttaatcggtaaagacggcgacgtgcagcgcatcgtcaaaggcagcatcaacgaagcgcaggcgttggcgttaatccgcgacccgaatgccgatttgggcagcttgaaacattcgttctacaaacccgacactcagaaaaaggattcaaaaatcatgaacacgcgcaccatttacctcgccggcggctgcttctggggcttggaagcctatttccaacgcatcgacggcgtggttgacgcggtatccggctacgccaacggcaacacgaaaaatccgagctacgaagacgtgtcctaccgccatacggggcacgccgagaccgtcaaagttacctacgatgccgacaaactcagcctcgacgacatcctgcaatatttcttccgcgtcgttgatccgaccagcctcaacaaacagggcaacgacaccggtacgcaataccgcagcggcgtgtactacaccgaccccgccgaaaaagccgtcatcgccgccgccctcaaacgcgagcagcaaaaataccaactgcccctcgttgttgaaaacgagccgctgaaaaacttctacgatgccgaggaataccatcaggactacctgattaaaaaccccaacggctactgccacatcgatatccgcaaagccgacgaaccactgccgggcaaaaccaaagccgccccgcaaggcaaaggcttcgatgcggcaacgtataaaaaacccagtgatgccgaactcaaacgcaccctgaccgaagagcaataccaagtgacccaaaacagcgcgaccgaatacgccttcagccacgaatacgaccatttgttcaaacccggcatttatgtggacgttgtcagcggcgaacctttgttcagctccgccgacaaatatgattccggctgcggctggccgagcttcacgcgcccgattgatgcaaaatccgttaccgaacacgatgatttcagctacaacatgcgccgcaccgaagtgcgcagccacgccgccgattcgcatttgggacacgtcttccccgacggcccgcgcgacaaaggcggactgcgctactgcatcaacggcgcgagcttgaaattcatcccgctggaacaaatggacgcggcaggctacggcgcgttgaagagtaaagtgaaataa

SEQ ID NO: 62495 - DNA, 1143 bp, Neisseria meningitidis; identical to SEQ ID NO: 45167

SEQ ID NO: 62496 - DNA, 234 bp, Neisseria meningitidis; identical to SEQ ID NO: 45569

SEQ ID NO: 62497 - DNA, 2853 bp, Neisseria meningitidis
atgaaactgtccgaactgttcaaccccgacgaatttgccgcgcggcatttgagttttggcgacgaagcggcgttgcttgccgctgtcggcgagaaaagtatggacgattttgtcggcaacaccgtgccgcaaagcatccgtatgccgtccgaactcgatttgcccgaggccttgaccgaggcggacgcattggcgaaattgaaaggcattgcgtcgaaaaacgtaatcaacaagtcctatatcggtttaggctattacccgacccgcgtgccgaacgtgattttgcgcaacgtgttggaaaatccgggttggtacaccgcctacacgccgtatcaggcggaaattgcccagggtcgtttggaagcgttgttaaacttccaacaagtgtgtatcgatttgaccggtttccctgtggcgggcgcgtctttgctggacgaggcaactgctgcggctgaagcgatggcgatggcgcaccgcgtgggcaaggtgaaatccgagcgtttctttgtggatgcgcgcgtgtatccgcaaactttggacgtgatgaaaacccgcgccaagtatttcgactttgaactggtggtcggcgattttgctcaagccgacgagggcgaatacttcggcgcgctgttccaatacgtcggcaaagacggcgatgtgcaagacttgcaggacgttatcggccgtctgaaagccaaaggcacaatcgtggccgtttccgccgacattatgagcttggttttgctgaaatcgcctgccgaattgggcgcggatattgctttgggcaacacccaacgcttcggcgtaccgatgggcttcggcggtccgcatgctgcttatttcgcgtttaaagacgagttcaaacgttccgccccgggccgtatcatcggcgtatccaaagacgcatcgggcaaacctgccttgcgcatggcgttgtccacccgcgagcaacacatccgccgcgaaaaagcgacatccaatatttgtaccgcgcaggcattgctggcgaacttggcgggtatgtacgccgtttaccacggccctgaaggtgtgaaacgcatcgccaaccgcattcacgcgctggcttctgcctttgccgatgcgctggtttcagacggcctgaatgtggttcataaggtcttcttcgataccgttaccgtcgatttcggcaacaaagagaaagcagaccaagtgtttgccgctgctttggaatcgggctataacctgcgccgcgttaacgatactcaagttgcggctgcattccacgaaacatcggcatgcgaagatttggttgatttgtaccgcgcgtttaccggcaaggatgcgttcgcatttgccgatgatgtcaaaggccgtctgaacgccgaattgctgcgtcaagatgacattctgcaacatcctgtgttcaaccgttaccacaccgaacacgaaatgttgcgctatctgaaaaaactcgaagaccgcgatttggcgatgaaccgcagcatgatttcgctcggtagctgcaccatgaaactcaacgcgactgcggaaatgctgccgattacttgggcggagttctccgacatccacccttacgctcccgaagcgcaaaccgtcggctaccgcgaattgcttgccgatatggaaaacagcctgaaagccattaccggctttgacgcgatttccttccagcccaactccggcgcgcagggcgaatacagcggtatgctgtccatccgccgttaccaagaagccaacggcgagggacaccgcaacatctgtctgattccgaaatccgcccacggtaccaaccctgcgactgcggccatgctgggcttgaaagtcgtcgttgtcgataccgacgaacacggcaacgtcaacatcgacgatttgaaagccaaagccgagcaacaccgcgacactttgtccgccatcatgattacctatccgtctacccacggcgtgtacgaagaaggcatccgcgacatctgccgcatcatccatgaaaacggcggacaggtttacatggacggcgccaacctcaacgcccaaatcggcatcatgcagcctgccgaagtcggcgcggacgtgttgcacatgaacctgcacaaaaccttctgtatccctcacggcggcggcggtccgggcatgggtccgattggcttgaaagcccatctggctccgttcgcaccaggccatgtggtaaccgatatgcacaacgccagtgccgatcaaactgccgtggctgccgcagctttcggttctgcgtccatcctgccgattacttggatgtacctgaccatgatgggcaaacaaggcatggagcaggcaacacgctgggcattgctcaacgccaactacgttgccaaacgcttgagcgaagactatccgattctgtatacaggcaaaaacggccgcgtcgcgcacgaatgtatcgtcgacttgcgtccgctcaaagccgaaagcggcattaccgaaaccgacatcgccaaacgcctgatggactacggcttccacgccccgaccgtctccttccccgttgccggcacgctgatgatcgagccgaccgaaagcgagagcaaagccgaactcgaccgcttcatcgccgccctgaaacaaatcaaacaggaagtgttgaaagtcgagcgcggcgaatggccgaaagaggacaacccgttggtgaacgctccgcataccgcatccgacgtaactggcgaatggacgcatccgtattcccgcgaagaagccgtcttcccattgccgttcgtccgcgaacacaaattctggccgagcgtcaaccgtgtggacgacgtgtacggcgaccgcaatctcgtgtgcagctgcccaccgatggaaaattatgaagactga

SEQ ID NO: 62498 - DNA, 396 bp, Neisseria meningitidis; identical to SEQ ID NO: 39569

SEQ ID NO: 62499 - DNA, 867 bp, Neisseria meningitidis
atgaaaggcatcatactggcaggcggcagcggcacgcgcctctaccccatcacgcgcggcgtatccaaacagctcctgcccgtgtacgacaaaccgatgatttattaccccttgtcggttttgatgctggcgggaatccgcgatattttggtgattaccgcgcctgaagacaacgcctctttcaaacgcctgcttggcgacggcagcgatttcggcatttccatcagttatgccgtgcaacccagtccggacggcttggcacaggcatttatcatcggcgaagaatttatcggcaacgacaatgtttgcttggttttgggcgacaatattttttacggtcagtcgtttacgcaaacattgaaacaggcggcagcgcaaacgcacggcgcaaccgtgtttgcttatcaggtcaaaaaccccgaacgtttcggcgtggttgaatttaacgaaaacttccgcgccgtttccatcgaagaaaaaccgcaacggcccaaatccgattgggcggtaaccggcttgtacttctacgacaaccgtgccgtcgagttcgccaaacaaatcaaaccgtccgcacgcggcgaattggaaattaccgacctcaaccggatgtatttggaagacggctcgctctccgttcaaatattgggacgcggtttcgcgtggctggacaccggtacgcacgaaagcctgcacgaggcggcttcgttcgtccaaaccgtgcaaaacatccaaaacctgcacatcgcctgcctggaagaaatcgcttggcgcaacggttggctgacgaaaaaaaatgtggaaacacgggcaaagcctttggaaaaaaccgcctacgggcaatacctgctgcgcctaatcggcaaataa

SEQ ID NO: 62500 - DNA, 1428 bp, Neisseria meningitidis
atgtttttctccgccctgaaatcctttctttctcgatacattactgtatggcgcaatgtttgggcggtgcgcgaccagttgaaaccgcccaaacgcacggcggaagaacaggcgtttttgcccgcgcatttggaactgaccgatacgccggtctctgccgctccgaaatgggcggcgcgttttattatggcgtttgcgcttttggctttgttgtggtcctggttcggcaaaatcgatattgtggcggcggcttcgggcaaaacggtgtcgggcgggcgcagcaaaaccatccagccgctggaaacggcggtggttaaggcggtacatgtgcgcgacgggcagcatgtgaaacagggagaaacgctggcggaactggaggctgtgggaacagacagcgatgtggtgcagtcggagcaggctttgcaggctgcccaattgtccaaactgcgttatgaagcggtattggcggcattggaaagccgtaccgtgccgcatatcgatatggcgcaagcacggtctttaggtctctccgatgccgatgtgcaatcggcgcaggtgttggcgcagcaccagtatcaggcatgggcggcgcaggatgcgcaattgcagtcggctttgcgcggccatcaggcggaattgcagtcggccaaggcgcaggagcagaagctggtttcggtgggggcgatcgagcagcagaaaacagcagactaccgccgtttgcgggccgacaattttatttcggaacatgcgtttttggagcagcagagcaaatcggtcagcaattggaacgatttggaaagtacgcgcggtcagatgaggcagattcaggcggccattgcacaggcggagcagaatcgggtgctgaatacgcagaacctgaaacgcgatacgctggatgcgctgcgccaggcaaacgaacagattgaccaataccgcggccaaacggataaggcaaagcagcggcagcagctgatgacaatacagtcgcctgcggacggcacggtgcaggaattggccacctatacggtgggcggtgtggtgcaggctgcccaaaaaatgatggtgattgcgcccgatgacgacaaaatggacgtggaagttttggtattgaacaaagacatcggttttgtggaacagggacaggatgcggtggtgaagattgagagctttccctatacgcgctacggttatctgacgggcaaggtgaaaagtgtcagccatgatgcggtaagccacgaacagttgggcttggtttatacggcggtggtgtcgctggacaaacataccttgaatattgacggcaaagcagtgaatctgacggcgggcatgaatgtcacggcggagattaaaacgggtaaacggcgggtgctggattatctgttaagcccgctgcaaaccaaattggacgaaagctttagggagcgatag

SEQ ID NO: 62501 - DNA, 1473 bp, Neisseria meningitidis
atgaaccagacaagccgcgatctgacccgcatcagccacaacactaaaatcgtcgccacccttgggccgggcagcaacaacgtcgaactgttggaagacatgatccgcgtcggcggtctgaacgtcgtccgcttcaacttcagccacggcacgcccgaattccatcaggaaaacgcccgcatcgtgcgcgaggcggcaaaacgcaccggacaggaaatcgccatcattgccgacctgcagggcccgaaaatccgcgtgggcaaaatcgccggcggcggcatcgaattgaacaaaggcgaaacgctggtactggatgccgcgctcgaaggcgaaggcacgcgcgaggcggtcggtttggactaccgcgacctgcccgacgacgttgccgcaggcgacgtattgtggctggacgacggcctgctgaccctgaccgtggaatccgtcgaaggcagcaggattatcacaagggtggaaaacagccatgtcctgaaaagcaacaaaggcatcaacaaacgcggcggcgggctgtccgcaggcgcgttgaccgaaaaagacttccgcgacctgaaaaccgcgattgccatcggttgcgactacctcgccatcagctttgtgaaatccgccgaagatttgcatatcgcgcgcgccaaagtcgaagaagaaatgaagggcagcactgccgtgcgccccggtttggtttccaaaatcgaacgcgtggaagcgattgaaaacttggacgaaatcatccttgccggcgacggcattatggttgcgcgcggcgacttggcggtcgaagtcggacacgccgccgtccccgccctgcaaaaacggatgatccgccgcgcccgcgagttgcgccgcttcagcattacggcgacgcaaatgatggaatcgatgattaccaaccccgtgccgacccgcgcggaagtcagcgatgtggcaaacgcggtattggacggtaccgatgcggtgatgtgttccgccgaaaccgccgtcggcgcgtatccgtttgaaaccgtcagccaaatggcaattatctgcgcggctgcggaaaaagagcaggattcgctcaacggcgttgccgaacaggcggagtatcccgaagcggtcagcaccaacctggcggttgccggcggcgcggtcagcgtggcgcgcgcggttcacgccaaagccatcgtcgccctgaccgaaagcggctcgaccgcctttgaaatcagccgccacaacatcaccctgccgattttcgcgctgaccccgagcgtttccgcccaacgccgtatggcgatgtaccggggcgtgcgcccgctgattttggcaaccagtaccgaccacgacacggcgttgaacgaagtcgaaacgatgctggtggaacacaacatcctgcattccggcgaccagtacatcatcaccagcggttcgcaaatgcgcgaatccggttcgaccaatacgctggaagtgctgcgcgtcaaataa

SEQ ID NO: 62502 - DNA, 384 bp, Neisseria meningitidis; identical to SEQ ID NO: 38550

SEQ ID NO: 62503 - DNA, 1290 bp, Neisseria meningitidis
atgaaaaaactcaacacccaatcgcccgatttccaagccggactcaaagccctgctggcttttgaaaccgcgcaaaaccccgaaaccgaacgcatcgtcgccgacatttgcgccgacgtgcaaaagcgcggcgatgcggctttgattgaatacaccaacaaattcgatcagacaaacgctaaaagcatcgatgatttaatactcacgcaagccgatttgaaagcggcgttcgagcgcattccgaacgacgttcagacggcattgcagaccgccgcccgccgtgtcgaaagctaccaccaacgccaaaaaatggaatcgtggagctacaccgatgaagacggcacgctgttgggacaacaaatcacaccgcttgaccgcgtcggcatttacgtccccggcggcaaggcggcgtatccgagttccgtcatcatgaacgccatgcccgcccacgtcgcaggtgtgaaagaaatcatcatggtcgtgccgacaccaaaaggcgaacgcaacgacatcgtacttgccgccgcatacgtcgccggcgtaaccaaagtcttcaccgtcggcggcgcgcaggcggttgccgccctcgcctacggcacggaaaccatcccccaagtcgataaaatcaccggtccgggcaacgccttcgtcgccgccgccaaacgccgcgtgttcggcgtggtcggcatcgacatggtggcggggccgtctgaaatcctggtcatcgccgacggcacgacacctgccgattgggtggcgatggatttgttcagccaggccgaacacgacgaaattgcccaagccatcctcatcggcacgtcgcaagcgtatctcgacgaagtagaagccgctatggaccgcctgatcgaaactatgccgcgccgcgacatcatcgaagcctcgctcggcaacaggggcgcgatgatactcgccaaagacttggacgaagcctgcgaaatcgccaactacatttcccccgaacacttggaactgtcagtcgaaaatccgcaggaatgggcgaaaaaaatccgccacgccggtgcgattttcatgggacgctacaccggcgaaagcctcggcgactactgcgccggtccaaaccatgtattgcccaccagccgaaccgcccgcttttcctcgcctttggggacatatgatttccaaaaacgctccagcctgattcaggtttcggaacagggcgcgcaaaaattaggcgaaaccgccagcgtgctggcacacggcgaaagcctgaccgcccacgcccgcgcggcagagttccgtatgaaataa

SEQ ID NO: 62504 - DNA, 360 bp, Neisseria meningitidis
atgctttccaacatcatccccctttccatcggtgcggcactcggtacaacggcgcgttggctgctcaacctcgccgttcccgcatcgttgtctcccgccacgggcaacctgtttgccaactggacgggcgcgctgctcatcggcatctttgccgaaaccgtcaaccatccgcaatggaagctgctgctgattaccggttttctcggcagcctgaccacgctttccggattttcactggaaaccgtaaccctgctccaatcgaatcgtcctgcttcagcacttgccaatattttcctgcacacggcaggttcgctgctgctgacttggctcgggctgaagatagggacggcagtcaaataa

SEQ ID NO: 62505 - DNA, 780 bp, Neisseria meningitidis
atgagcgcaaccattcccccaaaaatcatccgatacgacagcaatccgaccgatgtctattttttcggcacttgcgtccttgatctttttatgcccgaagcaggcatggatgccattaccctaatcgagcaacagggcatacgcgtccatttcccgatggcgcaaagctgctgcggccagcccgcctattcatccggccatccgaccgaagcctttgatgtcgccagagcgcaactcgaccttttccccgaggagtggccgattgtcgtaccgtccggttcgtgcggcggtatgatgaagcaccattggccgacgctgtttaaaggcagcgagtacgaggaaagggctgtggattgcgccgaccgcatcatcgagtttacccatttcctgcttgccatcggtttcaaacccgaagacaagggcgaaccgctcaaagtcgccgttcacacttcctgcgccgcccgccgcgaaatgaatgtccatctttcaggctggcaactgattgacggtatggaaaacgtcgaacgcatcgtccacgaccacgaaagcgaatgttgcggcttcggcggcacattctccgtcaaacaagccgatatttccggcgcgatggtaaccgacaaagtcgccgcgctgaaagaaaccggcgcaaccgaaatcatcagcgcggactgcggctgtatgatgaacatcggcggcaaaatcgccaaggacgagccggatatgccgcgtccgaaacatatcgcatccttcttgttggaacgcaccggaggcaaagcatga

SEQ ID NO: 62506 - DNA, 483 bp, Neisseria meningitidis
atgggaatagaaggcgttttgaaaaaaggtttcatcaccaccagcgcggatacggtgttgaactatatgcgtaccggttcgctgtggccggttactttcggcttggcctgctgcgccgtggaaatgatgcacgcgggtatggcgcgttatgaccttgaccgtttcggcatcattttccgtccgtctccccgtcaggccgacctgatgattgtggcaggtacactgaccaacaaaatggcgcccgccctgcgccgcgtatacgaccagctcgccgagccgcgctgggtattgtctatgggctcgtgtgccaacggcggcggctattatcactattcttattccgttgtgcgcggtgccgaccgcgtcgtgccggtagacgtttatgtgccaggttgtccgccgactgcggaagccctgatttatggcctgattcagctccaacaaaaaatcaagcgcacttccaccatcgcgcgtgacgaataa

SEQ ID NO: 62507 - DNA, 918 bp, Neisseria meningitidis
atgaatttgactaaaacacaacgccaactgcacaactttctgaccctcgcccaagaagcaggttcgctgtccaagctcgccaaactctgcggctaccgtacccccgtcgcactctacaaactcaaacaacgccttgaaaagcaggcagaagacccaaatgcacgcggcatccgtcccagcctgatggcaaaactcgaaaaacacaccggcaaacccaaaggctggctcgacagaaaacaccgcgaacgcactgtccccgaaaccgccgcagaaagcaccggaactgccgaaacccaaattgccgaaaccgcatctgctgccggctgccgcagcgttaccgtcaaccgcaatacctgcgaaacccaaatcaccgtctccatcaacctcgacggcagcggcaaaagcaggctggataccggcgtacccttcctcgaacacatgatcgatcaaatcgcccgccacggcatgattgacatcgacatcagctgcaaaggcgacctgcacatcgacgaccaccacaccgccgaagacatcggcatcacactcggacaagcaatccggcaggcactcggcgacaaaaaaggcatccgccgttacggacattcctacgtcccgctcgacgaagccctcagccgcgtcgtcatcgacctttccggccgccccggactcgtgtacaacatcgaatttacccgcgcactaatcggacgtttcgatgtcgatttgtttgaagaatttttccacggcatcgtcaaccacagtatgatgaccctgcacatcgacaacctcagcggcaaaaacgcccaccatcaggcggaaaccgtattcaaagccttcgggcgcgccctgcgtatggcagtcgaacacgacccgcgcatggcaggacagaccccctcgaccaaaggcacgctgaccgcataa

SEQ ID NO: 62508 - DNA, 255 bp, Neisseria meningitidis
ttgtcggctcaaaactacgcccgcgagctggaacaggcgcgtgcggaagctaaaaaatatgaagtcaaggcgcacgctgtcggcatggctttggcgaaaaaacaggcggaagtcagccgtctgaaaacggaaaataaaaaggaaatcgaaaatgtccttactcaagaccgtaaaaatgcaggcggcggttgtattgacggctttggctctcacggcttgcagctctacaagcgcgccctcggctacggaaattaa

SEQ ID NO: 62509 - DNA, 177 bp, Neisseria meningitidis; identical to SEQ ID NO: 38772

SEQ ID NO: 62510 - DNA, 558 bp, Neisseria meningitidis
atggatgctttaaaattattgacgaaccgccgatcttccaaaaagctgaagcaccccgcccccgatgcggcggagttggaacaaatatttcaggcggcaacccaagttcccgatcacggcaatatgcgccccttccgttttaccgtgattcaaggcgaggtaggattgcaacgttttcgcgatgtgttaaagcaaacggttgccgaattgaatttcggcgacgatgcgatgaaaaaggcggaaaaagtgggcaatatggcgccgatggttatcggtgtaacgtttgcgcccaaccagaaagtcgccaagccgaagccggaatgggagcagatgctgacggcgggttgtgcggcgtatgcgctgcaactggcggcaacggctcagggattcgacaatgtctggattacggggatgtgggtcaacagccccttgttgcgggaggctttcggttgtgcggataaggataaaatcatcgggctgatgatggtcggcacgccgacagaggaagtgcataagcccaagaataccgatttggaagcgtttgtcagccattggtaa

SEQ ID NO: 62511 - DNA, 831 bp, Neisseria meningitidis
atgttcaaagccgtcctgctcggacaatggcacagcctctccgatcccgaactcgaacacagcctcatcacccgcatcgatttcaacctgttttgccgtttcgacgaactgatcatccccgattacagtaccttatgccgctaccgcaactggctggcgcaagacgacaccctgtccgaattactcaaactgattaactgccaactgaccgaaaaaggcctaaaaatagagaaagcatccgccgccgtcgttgatgccaccattatccagaccgccggcagcaaacagcgtcaggccatagaagttgacgaagaaggacaaatcagcggtcaaaccacaccgagtaaggacagcgatgcccgttggataaagaaaaacggcctctacaaactcggttacaaacaacatacccgtaccgatgcagaaggctatatcgagaaactgcacattactcccgccaatgcccatgagtgcaaacacctgtcgccgttgttggaagggttacccgaaggtacgaccgtctatgccgacaaaggctacgacagtgcggaaaaccggcaacatctggaagaacatcagttgttggacggcattatgcgcaaagcctgccgcaaccgtccgctgacggaggcgcaaaccaaacgcaaccgatatttgtcgaagccccgttatgtggtcgaacaaagcttcggtacgctgcaccgtaaattccgctatgcgcgggcagcctatttcgggctgattaaagtgagtgcgcaaagccacctgaaggcgatgtgtttgaacctgttgaaagcggccaacaggctaagtgcgcccgctaccgcctaa

SEQ ID NO: 62512 - DNA, 1428 bp, Neisseria meningitidis; identical to SEQ ID NO: 59416

SEQ ID NO: 62513 - DNA, 402 bp, Neisseria meningitidis
atgaaagacaagcaccattcttccgccatgcggctggacaaatggctttgggcggcacgttttttcaagacccgttcccttgcgcaaaagcacatcgaactgggtagggttcaagtaaacggctcgaaggtcaaaaacagtaaaaccatagacatcggcgatattatcgacctgacgctcaattcccttccctataaaatcaaggttaaaggtttgaaccaccaacgccgcccggcatccgaggcgcgacttctgtatgaagaagacacgaaaacagcaacattgagggaagagcgcaaacagctcgaccaattcagccgcatcacttccgcctatcccgacggcagaccgaccaagcgcgaccgccgccaactggacaggctgaaaaaaggagactggtaa

SEQ ID NO: 62514 - DNA, 1452 bp, Neisseria meningitidis
gtgaattatttccctattttcgccaacctcgccggccgccccgtattggtcgtaggcggcggcgcggtcgccgcacgcaaaatcagcctgctgctgaaggcgggcgcagaggtcagggttgccgcaaaacacctgaatgccgaactctccgcgttggcggcggaaaacaaaatcctgtggcttgccgaagaatttcgtgccgaacacatccgcacggttttcctcatcattgcggcaagcagcgaccaagccctcaaccggcgcgttttccatcttgccgaaagctgccaaaagccggtcaacgtggttgacgaccgcgaccattgcagcttcatcttcccgtcggttatcgaccgcaacccggttcagattgccgtttccagctccggcagcgcgcccgtcctcgcccgactgctgcgtgaaaggctggaagccctgctgccgccgtctttgggcgatatggcggaaatttcaggaaggtggcgcgatgccgtcaagggcaaactgaaatccgttaccgaacgccgccgcttttgggaaaagcagtttaacggacgtttcgccgccctcgtcaaaaaccggcaaaacacccttgccgaacgggaattggcaggccaattggaacaaagtcgtcaaaatgatcaaggcggctccgtctcgctggtcggcgcgggtcccggcgatgcggggctgctgacgctcaaagggctgcaggaaatccagcaggcagacgtggtgctttacgacgcgctggtttcagacggcatactgtccctcgtccgccgcgatgcggaacggatttttgtcggcaagcgcgcccggggcgaccgcaccccgcaagaggacaccaatgcgcttatggtcaggctggcccgcgaaggcaggcgcgtggtgcgtttgaaaggcggagaccctttcgtgttcggacgcggcggcgaagaattggaaaccttggcacgccatcagattccgttttcggtcgtccccggcattaccgccgccgtcggcgcgaccgcctatgccggtatcccgctcacgcaccgcgattatgcccaaagtgcggttttcgtaaccggccaccgcaaggcggatgcgcccgacatcgaatggcagaccctcgcccgcagccgccagaccttggtgatttatatgggtgcgctcaaagccgccctgattgccgaacggctgcaacagcacggacgctcgcccgacacgccggcagccgtcatcagccaaggcacgctgccggctcaaaaaaccgcaaccggcacgctcgccaaccttgccgaactcgccgaaaccgcgccgaatccggcattgattgtcataggcgaagtggtggggctgcacgaaaaactcgcctggttcggtgaaaacggcgaaggagaaaaccgggtcgggcaggcgtatcccgcattgggcggactgaatgccggacaacgggcggcataa

SEQ ID NO: 62515 - DNA, 402 bp, Neisseria meningitidis
atgcgccgggcgttgattgcgaaaattaaaatcgctcaaaaggagctgggtttggatgatgcgacgtatcgcgcggtgttggagcgtgtgacgggcaagcgttcgtgtaccgagtgcagcatccctgagctggagcgcgtggtcgaggatttgcgccagcatgggtttacgccgaaaaaaacggcaggccgtcgcccgaaccgccgaagctctgccgatcctatgatgcggaaaatcgaagccctgctgctggataacggctggacttggaattatgcgcatggtacggcgaaaaagatgtttaaggttgaccgcgtggaatggttgtccgacggcaatatgcacaagctggtggcagcattgcagattgcggcgaaccgccgtaagaaaggggctgtgtga

SEQ ID NO: 62516 - DNA, 657 bp, Neisseria meningitidis
atgactattaaaattattctgatagacgaccacaccctcttccgcagcggcattaaagcccttttgtcgcgccaacacggttttgaagtcatcggcgaagccgcagacggcctctcgggcattaaaatgatcaaccggctccaacccgatgtcgtcctgcttgaccttgatatgcccggtatgaacggacgcgaagcactctcccaaatcatcagcatcaatccgcagcaggcagtgattatgctgaccgtttccgaagacaacgacgacttgaccgaatgtatgcgcatcggcgcgcgcggctacctgctgaaaaacatcaacgccgactttctgctcgaaagcatacgcaaagccgccgaaggcgataatgtattctcgcccgagatgaccgccaaactcgtcaaaagcctgatttccccccaacctgcccaagggacgcaggcactctcctcacttacccctcgcgaactggaaatcttgggctatctcgccgcaggacacagcaacaaaatcatcgcccgccacctcgatcttgccgaatccaccgtcaaagtccacgttcaaaacctgctccgcaaactcaacctcagcagccgggtgcaggccgctgtttacgccatccggcacaacgtcccccaacccatgctggaataa

SEQ ID NO: 62517 - DNA, 522 bp, Neisseria meningitidis
atggctaaaacccgaatcaaacagcccgccatcgaagcggcacaagacaaaacggaagttactgcatttatccgccaaatcggcgacttgcagcgcgaagtcaaacgcctggaaaccgaagccggagacaaaaaagcggctatcgaagaagaatatgccgccaaagccgcgccgatgtgtgccgaaatcatgagcctgaccgaacgtgtggccgcctactgcgaagcgcataaggacgagctgacggaaaatggtaaaaccaaaaccgtggactttactactggcctgattaaatggcgcattcgtccgccatccgtcaaggtaacgggcgtggcggccgtcttggcgtggctctcggaaaaatccgcctttgccgagtttgtccgcactaaaaaggaaatcgacaaagacgccatcctgaatcaaaaagagcgtttttcagacggccaagttccaggaattaagattgtatcggggcttgaggattttgtgattgagcctactgagcaggagttggcgtga

SEQ ID NO: 62518 - DNA, 924 bp, Neisseria meningitidis; identical to SEQ ID NO: 61680

SEQ ID NO: 62519 - DNA, 273 bp, Neisseria meningitidis; identical to SEQ ID NO: 41774

SEQ ID NO: 62520 - DNA, 1908 bp, Neisseria meningitidis
atgaacccaagccccctactcgacctgattgacaacccgcaagatttgcgccgcctggataaaaaacagttgccccaagtcgccgccgagttgcgagagtttctgctggaatccgtcggtcaaaccggcggtcatttcgccagcaacttaggtgcggtcgagcttaccgtggctctgcactatgtttatcacacgcctgaagacaagttggtttgggacgtcggtcatcaaagttatccgcacaaaatccttaccggacgcaaaaaccagatgcatactatgcgccgctacggtggtttggcgggcttccccaagcgcagcgaatccgaatacgacgcgtttggcgtagggcattcctccacctccatcggcgcggcgttgggcatggcggcggctgacaaaattttgggcagcgaccgccgcagcgtcgccattatcggcgacggcgcgatgacggcgggtcaggcgtttgaagccttgaactgcgcgggcgatatggacgtgaacttgctggtcatccttaacgacaacgaaatgtcgatttcccccaacgtcggcgcgctgccgaaatacctcgccagcaacgtcgtgcgcgatatgcgcggcctgttgagcaccatcaaagcccaatcgagcaaggttttagacaagctgcccggcgcgatggagctcgcccaaaaagtcgaacacaaaatcaaaacgctggcgggtgaagccgaacatgcaaggcagtctctgtctttgtttgaaaactttggcttccgctacaccggccccgtggacggtcataacgtcgaacatctggttgacgtattgaaagacttgcgcagccgcaaaggcccacaactgctgcacgtcatcaccaaaaaaggcaacggctacaaactcgccgaaaacgatcccgtcaaataccacgccgtcgccaacctgcccaaagaaagcgcggcgcaaatgccgtctgaaaacaaacctgccgccaaaccgacctatacccaagtattcggcaaatggctgtgcgaccgggcggcggcagattcccgactggttgcgattacccccgccatgcgcgagggcagcggactggtggagtttgaacaacgattccccgaccgctatttcgatgtcggtattgccgagcagcacgccgttacctttgccggcggtttggcgtgcgaaggcatgaagcccgtcgtggcgatttattccacctttttacaacgcgcctacgaccaactggtgcacgacatcgccctgcaaaacctgcccgttttgtttgccgtcgaccgtgcgggcatcgtcggcgcggacggcccgacccacgccggtctgtacgatttgagctttttgcgctgcgtgccgaacatgattgtcgccgcgccgagcgatgaaaacgaatgccgcctgctgctttcgacctgctatcaggcagacgcgcccgccgccgtccgctatccgcgcggcacgggtacgggcgtgccggtttcagacggcatggaaaccgtggaaatcggcaagggcattatccgccgcgaaggtgagaaaaccgcattcattgccttcggcagtatggtcgcccccgcattggcggttgccgaaaaactgaacgccaccgtcgccgatatgcgcttcgtcaaaccgatagacgaagagttgattgtccgccttgcccgaagccacgaccgcatcgttacccttgaagaaaacgccgaacagggcggcgcaggcggcgcggtgctggaagtattggcgaaacacggcatctgcaaacccgttttgcttttgggcgttgccgataccgtaaccggacacggcgatccgaaaaaacttttagacgatttgggcttgagtgccgaagcggtggaacggcgtgtgcgcgcgtggttgtcggatcgggatgcggcaaattaa

SEQ ID NO: 62521 - DNA, 303 bp, Neisseria meningitidis
ttgggattcaataatcttgtttcgcttgccgcgttgattgaaaaggctttccctattcgatatacgcctgccggaatccctgttttagatattattttaaagcatgaatcatggcagaaagaaaatggacagcaatgttttgtccaattggaaattccggcacggattttaggcaggcaggcggaagagtggcagtatcggcaaggtgtatatgttcacgtcgaaggttttttggctcaaaaaagcagacgttccctgatgccgatgctcagaatacaaaatattaaagaatataaaggttaa

SEQ ID NO: 62522 - DNA, 753 bp, Neisseria meningitidis
atgtttcagacgacctttttattagactcaagttcactggcgtgcgtaccacaccttacctgcagatttaatgtgggttacggcttgctgaagataaagttattaaggaatttggcaaatatggaaaagattgagaaatttaaatctgaattattggatgacatttttgagtacattcaatgcatatctatttttgtccacaagaaaaagatatattatttgattgattataaggaaaatttcatattaaacatgaagttggatttagattttgattttaaaaacgggaatattacgttagaacaatatcaggatgaaataaatagttgttattaccgaaacggtatctggcaattaactaaggacaattttgaaagctatcttcaatcagattcagtcattgtattaaaaaaggatgaattgaaggaactgatgtttcaggggtttacttctgatgaagcggtaaggttatattccgttgtcgagaacaagctgtcgtacaatgatcctatctcagattccggccggcaaagtgatttcttaaaaatcaatcagatttcttcgaggctgcctttattctatgtcaattttgacactgaagtgtacttacatatggattgggacagatgtcatgaagattatgtttatgacggctggtttgcaaaggcgatggattttgggtatttaataccggacgaattttgttattggaaaattgaagggcgggattattggaaatttggacaattataa

SEQ ID NO: 62523 - DNA, 1680 bp, Neisseria meningitidis
atggaaaattttgctcagctgttggaagaaagctttaccctgcaagaaatgaacccaggtgaggtgattaccgctgaagtagtggcaatcgaccaaaacttcgttaccgtaaacgcaggtctgaaatcagaatccctgattgatgtagctgaattcaaaaacgctcaaggcgaaattgaagttaaagtcggcgacttcgttaccgttaccatcgaatccgtcgaaaacggcttcggcgaaaccaaactgtcccgcgaaaaagccaaacgcgctgccgattggattgccctggaagaagccatggaaaacggcaacatcctgtccggcatcatcaacggcaaagtcaaaggcggcctgaccgttatgattagcagcatccgcgcattcctgccgggttctttggtcgacgtacgtcctgtaaaagacacttctcacttcgaaggtaaagaaattgaattcaaagtgatcaaactggacaaaaaacgcaacaacgttgttgtgtcccgccgcgccgttctggaagctaccttgggtgaagaacgcaaagccctgctggaaaacctgcaagaaggctccgtcatcaaaggcatcgttaaaaacattaccgattacggtgcattcgttgacttgggcggcatcgacggtctgttgcacatcaccgatttggcatggcggcgcgtgaaacacccgagcgaagtcttggaagtcggtcaggaagttgaagccaaagtattgaaattcgaccaagaaaaacaacgcgtttccttgggtatgaaacaactgggcgaagatccttggagcggtctgacccgccgttatcctcaaggcacccgcctgttcggcaaagtatccaacctgaccgactacggcgcattcgtcgaaatcgaacaaggcatcgaaggtttggtacacgtctccgaaatggactggaccaacaaaaacgtacacccgagcaaagtcgtacaactgggcgacgaagtcgaagtcatgattttggaaatcgacgaaggtcgccgccgtatctctttgggtatgaaacaatgccaagccaatccttgggaagaatttgccgccaaccacaacaaaggcgacaaaatctccggcgcggttaaatccattaccgatttcggcgtattcgtcggtctgcccggcggcatcgacggtttggttcacctgtccgacctgtcctggaccgaatccggcgaagaagccgtacgcaaatacaaaaaaggcgaagaagtcgaagccgtcgtattggcaatcgacgtggaaaaagaacgcatctccttgggtatcaaacaactggaaggcgatccgttcggcaacttcatcagcgtgaacgacaaaggttctttggttaaaggttccgtgaaatctgttgacgccaaaggtgccgttgttgccctgtctgacgaagtagaaggctacctgcctgcttccgaatttgcagccgaccgcgttgaagacttgaccaccaaactgaaagaaggcgacgaagttgaagccgtcatcgttaccgttgaccgcaaaaaccgcagcatcaaactttccgttaaagccaaagatgccaaagaaagccgcgaagcactgaactccgtcaatgccgccgccaatgcgaatgccggcaccaccagcttgggcgacctgctgaaagccaaactctccggcgaacaagaataa

SEQ ID NO: 62524 - DNA, 1338 bp, Neisseria meningitidis
atgctgccttccagtcggagcagtaaagaagcggaaagtaaaacggtcattcctgccgaaagacacaacatccgtgccgaaatgttgagctttgccgccgaaaacgtcatacgccgcctgaaagaggcagggtttcaggcttatgtggtcggcggcgcggtcagggacctgctgctcggcatcgaacccaaggatttcgatgtcgcaaccgatgccacgcccgaacaggtgcacaaactcttccgccgcagccgcatcatcggcaggcgttttcaaatcgtccatgtgatgaacggtgcggagattatcgaagtaacgacgtttcgcggcggtgcgaaggttcatcagaacgcgcacggcagaatcatgaaggacaacacctacggcagcatcgaagaagatgcgatgcggcgcgattttacctgcaatgccttgtattacgatcctgaaaaagaagagattttggatttccacaacgggattgccgatgttgccgcccgcaggctggttatgattggcgatgccgccgaacgctatcaggaagaccctgtcaggattttgcgcgccatccgcctgtcgggcaaattgggatttgatctgtcggaagaaaccgccgcaccgattgccgaatcaatatgccgtctgaagcacgaacctgtggcaaggctgttcgacgaaattatgaaactgctgttttcagggcacgcgcgcgagtgtctaaaacgtttgaacggatttgacataccggacgacatccatccgctgctcaatgccttgcgcgtttcagacggcatcgccggaaaaatgacggtgctcgccctgaaaaataccgatgagcggctgcgtgccgacaaatcggtttcggtcggttttgtattggcggctctgatgtggcccgagttggaacgccattggaaaagcaatctgcaacagggtttgaaacccgcgcccgccctgtccgatgcaatcaatacgatgcgcgaaaccgtcgaacgcggttggggcgtgccgcaacgcttttccgccacgatgcgcgaaatttggatgttccagccgcagtttgaaaaccgcaaaggcgcacgtccgcacaaactgtttgcacaggcgcgtttccgtgccgcctatgatttcctgctcttgcgcgccgaaaccggcaatgcggaccgcgcccttgccgagtggtggacggcgtttcagacggcatcggcggaacagcggtcggagatgaccaaaaacgaggccgccgcccgacacgaaaaaaacgaaggacaggcgaaaaaacgccgccgtcgcaggcgcaaacccaagccgaaggttgagggaacggattgggaataa

SEQ ID NO: 62525 - DNA, 540 bp, Neisseria meningitidis; identical to SEQ ID NO: 40430

SEQ ID NO: 62526 - DNA, 864 bp, Neisseria meningitidis
atggaattgaacgaatttttcgataaagcctatgccgttttgcggcgtttggatgccgtgcttccgcccgaacccgggcatacggattggaacgcgcttgccttccgctggcagagtgcgggcaaaaaaggttttttggaacacttgcccgatccgcacacctttcccttggtaaggctggcgggagtcggcaggcaaaccgaattgctggtgcgtaataccgaacagttcattgtcggcagacccgcgaacaatgtattgatgagcggcgcgcgcggaacaggcaaatcctcgctggtcaaagccctgctacacgaatatgcggataagggattgcgcctgatcgaagtcgataaaagcgatttaatcggcctgccttacctgttgacgcttttgaaggaacgtccggaaaaatttatcgtattttgcgacgatttgtcgtttgaaagcggcgatgaaacctataaggcattgaaaaccgcgttagacggcggtctgtctcaacgttgcgccaacgttttggtttacgcgacttccaacagacggcacctgatgcccgaatattttgacgagaatgccggtacgacggggatgcggggggaaatccatcagaaagaagcggtggaagaaaaaatatccctgtccgaccgattcggattgtggctcagtttttatccgttcgatcaaaacgattatctggcggcggtgcaaaattggctggaagatttcggcgtgccgtatgatgaaaccgcacagatggcggcattgcagtgggcgcagacgcggggcagccgttcgggacgttccgcgtggcagtttgcctgcgactgggcgggcaggctgccgaaacaacgggcgttgtga

SEQ ID NO: 62527 - DNA, 717 bp, Neisseria meningitidis
atgaagaccaaattaccgctttttatcatttggctgtccgtatccgccgcctgttcttcccctgtttcccgcaatattcaggatatgcggcccgaaccgcaggcagaggcaggtagttcggacgctattccctatcccgttcccactctgcaagaccgtttggactatctggaaggcagaatcgtccggctgtcgaacgaagtggaaaccttaaacggcaaagtcaaagcactggagcatgcgaaaacacacccttccggcagggcatacgtccaaaaactcgacgaccgcaagttgaaagagcattacctcaataccgaaggcggcagcgcatccgcacataccgccgaaaccgcacaaaacctctacaatcaggcactcaaacactataaaagcggcaggttttctgccgctgcctccctgttgaaaggcgcggacggaggcgacggcggcagcatcgcgcaacgcagtatgtacctgttgctgcaaagcagggcgcgtatgggcaactgcgaatccgtcatcgaaatcggagggcgttacgccaaccgtttcaaagacagcccaaccgcgcccgaagccatattcaaaatcggcgaatgccaatacaggttgcagcagaaagacattgcaagggcgacttggcgcagcctgatacaggcttacccgagcagcccggcggcaaaacgcgccgccgcagccgtgcgcaaacgatag

SEQ ID NO: 62528 - DNA, 492 bp, Neisseria meningitidis; identical to SEQ ID NO: 39111

SEQ ID NO: 62529 - DNA, 933 bp, Neisseria meningitidis; identical to SEQ ID NO: 54672

SEQ ID NO: 62530 - DNA, 1002 bp, Neisseria meningitidis
atgaaacggaaaatttggctgctgccgctgctggcggtttcggcatacctgcaggcgcagacggaagtcaggctggcggtgcataagtcgttcagcctgcccaaagggctgattgcgcgcttcgagcgggcaaacgatgcgaaggtgtcgattattcaggcgggcggcgcgaacgaaatgctcaacaaactgattttgagccgcgccaacccgattgccgacgcggtgtacggtttggacaacgccaatatcggcaaggcgcgggaaatgggcattttggcggcggcgcaacccgaatccgcccccgtcgcggtcgggctgccttcggctttggcggtcgattacggctatgtgtccatcaattacgacaaaaaatggtttgaaggcaaaaagctgcccctgccgcaaaccctgcaggatttgacccgccccgaatataaaaacctattggtcgtgccgtcccccgccacgtcgtccccggggctgggcttcctgatggcgaacatcagcgggatgggcgaagaaggcgcgttcaaatggtgggcacagatgcggcagaacggcgtgaaggtcgccaaaggctggagcgaggcatattacaccgacttttcgcacaacggcggcgcgtatccgctggtggtcggttatgccgccagcccggcggcggaagtgtatttttccaaaggcaaatacagcgagccgccgacgggcaacctgtttttaaaaggcggcgtattccgccaggtcgaaggcgcggcggtcttgaagggcgcgaaacagccggaattggcggcaaaactggtgcaatggctgcaaagtcgggaagtgcagcaggcggttccgtccgaaatgtgggtttaccccgccgtcaaaaacacgcgcctgcccgacgtgttccgcttcgcccaagccccgacgcacaccaccgcccccgcgcagcgcgatattgatgcgaaccagcgcggatgggtttcccgttggattagaacggttttgaaataa

SEQ ID NO: 62531 - DNA, 426 bp, Neisseria meningitidis
atgaaaacagcccgccgccgttcccgcgagcttgccgtacaagccgtttaccaatcacttatcaaccgcaccgcagcacccgagattgctaaaaacatccgcgaaatgtccgactttgccaaagcggacgaagaattgttcaacaaacttttcttcggcacgcaaaccaatgcggcagaatacatccggcaaatccgcccgctgctcgacagggacgaaaaagacctcaaccccatcgaacgcgccgtcctgctgaccgcctgccacgagctgtccgccatgcccgaaacgccctaccccgtcattatcaacgaagccatcgaagttaccaaaaccttcggcggtacggacgggcacaaattcgtcaacggcatcctcgacaaactcgccgcccaaatccgccccgacgagcccaaacgccgttga

SEQ ID NO: 62532 - DNA, 507 bp, Neisseria meningitidis
atgtttgaacaagaagacgaatggatcagcaaaacccaaatgaaaaagcagatgaacgatttgcaggatttgggtatggcgttgaccaagctctcaaacgatacgctgaaaaaaatcggtttggatgcggatttgtacgaggcggtaaccgcctataaaaaaatcacatccaacggcgcgctcaaacgccaggcacaatttatcggcaggctgatgcgcgataccgatcccgcgcccatcgaggcgtttcttgccaagctgcgcggcgacgatgcggcgcacaacgcctttttgcaacgcgtggaacaggcgcgcgtacggctgttggcagacgacggcgcgttgacgcagtttatgtcggattttccgcatgcggacgcgggcaagctgaggacgctcgtccgcaacaccaaaaaagagcaggagcaaaacaaaccgccgaaaaacttccgcgcgctgtttcaagaattgaaaaccgtgatggaaaacggggacgcggaaatttag

SEQ ID NO: 62533 - DNA, 672 bp, Neisseria meningitidis; identical to SEQ ID NO: 47737

SEQ ID NO: 62534 - DNA, 387 bp, Neisseria meningitidis; identical to SEQ ID NO: 45290

SEQ ID NO: 62535 - DNA, 1002 bp, Neisseria meningitidis
atgattgacggacaaacaaacaaacccaaacaaaaaacccgaatcatccttgcccccatgcaagggctggtagacgatgtgatgcgcgacctgctgacgcggataggcggctacgacgaatgcgtcagcgaatttgtacgcattacccataccgtgcattcccgatctatatggttaaaatatgtccccgaaatcgccaacggaaacaaaacgttttccggcacgccctgcaccgtccaacttctgggcagcgatgcggacaatatggcggagaatgcgctggaagccgtccgcttcggtgcgaacaaaatcgatttgaacttcggctgccccgcgcccaccgtcaacaaacacaaaggcggcgcaatccttttaaaagagccggaactgatattccacatcgtcaaaacgctgcgcggacgtttgcccgcacatattccgctcaccgcaaaaatgcggctcggttacgaagacaaaagccgggctttggaatgcgcctgtgcgattgccgaagggggcgcatgcggactgaccgtacacgcgcgtaccaaagccgagggttacgaaccgccggcgcattgggaatggataaggaaaatccgagacagcgtcaatattcccgttaccgccaacggcgacgttttcagcctgcaagactatatcggcatcaaaacaatcagcggctgcaacagcgtgatgctcggtcgcggcgcggtcatccgccccgatttggcgcggcaaatcaagcaatacgagaacggcgggccggtcaaagacacggattttgccgaagtttctaaatggatacggcagtttttcgagctgtgcctgacaaaagaggcaaacaataaatacccgatcgcccgtcttaagcaatggttgggcatgatgaaaaaaacgttcgacccggcgcaaacgctgtttgaccgcgtccgaacggttaaggatgcggatgaagttcggaacatcttggctgaatttgagcgagaaatgaatacttga

SEQ ID NO: 62536 - DNA, 1380 bp, Neisseria meningitidis
atggcaaaaacgcttaaaaccctttaccaatgcaccgaatgcggcggcacttccccgaaatggcagggcaaatgcccgcattgcggcgagtggaacacacttcaggaaagcttggccgcgcccgagccgaaaaacgcccgcttccaatcttgggcggcggatacctcgaccgtccaatccctctcctccgtgaccgccaccgaagtgccgcgcaatccgaccggcatgggcgaactcgaccgcgtattgggcggtggtttggtcgatggtgcggtcatcctgctcggcggcgaccccggcatcggcaaatccacgctgctgttgcaaaccatcaccaaaatggcacaaagccgcaaagtgctgtacgtttccggtgaagaatccgcccaacaagtcgccttgcgtgcgcaacgtttggaactgcccacagaaggcgtgaacctgcttgccgaaatccgcatggaagcgattcagacggccttgaaacaacaccagcccgaagtcgtggttatcgattccatccaaaccatgtattccgaccaaatcacttccgcccccggctccgtgtcgcaggtgcgcgaatgtgccgcccaactgacgcgcatggcgaaacaaatgggcatcgccatgatactggtcggacacgtgaccaaagacggcgcgattgccggcccgcgcgtattggagcatatggtcgataccgtgctgtatttcgagggcgaccagcattctaattatcgaatgatacgcgccatcaaaaaccgtttcggcgcggcaaacgaattgggcgtgttcgctatgaccgaaaacggtttgaaaggcgtgtccaacccgtccgccatcttcctcgccagctaccgcgacgacacgcccggttcgtgcgttttggttacacaggaaggcagccgcccgcttttggtcgaaattcaggcattggtcgatgacgcgcacggcttcacccccaaacgcctcaccgtcggactggaacaaaaccgccttgcgatgctgcttgccgtattaaaccgccacggcggcattgcctgtttcgaccaagacgtgtttctcaatgccgtcggcggcgtcaaaattggcgaacccgccgccgaccttgccgtcatccttgccatgctctccagcttccgcaaccgccccatgcccgaaaaaaccgtggttttcggcgaaatcggcttaagcggcgaagtccgccccgtcgcacgcggacaagagcggctcaaagaggcggaaaagctcggctttaaacgcgccatcgtcccaaaagccaatatgccgcgcaacgccaaagagtttccgaacctgaaaatctacggcgtttcgagtttgcaggaagccatcgatatttgccgtgacagcagggaataa

SEQ ID NO: 62537 - DNA, 888 bp, Neisseria meningitidis
atgtacacaggacgtttcgcccccagcccgaccgggctgctccacatcggctcgctgctgaccgccgccgcttcctatgccgatgcacgctcaaacggcggcaaatggctggtccgcatggaagacctcgatccgccgcgcgaaatgccgggggcggcaagccatatcctgcacacgcttgaggcattcggattcgagtgggacggagaagtcgcctatcagagccaccgttacgccctgtatgaagaaaccctatgccgtctgcaaaccgccggactggtctatccctgccattgcagccgcaaagactggcaggccggggcaaggcggggcgcagacggattcgtctataacggacgttgccgccaccccggccaacgccctgcaccgcaaggcaaacagccggcgtggcgcatccgcgtccccgaccgcattatcggtttttcagacggcatcgtcggcggttacgcccaaaacctcgcccgcgacatcggcgatttcgtcctgcttcgtgcagacggttactgggcataccaactcgccgtcgttgccgacgatgccgaacagggcgttacccacatcgtccgcggacaagacctgctcgtttccactccgcgccaaatctatttgcagcagtgtttgggcgttccgacaccgcaatatgcccacctgccgctgctgaccaacgcacaagggcagaaatggtcgaaacagacgctcgcccccgcattggatttaaaccgccgcgaacaactcctccgccaagtgttccgttacctcaagctgcccgaagcaccggaaaccgaccgccctgccgaactgctcgactgggcggtggcacactgggatatggacaaagtgccgaaacacgccattaccaccccctaa

SEQ ID NO: 62538 - DNA, 1185 bp, Neisseria meningitidis
atgattattgatgtaaaagtacctatgctgtctgaaagcgtatctgaaggcacgctcttggaatggaagaaaaaagttggcgaagcagttgcccgtgacgaaatcctgattgatatcgaaacggacaaagtggttttggaagtaccttctccacaagccggcgtattggttgaaatcgtagcgcaagacggtgaaaccgttgttgccgaccaagttttggcacgtatcgataccgctgctactgccgctgctgaagcccctgccgccgcgcctgccgaagctaccccagccgccgccgctcctgatgctgcacaaaacaacgccgctatgcctgctgccgccaaactggctgccgagaccggtgttgacgtgaacgcattgcaaggttccggccgtgacggtcgcgtattgaaagaagacgtacaaaatgccgcagccaaacctgccgcagcctctgctcctgccgttgcacttcctgccggcgcacgtcctgaagaacgcgtaccaatgagccgcctgcgtgcccgtgttgcagaacgcctcttggcttctcaacaagaaaacgccattctgactacattcaacgaagtcaacatgaaaccaatcatggacttgcgtgcgaagtacaaagaaaaattcgagaaagaacacggcgtgaaattgggctttatgtctttcttcgttaaagccgctgttgccgccctgaaaaaatacccggttgtgaatgcttctgttgacggcaaagacatcgtgtaccacggctacttcgacatcggtatcgcaattggcagcccacgcggtttggttgtaccaatcctgcgtgatgccgaccaaatgagcattgccgacatcgagcaagcaattgttgattacgcgaaaaaagccaaagacggcaaaatcgctatcgaagatctgaccggcggtacattcagtattaccaacggcggtactttcggttctatgatgtctaccccgatcatcaacccgcctcaatctgcgattttgggtatgcacgccactaaagagcgcgctgtggttgaaaacggccaagttgttgtccgtccaatgatgtatctggctctgtcttacgaccaccgtatcattgacggccgcgaagctgtattgaccttggtagccattaaagacgcgttggaagacccagcccgcctgttgttggatctgtaa

SEQ ID NO: 62539 - DNA, 807 bp, Neisseria meningitidis
atgccgacagttttcatctttttgacggcggtttacgcaggattgggtgcatttgcatggcactgccaacagcaggggcgcggtcgggattacccgtggaagacggaattgccggttttgggcgcggcattgaccgtccacggcgcggcactgctgatgccggtcattcaagacaaaatcatcattatgggcttcgggtattccggcagcctgattgtttggatgatgctgtttatttattttgccggcagcttcttttattcgctgcgcggagtgcagttgctgctgtatccttgcgccgcactgatgctgctgtcaggtttggtttttcctggaaaattctcgggatatgaaattaccgaccttccctttatgctgcatatcggcacatcgctgcttgcatacgggctgttcggcatcgcaacattattgtccgttttgaccctgctgctgaatcgcagcctgcaccgcaggagcttctccaagctcgcaggattcctgccgtcgctgctcagtttggaaaaactcatgttccaggtcatgtgggcaggtttcatcctgctgacctattccgtcgtcagcggaacattttttgccgaagccgtattcggcaaacccatgacctttacccataaaacagtattcggcatattgtcatggctgatttacggcggactgctgctcaagcacagcatgaccgcatggcgcggcaaaaaagccgccgtgtggaccatcatcggatttgtcagcctgatgattgcctatatgggcagcaagttcgtattggaaatcattctgaacagataa

SEQ ID NO: 62540 - DNA, 513 bp, Neisseria meningitidis
atgaaaaactttaacggcaaactcatcctcatcggactgatgggcgcgggcaaaaccacgctgggccggcaaatggcgcagcggctggattaccgtttttacgacagcgatcacgaaatcgccgcagccgccggcgttcccatccccaccatatttgaaatggaaggcgaacagggatttcgttcgcgcgaaaccgccatactcaaaaagctggttatcctgccccatatcgtcctgtccaccggcggcggcgcggtgttaaaagaagaaaaccgcgcccttatccgcaaaagcggcacggtcgtctatctgcacgccccgcccgaaaccctgctcgaacgcacgcgctgcgacaacagccgtcctttgctgcaagttgccgatcctttggcgaaattacgtgaactctacgccgcacgcgaccccgtttaccgccaaaccgccgactttaccgtagaatcggcaaactgccgggaaaccgtgcaaaccctgctcaaacgcttatcccgataa

SEQ ID NO: 62541 - DNA, 966 bp, Neisseria meningitidis
atgagctacacgcaactgacccaaggcgaacgataccacatccaatacctgtcccgccactgcaccgtcaccgaaatcgccaaacagctgaaccgccacaaaagcaccatcagccgcgaaatcagacggcaccgcacccaagggcagcaatacagcgccgaaaaagcccagcggcaaagccagactatcaaacagcgtaagcgacaaccctataagctcgattcgcagctgattcagcacatcgacacccttatccgccgcaaactcagtcccgaacaagtatgcgcctacctgtgcaaacaccaccagatcacgctccaccacagcaccatttaccgctaccttcgccaagacaaaagcaacggcagcacgttgtggcaacatctcagaatatgcagcaaaccctaccgcaaacgctacggcagcacatggaccagaggcaaagtccccaaccgtgtcggcatagaaaaccgacccgctatcgtcgaccagaaatcccgtatcggcgattgggaagccgacaccattgtcggcaaaggacagaaaagcgcattattgaccttggtcgaacgcgttacccgctacaccatcatctgcagattggatagcctcaaagccgaagacactgcccgggcagctgttagggcattaaaggcacataaagacagggtgcacaccattaccatggataacggcaaagagttctaccaacacaccaaaataaccaaagcattgaaagcggagacttatttttgtcgcccttaccattcttgggagaaagggctgaatgagaacaccaacggactcatccggcaatacttccccaaacaaaccgatttccgtaacatcagtgatcgggagatacgcagggttcaagatgagttgaaccaccgaccaagaaaaacacttggctacgaaacgccaagtgttttattcttgaatctgttccaaccactaatacactag

SEQ ID NO: 62542 - DNA, 882 bp, Neisseria meningitidis
atgccgtctgaaaacaccctctttcccctgcccgaccccctgttgcgccccatggtggaacaagccttgagcgaagatttgggcaggcgcggcgatattacgtccgccgccgtcatcgcccccgacaaaaccgccaaactcttcctcgtcagccgcgaagacggtgttatcgccggtatggacttggcgcgcctcgcctttcagacgatggatccgtccgtccgcttccaagccgaaatccgagacgggcaagtcgtccgcgcaggtcagacgcttgccgccgtcgaaggcaacgcccgcgcgctgctcgccgccgaacgcaccgcgctcaactacctcacgcacttgagcggcatctccaccgccaccgcgcgtgccgttgccgaagtcgccaaatacggtacagacatcgtgtgcagccgcaaaaccatccccctgctgcgcgtcctgcaaaaatacgccgtcagggcgggcggcggcgtgaaccaccgcatgggtttggacgatgccgtactcatcaaagacaaccacctcgcctattgcggcagcatcgcccaagccgttcggcaggcaaaacaggcggtcggagcattgacctgcgtggaaatcgaagtggacacgttggcacaactggacgaagccatcgcagcgggcgcggaacggattttgctggacaacatggacgacgaaaccctgaaagaagcggcaaaccgctgccacacgcaaaccgcccacccccacaccgtctattgcgaagcatcgggcggcatcggcttcgaccgcctgaagcgcgtggcgcaaaccggcgtggacggcatcgccctcggctatctgacccacagcagccgctcgttggacataggtttggatttcttggcatga

SEQ ID NO: 62543 - DNA, 975 bp, Neisseria meningitidis
atgctcgagaatctgccctatttccagcgacatctgcctgaagaccttgccaaagtcaatgaagtcatcaaccgtgcggtgcaatccgatgtcgcactgatttcgcaaatcggtacatatatcatcagcgcgggcggcaaacgcctgcgtccgattatgacgattttggcgggtaaggcggtcggttatgatgacgagaaactgtattcgctggcggcgatggtcgagtttatccacacttcgacgctcctgcacgacgatgtcgtcgatgaaagcgatttgcgccgtgggcgggcaacggcaaacaatctgttcggcaatgcggcggctgtgttggttggcgactttttatacacgcgcgcctttcaactgatggttgcctcgggcagtatgcgcgttttggaagtgatggcggatgcaaccaacattattgccgagggcgaagtcatgcagctgatgaacatcggcaatacggacattaccgaagaacaatatatccaagtcatccaatataaaacggcaaaattgtttgaagctgccgctcaagtcggcgcaattttgggcaaggcttcccccgaacacgaacgggcgttgaaagactacggtatgtatgtcggtacggcattccaaattattgacgatgtgctggactattctggcgaaaccgaagaaaccggcaaaaacgtcggcgacgatttggcggaaggaaaaccgactttgcctttgatttatctgatgcgtcagggttccgaacaggttgcgaacgatgtgcgtactgctttggaaaatgcagatcgcagctattttgagaaaatccacgattatgtcgtccgttcggatgctttggcatattcaataggcgaggcgcgcaaagcagtcgattgtgccgttgccgccttggatgccctgcccgacagcgaagtgaaggatgccatgattcagctggcgaaggaatctttggtcagggtgtcgtaa

SEQ ID NO: 62544 - DNA, 846 bp, Neisseria meningitidis
gtgaaccgaactgccttctgctgccttttcctgaccaccgccctgattctgaccgcctgcagcagcggaggcggcggaagcggaagcggcggtgtcgccgccgacatcggcacggggcttgccgatgcactaactacgccgctcgaccataaagacaaaggtttgaaatccctgacattggaagactccattccccaaaacggaacactaaccctgtcggcacaaggtgcggaaaaaactttcaaagccggcgacaaagacaacagtctcaacacgggcaaactgaagaacgacaaaatcagccgcttcgacttcgtgcaaaaaatcgaagtggacggacaaaccatcacgctggcaagcggcgaatttcaaatatacaaacaggaccactccgccgtcgttgccctacagattgaaaaaatcaacaaccccgacaaaatcgacagcctgataaaccaacgctccttccttgtcagcggtttgggcggagaacataccgccttcaaccaactgcccggcggcaaagccgagtatcacggcaaagcattcagctccgacgatgccggcggaaaactgacctataccatagatttcgccgccaaacagggacacggcaaaatcgaacacctgaaaacacccgagcaaaatgtcgagcttgccgccgccgaactcaaagcagatgaaaaatcacacgccgtcattttgggcgacacgcgctacggcagcgaagaaaaaggcacttaccacctcgcccttttcggcgaccgcgctcaagaaatcgccggctcggcaaccgtgaagataggagaaaaggttcacgaaatcggcatcgccggcaaacagtag

SEQ ID NO: 62545 - DNA, 618 bp, Neisseria meningitidis
atgccctatacggaagatatgcaaccgggggatacgaccagcccttacggcgcatcgaaatcgatggttgagcgcattctcactgacattcaaaaagccgatccgcgctggagcatgattttgttgcgttatttcaatccaattggcgcgcatgaaagcggcttgattggcgagcagccaaacggtatcccaaataatttgttgccttatatctgccaagtggcggcaggcaaactgccgcaattggcggtatttggcgatgactaccctacccccgacggcacggggatgcgtgactatattcatgtgatggatttggcagaaggccatgtcgcggctatgcaggcgaaaagcaatgtagcaggcacgcatttgttgaacttaggttccggccgcgcttcttcggtattggaaatcatccgcgcatttgaagcggcttcgggtttaaccattccatttgaaatcaaaccgcgccgcgccggtgatttggcgtgcttctatgccgacccttcttatacgaaggcgcaaatcggctggcaaacgcagcgtgatttaacccaaatgatggaagattcatggcgctgggtaagtaataatccgaatggctacgacgattaa

SEQ ID NO: 62546 - DNA, 459 bp, Neisseria meningitidis; identical to SEQ ID NO: 38813

SEQ ID NO: 62547 - DNA, 489 bp, Neisseria meningitidis
atgaaaaaaatactcaccgccgccgtcgtcgcactgatcggcatcctccttgccatcgtcctcatccccgacagcaaaaccgcgcccgccttctccctgcccgacctgcacggaaaaaccgtttccaacgccgacctgcaaggcaaagtaaccctgattaatttttggtttccctcctgtccgggttgtgtgagcgaaatgcccaaaatcattaaaacggcaaatgactataaaaacaaaaacttccaagtccttgccgttgcacaacctatcgatccgatagaaagcgtccgccaatatgtcaaagactacggtttgccgtttaccgtcatgtatgatgcggacaaagctgtcggacaggcgttcggcacacaggtttatccgacttctgtcctcatcggcaaaaaaggcgaaatcctcaaaacttatgtcggcgaacccgatttcggcaaactctaccaagaaatcgataccgcgctggcacaatag

SEQ ID NO: 62548 - DNA, 1185 bp, Neisseria meningitidis
atgggtaaacatattcttttaggtgtaacgggcagtattgcggcgtataagtcttgcgagttggttcgtctgctgaaaaaacaggggcattcggttacggtggttatgagccgctcggcaactgaatttgtttctccgctgacttttcaggctttaagcggcaatcctgtcctgaccgacacgcacggcggcaacggttcaaacggtatggaacatatcaacctgacccggaatgcggatgtttttctgattgcgccggcaagtatgaataccgtggcaaaaatctgtaacggcgtggcagataacctactgaccagtctggcagccgcacggaaatgtccgctcgccatcgctcccgcgatgaatgtggaaatgtggctcaaccctgccaaccaacggaatatcgcacaactggtttcagacggcattactgtctatatgccgggcttgggcgaacaggcttgcggagaaaatggtatgggaaggatgccggaacctgccgaattgctggatttgcttccggacttgtggacaccgaaaattttaaggggcaagaaaatcttgattaccgcaggtgcgacatttgaagccattgaccctgtcaggtgcatcacaaatacctccagcggaaaaatgggggtagctttggcgcgggcgtgccgtgccgccggtgcggaagtcagcctgattcacggacagcttcaaaccgcgctgcctttcggtatatccaatagggttcaaaccgtcagtgctgaagatatgcatcgtgcagtgcatcgtttaatcgacaaacaagatgcttttatttctgttgccgccgtctcagactataaggttaaaaacaggagtacgcaaaaattcaaaaaagataaaaatgccaaaccattatccatcgaattggatgagaaccccgatattttggcttctattgcctcattgccgaacccgccgttctgcatcggttttgccgctgaaacggagaatgtaatggcatatgcgcgagaaaaacgtattaagaaaaaaataccagtgatcgttgccaatgatgtttcaatcgcgatgggcaaaccgaccaaccggattaccattatcggggacgacgaggaactgtcttttcccgaaacaagtaaagatgaagcggcaatgcagattgttgaaaggcttgccgtatatttgaacaaataa

SEQ ID NO: 62549 - DNA, 1431 bp, Neisseria meningitidis
atgacctgggaaaccgtaatcggcttggaaatccacgtccaattgaacaccaaatccaaaatcttcagcggcgcatcgaccgcattcggcgcagaacccaacgcgcacgccggcgtagtggaatgtgctttgccgggcgtactgccggtaatgaaccgagaagtcgttgaaaaagccatcaaattaggcttggctttggatgcgaaaatcaaccggaaaaacgtgttcgaccgtaaaaactacttctatcccgacttaccaaaaggctatcaaatcagccagttggacttaccgattgtcgaacacggcaaattggaaatcgtagtcggcgacgatgtgaaaaccatcaacataacccgcgcccatatggaagaagacgcaggtaagtccgtgcatgaaggcttgaacggcgcgaccggtatcgacctgaatcgcgccggcacacctttattggaagtcgtatccgaaccggaattgcgctccgccgccgaagccgttgcctacgccaaagccttgcacagcttggtaacctggctggacatttgcgacggcaatatggcggaaggttcgttccgcgtcgatgccaacgtatccgtgcgcccgaaaggtcaagaagagttcggcacgcgccgcgagattaaaaacctcaattccttccgtttcttggagcaggcgattaattacgaagcagaagcgcaaatcgagattttggaagacggcggcaaagtacagcaggcaaccatgctgtttgatcccgaaaaaggcgaaacccgcgtaatgcgcctgaaagaagacgcgcaagactaccgctacttccccgaccccgatttgctgcccgtcatcatttcagacgctcaaatgcaaaaagccaaagcagaaatgcccgagttgccgaaagaaatggcagcgcgtttcgtggcggactacggcgtgtccgaatacgacgcgcgcctgctcaccgcaagccgcgcacaggccgcctattttgaagaagccgccaaagagagcggacaaggcaagccgactgccaactggatgaacggcgaactcgccgccgcgctgaacaaagccggcctggaacttgccgacagcccgattaccgccccgcgcctcgctgcgctggtgggcaaaatcgccgatggcacattaagcggcaaactggcgaaaaaagcctttgaggccatgtgggcagaacccgaatccaccattgccgaaatcattgaaaaacacggcttgcagcaaatgaccgataccggcgcagttgaagccattgtggacgaagtgctggcaaacaacgccaaagccgtggaacaattcaaatccggcaacgaaaaagccctgaatgcgattgtggggcaagtgatgaaggccagcaaaggcaaagccaatcccgcgcaggttcaagaactgattaaagccaaacttgcctga

SEQ ID NO: 62550 - DNA, 654 bp, Neisseria meningitidis; identical to SEQ ID NO: 59971

SEQ ID NO: 62551 - DNA, 891 bp, Neisseria meningitidis
atgagcgtattgattaataaagacaccaaagtattggttcaaggtttcaccggtaaaaacggtactttccactccgaacaagctctggcttacggcactaaagttgtcggcggcgtgaccccgggcaaaggcggtcaaacccacctgaacctgcccgtgttcaacaccatgaaagaagccgttaaagaaaccggcgctgacgcatctgtaatttacgttcccgctccgtttgtgttggattctatcgttgaagccgttgattcaggcgtaggcttggtcgttgtgattaccgaaggcgtgcctactctggacatgctcaaagccaaacgttatttggaaaccaacggcaacggtacccgcttggtcggccctaactgccctggcgtgattactccgggtgagtgcaaaatcggtattatgccgggccacatccacactccgggccgcatcggtattatttcccgttccggtacattgacttacgaagctgtggcacaaaccaccaaactgggcttgggtcaatcaacctgtatcggtatcggcggcgacccgattcctggtatgaaccaaatcgacgcactgaaactcttccaagaagacccagatactgatgccatcatcatgatcggtgaaatcggtggtactgcggaagaagaagcagccgaatacatccaatccaacgttaccaaacctgttgtaggttacattgctggtgttaccgctcctaaaggcaaacgtatgggccacgccggtgcgattatctccggcggtaaaggtactgccgaggaaaaattcgccgctttcgaaaaagccggcatcgcctacacccgcagccctgccgagttgggcactaccatgctggaagtgttgaaagcaaaaggtttggcataa

SEQ ID NO: 62552 - DNA, 1434 bp, Neisseria meningitidis; identical to SEQ ID NO: 39392

SEQ ID NO: 62553 - DNA, 714 bp, Neisseria meningitidis
ttgggcgcgtgcagcacttcctaccgcccctcgcgggcagaaaaagccaatcaggtttccaatatcaaaacccagttggcaatggaatatatgcgcggtcaggagtaccgtcaggcgacggcaagtattgaagatgccttgaaatcagaccctaaaaacgagcttgcctggctggtccgtgccgaaatctatcaatacctgaaagttaacgacaaggcgcaggaaagtttccggcaagccctctccatcaaacccgacagtgccgaaatcaacaacaactacggctggttcctgtgcggcaggctcaaccgccctgccgaatctatggcatatttcgacaaagccctggccgaccccacctacccgaccccttatattgccaacctgaataaaggcatatgcagcgcaaaacaggggcaattcggattggcggaagcctatttgaaacgttccctcgccgcccagccgcagttcccacccgcatttaaagaactggcgcgcaccaaaatgctggccgggcagttgggcgatgccgattactactttaaaaaataccaaagcagggtagaagtccttcaggccgatgatttgctgctaggctggaaaattgccaaagccctcggcaacgcacaggcggcatacgaatatgaagcacaattgcaggcgaatttcccctactcggaagaattgcaaaccgtcctcatcggtcaataa

SEQ ID NO: 62554 - DNA, 369 bp, Neisseria meningitidis
atggtgtttttgcgcgatgagctggaacggcgcatcggggctttgaaggacggcgctatgccgtctgaaacgagggaatgggataagcctgcgcctgcggtgctgtcggtcgcgggggcggatgcttcgggtttcggggaaatcggcgggggtgcgccgcgttatgactgggcggctttgtgtgcgcgcgcgccgtttcagatgtttgtcgcggaggtgtatccatcttttccggacgcgcgttcttttgtgatggggcgcgtttgttcgccggaagatgaggcggatgtggcggcggcgtattgtgcttggtttgaggataagaagctgtggggcggagacgacccgttgggaggggtaaatgtttaa

SEQ ID NO: 62555 - DNA, 219 bp, Neisseria meningitidis; identical to SEQ ID NO: 40879

SEQ ID NO: 62556 - DNA, 513 bp, Neisseria meningitidis
atgaacacccttcaaaaaggttttacccttatcgagctgatgattgtgattgccatcgtcggcattttggcggcagtcgcccttcctgcttatcaagactacacagcccgcgcgcaagtttccgaagccatccttttggctgaaggtcaaaaatcagccgtcaccgagtattacctgaatcacggcgaatggcccggcggcaacagtgatgccggcgtggcatcttcttcaacaatcaaaggcaaatatgttcaaagcgttacagtcgcaaacggcgtcattaccgcccaaatggcttcaagcggcgtaaacaaagaaatccaaggcaaaaaactctccctgtgggccaagcgtcaaaacggttcggtaaaatggttctgcggacagccggttacgcgcaccgcccccaccaccaccaacgacgacgtcaaagccgacaccgccgccaacggcaagcagatcgacaccaaacacctgccgtcaacctgccgcgacgcttcatctgccagctaa

SEQ ID NO: 62557 - DNA, 393 bp, Neisseria meningitidis; identical to SEQ ID NO: 38784

SEQ ID NO: 62558 - DNA, 465 bp, Neisseria meningitidis
atgcagactttagatggggagatggcaagtgggaatagaccgcctaaatctataacgtcggaaggaaaagccaatgctgcaacttatcctcaattagttaatcaattaactgagcaaaacttaaaaaacattgctgcacaagattcaaggttagcaagtgctgtaaatgattggaaaacaatacaaccaaataaaaagggagaaattaattttggtattggttctgcaactcgtcaagaggctgaacagttaggaaaaatttgggttggagacggagctaaaccagttaatagtccatcttgtcaaggatgtatgttaagtgcagatggcacaaggctatatcgtcctccaactacaaaatcaaacacccctgaatcacttaacccaacgggagtgcaagctaattttgttactagaagtgttgatggaaaaaccttaactaatggacatttgaatataaaatga

SEQ ID NO: 62559 - DNA, 807 bp, Neisseria meningitidis
atgaatatgaaaaaatggattgccgccgcccttgcctgttccgcactcgcgctgtctgcctgcggcggccagggcaaagatgccgccgcacctgccgccaaccccgacaaagtgtaccgcgtggcttccaacgccgagtttgccccctttgaatctttagactcgaaaggcaatgtcgaaggtttcgatgtggatttgatgaacgcgatggcgaaggcgggcaattttaaaatcgaattcaaacaccagccgtgggacagccttttccccgccttgaacaacggcgatgcggacgttgtgatgtcgggcgtaaccattaccgacgaccgcaaacagtctatggacttcagcgacccgtattttgaaattacccaagtcgtcctcgttccgaaaggcaaaaaaatatcttcttccgacgatttgaaaaacatgaacaaagtcggcgtggtaaccggctacacgggcgatttctccgtatccaaactcttgggcaacgacaacccgaaaatcgcgcgctttgaaaacgttcccctgattatcaaagaactggaaaacggcggcttggattccgtggtcagcgacagcgcagtcatcgccaattatgtgaaaaacaatccggccaaagggatggacttcgttaccctgcccgacttcaccaccgaacactacggcatcgcggtacgcaaaggcgacgaagcaaccgtcaaaatgctgaacgatgcgttggaaaaagtacgcgaaagcggcgaatacgacaagatttacgccaaatattttgcaaaagaagacggacaggccgcaaaataa

SEQ ID NO: 62560 - DNA, 2400 bp, Neisseria meningitidis
ttgggcatttcccgcaaaatatcccttattctgtccatactggcagtgtgcctgccgatgcatgcacacgcctcagatttggcaaacgattcttttatccggcaggttctcgaccgtcagcatttcgaacccgacgggaaataccacctattcggcagcaggggggaacttgccgagcgcagcggtcatatcggattgggaaacatacaaagccatcagttgggcaacctgatgattcaacaggcggccattaaaggaaatatcggctacattgtccgcttttccgatcacgggcacgaagtccattcccccttcgacaaccatgcctcacattccgattctgatgaagccggtagtcccgttgacggatttagcctttaccgcatccattgggacggatacgaacaccatcccgccgacggctatgacgggccacagggcggcggctatcccgctcccaaaggcgcgagggatatatacagctacgacataaaaggcgttgcccaaaatatccgcctcaacctgaccgacaaccgcagcaccggacaacggcttgccgaccgtttccacaatgccggtagtatgctgacgcaaggagtaggcgacggattcaaacgcgccacccgatacagccccgagctggacagatcgggcaatgccgccgaagccttcaacggcactgcagatatcgttaaaaacatcatcggcgcggcaggagaaattgtcggcgcaggcgatgccgtgcagggcataagcgaaggctcaaacattgctgtcatgcacggcttgggtctgctttccaccgaaaacaagatggcgcgcatcaacgatttggcagatatggcgcaactcaaagactatgccgcagcagccatccgcgattgggcagtccaaaaccccaatgccgcacaaggcatagaagccgtcagcaatatctttacggcagtcatccccgtcaaagggattggagctgttcggggaaaatacggcttgggcggcatcacggcacatcctatcaagcggtcgcagatgggcgcgatcgcattgccgaaagggaaatccgccgtcagcgacaattttgccgatgcggcatacgccaaatacccgtccccttaccattcccgaaatatccgttcaaacttggagcagcgttacggcaaagaaaacatcacctcctcaaccgtgccgccgtcaaacggaaagaatgtgaaactggcaaacaaacgccacccgaagaccaaagtgccgtttgacggtaaagggtttccgaattttgaaaaagacgtaaaatacgatacgagaattaataccgctgtaccacaagtgaatcctatagatgaacccgtctttaatcctaaaggttctgtcggatcggctcattcttggtctataactgccagaattcaatacgcaaaattaccaaggcaaggtagaatcagatatatcccacctaaaaattactctccttcagcaccgctaccaaaaggacctaataatggatatagtgccgggaatttaagcaaaaaagtcctgactttagtttacataaacggcaaactcaaattcgggccaagcagtctgccgtcttcggcattgaaagcacctgttcccattgtcggcaaggctgaggctccgcccggaaaagctgtgcctgtcggcgaagcccgcattccttcaaatccaaaagcggtaaaaggaacaaccgttaccctgtcgcaggaacaacgcctagccaacggagagctgataccgaaaggctctgtggtaacgtggtcggacaatgcggtgaaggttgtgcggcctgatgggaaaaagcggagatttaatagtcgggattgggaacagaaggcattgccgaaaccgcaactaccgaaagattacagagatgacatcaacataggtggaaataatcctagatttaatcagcaacggcatgaaaaaatcgaatcccacaacccaaacagaatagaggagatacgccaacgtaatgccgtttcttctgcagaaaggcaggctgatgcattaaaaaggatgcaaacgtctggccgcacccgcctgcctgggcagccacaaaaaggaaaacccggcgctgctagagaaatgtcctcttcagacaatccgaatcaaacagccgaggcttttgcacgtcgatatttaggcaggaaacctacactaatggaacgagtcgaaggtgaaaaattatacggaggtaaatgtgtgggctgttggaaagcgcaaatgccggacggaacctttgtggtgtataggccagcaggtaatgcttctatgaccaagggaactactgcgtctgttgatattaataacccaacattaaataacttaaatattaatttaaaaggcaagccaacagagttaaaatttaaattccctgctagataa

SEQ ID NO: 62561 - DNA, 3171 bp, Neisseria meningitidis
gtgaggcgggatggcgacggtgtcgggccgcttccgtttggcgacggtggcggccgtttttttgtgtggttcaaactcggcgatacgtctgctttcggacgtgcttcggtgtggaattgggaaacgcctgtttttgacgcgcaggcttcggacggtgtggaacggttcggggcggcggtgtttatttccaatcttccgttttacccggtggggtttgcgccgtctgtcttcggcgacaggtcgaagatatacaaccgggactttcttgttgtttccgagggttgggacagcttttatcagggcgagggtgcggcgaagtcgttgggtaggttcagacggcatttggtggtggaaagggtgctgcctttggtgtttgcgctgccgctatccgccaaaaatgcgaaaacggaactgcctttcggcttcaagtcggaagtgtcttatttgtttttcccgggtctgtacggttcggatgcgggtacgcctcgggtgtattcgacgattcaggatgtgcgccgggtttcgctcggggatgtgtcggcggcggggggtgcggtatcggtacgcaatgcggggcaacgcctgaggcagcggccgcacggcgatgatttggcatttccgttccccattgtattcaaccgtacctaccgggttttggcgacggttgaaaatcggtttgcgtggggcgtggcgcgtgtgttcgatcctttgcagaaggtcgggcgcggggcggattttgattcgcttgtgttcgggcaagcgtggttttcgcattttttgcggcatattgaaatcgggcagggggtcatcggcggctttttcgaacagcggcggacggtgcgcgtgagtttcggcaggcagtatgtggtgctgcctgccaacagtttcaggcggcggcagttttcgcgcaaccatacggtgggcttcccgccggaaatacggccgttgggctgggattcggcggcttatctgacgcgcatcgtgccgcccgggcaggcggtgcgcgttgatgcggggatgagggtgcgggtgtcgttcggcgtatcttcggtgcggcagtcggtgttgcgcgtgtcggcttggagcatcccgccttgggtcaacaattgggcgcatatcctgcgcaatgtcaggcagtatgtgcggccttcggatcaggtgcaggagcagatagacgggatggtgttcggtgcggcctatccgtacaaccgcgaccgcgtcgtgcgcccgagccgttttgcggcggtgcgctggggttatacggtgctgctgcttgcgggggagcgtgttgtgccggccacgctgccgccgccaaagccggggaagccgtctgtgacgaacagggtgcgctatgccgcgccgtccggatgggacggggcgagaatcccgacgggtgcggcggtgtggacgaacgggcaggtgctgctgccgccggggacggatatggcggtgcatacgcgcggggcgtatgtgtggaaaaaccgccgttttttgcgccgttttcgcgggattgagggggaggcgtacggcacggcgtttgcggcatacgcggtacggcatatctttcaggacgatggttcgctgtcgtttatgatacgcccgcccgatatgcgtatgccgtcggtggcgctgctgaagcggtatgtgccggtgcgcggtacggattcggcggccttcgggacgggggttttcaggatacggcggaacatgattgcgccttcttggccgccggacgacggcgggcgggatttcgggctggcttatttgaaaaagcgcaatgcggaagtgtatctgcacggcttcgggggttttgcgttttcggacggcgcggcggtgcagtactgggtcaggacgcttggggtggaaacgtttaaccgccatacgttgggacggctgacgtggatcgggcggcgggtgcgcttcatcggtatgggcggtatcggtacgatgcgcgtgccggacggacacgatgtgtggacggacagtacgccgcctttcggaacaaagctgatcttgctggatgcgtggtcttcggaggacggtgcttcgtccgggtcgggcaatggctgggacagtgtgctgttcgggggtacgggtctgaccgatatgtcggtcagggacgcgggcgggtttgcgccgtcgcttttcagtatcgggacgcggtttttcaataacggtatcctggttcgccagggcattcctgtcgggacggcgggacggtgcgccgtgtcgcacaggcacagacccatcgttgcgaaaggatggcggatggattttgcgttgggcaggccgcgcgttacgccccatacggtttgggtgatgtattcgccgccgcccaaggctgcggaaaacaacggcggaggcggttaccacgcgccttcggagggtatccggacgggctatccgtatattgtgttcaacagcgggcgggtcgaacagtatgcggcctatccgcaatatcgggcgggcaaggtgtcgggatactgcctgattgaaaatgccaggcagtctgtgcgggcgaaggggatatttcatttccgtgcgggctggaatactttttatccttatacgcagtatgtggaactgttttcgcaaggggacgtgaatgccgattatatggctttcggcgtgcttaaggcgggatttctggatgtgtttgattggcgtatcgccgccgccggtgtgcggtttgcgggtttcggggatcagacggtacgcaaccgcaatcaggatgtgcgcccggcaggggcggatatgctggaggcgggcaaaagccgttggaacgatacgccgtttatgtggcagggcttgcgcgtcggggaaaggataccgacggcaatcggcggcggggatttgctgcgcttcggcggctttgggtcggtgtcgtaccggaacaggacggtgcgggcggaaggtatggatatgtttgcttcggaaggggaggcgcggcggtttgacgacaggatgacggtgcgccgtgcttcgggtatgccgccggacaaccgtgtggggcgcaagggggaagacgcccggccggtgcagtttgtcggcgtacccccgttcggctttgcgccgttcggcagatgcgatattggaaataaggttcggtttatccgtcccgacgggtatgcggaccagttcaggaaaggtgcgagtgtatggcagaggtag

SEQ ID NO: 62562 - DNA, 2037 bp, Neisseria meningitidis
atgactgacaacgcactgctccatttgggcgaagaaccccgttttgatcaaatcaaaaccgaagacatcaaacccgccctgcaaaccgccattgccgaagcgcgcgaacaaatcgccgccatcaaagcccaaacgcacaccggctgggcaaacactgtcgaacccctgaccggcatcaccgaacgcgtcggcaggatttggggcgtggtgtcgcacctcaactccgtcgccgacacgcccgaactgcgcgccgtctataacgaactgatgcccgaaatcaccgtcttcttcaccgaaatcggacaagacatcgagctgtacaaccgcttcaaaaccatcaaaaattcccccgaattcgacaccctctcccccgcacaaaaaaccaaactcaaccacgatctgcgcgatttcgtcctcagcggcgcggaactgccgcccgaacagcaggcagaactggcaaaactgcaaaccgaaggcgcgcaactttccgccaaattctcccaaaacgtcctagacgcgaccgacgcgttcggcatttactttgacgatgccgcaccgcttgccggcattcccgaagacgcgctcgccatgtttgccgccgccgcgcaaagcgaaagcaaaacaggctacaaaatcggcttgcagattccacactacctcgccgtcatccaatacgccgacaaccgcgaactgcgcgaacaaatctaccgcgcctacgttacccgcgccagcgaactgtcagacgacggcaaattcgacaacaccgccaacatcgaccgcacgctcgcaaacgccctgcaaaccgccaaactgctcggcttcaaaaactacgccgaattgtcgctggcaaccaaaatggcggacacgcccgaacaagttttaaacttcctgcacgacctcgcccgccgcgccaaaccctacgccgaaaaagacctcgccgaagtcaaagccttcgcccgcgaaagcctgaacctcgccgatttgcaaccgtgggacttgggctacgccagcgaaaaactgcgcgaagccaaatacgcgttcagcgaaaccgaagtcaaaaaatacttccccgtcggcaaagtattaaacggactgttcgcccaaatcaaaaaactctacggcatcggatttaccgaaaaaaccgtccccgtctggcacaaagacgtgcgctattttgaattgcaacaaaacggcgaaaccataggcggcgtttatatggatttgtacgcacgcgaaggcaaacgcggcggcgcgtggatgaacgactacaaaggtcgccgccgtttttcagacggcacgctgcaactgcccaccgcctacctcgtctgcaacttcgccccgcccgtcggcggcagagaagcgcgtttgagccacgacgaaatcctcatcctcttccacgaaaccggacacgggctgcaccacctgcttacccaagtggacgaactgggcgtatccggcatcaacggcgtagaatgggacgcagtcgaactgcccagccagtttatggaaaatttcgtctgggaatacgacgtcttggcacaaatgtccgcctacgaagaaaccggcgttcccctgccgaaagaactcttcgacaaaatgctcgccgccaaaaacttccaacgcggcatgttcctcgtccggcaaatggagttcgccctctttgatatgatgatttacagcgaagacgacgaaggccgtctgaaaaactggcaacaggttttagacagcgtgcgcaaagaagtcgccgtcatccaaccgcccgaatacaaccgcttcgccttgagcttcggccacatcttcgcaggcggctattccgcaggctattacagctacgcgtgggcggaagtattgagcgcggacgcatacgccgcctttgaagaaagcgacgatgtcgccgccacaggcaaacgcttttggcaggaaatcctcgccgtcggcggatcgcgcagcgcggcagaatccttcaaagccttccgcggacgcgaaccgcgcatagacgcactcttgcgccacagcggcttcgacaacgcggcctga

SEQ ID NO: 62563 - DNA, 684 bp, Neisseria meningitidis
atgccgtctgaaaaatgttcagacggcatttcttataaccttttgtttgcagcacataaccaatcagtctttcctattccgttccgaaatgcataccatgcgcccgtacccaatatttgcgaacaaggaaagaaaatggcacgtttaaccgtacacaccctcgaaaccgcccccgaagccgccaaagcgcgcgtcgaggcggtacttcaaaacaacggctttatccccaaccttatcggcgtattatcaaacgcccccgaagccttggcgttttaccaagaagtcggcaagctcaacgccgccaacagcctgaccgccggcgaagtcgaagtcatccagatcatcgccgcccgtaccaaccaatgcggtttttgcgtggcagggcacaccaaactcgcaaccctgaaaaaactcctgtccgaacaatccgtcaaagccgcgcgcgctttggcagcaggcgaatttgacgatgccaaactcggcgcgctcgccgccttcacccaagccgtaatggcgaaaaaaggcgcggtatccgacgaggaactcaaagcatttttcgatgcgggctacaaccagcagcaggcagttgaagtcgtgatgggcgtagccttggcaaccctgtgcaactacgtcaacaacctcgcccaaaccgaaatcaaccccgaattgcaggcttacgcctga

SEQ ID NO: 62564 - DNA, 1416 bp, Neisseria meningitidis
ttgagcaggctacaaaaagccgcgcaacagatactgattgtgcgtggctacctcacttcccaagctattatccaaccacagaatatggattcgggaattctgaaattacgggtatcagcaggcgaaataggggatatccgctatgaagaaaaacgggatgggaagtctgccgagggcagtattagtgcattcaataacaaatttcccttatataggaacaaaattctcaatcttcgcgatgtagagcagggcttggaaaacctgcgtcgtttgtcgagtgttaaaacagatattcagattataccgtccgaagaagaaggcaaaagcgatttacagatcaaatggcagcagaataaacccatacggttcagtatcggtatagatgatgcgggcggcaaaacgaccggcaaatatcaaggaaatgtcgctttatcgttcgataaccctttgggcttaagcgatttgttttatgtttcatatggacgcggtttggtgcacaaaacggacttgactgatgccaccggtacggaaactgaaagcggatccagaagttacagcgtgcattattcggtgcccgtaaaaaaatggctgttttcttttaatcacaatggacatcgttaccacgaagcaaccgaaggctattccgtcaattacgattacaacggcaaacaatatcagagcagcctggccgccgagcgcatgctttggcgtaacagacttcataaaacttcagtcggaatgaaattatggacacgccaaacctataaatacatcgacgatgccgaaatcgaagtgcaacgccgccgctctgcaggctgggaagccgaattgcgccaccgtgcttacctcaaccgttggcagcttgacggcaagttgtcttacaaacgcgggaccggcatgcgccaaagtatgcccgcacctgaagaaaacggcggcggtactattccaggcacatcccgtatgaaaatcataaccgccggattggatgcagcggccccgtttatgttgggcaaacagcagttttcctacgaaaccgctatccatgcacaatggaacaaaacgcctttggttgcccaagacaagttgtctatcggcagccgctacaccgttcgaggatttgacggtgaacagagcctttccggagagcgtggtttctactggcagaacactttgggctggcatttccatccgcgccatcaattctatctcggtgcggactatggccgcgtatctggcgaaagtgcccaatatgtatcgggcaagcagctgatgggtgcagtggtcggcttcagaggagggcataaagtaggcggtatgtttgcttatgatctgtttgccggcaagccgcttcataaacccaaaggctttcagacgaccaacaccgtttacggcttcaacttgaattacagtttctaa

SEQ ID NO: 62565 - DNA, 438 bp, Neisseria meningitidis
atgcccgtgaaaaaagttgaaaaaaacatcttggtgctgcacggcgcggacaaaatgttcgagctggtcgataaggttgaggattacccgaactttctgccgtggtacagcaaaaccgaggtcatcgggcgcaacggcaacgaactgaaggcgcggctgtttatggactatatgcacgttcgccaatcattcgccacgcacaaccgcaacattccgggcagggaaatccgtatggaactgctcgaaggtccgttcaaaaccttacgtggaacgtggaaatttatcgatttgggcgacgatatgtgcaaaatcgaattcaatttggaatacgatttttccaatgccgttttgtccgccttaatttcccccgtcttcaaccacctttccgccacgctggtcgaagcgttcgtcaaagaggcagaccgccgttatgcttga

SEQ ID NO: 62566 - DNA, 672 bp, Neisseria meningitidis; identical to SEQ ID NO: 44776

SEQ ID NO: 62567 - DNA, 1077 bp, Neisseria meningitidis; identical to SEQ ID NO: 39262

SEQ ID NO: 62568 - DNA, 621 bp, Neisseria meningitidis
atggcacagtttttcgctattcatcccgacaatccccaagaacgcctcatcaagcaggcggttgaaatcgtcaataaaggcggcgtggtcgtctatccgaccgattcgtgttacgccttgggttgcaaactcggcgataaggcggcgatggaacgcatactctccatccgcaaaatcgatttgaaacaccacctgaccctgatgtgcgccgatttgagcgagttgggcacgtacgccaaaatcgacaacgtacagtttcgtcagcttaaggccgccacgcccggaccttatacctttatcttgcaggcgacgaaggatgtgccggcgcgcacgctgcacccgaaacgcaaaaccatcgggctgcgtattcccgataatgccattgcacaagccctgctgggggaattgggcgagccgcttttaagctgcaccctgatgctgcccgaagacggcgaaccattgaccgatccttatgaaatccgcgagcgtttggaacacgccgtcgatttggtgattgacggcggctggtgcggaaccgagccgaccaccgtcgtcgatatgaccgacggcacggaattggtgcgccaaggttgcggcgatacggcggtgttcggtttgtag

SEQ ID NO: 62569 - DNA, 855 bp, Neisseria meningitidis
atgaaccaaacccaactggcacgcggtatcggtacttcgccggcatccatcagtatgtatctgaacggcacttatgcggaaaaaggcggtaattatgaaaccatcgagccgaaaatcgaggcgtttttggagatgcaggacagtaaagcgcaacgtgaagagctggtgttgggatttgtatcgactaagacgacacgccgtattgcagaagtgatgcgcgatgcgcacgaaggcggcgaaacggtggtgatctacggtcaggctggcttgggcaagacgcaggcggtcaaaaactactgcgagaaaaaccctgcggccatcctgattgaggctaatccgagctttacggctttggtcttgatgcgcaagttggcgacagcggcgaaggtatcggcgatgggcagcctgaatgatttgtttgagtctgtatctgaccgcctgcgcgattcgggccgtctgattgtggtcgatgaagcggaaaacctgccgttacgcgcccttgaaattgtacgccgtctgcacgatgagactggctgcggcttggtgttgagcggtatgccccgactggttgcgaatttgcgcggtaagcatggcgagctggtgcaactttacagccgcgtgtcggttgcgctgaatttgggcgaatctttgccggatgacgaactctttgagattgcgaaagcggctttgcctgatgcggacgaagaaacgctcttggaactggttaaacatagcaacggcaatacgcgccggatgagcaaattgatgcgcggcgcggtacgcacggcgaacaagaacggtatcaagatgcaggtcggtatcgttaagaaatacagctccctgattatccgatag

SEQ ID NO: 62570 - DNA, 828 bp, Neisseria meningitidis
atggatggagaaggtatgtcggttgggcattatgagaattttcccgtcggttcgctgattttgccgcgcaggttgaggaagccggttcacgcggtgtacgcgtttgcacggacggcggacgatatggcggacgagggcagtatgccgtctgaagccaggttggcggggttggagggtttgcagcgcgagttggacgtgttggcatcgggcggccggtcggcgcatcctttgattgcacgattggatgccgaggcggttgtgccgttcggtttggatttgcagccgttttatgatttgctttctgcattttctcaggatgtggttaaaacaaggtatggaaatttcggcgagctggccgattattgtcggcgttccgccaaccctgtcggacgcattatgctggctttgtacgggaaaacggatgcggtgtgcgtggcgcaaagcgacggcatctgtacggctttgcaactggtgaatttttggcaggatgtggctgtggattggcaaaagggcagggtttatattccgcaggacgatttgttgaaattcggtgtttccgaaggacagattgcggagggtagggcggatgcggcgtttcagcggctgatggcgtatgagtgccggcgcgcatttcgtatgctgaaggcgggttcgcctttggcgcgcgaattgaaagggcgtatcggtttggaactccgtatgattgtgttaggggcgcagttgattttgcagaaactggacgcgtgccgatacgatgtgtttgcacaacgccccgttttggataagaaggattggttgattatgctgaaaaaggcgttgtggaaatga

SEQ ID NO: 62571 - DNA, 1008 bp, Neisseria meningitidis
atgagcaccttcttccagcaaaccgcacaagccatgattgccaaacacatcgaccgcttcccactattgaagctagatcaagtgattgattggcaaccgatcgaacaatacctgaaccgtcaaagaacccgttacctccgagaccaccgcggccgtcccgcctacccgctgttgtccatgttcaaagccgtcctgctcggacaatggcacaacctctccgatcccgaactcgaacacagcctcatcacccgcatcgatttcaacctgttttgccgtttcgacgaactgatcatccccgattacagtaccttatgccgctaccgcaactggctggcgcaagacgacaccctgtccgaattactcaaactgattaactgccaactgaccgaaaaaggcctaaaaatagagaaagcatccgccgccgtcgttgatgccaccattatccagaccgccggcagcaaacagcgtcaggccatagaagttgacgaagaaggacaaatcagcggtcaaaccacaccgagtaaggacagcgatgcccgttggataaagaaaaacggcctctacaaactcggttacaaacaacatacccgtaccgatgcagaaggctatatcgagaaactgcacattactcccgccaatgcccatgagtgcaaacacctgtcgccgttgttggaagggttacccgaaggtacgaccgtctatgccgacaaaggctacgacagtgcggaaaaccggcaacatctggaagaacatcagttgttggacggcattatgcgcaaagcctgccgcaaccgcccgctgtcggaagtgcaaaccaaacgcaaccgatatttgtcgaagacccgttatgtggttgaacagagcttcggtacgctgcaccgtaaattccgctacgctcgggcagcctatttcggactgattaaagtgagtgcgcaaagccacctgaaagcgatgtgtttgaacctgttgaaagcggccaacaggttaagtgcgcctgttgccgcctaa

SEQ ID NO: 62572 - DNA, 654 bp, Neisseria meningitidis
atgaagataacgcactgcaaattaaagaaaaaagtacagaaagaactgctccgtttttttgtgctggaagttaccgcccgttctgccgccgatattttgggtatccatcccaattcggcagcactgttctaccgtaaaatccgcacggttatcaaccatcatttggccttggctgccgatgaggtttttgagggccctgtcgagccggacgaaagcgatttcggcggacggcgtaaaggcagacgtggtcgcggtgcggcaggaaaagtggttgtcttcggcattctgaaacgcaacggacgggtctataccgttgtggtggataatgccaagtctgaaacgttactccctgtcatcaagaagaaaatcatgccggacagcattgtttataccgatagtctgagcagctgcgacaagttggacgtgagcggttttatccattaccgcatcaaccattccaaggaatttgcagaccgtcaaaaccacattaacggcattgagaacttttggaatcaggcaaaacgcgtcttgcgaaaatacaacggaatcgatcgtaaatctttcccgctgttcttgaaagaatgcgaatttcgatttaacttcggcacaccgtctcaacagcttaaaatcctgcgggattggtgtggaatttag

SEQ ID NO: 62573 - DNA, 2703 bp, Neisseria meningitidis
atgcaactgcatatcctgaacaatccgaaggacgcggctttggcggcggacgcggaatttctgaaacaatccctgtttaacctcctacacgaagaagcctcgccgttggtggtggaaacggtcaagctgctgtccacttccgacgacagcgcggcattgattgaaaaagtattgccgcaattggacgaacaacaaacccacgatttaaccttggcctgcggcctgttcgcccagattttgaacatcgccgaagacgtgcaccacgaacgccgccgccaaatccacgaagaagccggacgcggcggcgcggaaggcagcctgacggaaaccgtccgcaggctcaaagcggggaaagccgacggcaaatcggtgcagcggcagttggacaatacgtccgttaccgccgttttgaccgcgcatccgaccgaagtgcaacgccaaaccgtcttaagcttcaaccgccgcatccgcgcactgttgccgcaacgcgaacgctgcaccaatgccgacgcgctggcacggctgcgccgcgaaatcgacactatcctgctgggcttgtggcagaccagcgaaacgcgccgccacaaactcagcgtcaacgacgaaatcaacaacggcgtgtccatcttcccgatgagctttttcgaagccctgcccaagctctaccgcaatatggaacacgactttcagatggtctatcccgatgtctgcgttccgaatatcctcaaaatcggcggctggattggcggcgaccgcgacggcaatccgttcgtttctgccgaaaccttgcgttttgccttccgccgccacgccgatgccgtgttccgtttttaccgtggcgaactcgacaaactttaccgcgaactgccgctctccatccgccgcgtcaaagtcaacgacgacgtaatggcactggccgccctctcgcctgacgaagaaatcgcccgtaccgaagaaccctaccgccgcgccatcgcctacatcatggcacgcgctatgggcaaggcacgctcactcggtttgggcatgggctgcaaattcggcttcctcgagccttatgcttcggcacaagaatttctcgatgatttgaaaaaattgcaacgttcccttatcgacaacggcagccgcctgcttgccgaaggccgtctggcagacctcatccgctccgtatccgtgttcggcttccatatgatgccgcttgatttgcgccaacacgcaggcaaacacgccgatgtggttaccgagcttttccaacacgcaggcttggaagactacaacagcctgaacgaagaacaaaaacaagccgtcctgttgcgagaattgagccatcaacgtccgctgtacagcccgttcatcacatacagcgaccatacccgccacgaactggcaattttcaacgaagcgcgcaaaatcaaagacgaatttggcgaagatgccgtaacacaaagcattatttccaactgcgaacaacccagcgacctgctcgccttggcattgctgctgaaagaaagcggcctgttggcggtggaaaacggcaaaccgcacagccgcatcaatatcgtgccgctgtttgaaaccatcgaagcactcgaaaacgcctgtccggttatggaaacgatgttccgcctcgactggtacgatgccctgctcgaaagccgcggcaatatccaagaaatcatgttgggctactccgactccaataaagacggcggctacgttaccagctcatggtgtctgtatcaggcggaattgggcttggtcgaactcttcaaaaaatacgatgtccgcatgcgcctgttccacggccgcggcggcagcgtcggacgcggcggcggcccttcttaccaagccattttggcgcaaccggccggcagcgtggcgggacaaatccgcattaccgaacaaggcgaagtcattaccgccaaatacgccgaccccggcaatgcccaacgcaacttggaaaccttggttgccgcgactttggaagccagcatcctgccggataaaaaagaccctgatgccaaactgatgcaggcattgtcggacgtatcgttcaaatactaccgcgaactgattacccaccccgacttcatcgactacttcctgcaaatcagcccgattcaggaaatcgccaccctcaacctcggcagccgtcctgccagccgcaagaccttagcgcggattcaagacttgcgcgcgattccgtgggtattttcctggatgcagaaccgcctcatgctgcctgcttggtacggtttcggcagcgcggtggaaaccttgtgcgaaggcaatcccgacacactgaccgccctgcgcgaacatgcccaaagcaatccgttcttccaagccatgctctccaatatggagcaagtgatggcgaaaaccgacatcaccctcgcggaaaactatgccggcttgagcgaatcgcccgataaggcaaaaatcatcttcgggatgattaaggaagaatatcgccgcagccgcaaagcactgctcgacctgctgcaaaccgaagagcttttgcgcgacaaccgcagcctcgcccgttcgctcgctttgaggattccttacctgaacgccctcaacggcctgcaagtcgctatgctcaaacgcctgcgtaaagaacccgacaatccgcacgcgctgctgatggttcacctgaccatcaacggcgtggcgcaaggtttgcgtaataccggctga

SEQ ID NO: 62574 - DNA, 1284 bp, Neisseria meningitidis
atgactgcatcgaaatcaggttttatcgggcaaatcttttcccgcaatatgcttgtctgtatttttacggggtttacctcggggctgccgctgtactttctgattaacctgattccggcttggttacgcagcgagcaggtggatttgaagagcatcgggctgatggcgttaattggtctgccgtttacttggaaatttttgtggtcgccgctgatggacgcggtcaggctgcccgttttggggcggcggcgcgggtggatgctgctgacgcaggcagggttgctggcagctttggcggcatatgcctttttaaacccccgtaatcatctgccgctgattgccggcttgtcggtgcttgtcgcttttttttccgccagtcaggacattgtattggatgcgttcaggcgcgagattttgtcggacgaggaattgggtttgggcaactcagtccatgtgaacgcctaccggattgccgccctgattcccggttcattgagtttggtgttggcagacaggatgccgtggtcagaagtatttgttatcacttcattatttatgctgcccggccttctgatgacgctgtttcttgcgcgcgaacccgtgttgcctcctgccgttcctaaaacgttgaagcagaccgtggtagagccgtttaaagaattttttacgcgcaagggcatcgcttcggcggtgtgcgtgctgctgtttatcttcctttacaaactcggcgacagtatggcaaccgcgttggcaacgccgttttatctggatatgggtttcagcaagacagacatcggtttgattgcaaaaaatgcaggactgtggccggcagtggcggcaggtatcttgggcggcgtgtggatgctgaaaatcggcgtaaacaaagccttgtggctattcggcgcggtgcaggctgtaaccgttttggggtttgtatggctggcagggttcggacatttcgacacggtcggcacaggcgagaggctgatgctggcggcagttatcggcgcggaagcggtcggcgtggggttggggacggcggcgttcgtatcgtatatggcgcgcgagaccaatcccgcatttaccgcaacgcagcttgcgctgtttaccagcctgtccgccgtcccgcgcacggtcatcaattcctttgccggttatctgattgaatggctcggttatgtaccgtttttccaactgtgtttcgcactcgccctaccgggtatgctgctgctgctgaaagttgcgccttggaacggggagaaaactcaggatgcaggcagatga

SEQ ID NO: 62575 - DNA, 459 bp, Neisseria meningitidis
atggaaaccccgaaactcagtgtcgaagccattgaaaaaggtacggttatcgaccatattcccgccggcagggggctgaccatcctgcgccagttcaaacttttgcactacggcaacgcagtaaccgtgggcttcaacctgcccagcaaaacccaaggcagcaaagacatcatcaaaatcaaaggcgtgtgcttggacgacaaagccgccgaccgcctcgccctgttcgcccccgaagcggtggtcaataccatcgacaatttcaaggtcgtgcagaagcggcatttgaacctgcccgatgaaattgccgaagtgttccgttgcccgaacacgaattgcgccggccacggcgagccggtcaaaagccggttttatgttaaaaaacacaacgggcagacgcggctgaaatgccattactgcgaaaaaacctacagccgggattcggtggcggaagcctga

SEQ ID NO: 62576 - DNA, 330 bp, Neisseria meningitidis
atgtttgatggcgaagtagaagcagatgaaagttattttggcggacaacgcaaaggcaaacgcggtcgcggtgctgccggtaaagtcgccgtattcggtcttttgaagcgaaatggtaaggtttatacggttacagtaccgaatactcaaaccgctactttatttcctattatccgtgaacaagtgaaacctgacagcattgtttatacggattgttatcgtagctatgatgtattagatgtgagcgaatttagccattttagcttcgctgaaacttcgttttcgtatcaatcacagcacacattttgccgaacgacaaaaccatattaa

SEQ ID NO: 62577 - DNA, 1356 bp, Neisseria meningitidis
atgaaagcacccgaactcttattgcccgccggcggattggaaagaatgcgcaccgcctacgactacggcgcagatgccgtttacgccggcagcccgcgttattccctgcgcgcccgcaacaacgaatttgccaaacttgatgttttagaacaaggcattaaagaagcgcacgagcgcaacaaaaaattctttttgaccgtcaacaccctgccgcacaattccaaactcaaaacctttgtttccgatatggagccgctgattgcgatgaagcccgacgcgctgattatggcggatccgggcttgattatgaccgtgcgcgaaaaatggccggaaatgccgatccacctgtccgtacaggcgaacaccaccaactactggggcgtgaaattctggcagaacatcggcgtcgaacgcattattctgtcacgcgaattgagtatggaagaaatcgccgaaatccgccaacaatgccccgacatcgaactcgaagtcttcatccacggcgcattgtgcatcgcctactccggccgttgcctattgtcgggctatttcaaccaccgcgaccccaaccaaggcacttgcaccaactcttgccgttgggattacaaagtccacaacgctacggaaagcgatgcgggcgatgcccagcttctgcaaggttttaactttgaaaaagcccaagaagaagccaaccaaaacttcgaaggcatcaacggtcagaaacgccatccctacgccgacaaggttttcctgattgaagaatccaaccgtccgggcgagatgatgccgattatggaagacgaacacggcacctacatcatgaactccaaagaccttcgtggcattgaagtggttgagaaactcgccaaaatcggcgtggacagcctcaaagtcgaaggccgcaccaagtcgctctattatgtcgcacgcgtcgcccaatcctaccgcaaagcgattgacgatgccgtcgcaggccgtccgtttgattacagcctgttgagcgaactcgaaggccttgccaaccgcggctacaccagcggcttcctcgaacgccaccacactcaggattatcaaaactacctgaccggccattccaccgccaaacaaagccaatacgtcggacacgttaccgaaatcgacaaaaacggctgggcgaccatcgaagttaaaaaccgcttcgccgtcggcgattcactcgaaatcatccacccgaacggcaaccaaaccatcaaattggaacaaatggcccgaaaaggccagcctgtcgatgtcgcacccggcaacggcattcaggtcaaaatccccgatatgcagggcaaagaaaaagccctcatcgcacgcgtgttgaacccctga

SEQ ID NO: 62578 - DNA, 702 bp, Neisseria meningitidis
atgagcgcgcgtgaaaatattttggcaaaactgaaaaaagccgatgccttgccgatggaagagcctgcggttttcgattattaccgcgaaaagggcgtttcttgggacagcgaagccgagcgtctgaaacattgggctgccgcaatgcgcgcggtcaaaaccgaaatttattgggtgacgaaaagcaattggatgcaggttttccgcgaagcggcagaaggcaagggtttgaaaaacatcctgctgcccttggcgaccgaacacggacaaattgcccgtgccgcattggcggacagcaatatcgaaccgattgctttcgagcgcgaaatcgatacttggaaaaccgagtttttcacgaacatcgatgcgggcttcagcggcgcgcaatgcggcatcgcccgcaccggcacgctgatgctgttttccagccccgaagaaccgcgtactttaagcctcgttccgcccgtgcatttctgcctgttcgatacgtccaagatgtacaacgagtttcataatgccgtcgaaggcgaaaaactggtggaaaacggtatgccgaccaatgtattcctgatttccggcccgtccaaaaccgcagacatccaactgacgcttgcttacggcgcgcacggcccgcgcgatttggtcatcctcgccatcctgcccgaccacatttcccctgccgatttggaggaaaacgcatga

SEQ ID NO: 62579 - DNA, 309 bp, Neisseria meningitidis
atgaaaactgttccaaccatcctgattagcatccttttggcaaccgcccttcccgcatccgcacacggtatgcataagagcaaacccctgactatggacgagctgccgccgatttgccaacaatatttcaaacgcgccgaaacctgttacaacaaaaccggagacaaagcagatttcgcacgcaacaacaccaaattcctattccaagccctgcctgctgccgatttgggacagcgtaagcaaatgtgccaaatcgctatggattcgtttgcagaaaaaacccgcatcagcaatagcaatgccgtctga

SEQ ID NO: 62580 - DNA, 1110 bp, Neisseria meningitidis
atggatatgacggaccgcaaggcagcgattatccgccccggaggagcaagggatatatacagctattatgtcaaaggaacttcaacaaaaacaaagactaatattgtccctcaagccccattttcagaccgttggctaaaagaaaatgccggtgccgcctctggttttctcagccgtgcggatgaagcaggaaaactgatatgggaaaacgaccccaatcaaaattggtggagtaaccgtatggatgatattcgcggcatcatccaaggtgcagccaatccttttctaacgggttttcagggattgggagttggggcaattacagacagtgcagtaagcccggtcacagatacagccgcgcagcagactctacaaggtattaatgatttaggaaaattaagtccggaagcacaacttgctgccgcgagcctattacaggacagtgcttttgcggtaaaagacggtatcaactctgccaaacaatgggctgatgcccatccaaatataacagctactgcccaaactgccctttccgcagcagaggccgcaggtacggtttggagaggtaaaaaagtagaacttaacccgactaaatggaattgggttaaaaataccggctataaaacacctgctgcccgacctatgcagactttagatggagagatggcaggtaggaataagccagcgaagcaagctactcctaatggcaaagctggcgtttctacacaacaatctttgcaaaatagtctcgttccacaaaaaaattatacgcatactacctataatggtggatcagctattacagatggcaaatatattactgaccctctcagtatggtacgacacaaacctgatgcatctagtctagacaagatagatagcaaaagtttatttaaatcagatgttgatgcggaaaaagctacattagatgctgctagatatgcagataaacataatttatgggatagtcaaaataaggcaaaagttccaacgaacgacgtagttggctatacagacggaaaaccgacacatataattaacatttatcgtagaaagccgaataaagatgggattagacctgtgcatggaacaccaggtaaggaacgttga

SEQ ID NO: 62581 - DNA, 288 bp, Neisseria meningitidis; identical to SEQ ID NO: 41116

SEQ ID NO: 62582 - DNA, 621 bp, Neisseria meningitidis
ttgctgggtgtggttccgggtatcggtgaatcgatacaggcctataaagtagcgaaagcggcaaaaaatttacaaggcatgaaaaaagccttggacaaggcagcaaccgttgccactgcacagggctatgtcagtaaaaccaaaatcaaagtcggtcaaactgaattaagggttactgcagcaactgacaaacaattgctgaaagctattggcgaaggaagggacacgacaggtaaaatgaccgagcagttatttgactctgtagctaaacaaaatggcttcagagtgctttcgggcggcaaatacggcggaaataacggttttgatcatgtatggcaggctgccgatggtagtgttgttttgattgtagaaagtaagcagattaggaacggtacggtacagctgaatccgaatggtgcgggtggatatacgcagatgagtcgtgaatggattaaacaagttgtaaaaagtttacctgatggtagtcctgctaaggcagttgtcttaaaagcaaatcagaacggcaaattaaaaacggcaatagcaggcgttgatcgtcaaacaggtaaggccgttattctttctgtcaaagttccttctaaaaccaatataaggagataa

SEQ ID NO: 62583 - DNA, 1131 bp, Neisseria meningitidis
atgaaacaaaccgattcaaccatcaaatctcgtgcggcggtggcattcgcccctaaccaacccttacaaattgtggaaatcgacgtagaaatgccgcgtaaaggcgaggtgttaatccgcaatacccacactggcgtgtgccatactgatgcgtttacgttatcaggaagcgatcctgaaggcgtattccctgtggtgcttggacacgaaggtgcgggtgtggtcgttgctgtgggcgaaggtgtgtcaagcgtaaaaccgggtgatcacgtgattccgctttacaccgccgaatgtggcgaatgtgagttttgttgttcaggtaaaaccaacttgtgcgtctcagtgcgtgatacacaaggtaaaggcttaatgccggacggcacgacgcgtttttcttatcaaggtcagccaatctatcactatatgggctgttcgactttcagtgaatactccgttgttgccgaagtttcactggcgaaaatcaaccctgaagccaaccatgaacaagtatgtttgctcggctgcggcgttaccacaggtattggtgcggtacataatacggcaaaagtgcaagaaggcgactctgttgccgtgtttggcttaggcgcgattggtttggcggtggtgcaaggtgcgcgtcaagccaaagccggccgcattatcgccattgataccaatccatcaaaatttgagttggcaaaacagtttggtgcaacggattgtttgaacccgaacgattacgataaaccgatcaaagatgtgttgttagacattaataaatggggcattgaccatacctttgaatgtatcggcaacgtaaacgtaatgcgtcaggcattagaaagtgcacatcgtggttggggtcaatccattatcatcggcgtagcaggtgcaggacaagaaatttcaacgcgtccgttccagttggtaacaggtcgtgtttggaaaggttcagcatttggcggtgtgaaaggtcgctctgaactgccgaaaatggtggaagattcaatgaaaggcgacattgagttagaaccgtttgtaacccacacaatgacactcgatcaaatcaataaagcctttgacttaatgcacgaaggtaaatcgatccgcgccgttattcactactaa

SEQ ID NO: 62584 - DNA, 210 bp, Neisseria meningitidis; identical to SEQ ID NO: 39235

SEQ ID NO: 62585 - DNA, 411 bp, Neisseria meningitidis
atgattgaatttgtccgagccaaaaaacggctgctttgggcatttgtgcttttgcttgtgtggacgtgcggttaccgatacgccgccgacaaggccgaagcggaacaaaccgccctgattgccacctatcggcattcttctatggttgcggcggaacaatacgccttgcagcttaaaaaagcgcaggacgaaaggcagcggtggtacgacttttcccaaaaacaaggaagaaagcccgtgaaaaaacagtatccgccgcaaacgaaaaaagccggctatctgaaaaccaaggaagaactgcttgcggaattggcttgccttaaagcggaaatggctgccctaaaaaagctcgatgccttaatctatgggaaagaagtgcggcagaaagaacgcaactcgtcgcagggttaa

SEQ ID NO: 62586 - DNA, 2604 bp, Neisseria meningitidis
atgagcaaaaccgtccgttatctgaaagattaccaaacgcctgcctaccgtattctcgaaaccgacctgcatttcgatattgccgaaccgcaaaccgtcgtgaaatcccgtttgacggttgagccgcagagggtaggggagccgctggtgttggacggttcggcgaaactcttgtccgtcaaaatcaacggcgcggcggcggattatatgttggaaggcgagacgctgacgattgcagacgtgccgtccgaacgcttcaccgtcgaagtggaaaccgaaatcctgccggcggaaaacaaatcgctgatggggctgtatgcgtccgccggtaacctgtttacccagtgcgagccggagggcttccgcaaaatcacgttctatatcgaccgtccggatgtcatgtccaagttcacgaccaccatcgtcgcggacaaaaaacgctatcccgttttgctctccaacggcaacaaaatcgacggcggcgagtattcagacggccgccattgggtgaaatgggaagacccgtttgccaaaccgagttatctgtttgctttggtcgcgggcgatttggcggtcacggaagactatttcaccaccatgagcggcagaaacgtcaaaatcgagttttacaccaccgaagcggacaagcccaaggtcggctttgccgtggaatcgctgaaaaacgcaatgaagtgggacgaaacgcgcttcggtttggaatacgacttggatattttcatggtcgtcgccgtgggcgatttcaatatgggcgcgatggaaaacaaggggctgaacatttttaataccaagttcgtccttgccgacagccgtaccgccaccgataccgattttgaaggcatcgaatccgtggtcggacacgagtatttccacaactggacaggcaaccgcgttacctgccgcgattggttccagctttcgctgaaagaagggttgaccgtgttccgcgaccaagaattttccggcgaccgcgccagccgcgccgtgcgccgcatcgagaacatccgcctgctgcgccagcaccagttccccgaagacgcaggcccgaccgcccatccggtgcgccccgccagctatgaggagatgaacaatttctacaccatgaccgtttatgaaaaaggcgcggaagtggtgcggatgtatcacaccttgctcggcgaagagggcttccaaaaaggcatgaagctctatttccaacgacacgacgggcaggccgtgacctgcgacgatttccgcgcggcgatggcggacgcgaacggcatcaatctcgaccagttcgccttgtggtacagccaggcgggtacgcccgtcttggaagcggaaggtcgtctgaaaaacaatagtttcgagttaaccatcaaacaaaccgtgccgcccacgcccgatatggcggacaagcagccgatgatgattcccgtcaaagtcgggctgctgaaccgcaacggcgaagcggtggcattcgattatcagggcaaacgcgcaaccgaagccgtgttactgctgaccgaagccgaacagaccttccagttcgaaagcgtaaccgaagccgtcgttccctcgctgctgcgcgggttcagcgcgccagtgcatctgaactatccgtacagcaacgacgacctgctgctcctgctcgcccacgacagcgacgccttcacgcgctgggaagccgcccaaacgctctaccgccgcgccgtcgccgccaaccttgccgcgctttcagacggcatcgggttgccgaaacacgaaaaactgcttgccgccgtcgaaaaagtcatttcagacgacctcttagacaacgccttcaaagccctgcttttgggcgtgccgcctgaagccgagctgtgggacggcacggaaaacatcgacccgttgcgctaccatcaggcgcacgaagccttgttggatacaatcgccgtccgcttcctgccgaaatggcacgaattgaaccgtcaggcggcgaagcaggaaaaccaacgctgcgaatacagccccgaagccgccggttggcgcacgctgcgcaatgtctgccgcgccttcgtcctgcgcgccgaccccgcacacatcgaaaccgttgccgaaaaatacggcgaaatggcacaaaacatgacccacgaatggggcatcctgtccgccgtcaacggcaacgaaagcgatacgcgcaaccgcctgctggctcagtttgccgacaagttttcagacgacgcgctggtgatggacaaatatttcgccctcgttggatcaagccgccgcagcgacaccctgcaacaggttcaaaccgccttgcaacatcctaaattcagcctcgaaaaccccaacaaagcccgctcgctcatcggcagcttcagccgcaacgtcccgcattttcacgcagaagacggcagcggctaccgcttcatcgccgacaaagtcatcgaaatcgaccgctttaacccgcaggtcgccgcccgcctagtgcaggcgttcaatctctgcaataagctcgaaccgcaccgcaaaaacttggtgaaacaagcattgcagcgcattcgggcgcaggaaggattgtcgaaagacgtgggcgaaatcgtcggcaaaattttggattga

SEQ ID NO: 62587 - DNA, 225 bp, Neisseria meningitidis
atgatgaaaaacaaatatattttaacaaaagcagcaatcagcataaccgccatatctatattttatcttctaactcaagaaagcagcggcaaaactgaagaaccatcatatttcttgatgtttatgtttctcaacttgctttggtttgaagaaaataaaacagttatggctgccgttacagcaatgattgccgcccactttatatttgtcgcactatccgattaa

SEQ ID NO: 62588 - DNA, 1419 bp, Neisseria meningitidis
atgtctattaaaaacgccgtaaaattgattgaagaaagcgaagcccgctttgtcgatttgcgctttaccgataccaaaggcaagcagcaccactttaccgtgcctgcgcgcatcgtgttggaagaccccgaagagtggttcgaaaacggtcaggcgtttgacggttcgtctatcggcggctggaaaggcattcaggcttccgatatgcagttgcgtcccgatgcgtctacagccttcgtcgatcctttttatgatgatgttaccgtcgtcattacctgcgacgtcatcgaccctgccgacggtcagggttacgaccgcgacccgcgctccatcgcccgccgcgccgaagcctatttgaaatcttccggcatcggcgacacggcatacttcggccccgaacccgaattcttcgtcttcgacggcgtagaatttgaaaccgacatgcacaaaacccgttacgaaatcacgtccgaaagcggcgcgtgggcaagcggcctgcatatggacggtcaaaacaccggccaccgtcccgccgtcaaaggcggctacgcgcccgtcgcgccgattgactgcggtcaggatttgcgttccgcgatggtaaacattttggaaggactcggcatcgaagtcgaagtccaccacagtgaagtcggtaccggcagccaaatggaaatcggcacgcgtttcgccaccttggtcaaacgcgccgaccaaacccaagacatgaaatatgtgattcaaaacgttgcccacaacttcggcaaaacagccacctttatgcccaaaccgattatgggcgacaacggcagcggtatgcacgttcaccaatccatttggaaagacggtcaaaacctgttcgcaggcgacggctatgccggcttgagcgacaccgcgctctactacatcggcggcatcatcaaacacgccaaagccctgaacgcaattaccaatccgtccaccaactcctacaaacgcctcgtgccgcactttgaagcaccgaccaaactggcatattccgccaaaaaccgttccgcttccatccgcattccgtccgtgaacagcagcaaggcgcgccgcatcgaagcgcgtttccccgatccgaccgccaacccgtatttggcatttgccgccctgttgatggcgggtttggacggtattcaaaacaaaatccatccgggcgatcctgccgataaaaacctgtacgacctgccgccggaagaagacgcgctcgtcccgaccgtttgcgcctctttggaagaagccctcgccgccctcaaagccgaccacgaattcctcctgcgcggcggcgtgttcagcaaagactggatcgacagctatatcgcctttaaagaggaagatgtccgccgcatccgcatggcgccgcacccgctggaatttgaaatgtattacagcctgtaa

SEQ ID NO: 62589 - DNA, 633 bp, Neisseria meningitidis; identical to SEQ ID NO: 58337

SEQ ID NO: 62590 - DNA, 1449 bp, Neisseria meningitidis
atgaaaggcgatattggcgtaatcggtttggcggttatggggcaaaacctgattttgaatatgaacgattgcggatttaaggttgtcgcctacaaccgaacaatcggtaaggtggacgaatttttaaacggcgcggctaagggaacggatattgtcggcgcgtattccctgcaagacttggtcgataagctggcaaaaccgagaaaaatcatgatgatggttcgcgcaggttcggtcgtcgacgactttatcgaacaactgctgcccctgttggacgaggaagacatcattatcgacggcggcaatgccaattaccccgacacgacacggcggacacattaccttgccgaaaaagggattttgtttgtcggggcgggcgtatccggcggcgaagaaggcgcgcggcacggcccgtccattatgccgggcggggataagcgcgcttgggaagcggttaagccgatttttcaggcgattgccgccaaaacgccgctgggcgaaccgtgttgcgactgggtcggcagggacggcgcgggacattttgtcaaaatggtgcataacggcatcgaatatggcgatatgcagttgatttgcgaagcgtaccagttcatgaaagacggtttgggactgtcctacgacgaaatgcaccgcgtgtttgccgagtggaacaaaaccgagctggattcttatctgattgaaatcacagcggcaattttgggctataaggacgaaggcggcgaaccgctggtcgagaaaatcctcgatacggcagggcaaaaaggcacgggcaaatggacgggcatcaatgctttggatttgggtattccgttgacgctgatttccgaagcggtattcgcccgctgcgtttcgtcgttcaaagaacagcgcgtgcagaccggcaagctgttcgcccgaaccgttacgcccgtcgaaggcggcaaacaagaatgggttgaggcgttgagacaggccctgcttgcatccaaaatcatttcctacgcacaaggctttatgctgatccgcgaagcgggcgaaagctacggctgggatttggactacggcaacactgcgctgctgtggcgcgaggggtgcatcattcgcagcgcattcttaagcaatatccgcgacgcgtatgaaaacaatcccgatttggtgttcttgggtgcggatccgtatttcaaaaatattttggaaaactgcctgccggcgtggcgcaaggtggttgccaaggcggtcgaatgcggcatccctatgccctgcatggcttcggcgattacgttcttggacggctacacgaccgaacgtctgcctgccaacctcttgcaggcacagcgcgactacttcggcgcgcatacttacgagcgcaccgacaaaccgcgcggcgagtttttccataccaactggacgggcaagggcggagataccgcttcgacaacctacgatatttga

SEQ ID NO: 62591 - DNA, 936 bp, Neisseria meningitidis
ttgacccacggcgggaacaacccgccatttttgaaaaaaggattagatatgtggtttaaacaagttaccccattccgtttactggaattacctgaaaaacgctatttagatgaatctcttggaaatagttggtttaccgaaccacagggcttggactggttttccgagggctttactcccccgaatgcgtttacagacctagctgtgtttgaagctcaaaaaactatgcttatcagtttgatgcgagaagaaaaagtattacccagtgcggccatcaaacataaattggacgaacagattattaaaatccaagcccatgaaggacgaaatgttggtcgtaaagaaaagcaggaattacgcgaagcaattatcgacgacctgctgcctaagtcgttgattaaaagcagccgcacttatggtttatttgctggagagtggttattcgttgatacggcaaatcgccgcaaggccgaaaacctgttgaccaagttgcgcgaagcccttggcggcctgcctgctcaacagcctctcacccgtcaatcgccgtcagcattgatgaccaactggctgttgcggggcgaagcccaaggcctgtttgtgttggatagtgatgttaccctggtcggcgcgggcgatgttgctccaaaagttaaaatcagccgcaaagaccttaccgccgaagatgtggtacaacacgccaaaaacggtatgactgtaaccgaactgggcttggtctggaatggccgcgtggcatttatcctgacacaggatttaacactgaaacgtatccaatggctggacgttgtacaggaagaagctgaaggcagctgtgatgatgcgaaaagtatgtcttatgccacgcagctactgatggaggccgcactgagtgcgattcttggtgagttggtggatttactgggaggttggcaggaatga

SEQ ID NO: 62592 - DNA, 612 bp, Neisseria meningitidis; identical to SEQ ID NO: 45607

SEQ ID NO: 62593 - DNA, 738 bp, Neisseria meningitidis
atgggcggacagaaaacgcatttcggattcagtacggtcaacgaagatgagaaagccggaaaagtggcggaagtgttccactccgtcgccaaaaactacgacattatgaacgatgtgatgtcggcagggctgcacagggtgtggaagcatttcaccatcaacacggcgcacctgaaaaaaggcgataaagtgttggacattgccggcggtacgggcgatttgtcgcgcggttgggcgaaacgggtcggcaaggaaggcgaggtttggctgaccgatattaattcctctatgctgaccgtcgggcgcgaccgtctgttgaacgaaggcatgattttgcccgtgtcgcttgccgatgcggaaaaactgcctttccctgacaattatttcaacttggtttccgtggcgttcggcttgcggaacatgacgcataaagatgccgcgctgaaagagatgtatcgtgttttgaaacctggcgggacattgctggtgttggagttttccaaaatctacaagccgttcgaaggcgcgtatgatttttattcgttcaagctgctgccggtcatgggcaaactgattgccaaagatgcggagagttatcaatatctcgccgaatccatccgcatgcaccccgatcaggaaactttaaagcaaatgatgctggatgccggatttgacagtgtggactatcataatatgagtgcggggatcgttgcgttacataagggcgtgaaattttaa

SEQ ID NO: 62594 - DNA, 1215 bp, Neisseria meningitidis
atggataaatttcccaagtctgcaaagctcgatcacgtctgttacgacatacgcgggccggttcacaaaaaagcccttcagttggaagaggagggcaataaaatccttaaactcaatatcggcaaccctgcgccgttcggctttgaagcccctgatgaaatcttggtcgatgtcatccgcaacctgccgacttcgcaaggctattgcgattctaaagggctgtattccgcccgcaaagccattgttcactactatcagaccaaaggtttgcgcgatattacggttgatgatgtctatatcggcaacggcgtgtccgagctgattacgatgtctatgcaggcattgctcgacgacggcgacgaaatcctgattcccgcgcccgactaccctttgtggacggcggcggcaacgcttgcgggcggtacggtacgccattatctgtgcgacgaagaaaacggctggttccccaaccttgccgatatggaagccaaaatcacgcccaaaaccaaagccatcgtcgtcatcaatcccaataatccgacaggcgcggtgtacagcagggaaatcctgttggaaatcgccgaactggcgcgcaagcacggtttgattattttcgccgacgagatttacgataaaatcctttatgacggcgcggttcaccaccacatcgccgcgcttgcccccgaccttttgacggtaacgttcaacggtttgtccaaatcctaccgcgtcgccggcttccgccaaggctggatggtgctcaacgggccgaaacatcacgcaaaaggttacatcgagggtttggatatgctctcgtccatgcgcttgtgtgccaatacgccgatgcagcacgcgattcagacggcattgggcggctatcagagcattaacgaatttatcctgccgggcgggcggcttttggaacagcgcaacagggcgtgggaactggtcagccaaatccccggcgtgtcctgcgtcaaaccgatgggcgcgatgtatatgttcccgaaaatcgataccgaaatgtaccgcatccgcgatgacatgaaattcgtttacgatttgctggtgcgcgaaaaagtcttgctggtacagggaacggggtttaattggattaaacctgaccatttccgcattgtcacgctgccttacgtccatcagattgaagaggcgatgggcaggttggcaagattcctgcaaacctaccgccaataa

SEQ ID NO: 62595 - DNA, 1056 bp, Neisseria meningitidis
atgattacacttgccgtagatgccatgggcggcgaccaaggacttgccgttaccgtacccggcgcaaccgcattcctccaagcacaccccgatgtccgcctgattatgaccggcgacgaaacgcaactgcgccaagccctgaccgcggcaggcgcaccgatggaacgcatcgacatctgccataccacccaagttgtcggcatggatgaatcccctcagtccgccctaaagaacaaaaaagactcctccatgcgcgttgccatcaaccaagttaaagaaggcaaagcccaagccgccgtatccgcaggcaacacgggcgcactcatggcaaccgcacgtttcgtcctcaaaaccattcccggcatcgaacgccccgccatcgccaaattccttccttccgacaccgaccacgttaccctcgccctcgacctcggcgcaaacgtcgactgcacgcccgaacagctcgcccaatttgccgttatcggcagcgaactcgtccacgcactccatcctcaaaaaggacagccgcgtgtcgggctggtcaacgtcggcacggaagacatcaaaggtacggacaccgtcaaacaaacctacaaactgctgcaaaacagcaaactcaactttatcggcaacatcgaaagcaacggcatcctgtacggcgaagcagatgtcgtcgtcgccgacggctttgtcggcaacgtcatgctcaaaaccatcgaaggcgcggtcaaattcatgagcggagccatccgccgcgaattccaaagcaacctgttcaacaaacttgccgccgttgccgccctacccgccctcaaagggctgaaaaacaaactcgatccgcgcaaattcaacggggccatcctgctcgggctgcgcggcatcgtcatcaaaagccacggcggcacagacgaaaccggtttccgctacgcactcgaagaagcctaccacgaagccaagtccgccggcctttccaaaatcgaacaaggcgttgccgaacaactcgccgcactcgaaactgccaaagccgtccaaaacgaaaatgccgacggtctgtaa

SEQ ID NO: 62596 - DNA, 1584 bp, Neisseria meningitidis
ttgggtacaatcgcaacatcagtgtttcaagtggggaaggcgatggatggacggcgttgggcggtatggggtgcttttgccctgctgccttcggcttttttggcggtaatggtcgttgcgcctttgtgggcggtggcggcgtatgacggtttggcgtggcgcgcggtgctgtcggatgcctatatgctcaaacgtttggcgtggacggtatttcaggcagcggcaacctgtgtgctggtgctgcctttgggcgtgcctgtcgcgtgggtgctggcgcggctggcgtttccggggcgggctttggtgctgcgcctgctgatgctgccttttgtgatgcccacgttggtggcgggcgtgggcgtgctggctctgtttggggcggacggcctgttgtggcgcggacggcaggatacgccgtatctgttgttgtacggcaatgtgtttttcaaccttcctgtgttggtcagggcggcgtatcaggggtttgtgcaagtgcctgcggcacggcttcagacggcacggacgttgggcgcgggggcgtggcggcggttttgggacattgaaatgcccgttttgcgcccgtggcttgccggcggcgtgtgccttgtcttcctgtattgtttttcggggttcgggctggcattgctgctgggcggcagccgttatgccacggtcgaagtggaaatttaccagttggtcatgtttgaactcgatatggcggttgcttcggtgctggtgtggctggtgttgggggtaacggcggcggcagggttgctgtatgcgtggttcggcaggtgcgcggtttcggataaggcggtttcccctgtgatgccgtcgccgccgcagtcggtcggggaatatgtgctgctggcgtttgcggcggcggtgttgtctgtgtgctgcctgtttcctttgttggcaattgttgtgaaagcgtggtcggccggcgaatcgtggcgtgtgttaatggaaagtgaaacgtggcaggcggtgtggaatactttgcgcttctcggcggcggcggtgtatgcggcggcggttttgggtgtggtgtatgcggcggcggcgcggcggtcggcgtggatgcgcgggctgatgtttttgccgtttatggtgtcgccggtttgtgtttcggcgggcgtgctgctgctttatccgcagtggacggcttcgttgccgctgctgctggcgatgtatgcgctgctggcgtatccgtttgtggcaaaagatgttttatcagcctgggatgcactgccgccggattacggcagggcggcggcgggtttgggtgcaaacggctttcagacggcatgccgcatcacgttccccctcttgaaaccggcgttgcggcgcggtctgactttggcggcggcgacgtgtgtgggcgaatttgcggcgacattgtttctgtcgcgtccggaatggcagacgctgacgactttgatttatgcctatttgggacgcgcgggtgaggataattacgcgcgggcgatggtgctgacattgctgttggcggcgttcgcgctgggtattttcctgctgttggacggcggcgaaggcggaaaacggacggaaacgttataa

SEQ ID NO: 62597 - DNA, 246 bp, Neisseria meningitidis; identical to SEQ ID NO: 38257

SEQ ID NO: 62598 - DNA, 570 bp, Neisseria meningitidis
atggtacggcgtttgataatcggcatcagtggggcgagcggtttccaatacggcgtgaaggctttggaacttttacgcgcgcaagatatcgaaacgcaccttgtggtatcgaaaggtgcggagatggcgcgcgcttcggaaacggcttatgcgagagacgaggtatatgccctcgcggacttcgtgcatccgatcggcaatatcggggcgtgcattgccagcggtacgtttaaaacggacgggatgctggtcgccccctgttcgatgcggacgcttgcctcggtcgcgcacggcttcggcgacaacctcttgacgcgtgcggcggatgtggttttgaaggaaaggcggcggctggtgctgatggtgcgcgaaacgccgctgaaccttgcccatttggacaatatgaagcgggtaacggaaatgggcggcgtggtgtttccccctgttcctgcgatgtaccgcaaaccgcagacggcggacgacatagtggcgcacagtgtcgcacacgctttgtcgctgttcggaatcgatacgccggattcggcggaatggcagggaatggcggattaa

SEQ ID NO: 62599 - DNA, 951 bp, Neisseria meningitidis; identical to SEQ ID NO: 44968

SEQ ID NO: 62600 - DNA, 1407 bp, Neisseria meningitidis
atgaacgattacacagccatgccgtctgaagaccgtgagatcggcgcattgtcgctgcctccacattcgatggaggcggaacaatccgttttgggcgggttgatgctggaaaatccggcatgggacaggattgccgatgtggtttcgggagaggatttctaccggcatgaacaccgcctgattttccgatccattgccaaattaatcaatgagagccgtcccgccgatgtgattacggttcaggaagatttgcagcggaacgaagaattggaagcggcaggcggatttgaatatctgattacgctggcgcaaaacaccccgtctgccgccaacatccgccgctacgccgaaatcgtgcgcgagcgttccattatgcgccaactcgccgaagtggggacggaaatcgcccgcagcgcatacaatccgcaaggcagggacgcgggtcagcttttggacgaggcggaaaacaaagtattccaaatcgccgaaagcaccgccaaatccaagcagggctttttggagatgcccgatttgctgaaagaagtcgtacagcgcatcgatatgctctactcgcgcgacaatcccgatgaagttaccggcgtgccgacagggttcatcgacctcgacaaaaaaacctcgggtctgcaacccggcgacctgattatcgttgccggtcgtccgtctatgggtaagaccgccttttctatcaatatcgccgaacacgttgccgtagaaggcaagctgccggttgccgtcttctcaatggaaatgggcggggcgcaactggtcatgcgtatgctcggctcggtcggacgcttggatcaaagcgttttgaaaaccggcaggctcgaagacgaacactggggtcgcctgaacgaagcagtcgtcaaactctccgacgcgcccgtgtacatcgacgagaccccgggtctgaccgcgctcgaactgcgcgcccgtgcccgccgtctcgcccgtcaatttaacaataagcttggattgattgtcatcgactacctgcaactgatggcaggatccggccgttccgacaaccgagcttcggagctgggagagatttcacgttcgctcaaagcgttggcgaaagaattgcaagtccccatcatcgccctgtcgcaattgagccgcacggtcgaatcgcgtaccgacaaacgcccgatgatgtccgaccttcgcgaatccggtgctatcgagcaggatgccgacctgattatgtttatgtaccgcgacgaatactacaaccaagactcgcccatgaaaggccttgccgaatgtatcatcggcaaacaccgcaacggtcccgtcggtaaaatcttcctcacatggacgggacaattcaccaaattcgacaatgctgcctatattcccgaggaggcaaagatagaggattaa

SEQ ID NO: 62601 - DNA, 510 bp, Neisseria meningitidis; identical to SEQ ID NO: 42226

SEQ ID NO: 62602 - DNA, 1287 bp, Neisseria meningitidis
atgagcgcaatcgttgatattttcgcccgcgaaattttggactcacgcggcaaccccacagtcgagtgtgatgtattgctcgaatccggcgtaatgggacgcgcagccgtaccgagcggcgcgtccaccggtcaaaaagaggctttggaacttcgcgacggcgacaaatcccgttattcgggcaagggcgtattgaaggcggtcgaacacgtcaacaaccaaatcgcccaagccctcattggtatcgatgccaacgagcaatcttatatcgaccaaatcatgatcgaattggacggtactgaaaacaaaggcaatttgggtgcgaatgcgactttggcggtttctatggcggttgcacgcgccgctgccgaagactcaggcctgccgctttaccgctacttgggcggcgcaggcccgatgtccctgcccgtaccgatgatgaacgtcatcaacggcggcgaacacgccaacaacagcctgaacatccaagagtttatgattatgcccgtcggcgcaaaatctttccgcgaagcgttgcgctgcggtgcggaaattttccacgccttgaaaaaactgtgcgacagcaaaggcttcccgaccacagtcggcgacgaaggcggtttcgcccccaacctgaacagccacaaagaagccctgcaactgatggtcgaggcgaccgaagccgccggctacaaagcgggcgaagacgtattattcgcattggactgcgcctccagcgagttctacaaagacggcaaataccacttggaagccgaaggccgctcctacaccaacgcggaatttgccgaatatctggaaagtctggtcaacgagttccccatcatctccatcgaagacggcatggatgaaaacgactgggaaggctggaaactgctgaccgaaaaactgggcggcaaagtccagctcgttggcgacgacctcttcgttaccaatccgaaaatccttgccgaaggcattgaaaaaggcgtggcaaacgcactattggtcaaagtcaaccaaatcggtactttgagcgaaaccctgaaagccgtcgatctggcaaaacgcaaccgctacgccagcgtgatgagccaccgctccggcgaaaccgaagacagcaccattgccgacttggcagtcgccaccaactgtatgcagattaaaaccggttccctgtcccgttccgaccgtatggcgaaatacaaccaactgctgcgtatcgaggaagaattggcggaagccgcctactaccccggcaaagccgcattctaccaactgggcaaataa

SEQ ID NO: 62603 - DNA, 279 bp, Neisseria meningitidis; identical to SEQ ID NO: 38315

SEQ ID NO: 62604 - DNA, 372 bp, Neisseria meningitidis; identical to SEQ ID NO: 39100

SEQ ID NO: 62605 - DNA, 1497 bp, Neisseria meningitidis
atgtcgcttgccttggtttacagccgcgccttgagcggtatgaatgcgccgttggtcgaagtggaagcccaccttgccaacggcctgccacatttcaacatcgtcgggctgcccgatacggaagtcaaagaaagtcgcgaccgcgtccgtgccgccattattcaaagcggttttgaattccccgccaaaaaaatcaccgtcaacctcgcccccgccgacctgcccaaagagtcggggcgtttcgatttgccgattgcaatcggcatccttgccgcatcggggcaggttgcgcccgaaaaactggaggaatacgagtttgcgggggaattggcactgtcggggctgttgcgccccgtgcgtggcgcgttggcgatggcgtggcagggtatgcaggcaaaacgtgcatttgttttgcctgaagaaaatgcaggacaagccgccgtgatgcgcggcattaccgtttacggcgcgcgctctttgggcgaagtcgccgcccatttgaacggcatcgaacctttggcgcaaaccgaatgccaagttcctcagatgccgtttgaacatggcggacaacctgatttgtgcgatgtgaaaggtcagcacaccgcgcgccttgctttggaaatcgctgccgcaggcggacacagcctcttgatgatgggtccgccgggaacgggcaagtctatgctctcccaacggctgcccggcatcctgccgccgctgaccgaagacgaattggtagaagtttgggcattgcgttcgctcctgcccaaccaccaacaacaactcgacagcaaccgtcctttccgcagtccgcatcacagcgccagcgcggcggctatggtcggcggcggttcggatccgcgtccgggcgaaatttcattggcgcaccacggcgttttgtttttggacgagctgcccgagtttgaccgcaaagttttggaagttttgcgcgaaccgttggaaaacggcgaaatccacatttcccgcgcggcgcgccaagccgtctatcccgccaaattccaacttgtcgccgccatgaacccctgcccgtgcggttatctcgggcatcccgtcaaaccctgccgctgcacgcccgaaagcgtcgcgcgttaccgcagcaagatttccgggccgctgctcgaccgcatcgatttgaccatcgaagtcccgagcctgtccgccgccgaactgatgcagcaggaagcaggggaaagcagcgcgtccgttttggaacgcgttatcgccgctagagacaaacaatacgcacggcaaggcaaagtgaatgccgccttgagtgtcagtgaactcgacacatccgcccgcattcaaaaagaagcgcaggaagcattgggcggcctgctggaaaaactctccctttccgcccgcagcttccaccgcattatgcgcgtggcgcgtacattggcggatttggcgggcgacgaagaagtcggcagaagccacgtcatgaaagccataggtttccgtcgtgctttatag

SEQ ID NO: 62606 - DNA, 129 bp, Neisseria meningitidis; identical to SEQ ID NO: 43085

SEQ ID NO: 62607 - DNA, 822 bp, Neisseria meningitidis
atgacgtttgacgaatggttgggcttgtcaaaactgcctaaaattgaagcaagaatgctgctgcaatatgtttcggaatatacgcgcgtgcagttgttgacgcggggcggggaagaaatgccggacgaagtccgacagcgggcggacaggctggcgcaacgccgtctgaacggcgagccggttgcctatattttaggtgtgcgcgaattttatggcagacgctttacagtcaatccgagcgtgctgattccgcgccccgaaaccgaacacttggtcgaagccgtattggcgcgcctgcccgaaaacgggcgcgtgtgggatttggggacgggcagcggcgcggttgccgtaaccgtcgcactcgaacgccccgatgcgtttgtgcgcgcatccgacatcagcccgcccgcccttgaaacggcgcggaaaaatgcggcggatttgggcgcgcgggtcgaatttgcacacggttcgtggttcgacaccgatatgccgtctgaagggaaatgggacatcatcgtgtccaacccgccctatatcgaaaacggcgataaacatttgtcgcaaggcgatttgcggtttgagccgcaaatcgcgctgaccgacttttcagacggcctaagctgcatccgtaccttggcgcaaggcgcgcccgaccgtttggcggaaggcggttttttattgctggaacacggtttcgatcagggcgcggcggtgcgcggcgtgttggcggagaatggtttttcaggagtggaaaccctgccggatttggcgggtttggacagggttacgctggggaagtatatgaagcatttgaaataa

SEQ ID NO: 62608 - DNA, 267 bp, Neisseria meningitidis
atgcaagttttgaagaaagttgattggaagatgtttgtggcacgctctttttggcggtgtgtgccggttggtttgacggcgggcgtgtggtgttttgtggcggggatggcgttgcattcctgcgcgaaagaacccgaaccggttgcgaaagagctgacgaaggtcgagaagatggaaagacaggcggatttggaggtcaaggtatgggaagagcaatacgagtcaatgagcgtcgaggaaaaaatgaaagggattgtttatgagtga

SEQ ID NO: 62609 - DNA, 2385 bp, Neisseria meningitidis
atgaataaaaatattaaatctttaaatttacgggaaaaagacccgtttttaagtcgtgaaaaacagcgttatgaacatcctttgcccagtcgggaatggataatcgaattgttggagcgcaaaggtgtgccttcaaaaatcgaatcgcttgcgcgcgagctgtcgattacggaagacgagtatgtctttttcgaacgccgtctgaaggcgatggcgcgggacggtcaggttttaatcaaccgccggggcgcggtttgcgcggcggacaaattggatttggtcaaatgccgtgtcgaggcgcacaaagacggtttcggttttgccgtgccgctcacgcccgccaaagacggtgattttgttttgtatgaacgccagatgcgcggcattatgcacggcgatattgtcactgttcgtcctgccggcatggaccgtaggggccgccgcgaagggacagttctggatattgtcgaacgcgcgcaaagcaaagtggtcggccgtttctatatggataggggcgtggcgattttggagccggaagacaagcgtctgaaccaaagcatcgtattggaaccggacggcgtggcgcgtttcaaacctgaatccggtcaggtcatcgtcggcgaaattgaggtttatcctgagcaaaaccggccggcagtggcaaaaatcatcgaagttttgggcgattatgccgacagcggcatggagattgaaattgccgtgcgcaagcatcatttgccgcaccaattcagtgaagcgtgtgccaaagccgtgaaaaaaattcccgaccatgtacgcaaaagcgatttgaaaggccgcgtcgatttgcgcgacctgcctttggtaacgattgacggcgaaacggctcgagattttgacgatgcggtgtttgccgaaaaaatcggacgcaattaccgtctggtcgtggcgattgccgatgtcagccattatgtccgccccgatgacgctatcgacacggacgctcaggaacgcagcaccagtgtttacttcccgcgccgcgtgattcccatgttgccggaaaacctgtccaacggcatctgctcgctcaatcctaatgtcgagcgtttgtgtatggtgtgcgatatggttatcacttacgcgggcaatattaaagaataccgcttctaccccgccgtgatgcgctctcatgcccgcctgacctacaaccaagtttggaaatggctttcaggcggcatcgggcatccgttcaaagcccaaatcgacacgctttacaaactcttcaaaatccttcagaaaaagcgtttcgaacgcggggcggtggagtttgacagcatcgaaacccaaatgcttttcgacgacaacggtaaaattgaaaaaatcgtccccgttgtccgcaacgatgcccacaagctgattgaagaatgtatgttggcggcaaacgtttgcgcagcggattttctgttgaaaaacaagcataccgcattgttccgcaaccatttggggcccacgcccgaaaaactcgccgccttgcgcgagcagttcggtctgttggggcttcaacttggcggcggcgacaacccgtcgccgaaagactatgccgcgcttgccggacagttcaaaggcaggccggatgccgaattgctgcaagtcatgatgttgcgctccatgcaacaggcggtttacgaaccgcattgcgacggacactttggtcttgcctacgaagcatacgcccacttcacctcgcccatccgccgctatcccgacctgaccgtacaccgcgccatcaaagccgtgttgaatcagcaaacctacacgccaaaaaaaagctggcaggctttgggcgtgcatacctcgttctgtgagcgccgtgccgacgacgccagccgcgacgtggaaaactggctgaaaacctactatatgcgtgacaaagtcggcgaaatatttgaaggcaaaatttccggggtggcaaattttggaatatttgtcactttggacgatatccatatcgacggtctggtgcatatcagcgatttgggcgaagactatttcaacttccgccccgaaatcatggcaatcgaaggtgaacgcagtggcatccgtttcaatatgggcgacagggttgccattaaagtggcccgtgccgatttggatgatggaaaaatcgattttgtcctgattgccgaggggagcggcagagggcggaaagttaaatcatccgcgtctgccaaaccggcagggacggcggggaaagggaagccgaaaaccgccgccgggaaaaaaacagcccgaggcggcaaagtaaggggaaggggcgcgtctgccgccgcagaatcggggaaaaaggcaaagaaaccgattccgattgaagtacaaaaggtaaaaaaacggaaaggcaaatcataa

SEQ ID NO: 62610 - DNA, 300 bp, Neisseria meningitidis; identical to SEQ ID NO: 39584

SEQ ID NO: 62611 - DNA, 657 bp, Neisseria meningitidis
atgaacagacaaaaagtcatcgccatcgacggtccgggcgcatcgggcaaaggcacggtcgccgcccgcgttgccgccgcattgggatacgattatctcgataccggcgcactctaccgcctgaccgccctatatgcacaaaaacaaggcgtggaatggcacgatgaagaaaacgtttccgaactggcaaaaaaactgcccgccgtattttcaggcagccgcatcctgctcggcggcgaagacgtttcagacggcatccggacagaagccatcggcatgggcgcatccgcagtcgcacagttgcctaaagtccgcgcctccctgctgcaacgccaacgcgattttctgaccgaaaaaggactggtcgccgacggacgggacaccggatcggtcgtcttcccccaggccgaactcaaaatttttctgacagccgaatccaaaatcagggccgaacgccgcgccaaacaaatcggtatcccctgcgaaggtttggcattcgagcgcatcctgtccgacatcgaagccagagacgaggcagaccgaaaccgcaaggttgcccccctgaaacaacaacccgatgccctgcttttggatacgagccgcctgactatagaagaaactgtaaaaaaagtgcttgattggtatcgtaaagtttaa

SEQ ID NO: 62612 - DNA, 357 bp, Neisseria meningitidis
atggataaaatctttttgcacggcatcaaggcggatacgcttatcggcgtgtacggctgggagcgcgaacggttgcagaccctgattgtcgatttggacatcggcattcccgagaaagcgggttcggacgacgatattgccaatacggtgcattatgccgaggtatgcgaaacgctgcgccgacatctgaaagaacaggatttcctgcttttggaagcgttggcggaatatattgccgatttggttttgggatatttcggcgcggtgtgggtgcgcgtgaaaatcgtcaagccgggtattttggaaggcgtgcgcgaggttggcgtggaaatcgagcgcggcaagcgtgaagattga

SEQ ID NO: 62613 - DNA, 1194 bp, Neisseria meningitidis
atgttcttcaagcacatcgaagccgcccccgccgatccgattctcggtttgggcgaagcgttcaaagccgaaacccgccccgaaaaagtcaacctcggcatcggcgtttataaagacgcatccggcgcgacacccctcgtcaaagccgtcaaagaagccgaaaaacgcctgttggaaagcgaaaccaccaaaaactacctcaccatcgacggcgttgccgactacaacgcgcaaacccaaatcctgctgttcggcaaagaccacgaaatcatcgccagccgtcgcgccaaaacagcgcaaagcctcggcggtacgggcgcattgcgtattgcggccgagtttgccaaacgccagttgaacgcgcaaaccatctggatttccaatccgacttggcccaaccacaacgccatcgccaaagcggtcggtatccaagacaaaccttatcgttactatgatgccgccaaacacggtttggattgggacggcatgattgaggacttgagccaagcgcaaaaaggcgacatcgtcctgctgcacggctgctgccacaatcctaccggcatcgaccctacgcccgaacaatgggaaactttggcaaaactttctgccgaaaaaggctggttgccgctgtttgactttgcctaccaaggcttcggcaatggtttggaagaagatgcctacggcttgcgcgtgttcttgaaacacaatacagaattgctgattgccagctcttattccaaaaacttcggtatgtacaacgagcgcgtcggcgcgttcactttggtggccgaagatgaagaaacagcagcccgcgcccacagccaagtcaaaaccatcatccgtaccttgtattccaacccggcttcacacggtgcgaacaccattgcgctggtgttgaaaaatgatgatttgaaagcacaatggattgccgaactcgatgaaatgcgcggccgcatcaaagccatgcgccaaaaatttgtcgagttgctcaaagccaaaggtgcaagccaaaactttgatttcattatcgaacaaaacggtatgttctctttcagcggcttgactcccgaacaagtcgaccgcctgaaaaacgagtttgccatttatgccgtccgctccggccgcatcaacgtcgccggcattaccgacgacaacatcgattatctgtgcgaaagcatcgtgaaagtactgtaa

SEQ ID NO: 62614 - DNA, 195 bp, Neisseria meningitidis; identical to SEQ ID NO: 55922

SEQ ID NO: 62615 - DNA, 585 bp, Neisseria meningitidis
atgcacatactgaccgccggcgtggacgaggcagggcgcgggcctttagtcggcagcgtgtttgccgccgccgtcatccttccggaaatattcgacctgcccggactgaccgactccaaaaaactcagcgagaaaaaacgcgacgcgcttgccgaaatgataaaaaatcaggcggttgcgtggcacgttgccgccgcctcgcccgaagaaatcgccagcctcaacatcctgcacgccaccatgctcgcgatgaaacgcgccgttgacggtttggctgtgcgtcccgaaagaatattcatcgacggcaaccgcattcccgaacatttgaacatccctgccgaagccgtcgtcaaaggcgacagcaaaatcatcgaaatctccgccgcatccgttttggcaaagaccgcacgcgatgcagaaatgtacgcactggcgcaacgccatccccaatacggtttcgacaaacacaaaggttacggcacgaagcagcatctggaagccctcaaacaatacggcgtgctgcccgaacaccgccgagacttcgcccccgtcagaaacctgctcgcgcagcaggccttgttttaa

SEQ ID NO: 62616 - DNA, 807 bp, Neisseria meningitidis; identical to SEQ ID NO: 52106

SEQ ID NO: 62617 - DNA, 276 bp, Neisseria meningitidis
atgttaaacactgtcagcagcagggaatttaaccaataccccagccaaacacaaaagaaagccgcaaagtcccccgtatttattaccacacgcggcaagccgagccatgtattaatcagttatgcggaataccgcaaactgacaggcaagccgcaaagcgcactggaggcactgacggcaaacgccgagcttgccgccaaactggaaagcatcgattttgaaataccgccgcgaagcaccgcgcaaagaccgcccgttgattttggggaggattga

SEQ ID NO: 62618 - DNA, 756 bp, Neisseria meningitidis
gtgtcgcgcgaaatcaatgcgggcgggcatcatttcctctacggcggcatcagcggcggcggcgtgcattattgggataacaaagatttcagcgaacagtgcctgcacctgtcgctcggctataaaaatcgttcggtaacgcgctcgttcggcatcgtgccgtttgtcgggcaaaacctcttaggcggcagccgatacaatttcgtcggcggctttaatgccgatttctcccaacacttgagcgaacgctggcggttgacactaaacgcgggcaatatgtggaagcattatcaggaagaccgcaccgccgcccgatacgacagccatatgccgctggcgggcgcgacgctgatgtattccgcgccgaaagactggctgctttacggcggggcggactggtcgcacgacttgacgaaggaggcggaacaggcttccgtccgcaagggtttgcgtatcggcgcggtcaaaacgttcgacggcggcttgggtctgcgggcaaacctgcgctatacacgcaggacgtttgacgcgcccgggaccattgtgtaccgcttcccgcgcaaagaccacgaatatcaggcaaacctgtcgttttggcacgacaaaatctcttggaagggctttacgccgcaactcaatttccgctatctgaaaatcgacagcaatatgaaaagtttttacacacgcaaaaacacgcagattttcatgagcgtggaaaaggatgagacctttgcaaaattccccaaaatcccctaa

SEQ ID NO: 62619 - DNA, 687 bp, Neisseria meningitidis
atggcaggcttaacatttgaacaaaccgtttccaacatcatcggtatgaaaggcgaaatcgtccgcgcattgggcgaaaccttcgtaatggtcggtttgtccaccacattcgccgtcgttttcggcacgttgctgggcgtgttgctcttcgtaacctccagccgccaactgcattacaacaagccggtaaatttcctgctcgacaacctcgtcaacctcatgcgcgccttccccttcgtcattttgatgattgcgatgatacccgccacacgcgccattgtcggcagcaccatcggtccggttgccgcctcgctggtattgagcgtgtcgggattgttttattttgcccgactggtggaacaaaacctgcgcgaagtccccaaaggcgtgattgaagccgccgccgcgatgggtgcgcctccgattgccatcgtctgcaaagtcctcttgaacgaagcgcgcgcgggcatggtttccagcattaccgtgcttgccatcgggcttttgtcatacagcgcggcggcagggatgataggcggcggcggcttgggcgacctcgccatccgctacggctactaccgctaccaaaccgaagtcatcgtcttcatcgtcgccctcctcgtgctgctcgttatcctgattcaaagcatcggcaacgcgttggcgcggaaactcgacaaacgttga

SEQ ID NO: 62620 - DNA, 966 bp, Neisseria meningitidis
atgagctacacgcaactgacccagggcgaacgataccacatccaatacctgtcccgccactgcaccgtcaccgaaatcgccaaacagctgaaccgccacaaaagcaccatcagccgcgaaatcagacggcaccgcacccaaggacagcaatacagcgccgaaaaagcccagcggcaaagccagactatcaaacagcgtaagcgacaaccctataagctcgattcgcagctgattcagcacatcgacacccttatccgccgcaaactcagtcccgaacaagtatgcgcctacctgtgcaaacaccaccagatcacgctccaccacagcaccatttaccgctaccttcgccaagacaaaagcaacggcagcacgttgtggcaacatctcagaatatgcagcaaaccctaccgcaaacgctacggcagcacatggaccagaggcaaagtccccaaccgtgtcggcatagaaaaccgacccgctatcgtcgaccagaaatcccgtatcggcgattgggaagccgacaccattgtcggcaaaggacagaaaagcgcattattgaccttggtcgaacgcgttacccgctacaccatcatctgcaaattggatagcctcaaagccgaagacactgcccgggcagctgttagggcattaaaggcacataaagacagggtgcacaccatcaccatggataacggcaaagagttctaccaacacaccaaaataaccaaagcattgaaagcggagacttatttttgtcgcccttaccattcttgggagaaagggctgaatgagaacaccaacggactcatccggcaatacttccccaaacaaaccgatttccgtaacatcagtgatcgggagatacgcagggttcaagatgagttgaaccaccgaccaagaaaaacacttggctacgaaacgccaagtgttttattcttgaatctgttccaaccactaatacactag

SEQ ID NO: 62621 - DNA, 1167 bp, Neisseria meningitidis
atgcgaaaaaaacttaccgccctcgtattgtccgcactgccgcttgcggccgttgccgatgtcagcctgtacggcgaaatcaaagccggcgtggaaggcaggaacatccagctgcaattgaccgagcagccctcaaaggctcaaggtcaaacgaacaatcaggtaaaagttactaaggcaaaaagccgcatcaggacgaaaatcagcgatttcggctcgtttatcggctttaaggggagtgaggatttgggcgacgagctgaaggctgtttggcagcttgagcaagacgtatccgttgccggcggcggcgcgacccgttggggcaatagggaatcctttgtcggcttggcaggcgaattcggcacgctgcgcgccggccgcgttgcgaatcagtttgacgatgccagccaagccattgatccttgggacagcaacaatgatgtggcttcgcaattgggtattttcaaacgccacgacgatatgccggtttccgtacgctacgactctccggacttttccggtttcagcggcagcgtccaattcgttccgatccaaaacagcaagtccgcctataagccggcttatgtggatgagaagaagatggttcatgcggctgttgtcggcaagcccggatcggatgtgtattatgccggtctgaattacaaaaatggcggatttgccgggagctatgcctttaaatatgcgagacacgccaatgtcggacgtgatgcttttgagttgttcttgctcggcagcacgagtgatgaagccaaaggtaccgatcccttgaaaaaccatcaggtacaccgcctgacgggcggctatgaggaaggcggcttgaatctcgccttggcggcccagttggatttgtctgaaaatggcgacaaagccaaaaccaaaaacagtacgaccgaaattgccgcgactgcttcctaccgcttcggtaatgcagttccacgcatcagctatgcccatggtttcgacttgatcgaacgcggtaaaaaaggcgaaaataccagctacgatcaaatcatcgccggcgttgattatgatttttccaaacgcacttccgccatcgtgtctggcgcttggctgaaacgcaataccggcatcggcaactacactcaaattaatgccgcctccgtcggtttgcgccacaaattctaa

SEQ ID NO: 62622 - DNA, 570 bp, Neisseria meningitidis
atggcggcaggcaaacataccaaacacagcaaccgggtacgcattatcggcgggcaatgccggggcaggaaattgagtttcacatccgccgacggactgcgtccgacacccgacagcgtgcgtgaaaagctgtttaactggctgggacaggatttgacgggtaaaacggttttggatctcttcggaggcagcggcgcactcggtatagaagccgcttcgcgcaacgccaaacgcgtgctgatttcggataacaaccgccaaaccgtgcagaccttgcagaaaaacagtcgcgaactgggtttggggcaggtgcaaatcgtctgttcagacagcatcgcatatttgaagaccgtatccgaacagtttgatgtcgtctttctcgacccgccgtttgcatggcaggactggcaaatcctgttcgatgccttgaagccgtgcctgaacccccgggcattcgtctatctcgaggcgggtaggctgccggatatccccgattggctgacggaatatagagaggggaaatcggggcagagtacatttgaattaagggttttccaagtggctgaataa

SEQ ID NO: 62623 - DNA, 1128 bp, Neisseria meningitidis
atgacccatatcaaacccgtcattgccgcgctcgcactcatcgggcttgccgcctgctccggcagcaaaaccgaacagcccaagctcgactaccaaagccggtcgcaccgcctgatcaaacttgaagtcccacccgatttgaacaaccccgaccaaggcagcctctaccgcctgcctgccggttcgggcgccgtccgcgccagcgatttggaaaaacgccgcacacccgccgtccaacagcctgccgatgccgaagtattgaaaagcgtcaaaggtgtccgcctcgagcgcgacggcagccaacgttggcttgtcgttgacggcaaatcccctgccgaaatctggccgcttctgaaagccttttggcaggaaaacggcttcgacatcaaatccgaagaacccgccatcggacaaatggaaaccgagtgggcggaaaaccgtgccaaaatcccccaagacagcttgcgccgcctattcgacacagtcggtttgggcggcatctactccaccggcgagcgcgacaaattcatcgtccgtatcgaacagggcaaaaacggcgtttccgacatcttcttcgcccacaaagccatgaaagaagtgtacggcggcaaagacaaagacacgaccgtatggcagccctccccgtccgatcccaacctcgaagccgctttcctgacgcgctttatgcaatatttgggcgttgacggacagcaggcggaaaacgcatcggcaaaaaacccgaccctgcccgccgccaacgaaatggcgcgtatcgaaggcaaaagcctgattgtctttggcgactacggcagaaactggcggcgcaccgcgctcgccctcgaccgcatcgggctgaccgtcgtcggtcaaaacaccgaacgccacgctttcctggttcaaaaagccccgaacgaaagcaatgcagttaccgaacaaaaacccggcctgttcaaacgcctgctgggcaaaggcaaagcggagaaacctgccgaacagccggaactgattgtctatgccgagcctgtcgccaacggctcgcgcatcgtcctgctcaacaaagacggcagcgcatatgccggcaaagacgcatccgcattattgggcaaactccattccgaactgcgttaa

SEQ ID NO: 62624 - DNA, 1050 bp, Neisseria meningitidis; identical to SEQ ID NO: 38313

SEQ ID NO: 62625 - DNA, 504 bp, Neisseria meningitidis
atggctttattgaatatcttgcaatatcccgacgagcgtctgcacacggtggcaaagcctgtcgaacaagtcgacgagcgcatccggaagctgattgccgatatgtttgaaacgatgtacgaatcgcgcggcatcgggctggcggcgacgcaggtcgatgtgcacgagcgcgtggtcgtgatggatttgaccgaagaccgcagcgaaccgcgcgtgttcatcaaccccgtcatcgttgaaaaagacggcgaaaccacttacgaagagggctgcctgtccgtgccgggcatttacgacaccgtaacccgcgccgaacgcgtcaaggtcgaggctttgaacgaaaaaggcgaaaagttcacgctggaggcggacggcttgctggcgatttgcgtgcagcacgagttggatcacctgatgggcatcgtgtttgtcgaacgcctgtcgcagctcaagcagggacgcatcaaaaccaagctgaaaaaacgtcagaaacatacgatttga

SEQ ID NO: 62626 - DNA, 210 bp, Neisseria meningitidis; identical to SEQ ID NO: 40404

SEQ ID NO: 62627 - DNA, 876 bp, Neisseria meningitidis; identical to SEQ ID NO: 58909

SEQ ID NO: 62628 - DNA, 1005 bp, Neisseria meningitidis
atgagcattaaagtagcgattaacggtttcggccgcatcggccgcctcgcattgcgtcaaattgaaaaagcccacgacatcgaagtcgtcgccgtcaacgacctgacccctgccgaaatgctgctgcaccttttcaaatacgacagcacgcaaggccgtttccaaggtactgccgaattaaaagacgatgccatcgtggtaaacggcaaagaaatcaaagtttttgccaatccgaatcccgaagaattgccttggggcgagttgggtgtggatgtcgtcctcgaatgtaccggcttctttaccaacaaaaccaaagccgaagcccacatccgtgccggcgcacgcaaagtcgtgatttccgcacctggcggcaatgatgtgaaaaccgtcgtatatggcgtgaaccaaaacattttggacggcagcgaaaccgtcatttccgccgcttcctgcaccaccaactgccttgccccgatggcggcagtcctgcaaaaagagttcggcgtagtcgaaggtctgatgaccaccatccacgcctacaccggcgaccaaaacacccttgacgcgccgcaccgcaaaggcgatttgcgccgcgcccgagccgccgcgctcaacatcgtgcccaacagcaccggtgccgccaaggccatcggtctggttatccccgaattgaacggcaaactcgacggctccgcccaacgcgtccctgttgccaccggctcgctgaccgaattggtttccatcctcgaacgccctgtaaccaaagaagaaatcaacgccgcgatgaaagccgccgccagcgaatcttacggctacaacgaagatcaaatcgtttcttccgacgttgtcggcatcgaatacggctcgctcttcgatgcgacccaaacccgcgtgatgaccgtgggcggcaaacaattggtgaaaaccgttgcctggtacgacaacgaaatgtcctacacctgccaactcgtccgcactttggaatactttgcaggcaaaatctaa

SEQ ID NO: 62629 - DNA, 3606 bp, Neisseria meningitidis
atgtttcattttgcatttccggcacaaactgccctgcgccaagcgataaccgatgcctaccgccgtaatgaaatcgaagccgtacaggatatgttgcaacgtgcacagatgagcgacgaagagcgcaacgccgcctccgagcttgcccgccgtttggttacccaagtccgcgccggccgcaccaaagccggcggcgtggatgcgctgatgcacgagttttcactctccagcgaagaaggcatcgcgctgatgtgtctggcagaagccctgctgcgcattcccgacaacgccacgcgcgaccgcctgattgccgacaagatttcagacggcaactggaaaagccatttgaacaacagcccttccctcttcgtcaacgccgccgcctggggcctgctgattaccggcaaactgaccgccacaaacgacaaacaaatgagttccgcactcagccgcctgatcagcaaaggcagcgcaccgctcatccgccaaggcgtaaattacgccatgcggcttctgggcaaacagttcgtaaccggacagaccattgaagaagccctgcaaaacggcaaagaacgcgaaaaaatgggctaccgcttctccttcgatatgttgggcgaagccgcctacacccaagccgatgccgaccgctactaccgcgactatgtcgaagccatccacgccatcggcaaagatgcggcaggacaaggcgtttacgaaggtaacggtatttccgtcaaactttccgccatccatccgcgctactcgcgcacccaacacggccgcgtgatgggcgaactgttgccgcgcctgaaagagctgttccttttgggtaaaaaatacgatatcggtatcaacatcgatgccgaagaagccaaccgtctggagctgtctttggatttgatggaggctttggtttcagaccctgacttggctggctacaaaggtatcggtttcgttgtccaagcctaccaaaaacgttgtccgttcgttatcgactacctgatcgaccttgcccgccgcaacaaccaaaaactaatgatccgcctcgtcaaaggcgcgtattgggacagcgaaatcaaatgggcgcaagtggacggcttgaacggctatccgacctacacccgcaaagtccacaccgacatctcctacctcgcctgcgcgcgcaaactgctttccgcgcaagacgcggtattcccgcaatttgccacccacaacgcctacactttgggcgcaatctaccaaatgggtaaaggcaaagattttgaacaccaatgcctgcacggtatgggcgaaaccctgtacgaccaagtcgtcggcccgcaaaacttaggccgccgcgtgcgcgtgtacgccccggtcggcacacacgaaaccctgctcgcctacttggtgcgccgcctgttggaaaacggcgcgaactcgtctttcgtcaaccaaatcgtcgatgaaaacatcagcatcgacacgctcatccgcagcccgttcgacaccatcgccgaacaaggcatccacctgcacaacgccctgccgctgccgcgcgatttgtacggcaaatgccgtctgaactcgcaaggcgtggacttgagcaacgaaaacgtattgcagcagcttcaagaacagatgaacaaagccgccgcgcaagacttccacgccgcatccatcgtcaacggcaaagcccgcgatgtcggcgaagcgcaaccgattaaaaatcctgccgaccacgacgacatcgtcggcacagtcagttttgccgatgccgcgcttgcccaagaagcggttggcgcagccgttgccgcgttccccgaatggagtgcgacacctgccgccgaacgcgccgcctgcctgcgccgtttcgccgacctgctcgaacagcacacccccgcgctgatgatgcttgccgtgcgcgaagcaggcaaaacgctgaacaacgccattgccgaagtgcgcgaagccgtcgatttctgccgctactacgcaggcgaagccgaaaacaccctgcccaaagacgccaaagcagtcggcgccatcgtcgccatcagcccgtggaacttcccgctcgccatctttaccggcgaagtcgtttccgcattggcggcaggcaacaccgtcatcgccaaacccgccgaacaaaccagcctgattgccggttatgccgtttccctcatgcacgaagccggcatcccgacttccgccctgcaactcgtcctcggcgcaggcgacgtgggtgcggcattgaccaacgatgcccgcatcggcggcgtaattttcaccggctcgaccgaagtggcgcgcctaatcaacaaagcccttgccaaacgcaacgacaatcccgtcctgattgccgaaaccggcggacaaaacgccatgattgtcgattccaccgcacttgccgaacaagtctgcgccgacgtattgaactccgccttcgacagcgcgggacaacgctgctccgccctgcgtatcttgtgcgtccaagaagacgttgccgaccgtatgctcgacatgatcaaaggcgcgatggacgaactcgtcgtcggcaaaccgattcagctcactaccgatgtcggccccgtcatcgatgccgaagcgcagcaaaacctgttgaaccacatcaacaaaatgaaaggcgttgccaagtcttaccacgaagtcaaaaccgctgccgatgtcgattccgaaaaatccacgttcgtccgccccatcctgtttgaattgaacaacctcaacgaactgcaacgcgaagtcttcggccccgtcctgcacgtcgtctgctaccgcgccgacgaactcgacagcgtcatcgaccaaatcaacagcaaaggctacgccctgacccacggcgtacacagccgcatcgaaggcacggtacgccacatccgcagccgcatcgaagccggcaacgtttacgtcaaccgcaacatcgtcggcgcagtcgtcggcgtacagcccttcggcggacacggtctgtccggcacaggtcccaaagcaggcggttcattctacctgcaaaaactgacccgcgccggcgaatgggttgccccgaccctgagccaaatcggacaggcggacgaagccgcactcaaacgcctcgaagcactggttcacaaactgccgttcaacgccgaagagaaaaaagccgcagcggccgctttgggacacgcccgcatccgcaccctgcgccgtgccgaaaccgtccttaccggaccgaccggcgagcgcaacagcatctcatggcacgcgcccaaacgcgtttggatacacggcggcagcacggttcaagcctttgccgcactgaccgaacttgccgcctccggcatacaggcagtggtcgaacccgacagccccttggcttcctacactgccgacttggaaggtctgctgctggtcaacggcaaacccgaaaccgtcggcatcagccacgttgccgccctgtcgcctttgaacagcgcgcgtaaacaggaacttgccgcccacgacggcgcactcatccgcatcctcccttcggaaaacggactcgacatcctgcaagtgtttgaagaaatctcttgcagcgtcaacaccacagccgccggcggcaacgccagcctgatggcggtcgccgactga

SEQ ID NO: 62630 - DNA, 477 bp, Neisseria meningitidis; identical to SEQ ID NO: 55969

SEQ ID NO: 62631 - DNA, 3435 bp, Neisseria meningitidis
atgaccgagccgacctacatccccttgcgcctgcataccgagttctcaattaccgacggtatggtgcggattaaaaaactggttgccaaagcgcaggaatacggtttgcctgctttgggcatcagcgatttgatgaacgaattcggcttggtgaaattctataaagcctgccgcggcgcagggattaaacccatcggcgcggcggacgtgtggataggcaatccgaatgcgcccgacaagccgtttcgcgccatgctgattatccgcaacgatgcgggctatctgcgcttgagcgagcttctgacggcggcttatgtcggcaaagaccgcaatatccatcatgcggaactcaatcccgaatggctggaaaacggcgacaacagcggcttgatttgtttgagcggcgcacattacggcgaagtgggcgtgaatctgttgaacggcaatgaagacgcggcgcgtgcggcggcgttgaaatatgcggcatggtttcccgatgcgttttatttagagctgcaacgcctgcccgaacgccccgaatgggaggcttgcgtttccggcagcgtgaagctggcggaggaactgggtttgccggtggtggcgacccacccgacgcagtttatgagcagcgatgatttcaacgcgcacgaggcacgggtgtgtattgcgggcggctgggtgctgacggacaaaaaacgtccgcgcgatttcacaccgggccagtttttcattccgccggaaacgatgctggagcgtttcgccgatttgcccgaggccttggaaaacacggtagaaattgccaaacgctgcaatctgcacatcacattgggcaaaaacttcctgccccttttccccacgcccgacggtttatcgcgcgatgactatctcatcaaactctcaaacaagggcttgcaggaacgcatggttcagctttatcccgacgaggcggagcgtgcggcaaaaatgccggaatatcaggaacgtttggattttgagctgaacatcatcatccagatgaaattccccggctatttccttatcgtacaagactttatcaactgggcgaaaacgcacggctgtccggtcgggccgggacgcggttcgggcgcgggttcgctggtggcgtattcgctgaaaattaccgacctcgacccgctgaaatacgcgctgctgtttgaacgtttcttaaaccccgaacgcgtctccatgcccgacttcgacgttgacttctgtcaggcaaaccgcggccgcgtgatcgaatatgtgcgcgataaatacggcgctcaggcggtcagccagattgttaccttcggcacgatgtcgtccaaagcggtcatccgcgacgtggggcgcgtgttggagctgccgtttatgctgtgcgacaaactgtccaagctgattccgttggaagccaacaaacccctgagtttggacgacgcgatgaaggcggagccgcagattcaggaattaatcgaagcggaagaagcggacgaactgattacgctggcgaaaaagctggaagacctgacgcgcggtttgggtatgcacgcaggcggcgtgttgattgcgccgggcaagatttccgattacagccccgtgtatcaggcggatgaatccgcctctcccgtatccatgtacgacaagggcgacgtggaagacgtgggtttggtgaaattcgactttttaggtctgcgtaacctgaccattatcgaaatggcgcagaacaacatcaaaaacaccaccggcgacatcatcgatgtcggcaaaattccgctcgacgaccaagccgcctaccaaatcttccgagatgcgaacaccaccgccgtgttccagttcgagtcgaccggcatgaaaaaaatgctgaaaacggcgcacacgaccaagtttgaagaactgattgccttcgtatcgctctaccgccccggcccgatggacaacatccccgacttcgtcgcgcgcatgaaaggccaggaattccaatacatccatccgctgctcgaaggcatcctcgcgccgacctacgggattatggtgtatcaggaacaagtgatgcaggcggcgcaaattatcggcggctactcgctcggcggcgcggacctgctgcgccgcgcgatgggtaagaaaaagcccgaagaaatggtgaaacaccgcgaaatctttgccgaaggcgcggcaaaacaaggcatttcgcgcgaaaaatccgacgaaatcttcaactacatggaaaaattcgccggctacggtttcaacaaatcccacgccgccgcctacgccctgatttcctaccagaccgcatggcttaaagcccactatcccgccgaatttatggcggcgaccatgtcgtccgaattggacaacaccgaccagctcaagcatttctacgacgactgccgcgccaacggcattgagttcctgccgcccgacatcaacgaatccgactaccgcttcacgccgtatccggacatgaaaatccgctacgcgctcggcgcgattaaaggcacgggcgaagccgccgtcgaatccatcaccgccgcgcggcaaagcggcggcaagtttaccggcctcttggacttctgcgagcgcgtcggcaaagaacacatgaaccgccgcaccctcgaagccttgatacgcggcggcgcgttcgacagcatcgaacccaaccgcgccatgctcttggcaaacatcgacctcgccatgaacaacgccgaccaaaaagccgccaacaccaatcagggcggacttttcgacatgatggaagacgccatcgaaccggtgcggctcatcgacgcgccgatgtggagcgaatcggaaaaactcgccgaagaaaaaaccgtcatcggcttttacctctccggccacccgttcggcccgtatgcccaagaagtccgccaaatcgcaccgaccaaattaggccgtctgaagccgcaagacagcgtgcgcctcgccggattcgttaccgccgtacgcaccatgatgggcaaacgcggcaaaatcgccttcgtcagcctcgaagatttgagcggacaggttgaaatcatggtcggcggtcagacgttggaaaactgcgccgactgcctcaaagccgaccaagtgctgattatcgaatccaaagtcagccgcgacgactacggcggcggcgacggactgcgtattctggcaaaccaagtcatgaccctgcaaacggcgcgcgaacgctacgcccgcagcctcagcctcgccctcgccccgcatcacgacatcggcggactggtacaactgctcgccgcccaccaactgcccgacacgccgcgcatcccgctgcaactgtcgtatgccaacggaaaagcgtcgggcaggcttcaagtgccgccgaaatggacggttacgccgagttccgcattgttcggcgaactggaaacattgctcggcagccggtcggtgcgcgtgaattggtaa

SEQ ID NO: 62632 - DNA, 2151 bp, Neisseria meningitidis
atgctcaccgacttagaaaaaaacgccatccgcgaccattaccaaaatattggcaaaaacctgcccggtttccgtccgcgtgcttcgcagcgggaaatgattgcggcggttgccaacgctttttcgcggacgttggcgcgcgaagaaggcggcgagccgcccaagcgcgaaggcgagagcatcgccgtaatcgaaggaccgaccggcgtgggcaaatcgcttgcctacctgctggcgggcggcatcatggcgcaaacacgcggcaagcggctgattgtgagcagcgcgacggttgccttgcaggagcagttggtagaccgcgacctgccgtttctggtcgaaaaaagcggtttggaactgaccttcgcacttgccaaagggcgcggccgctatctctgcccctacaaactctatcaactgacgcaaagcaatgcccagcaaaacctgctcggctttgaagcccccgccgtcttgtgggacagcaaacccaagcccgaagaattgaagctgctgcgcgacatcgccgacgaattttccgcccgacggttcaacggcgaccgcgacacttggccggaaaaaatcgatgacgcgatttggctcaaagtgaccaacgaccgccacggctgcctgaaaaccgcctgtcccaaccgtccggaatgtccgttttacctagcacgcgatgtcttggaaaccgtcgatgtcgtcgttgccaaccacgatcttctgcttgccgacatcagtatgggcggcggcgtgattctgcctgcgcccgaaaacagtttctattgcatagacgaagcgcaccacctgcccaaaaaagccctcagccgttttgccgccgaacattcatggaatattgccgtttggacgctggaaaaactgccgcagctgaccggcaaaattgccgcgcttaccgataaagccgaacttgccaacctggccgacgaagccgccgcatccttgctcgacagcctgcacgaatggcagttccatttggcggaagagccgtctttaagtatggggccgtctgaaaacgacagacgaaccaacagcgaaccgacttggctgtgggaagacggcaaaatccccgaaggcctcgaaaccaccgtttccaacacagccattgccgcacgcagcctgctcaaacacgttgtcgggctgaacgatgcgctttccgccgcgcgccgcgaaaaagaacaggacggcgcgctcctcgaccgcctgaccggcgatttcggcatcttcatcgcccgtatcgaacaaatcagcgcggtttgggatttgctctctaccgttcccattgagggcgaagagccgttggcgaaatggataacccgccgcgccgacgacaaaaacgactacattttcaacgccagccccatcagcagcgcgtcccacctcgccaacagcctgtggcggcgtgcggcaggcgcggtgttgacctccgccaccctgcaatccttgggcaactttaacctgatgctgcgccaaaccgggctgcaatggctgcccgaaaccaccaccctcgccctcaaaagcccctttgactttgaaaaacagggcgaactctacatcccccccatatacgccagccccaaagaccccgaagcccacaccgccgccatcatcgaatggctgcccaagcttatttcgcccatcgaagccatcggcacactcgtcttgttttcctcgcgcaaacaaatgcaggatgtcgccctgcgcctgcccggaaactacctgccgctcctgctcgtacaaggcgaattgcccaaagccgtcctcctgcaaaaacaccaccgggccatagaagaaggcaaagccagcatcatcttcggactcgacagtttcgccgaaggactcgacctgcccggcaccgcctgcgtgcaagtcatcatcgccaagctgccgtttgcgatgcctgacaaccccatcgaaaaaacccaaaaccgctggatagaacagcgcggcggcaatccttttattgaaatcaccgtccccgaagccggcatcaaactcatccaggccgtcggccgcctcatccgcaccgaacaagactacggccgcgtaaccatcctcgacaaccgcatcaaaacacagcggtacggccaacaattattggccggcctgccgccgtttaaaaggatagggtaa

SEQ ID NO: 62633 - DNA, 204 bp, Neisseria meningitidis
atgatttgcgccctatcagattactcccaaaataaacatactgtcgttatggcgaattttctctatccaaatgaaaaaatggattggagaaatttagatgatttgttcaatgagttggttttagaggaattacagtcttcatttatggattggtatccgactattgaagaggcaattagccatcatttagaagacttttcgtaa

SEQ ID NO: 62634 - DNA, 834 bp, Neisseria meningitidis
atggcaatcgttaaaatgaagccgacctctgcaggccgtcgcggcatggttcgcgtggtaacagaaggtttgcacaaaggtgcaccttatgcgcccttgcttgaaaagaaaaattctactgccggccgtaacaataatggtcatatcaccacccgtcacaaaggcggcggtcataaacaccattaccgtgttgtagactttaaacgtaacaaagacggcattcctgccaaagtagagcgtatcgaatacgatcctaaccgtactgccttcatcgcactgttgtgctatgcagacggcgagcgtcgttacatcattgctcctcgcggtattcaagccggtgctgtattggtttccggtgctgaagctgccatcaaagtaggcaacaccctgccgattcgcaacattcccgttggtacgactatccactgtatcgaaatgaaacccggtaaaggtgctcaaatcgcacgttctgccggtgcttctgcggtattgctggctaaagaaggcgcgtacgctcaagtccgtctgcgctctggcgaagtccgtaaaatcaacgtaaattgccgtgcgaccattggtgaagttggtaacgaagagcaaagcctgaaaaaaatcggtaaagccggtgccaaccgttggcgcggtattcgtccgaccgtacgcggtgttgtcatgaatcctgtcgatcacccgcatggtggtggtgaaggccgtacgggcgaggcccgcgaaccggtcagcccatggggtactcctgctaaaggctaccgcactcgtaataacaaacgcacggataacatgattgttcgtcgccgttactcaaataaaggttaa

SEQ ID NO: 62635 - DNA, 894 bp, Neisseria meningitidis
atgaagggttttaccattattgaatttttggttgcgggcatgctcagtatgattgtcctgatggcggtcggatcgagttacttcacatcccggaaattaaatgatgcggcaaacgagcgtctttccgcacaacaggatttgcggaatgcggcaacattgattgtccgcgatgcgagaatggcgggcggcttcggttgtttcaatatgtccgagcatcctgcaactgatgttatttccgatacgacgcaacaaaattctcctttttccttaaaaaggaacggtatagataaacttatccccataacggaatctttaaatatcaattatcagaattttttccaggttgatagcgcattgatttttcaatacggaatcgatgatcttgatgcgagtgctgagactgttgtagtcagcagctgttccaaaatagcaaaaccgggtaagaaaatatctaccttgcaagaagcaaagagtgcattacagattactaatgatgataaacaaaatggaaatatcacccgtcaaaggcatgtggtcaatgcctatgcggtcggcaggattgccggtgaggaaggtttgttccgcttccaattggatgataagggcaagtggggtaatcctcagttgctcgcgaaaaagattagacatatgaaagtgcggtatatctatgtttccgactgtcctgaagatgacgatgccggcaaagaggaaacattcaaatatacggatacattcaacagcgccaaagatgctgttacgcccgccggggtggaggttttattgagtagcggtactgataccaagattgccgcttcttcagacaatcatatttatgcttaccgtatcgatgcgacaatacgcgggggaaatgtatgcgcaaacagaacactttga

SEQ ID NO: 62636 - DNA, 270 bp, Neisseria meningitidis
atgctcaaacaatccatcgaaatcatcaacaaactcggacttcacgcccgtgcctccagcaaattcacccaaactgcgtctcagtttcaaagcgaagtctgggtaacgaaaaacggcagccgcgtcaacggcaaaagcatcatggggctgatgatgctcgccgccgccaagggtacggtcatcgagctggagacggacggcgcggacgaggcggaagcgatgcgcgccctgaccgacttaatcaacggctacttcggcgagggcgaataa

SEQ ID NO: 62637 - DNA, 1848 bp, Neisseria meningitidis
atgcacgacacccgtaccatgatgatcaaaccgaccgccctgctcctgccggctttatttttctttccgcacacatacgcgcctgccgccgacctttccgaaaacaaggcggcgggtttcgcattgttcaaaaacaaaagccccgacaccgaatcagttaaattaaaacccaaattccccgtccgcatcgacacgcaggatagtgaaatcaaagatatggtcgaagaacacctgccgctcatcacgcagcagcaggaagaagtattggacaaggaacagacgggcttcctcgccgaagaagcaccggacaacgttaaaacaatgctccgcagcaaaggctatttcagcagcaaagtcagcctgacggaaaaagacggagcttatacggtacacatcacaccgggcccgcgcaccaaaatcgccaacgtcggtgtcgccatcctcggcgacatcctttcagacggcaacctcgccgaatactaccgcaacgcgctggaaaactggcagcagccggtaggcagtgatttcgatcaggacagttgggaaaacagcaaaacttccgtcctcggcgcggtaacgcgcaaaggctacccgcttgccaagctcggcaacacccgggcggccgtcaaccccgataccgccaccgtcgatttgaacgtcgtcgtggacagcggccgccccatcgccttcggcgactttgaaatcaccggcacacagcgttaccccgaacaaatcgtctccggcctggcgcgcttccaaccgggcacgccctacgacctcgacctgctgctcgacttccaacaggcactcgaacaaaacgggcattattccggcgcgtccgtacaagccgacttcgaccgtctccaaggcgaccgcgtccccgtcaaagtcagcgtaaccgaggtcaaacgccacaagctcgaaaccggcatccgcctcgattcggaatacggtttgggcggcaaaatcgcctacgactattacaacctcttcaacaaaggctatatcggctcggtcgtctgggatatggacaaatacgaaaccacgcttgccgccggcatcagccagccgcgcaactatcggggcaactactggacaagcaacgtttcctacaaccgttcgaccacccaaaacctcgaaaaacgcgccttctccggcggcatctggtatgtgcgcgaccgcgcgggcatcgatgccaggctgggggcagagtttctcgcagaaggccggaaaatccccggctcggatatcgatttgggcaacagccacgccacgatgctgaccgcctcttggaaacgccagctgctcaacaacgtgctgcatcccgaaaacggccattacctcgacggcaaaatcggtacgactttgggcacattcctgtcctccaccgcgctgatccgcacctctgcccgcgcaggttatttcttcacgcccgaaaacaagaaactcggcacgttcatcatacgcggacaagcgggttacacccttgcccgcgacaatgccgatgtcccctcggggctgatgttccgcagcggtggcgcgtcttccgtgcgcggttacgaactcgacagcatcggacttgccggcccgaacggatcggtcctgcccgaacgcgccctcttggtgggcagcctggaataccaactgccgtttacgcgcaccctttccggcgcggtattccacgatatgggcgatgccgccgccaatttcaaacgtatgaagctgaaacacggttcgggactgggcgtgcgctggttcagcccgcttgcgccgttttccttcgacatcgcctacgggcacagcgataagaaaatccgctggcacatcagcttgggaacacgcttctaa

SEQ ID NO: 62638 - DNA, 291 bp, Neisseria meningitidis
atgtggatgattttgcgtgaagacatcggctctgctgaggataaaaaggatattctactgccggcatcgggcaaattccaaatatacgccccgatatgggaagccccgcatccgcagcgttggaaacaggcaaacgcctgcaaacaaagccggcaaacggataacggcatattgcctgattgtcattcagacataggaaatgcggaaaaaaacacccaaattggctataatcccgacaaacacactcaaggacaacaacatggcagcctcgcccgaagcaaaattcactga

SEQ ID NO: 62639 - DNA, 1140 bp, Neisseria meningitidis
atgagtcaaaatgcctcggtgggcattgtaacgccccaaaaaattccgtttgaaatgccgctggttttggaaaacggtaaaactttgccgcgtttcgatctgatgattgaaacctacggcgagctgaatgccgaaaaaaataatgcggttttaatctgtcatgcgctgtcaggcaaccatcatgttgcgggcaggcattcggcggaggataaatatacgggctggtgggacaatatggtaggacccggcaaaccgattgatacagaacgttttttcgtggtcggtttgaacaatctgggcggctgcgacggcagcagcggacctttgtcgatcaatcctgaaacgggcagggaatacggcgcggattttccggtggttacggtgaaggactgggtaaaatcccaagccgcgcttaccgattatctcggcatcgggcaatgggcggcggttgtcggcggcagcttgggcggtatgcaggctttgcagtggacgatttcctatcccgagcgcgtgcgccatgccttagtgattgcgtccgcgccgaaactgtccacgcaaaatatcgcgtttaatgatgtagcacgtcaggcgattttgaccgatcccgatttcaacgaaggacattaccgcagccgcaacaccgttcccgctcggggcttgcggattgcccgcatgatggggcacatcacctatcttgccgaagacggtttgggcaaaaaattcggacgcgatttgcgttccaacggctatcaatacggctatggcgttgaatttgaagtagaatcctatctgcgctatcaaggcgacaaattcgtcgggcggtttgatgccaacacctatttgctgatgaccaaggctttggactatttcgatccggcggcggatttcggcaacagcctgacccgcgccgtgcaggatgttcaggcaaaattctttgtcgccagcttcagcaccgattggcgtttcgcgcccgaacgttcgcacgaactggtcaaggccctgattgccgcccaaaaatccgtgcagtatatcgaagtcaaatccgcacacgggcacgatgcctttttaatggaagacgaagcctatatgcgtgcggtcgccgcctatatgaacaacgtttataaggaatgtcagcaatga

SEQ ID NO: 62640 - DNA, 1986 bp, Neisseria meningitidis
atggctaaaaacaaccaatacagcgaatccagcatcaccgtcctcaaaggtttggaaccggtcaaagaacgtcccggtatgtacacccgcaccgacagcccgacccatatctgccaagaagtcatcgacaacgcggcggacgaggcgttgggcggtttcgctacggcaatcgacgtgcaaattcatgaagacggttcgctttccgtacgcgacaacggccgcggtattcccgtcggtctgcaccctgaagaaggcgtacccgtagtcgaactcgtgtttacccgtctgcacgcgggcggcaagttcaataaaaaagacggcggcagcgcgtatgccttttcaggcggcctgcacggcgtgggcgtatccgtgaccaacgccctttccacccgccttgaggtaacggtcaaacgcgaaggcaaaatccaccgtatcgtgtttgccggcggcgacgtggtcgaaccgttggcacaagtgggcaaatgcgccgtcaaagacagcggcaccgaagtgcgcgtgtggccggacggcaaatattttgaaagcccgaattacagcattcccgaactcgaacgcctgctgcgtgccaaagccgtgctgctgccgggtgtgcgcgtttccctgacccgtccggtcaaaggcgaagacgaagcgcacacccaaacctggcactaccccgacggcctgaaaagctatctgaccgacctgattgccgacgcgcaagaagctgtgccgctgttctcctgcgaaaactacatttcagacggccacaacggcgatttcagcatcggcgaaggagcggcgtttgccctgacctggctggaagaaggctcgtgcgccaacgaaagctacgtcaacctcatccccaccccgctgggcggcacgcacgaagcaggtttgaaacaagccgtgttcaacgccgtcaacaatttcatcaatctgcacaacctcctaccgcgcggcgtgaaagtacaaagtgacgacgtgttcggtaaaaccgccttcgtcctctccgcccgcgtcctcgacccgcagttccaaggtcaaaccaaagacaagctgaccaaccgcgacgcgttgaaactcgttgccgccgtatcgggcgaccctttggaattgtggctgaaccaaaacgtggacttcggtaaaaaaatcgccgaactcgccatccgtcaggcgcaggcgcggatgcgttcggttaagaaaatcgaaaagaaaaaaggcagcggcgtcgccgtcctgcccggcaaactgaccgactgcgaaagcgaagacatccgcgaaaacgaactcttcctcgtcgaaggcgattccgccggcggctcagccaaactcgcccgcgacaaagccacccaagccatcctgcccctgcgcggcaaagtgctcaacagctttgaagtccaccccgaccaactcttcggcaacgccgaaatccacgacatttccgtcgccatcggcgtcgatccgcacggtattaacgaccatcccgatttaagcggcctgcgctacggcaaaatcgccatcctgtccgatgccgacgtggacggctcgcatattcaagttttgctgctgaccttgttctaccgccacttcccgaaactggtcgccgatggacacatctacgtcgcccagccgccgctgttccgcgtcgatgtcaatgcacaaggcaaaaacaaaccggcccgcaaattctacgccctcgaccaaaacgaactcgacagcattttggagcgactacaaaaagaaggctttaaagaaactgcttattccatcagccgttttaaaggcttgggcgagatgaaccccgaccaactcaaagacaccaccatgcaccccgacacccgccgtctgttgcaggtacaaatcctagaaggcgcagatgacgaaacacgcgacatcttcgtcaaactgatgggcaaaggcgaagccgccgcccgccgcgcttggatggaacgcgaaggcgatacggcggaattggatatttga

SEQ ID NO: 62641 - DNA, 336 bp, Neisseria meningitidis; identical to SEQ ID NO: 39221

SEQ ID NO: 62642 - DNA, 1332 bp, Neisseria meningitidis; identical to SEQ ID NO: 42871

SEQ ID NO: 62643 - DNA, 1008 bp, Neisseria meningitidis
atgagcaccttcttccagcaaaccgcccaagccatgattgccagacacatcgaccgtttcccgctattgaagttggaccaggtgattgattggcaaccgatcgaacagtacctgaaccgtcaaaaaacccgttaccttagagaccaccgcggccgtcccgcctgtcccctgttgtccatgttcaaagccgtcctgctcggacaatggcacagcctctccgatcccgaactcgaacacagcctcatcacccgcatcgatttcaacctgttttgccgtttcgacgaactgatcatccccgattacagtaccttatgccgctaccgcaactggctggcgcaagacgacaccctgtccgaattactcaaactgattaactgccaactgaccgaaaaaggcctaaaaatagagaaagcatccgccgccgtcgttgatgccaccattatccagaccgccggcagcaaacagcgtcaggccatagaagttgacgaagaaggacaaatcagcggtcaaaccacaccgagtaaggacagcgatgcccgttggataaagaaaaacggcctctacaaactcggttacaaacaacatacccgtaccgatgcagaaggctatatcgagaaactgcacattactcccgccaatgcccatgagtgcaaacacctgtcgccgttgttggaagggttacccgaaggtacgaccgtctatgccgacaaaggctacgacagtgcggaaaaccggcaacatctggaagaacatcagttgttggacggcattatgcgcaaagcctgccgcaaccgtccgctgacggaagcgcaaaccaaacgcaaccgatatttgtcgaagacccgttatgtggtcgaacaaagcttcggtacgctgcaccgtaaattccgctatgcgcgggcggcctatttcggactgattaaagtgagtgcgcaaagccacctgaaggcgatgtgtttgaaccttttgaaagccgccaacaggctaagtgcgcccgctgccgcctaa

SEQ ID NO: 62644 - DNA, 333 bp, Neisseria meningitidis
atgctgcccgaattgaggcggctgtcgcacaaacggatagcgggtttggccggcattgccccgcacccgagggagggcggggaaaccaaatttaaaagccgctgctttggcggaaggtctgcggtgcgtaaggcactgtatatggctaccgtggcagcgacacgttttgaaccgcttattcgggatttctaccaacgcctgctgtccgagggtaagccgtataaggttgccgttacggcatgtatgcgcaaactgctgacgatatcgaatgcccggatgcgtgattattttgccgaaaacgataccgccgaaaacggtatccggacggcttga

SEQ ID NO: 62645 - DNA, 633 bp, Neisseria meningitidis
atgctcaacattcaaaatccgatgtttctgatgctgatgagcgacagcccgcagctgcgcgagtttctggtgcgcaatatcgacaacatcgccaacgatacagaagccttcgtaaaccgatacgacctcaaccgtcatatgatttacaatactctgctgatggtggagggtaagcagcttgatcggttgaaacaacgtagcgagaaagtcttggcgcatcccacccctagcaaatggctgcaaaagcggttgtacgattaccgcttcttcctcgctttcgccgaacaggatgccgaggcaatgaaagccgccttagagccgcttttcgataaaaaaaccgcgcgtatggctgcaaaagaaacattgtcctatttcgatttctacctgcagccgcaaatcgttacctatgccaaaatcgcatccatgcacggtttcgatttgggcatagaccacgaaatcgcgccgagggatttgactgtttacgatccgctgccggcagacgaatatcaagacatcttcgattttatgaaacagtatgacttgtcttatccgtatgaatatctgcaggattggatagattactatacgttcaaaaccgataagctggtatttggtaacgcgaagcgagagtga

SEQ ID NO: 62646 - DNA, 447 bp, Neisseria meningitidis
atgagactgaccaccaaagggcgtttcgccgttaccgctatgctggatttggcgatgaacgcgcaaaccggcgccgtcaaactcagtgccatcagcgaacgccaaaacatatccctctcctatctcgagcaattgttcggcaaactccgccgcgccggactggttgaaagcctgcgcgggcccggcggcggctacatcctcgccgcaccggcggcacgcatcaacatcgcccaaatcatcgccgccgccgaagaccggctggacgcaacccaatgcggcagcaaagccaactgccaccacggcgcgccctgcctgacgcacgatctttgggagaatttaaacaaaaccatcaacgactacctcggcagcgttaccctgcaaagcatcatcgaacagaaaaacaacggcgacggcagccgcgtcgtccaatttacacacatccattaa

SEQ ID NO: 62647 - DNA, 1221 bp, Neisseria meningitidis; identical to SEQ ID NO: 55099

SEQ ID NO: 62648 - DNA, 246 bp, Neisseria meningitidis; identical to SEQ ID NO: 38743

SEQ ID NO: 62649 - DNA, 537 bp, Neisseria meningitidis; identical to SEQ ID NO: 37832

SEQ ID NO: 62650 - DNA, 1380 bp, Neisseria meningitidis
atgctgctcgacctcaaccgcttttccttttccgtcttcctgaaagaagtccgcctgctgaccgctcttgccctgcccatgctgttggcgcaggtcgcgcaggtgggcatcggttttgtcgataccgtgatggcgggcggtgcgggcaaggaggacttggcggcggtggctttgggcagcagcgcgtttgccacggtttatattacctttatgggcattatggcggcgctgaacccgatgattgcccagctttacggcgcgggtaaaaccgacgaagtgggcgaaacggggcggcaggggatttggttcgggctgtttttgggcgtgttcggcatggtcttgatgtgggcggcgattacgccgttccgcaactggctgaccttgagcgattatgtggaaggcacaatggcgcagtatatgctgttcaccagcttggcgatgccggcggcaatggtacaccgcgcactgcacgcctacgcctccagcctgaaccgcccgcgcctgattatgttggtcagctttgcggcgtttgtgttgaacgtgccgctgaactatattttcgtttacggcaaattcggtatgcccgctttgggcggtgcaggctgcggactggcgacgatggcggtgttttggttcggcgcgctggcattgtggatttatatcgctaaggagaaattcttccgtccgttcggactgacggcgaaattcggcaaaccggattgggcggtgttcaaacagatttggaaaattggcgcgcccatcgggctgtcttattttttggaagccagcgcgttttcgtttatcgtgttcttgatcgcgcccttcggcgaggattatgtggcggcgcagcaggtcggcatcagtttgtcggggattctctatatgattccgcaaagcgtcggctcggcggggacggtgcgcatcggcttttcgcttgggcggcgcgaattttcgcgggcgcgctatatttcgggcgtgtcactggtgttaggatggatgctcgccgtgattaccgtgctttccttggtattattccgttcgccgctggtaagtatgtacaacaatgatccggcggttttaagcatcgccgccaccgtcttactgttcgccggcttgttccaaccggcagacttcacccaatgtatcgcctcctacgccttgcgcggctacaaagttacaaaggtgccgatgttcatccacgccgccgccttttggggctgcggtctgctgccgggctacctgctcgcctaccgtttcgatatgggcatttacggcttctggacggcattgattgcctcgctcaccatcgccgccgtcgccttggtgtggtgcttggaattgtgcagcagggagatggtcagatcgcataaggctgtctga

SEQ ID NO: 62651 - DNA, 717 bp, Neisseria meningitidis
gtgttcaataatttccttgcttcgctgccgtttatgacggaaacacgcgccgatatgattgtcagcgcgtttttgcctatggtcaaagccggcttcgcggtctctctgcctttggcggcagcttctttcgttatcggtatgatgattgcggtagccgtggctttggtgcggattatgcccgccggcggcatcgtgcggaaaatcctgctgaaattggtggaattttatatttccgtcattcgcggtacgccgctgttggttcagcttgtgattgtgttttacgggctgccttccgtcggcatctatatcgacccgattcctgccgccatcatcggcttttcgctcaatgtcggcgcatatgcttccgaaaccatacgcgcggcaattttgtccgtaccgaaaggccaatgggaagcaggtttctccatcggcatgacctatatgcagacgttccgccgcattgtcgcgccgcaggcattccgcgttgccgtgccgcctttgagcaacgagtttatcggtttgtttaaaaacacctcgctcgcggcagtcgtgacggtaacggaattattccgcgtcgcgcaggaaacggcaaaccgcacttatgactttttgcccgtctatatcgaagccgctttggtttactggtgtttttgtaaagtgctgttcctgattcaggcgcgtttggaaaaacgtttcgaccgctacgtcgccaaataa

SEQ ID NO: 62652 - DNA, 192 bp, Neisseria meningitidis; identical to SEQ ID NO: 58769

SEQ ID NO: 62653 - DNA, 813 bp, Neisseria meningitidis
atggcttcaaaaccttttctaaaatgggcaggcggcaaacataaacttgtcccctttatcgaacacaatctacctactcccacacgaaaacgcctgattgaacccttttgcggttctgccgctttgtctcttgcattggatttcgaacaatatctgctcaatgatattaacgctgacttaatcggcttattccgtatcctaaaagaagaaaaatccggattcatcgactacgcccgctctttctttatttccgaaaacaatagcgattcaagattctatgaattgcgggaacaattcaacttcagcaaaaatctgcacgaacgctcggcactatttatttatttgaaccgtcatgcttttaacggtttatgccgttacaacagcaaaggggtattcaatgtgccgttcggacgctacaaatcgccgtactttccccaacaagaaatggaaggtttcattcagaaatctgacagagttgaattaatgtgcggagattttcaaatgattctatctcagacagacaataccgatacggtttattgcgatcccccttacgcgcctttaagcccaaccgcttcatttaccacttatgccaaagaaggtttcaatttagacaatcaaatccgtcttgcccagtcagcccaacaaattgcgcccgattcccaaggcgttttgatttcaaatcatgatactgaattcacaagggatatttattcttttgctattctgaaaacaattgaagtacaacgcaatattgccgcaaaaggcagcagccgtaaaaaagtcggagaattattggcaatttatgattga

SEQ ID NO: 62654 - DNA, 1068 bp, Neisseria meningitidis
atgagaaaaatcctcgttaccggcggtgcgggctttatcggttctgccgttgtccgtcatatcattcaaaacacccaagattccgtcgtcaacctcgacaaactgacctacgcgggcaatctcgaatcgctgaccgacattgccgataatccccgctatgctttcgagcaagtggacatttgcgaccgcgccgaactcgaccgcgtattcgcacaacaccggcccgatgccgtgatgcacttggcggcggaaagccatgtcgaccgctctatcggttcggcaggcgagtttatccaaaccaatatcgtcggcacattcaatctgcttgaagcagcccgcgcctactggcaacaaatgccgtctgaacagcgcgaagctttccgtttccaccatatttccaccgatgaagtctatggcgatttaggcggcacggacgatttgtttaccgaaaccgcgccctacgcgccgtccagcccctactctgcctctaaagcgtccagcgaccacctcgtccgcgcgtggttgcgtacttacggcttgccgaccattgtaaccaactgctccaacaactacggtccttaccattttccggaaaaactcattcctttgatgattctgaacgcgcttgacggcaaaccgctgcctgtgtacggcgacggtatgcaaatccgcgactggctgtttgtcgaagaccacgcgcgcgcactgtatcaggttgttaccgaaggtgttgtcggcgaaacctacaatatcggcggccacaatgaaaaagccaatattgaagtggtgcgcaccatttgcgccctgctggaagaattggtgccgaacaaaccgcaaggcgtggcgcgttatgaagatttgattacctatgtcaaagaccgccccggccatgatgtgcgctacgccgtcgacgcagccaaaatcaggcgggatttgggctggctgcctttggaaaccttcgagtccggcctccgcaaaaccgtgcaatggtatctggacaacaaaacctggtggcaaaatgtattgaacggcagctatcgtttggaacgtttaggtactggaaaatag

SEQ ID NO: 62655 - DNA, 372 bp, Neisseria meningitidis
atgcaagatgtgctaattggctggacatcggaagaacgtgtgtttagcttgaggcaaaccattcaggcagaagaacaggcaaggcgggaagcggctaaagcagaggcagaaaaacaggaagtgagggcattgccttattgcgttattcccgaatttgaaacccctgaatttgaaaccgcctgtttagtggtgagggatttttggaacaggcaggcggtaggggttgcaccccctaaggcaattattattcaagagtttattaagaacacctttaagaatataacaggggtagaacccaaggaggcggcaatcaggcgcattgacagtttgacgcgcccgccgttattcaaaaaccaatctaaaaaacaataa

SEQ ID NO: 62656 - DNA, 999 bp, Neisseria meningitidis
gtgattgcaagccgtctctctggaaatatatcttcagctattcaggagcataaagatggtaaagttaatatcaaccgttttcaaaatattttagcggatttatattcattgggagggttaggaagtacattaatagagaagaatggaaatatgcagagttgggggattccattagcaattgctggagatataattgcagcaacggctattgccacaggagatactggtacgatatctacagaggaattttataattttgacaactggaaaggttttgggtatgagctatttgaagactggtctcgttgggtatacgactggctgcccgacggctggaatctgtggaaagaattggacagaaaccgttcaggccaataccacatctacgaccccctcgccctagacctagacggcgacggcatagaaacagtcgccgccaaaggcttttcaggcagcctcttcgaccataacggcaacggcatccgcaccgccactggctgggtttctgccgatgacggtttactcgtccgcgatttgaacggcaacggcatcatcgacaacggcgcggaactcttcggcgacaataccaaactggcagacggttcttttgccaaacacggctacgcagctttggccgaattggattcaaacggcgacaacatcatcaacgcggcagacgccgcattccaatccctgcgtgtatggcagaatctcaaccaggacggcatttcccaaaccaacgaactccgcacccttgaagaattgggtattcaatctttggatctcgcctataaagatgtaaataaaaatctcggtaacggtaacactttggctcagcaaggcagctataccaaaacagacggtacaaccgcaaaaatgggggatttacttttagcagccgacaatctgcacagccgcttcacgaacaaaatgctatccattagccatgttcgggaaaacacgatttccccgtttgttttaggctgtctaaacaaataa

SEQ ID NO: 62657 - DNA, 984 bp, Neisseria meningitidis
atgagtgaaatcaaaaccgacgaccccaaacgcggcatcaaactcagaggcgcggacaaaaccgcccgcatccccatcaaagtcgtcccccttcaggaaaaattaaaaaagcccgaatggatacgcgccaaacttccatcgcgcaaattctttgaaatcaaagacattttgcgcgaacaaaaaatgcacaccgtttgcgaggaagcctcctgccccaacatcggcgaatgcttcagcaaaggcacggcgaccttcatgattatgggcgacatctgcacccgccgctgcccgttctgcgacgtgggacacggccgcccgaatatgctcgaccccgacgaaccgaaaaacctcgccgaatccgtcaaagccatgaacctgcgttacgtcgtcatcacctccgtcgaccgcgacgacctgcgcgacggcggcgcacagcatttcgccgactgcatcaaagccatccgcgaaaccagcccgaacaccaaaatcgaaatcctcgtccccgacttccgaggacgcttggacatcgcactcaaaatccttgccgaaaccccgcccgacgtgatgaaccacaacctagaaacccatccgagcctgtacagaaaagcccgtcccggtgctaattatcaacattctttagacttattaaaacgttataaagaaatgatgccgcatatcccgaccaaatccggcatcatggtcggcttgggcgaaacagacgaagacgtgcgtgaaattatgcgcgatatgcgggcgcacaatatcgaaatgattaccatcggacagtacctccagccttcagacggacacctgcccgtcctgcgctacgttacgcccgagcagttcaaaatctttgaaaaagaagcatacgaactgggcttcagcaatgccgccatcggcgcgatggtacgttccagctaccacgccgacgaacaggctgccgaagccttacgcgaaagccacggcggttgcgggcatcattaa

SEQ ID NO: 62658 - DNA, 312 bp, Neisseria meningitidis
atgcttgccatactgttgtctgcaatattgggactggtatcgacaactgccgctgccggtacgtcagaacccgcccaccgccataccaaacatatccgcaaggcaaacaagcagatgctgcaccccgaatgcaggaaatatttggaacgccgtgccgcgtggtaccgatcgcaaggcaacgtgcaggaattgcgcgaaaacaaaaaggcgcgcaaagcattccgctccctgccttataaggaacagaaaacccaatgccgggcggcttatgaggctttcgatgatttcgacggcggcaggttccgccgttaa

SEQ ID NO: 62659 - DNA, 1887 bp, Neisseria meningitidis; identical to SEQ ID NO: 56077

SEQ ID NO: 62660 - DNA, 1713 bp, Neisseria meningitidis
atgaaagccagccaattctttatctctactttaaaagaagcccctgccgaagccgcgcttgccagccacaagctgatgattcgcgccggcctgattaaagccaacgcgtccggcctttatacttggatgccgatggggctgcgcgtgttacgcaaagtcgaaaacgtcgtgcgcgaggaaatggcgcgcgcgggcagcgtggagctgctgatgccggtggtgcagcctgccgagctgtggcaggaatccggccgctgggaattttacrgtaaagaactgctgcgcctgaaagaccgccacgaccgcgatttctgcatgggcccgacctgcgaggaagtcatcgccgacatcgtgcgcaaagaaatcaacagctacaaacagctgccgaaaaacttttaccacatccaaaccaaattccgcgacgaagtgcgcccgcgtttcggcgtgatgcgcgcgcgcgagttcgtcatgaaagacgcttattccttccatgccgactacgcctcgcttcagacgacctatgatgccatgtatgacgcttactgccgtatcttcacccgtctgggcttggcattccgccccgtcgccgcagacaccggcagcatcggcggtacgggttcgcacgagtttcaagtgttggcggaaagcggcgaagatgttattgcgtacagcgacacttccgattacgccgccaatatcgagttggcaccgaccttgccgcttaaaggcgaacgcgccgctgctcaggctgtgttgaccaaagtacatacaccaaacgtcaaaaccattgagtctttggttgaattcctgaatattccggttgaacaaaccctcaaatccatcgtggtcgaaggcgaaaacgaaggcgaaatcgtcttattactgttgcgcggcgaccatgagttcaacgacatcaaggcagaaaaactggcgggcgtgaaatcgccattgacgatggcaagccctgccgcgattgtcgaacagttcggcgcaaacggcggctctcttggtcctgtcggcttcaaaggcaaagtctatgccgatttcgctaccgaaaaaggcgcggactgggtcatcggtgcgaacgaagacggctaccactataccggcttcaacttcggtcgcgatgccgccgagcctgagtttgtcgatttgcgcaacgtcgtcgaaggcgacgaaagccccgacggacaaggccgtctgaaactggcgcgcggcattgaagtcggacacgtcttccagttgcgcgacaaatatactaaagccatgaacgtcagcttcctcgacaacaacggcaaatcgcaaattatggaaatgggctgctacggcatcggcatcacccgcgtcgttgccgccgccatcgagcagaataacgacgaaaaaggcatcatctggaccaaagcaatggcgccgtttgaagtcgttatcgtgccgatgaactacaaaaaatcagacaccgtacgcgaagccgccgacaaaatctatgccgaattgctggcggcaggcgcggatgtgctgctggatgaccgcgacgaacgcgcaggcgtattgctgaacgattccgagctgttgggtattccgcaccgcatcgtcatcggcgaccgcgctttgaaagaaggcaatgtcgaatacgccgaacgccgcaacaacgaagcgcaggcagttgcaatcggagaaattgttgcgcgtgtaacagcttcattaaatgggtaa

SEQ ID NO: 62661 - DNA, 372 bp, Neisseria meningitidis
atgagaaaaccccaacgcggctacgcccgccaagaccgtgtcaaagaacaaatcatgcgcgagcttgccgaactcgtccgtaccggactgaaagacccccgcgccggcttcatcaccgtcaacgaggtcgaagttacccgcgattacagccacgccaccgtgttctacaccgttttaaaccaagatgcgcgcgaaattacggaagaagtgctggaacacgcacgcggacacctccgcagcgaattggccaaacgcatcaagctgttcaaaatccccgagctgcatttcaaatacgacgaatcgttggaacgcggtttgaacctgtccgcccttatcgatcaagtggcggcggaaaaaccggttgaagactga

SEQ ID NO: 62662 - DNA, 453 bp, Neisseria meningitidis
atgcaaattattctgttagaaaaaatcggcggtctgggcaacttgggcgacatcgtaaccgttaaaaacggttatgcccgcaacttcttgattcccgcaggtaaggcaaaacgtgctactgaagcgaacatgaaagagtttgaagcacgccgtgccgaattggaagccaaacaggccgaaattttggcagatgcccgagcccgtcaggaaaaattggacggtcaaaccgttaccgttgcacaaaaagccggtgtggacggccgcctgttcggttccgttaccaatgccgacattgctgctgcaatcgttgctgccggcatcgaagccgtgaaagcaaatgtacgtctgccgaacggtcctctgaaagccgttggcgagtacgaagtggaagtggctttgcacactgatgccgttgctaaaattaccgttgctgtcattgccgcagccgagtaa

SEQ ID NO: 62663 - DNA, 1524 bp, Neisseria meningitidis; identical to SEQ ID NO: 37607

SEQ ID NO: 62664 - DNA, 1008 bp, Neisseria meningitidis
atgagcaccttctttcaacaaaccgcgcaagccatgattgctaaacacatcgaccgtttccctctattgaagttggatcaagtgattgattggcagccgatcgagcagtacctgaaccgtcaaaaaacccgttaccttagagaccaccgcggccgtcccgcctatcccctgttgtccatattcaaagccgtcctgctcggacaatggcacagcctctccgatcccgaactcgaacacagcctcatcacccgcatcgacttcaacctgttttgccgctttgacgaactgagcatccccgattacagcaccttatgccgctaccgcaactggctggcgcaagacgacaccctgtccgaattgctcaaactgatcaaccgccaactgaccgaaaaaggcctaaaagtagagaaagcatccgccgccgtcgttgacgccaccattattcagaccgccggcagcaaacagcgtcaggccatagaagttgacgaagaaggacaaatcagcggtcaaaccacaccgagtaaggacagcgatgcccgttggataaagaaaaacggcctctacaaactcggttacaaacaacatacacgtaccgatgcggaaggctatatcgagaaactgcacatcacccccgccaatgcccatgagtgcaaacacctgccgcctttgttggaaggactgcccaaagatacgaccgtctatgccgacaaaggctacgacagtgcagaaaaccggcaacatctggaagaacatcagttgcaggacggcattatgcgcaaaacctgccgcaaccgtccgctgacggaaacgcaaaccaaacgcaaccggtatttgtcgaagacccgttatgtggtcgaacagagcttcggtacgctgcaccgtaaattccgctatgcgcgggcagcctatttcggactgattaaagtgagtgcgcaaagccacctgaaggcgatgtgtttgaacctgttgaaagcggccaacaggctaagtgcgcccgctgccgcctaa

SEQ ID NO: 62665 - DNA, 996 bp, Neisseria meningitidis
atgttgaaaaaaatgttgaaatggtctgccgtttttttgaccgtgtcggcagccgttttcgccgcgctgctttttgttcctaaggataacggcagggcataccgaatcaaaattgccaaaaaccagggtatttcgtcggtcggcaggaaacttgccgaagaccgcatcgtgttcagcaggcatgttttgacggcggcggcctacgttttgggtgtgcacaacaggctgcatacggggacgtacagactgccttcggaagtgtctgcttgggatatcttgcagaaaatgcgcggcggcaggccggattccgttaccgtgcagattatcgaaggttcgcgtttttcgcatatgaggaaagtcatcgacgcaacgcccgacatcgaacacgacaccaaaggctggagcaatgaaaaactgatggcggaagttgcccctgatgccttcagcggcaatcctgaagggcagtttttccccgacagctacgaaatcgatgcgggcggcagcgatttacagatttaccaaaccgcctacaaggcgatgcaacgccgcctgaatgaggcatgggaaagcaggcaggacgggctgccttataaaaatccttatgaaatgctgattatggcgagcctggtcgaaaaggaaacggggcatgaagccgaccgcgaccatgtcgcttccgtcttcgtcaaccggctgaaaatcggtatgcgtctgcaaaccgacccgtccgtgatttacggcatgggtgcggcatacaagggcaaaatccgtaaagccgacctgcgccgcgacacgccgtacaacacctacacgcgcggcggtctgccgccaaccccgattgcgctgcccggcaaggccgcgcttgatgccgccgcccatccgtccggcgaaaaatacctgtatttcgtgtccaaaatggacggcacgggcttgagccagttcagccatgatttgaccgaacacaatgccgccgtccgcaaatatattttgaaaaaataa

SEQ ID NO: 62666 - DNA, 1527 bp, Neisseria meningitidis
atgaatcccatgtacattacttttgcaatctatctggttgcagtccttctcatcgggcttgccgcctatttttctacgcgcaatttcgacgattatattttgggcgggcgcagcctaggcccgtttgttaccgcgatgtcggcaggcgcgtccgatatgtccggctggctgctgatgggtctgccgggcgcgatttacctgagcggtttgaatgaggcttggattgccatcggcctcttggtcggcgcgtatttcaactggctcttggtggcgggccgcctgcgcgtgcataccgaatacgccaacaatgcgctgacgctgccggattatttcttccaccgcttcggcgcgggcggacacttgatgaaagtggtttccgcactgattatcctgttcttcttcacgatttattgcgcctcgggcattgtggcgggcgcaaccctgttccaaagcctgtttgaaggtatgacttacaatcaggcaatgtggctgggcgcgggcgcgaccatcgcctataccttcttgggcggcttcttggcggtcagctggacggatacgctgcaggcttctttgatgattttcgccctgattttaacgccggtgatggtctatctgggcttgggcggcgcggaacagatgtctgccgcgattcaaagcgtcgccgcaggcacgggcaaagcatacggcagcctgtttgccggtacgaccgtcatcggcatcatttccaccgccgcatggggcttgggctacttcggacagccgcacattttggcgcgctttatggccgccgaaagcgcgaaatcgctggtatccgcacgccgcatcggtatgacttggatggcgttgtgccttgcgggcgcggtagcggtcggttatttcggcattgcgtatttcggtgcaaatcccgacaaagtttcttctatgagcggcaaccacgaacgcatcttcatcgcgctttccaccctgctgttcaacccttggatcgccggcattattttgagcgcgattttggcggcggtgatgtccaccctgtcctgccagcttttggtttgctccagtgcgattaccgaagacttctacaaaggctttttgcgtaaaaacgcgcaacagtcggaactggtatgggtcggccgcctgatggtcttggcgattgccgtgatttccatcctgattgcttccgatccgaacagcaaagtattgggactggtttcttacgcgtgggcaggtttcggtgcggcgttcggcccgattgtgattctgtccgtattgtggaaacgcatcactgcctacggcgcgttgtcgggtatggttgcaggtgccttaaccgtagtcgtatgggcggaatgggtgaaaaaaccggctcaagcggcaggagaaagcggcttgttgacgatgtacgaaatcgtgccgggctttattgtctgcttaatcattgccgtgttggtttccctgttcaacaaagaaccttcgcgcgaaacccaagaacgctttgaaaaagccgacgcagattaccgcgccgcccgataa

SEQ ID NO: 62667 - DNA, 678 bp, Neisseria meningitidis
atgagccgcgtattactcgtagatgacgatgccctgctaaccgaactgctgaccgaatacctgagcgccgaaggtctgaacgtccgcagcgttcccgacggggaagcaggcgtacaggaaatcctgagcgggcagtacgatgtagtcgtattggattccatgatgcccaaaatgaacggcttggatgtcttgaaaaacgtacgcgcccgaagcaccgtccccatcatcatgctgaccgccaaaggcgacgacatcgaccgaatcatcggcttggaaatgggcgcggacgactatgtccccaaaccctgcacaccacgcgaactcttggcacgcatcaatgccatcctgcgccgcgcacaacacagcggcgaacagaacaacgcacccaacagcatctccgtcagcgatgtcgtcctgtaccccgccaaacgccaggcatccgtcaaagacatgccgctcgaactgaccagcacagaattcaacctgctcgaagtcctgatgcgccatgccggacaggtagtcagcaaagaaaccctgtccgtcgaagcactcgaccgcaagctggcaaaattcgaccgcagtatcgacgtacacatctccagcatccgccacaagttgggcgatgcctctctgattcaaaccgtacgcggcttgggctacctgtttgtcaaaaactga

SEQ ID NO: 62668 - DNA, 798 bp, Neisseria meningitidis
atgctgaaacaacgggtgataactgctatgtggctgctgccgctgatgctgggcatgctgttttacgcgccgcaatggttgtgggctgcattttgcggactgattgccctgattgccttgtgggaatatgcccgtatgagcggcttgtgcaaaatcaaaaccaaccattacctcgccgcaactttggttttcggcgtggttgcctatgcgggcggctggatgctgcctaatttggtttggtatgttgttttggcattttggctcgccatcatgcctttatggttgagattcaaatggaggctcaacggcagttggcaggtttatgccgtcggctggcttctggttatgccgttttggttcgcgctcgtatccctgcgcccgcatcccgatgatgccctgccgctgctcgccgtcatgggcctggtctgggttgccgatgtttgcgcatatttctgcggcaaggcgttcggtaaacacaaaatcgcaccggcaatcagccctggcaaaagctgggaaggcgcaatcggcggcgcggtttgcgtggccgtgtacatgaccgccgtacgaagtgccggctggctggcattcgatacaggctggttcgataccgtgttaatcggtttggtgttgaccgttgtcagcgtatgcggcgaccttttggaaagctggctcaagcgcgcggcaggcatcaaagacagcagcaagctgctgcccggacacggcggcgtgttcgaccgtaccgacagcctgattgccgttatcagcgtctatgcagcgatgatgtcggttttaaattga

SEQ ID NO: 62669 - DNA, 237 bp, Neisseria meningitidis; identical to SEQ ID NO: 39540

SEQ ID NO: 62670 - DNA, 999 bp, Neisseria meningitidis
gtggcggcacatatcggacgcattgatacggacgcgcctttgaaacccctgtacgtcatccacggcgaggaagaactgttgcgtatcgaggcattggacgcattgagggcggcggcgaagaaacaaggttacctcaatcgggaagtttatacggcagacaatgccttcgattggaacgaactgttgcaaaccgcaggcagtgcgggtctgtttgccgatttgaagctgttggaactgcatatccccaacggaaaacccggcaaaaccggcggcgaggcgttgcaggattttgccgcccgcctgccggaagatacggtaacgctggttttgctgcccaaactggagaaaacccagctccagtccaaatggtttgccgcattggcggcaaagggggaagtgtgggaagccaaaccggtcggcgcggcggctttgccccaatggatacgcggacggctggacaaaatcggtttgggtatcggggcagacgcattggcactgtttgccgagcgcgtggaaggcaatctgttggcggcacgtcaggaaatcgacaagctcgcgctgctgtatccgaaagggcataccgtcaatatcgatgaggcgcaaaccgccgtcgccaacgtcgcccgctttgacgcgttccaactggcaggcgcgtggatgaagggcgatgtcccgcgcgtatgcagattgttggacggattgcaggaggaaggcgaagaaccggtgctgcttctgtgggcggttgccgaagacgtgcggacgctgatccggcttgccgccgccctgaagcaggggcagagcatccaatccgtccgcaacagcctcaggctttggggcgacaagcagacgctcgcaccgcttgcagtcaagcggatttccgtcgtccgcctgcttgacgcgctcaaaacctgtgcccaaatcgaccgaatcatcaaaggcgcggaagagggcgacgcatggacggtattcaaacggcttgtcgtgtcgctggcggaataa

SEQ ID NO: 62671 - DNA, 915 bp, Neisseria meningitidis; identical to SEQ ID NO: 39317

SEQ ID NO: 62672 - DNA, 1155 bp, Neisseria meningitidis
atggttgataaaaaaagccctttgattgccgtcagtgtcggcgaagcgtcgggcgacctgttgggggcgcacctgatacgcgccatccgcaagcgttgtccgcaggcgcgttttgtcggtatcggcggcgaactgatgaaggcggaaggtttcgagagcctttatgatcaggagcggctggcggtgcgcggctttgtcgaagtggtcaggcggctgccggaaattttacggatacgcagggggctggtacgggatttgctgtcgttgaaacctgatgtctttgtcggtatcgatgcgcccgattttaatttgggtgtggcggaaaagctgaaacggtcggggattccgaccgtgcattatgtcagcccgtcggtgtgggcgtggcggcgggaacgtgtgggcaaaatcgtgcatcaggtcaatcgcgtgttgtgcctgttcccgatggagccgcagctttatctcgatgcgggcggacgtgcggagtttgtcggtcatccgatggcgcagcttatgcccttggaagacgaccgtgaaacggcgcggcaaactttgggcgtggatgccggcatccccgtattcgccctgctgcccggcagccgcgtcagcgaaatcgactatatggcgccggtgttttttcagacggcattattgttgttggaacgctatcctgccgcatgcttcctgctgcctgccgcaacggaggcgacgaagcggcgtttggcggaagttttgcagcggccggagtttgccggattgccgctgacggtaatcgacagacagtctgaaacagtgtgcagggcggcggatgcggtgctggtaacgagcggtacggcgactttggaggtggcgttgtgcaagcgtccgatggtcatcagctacaagatttcgccgctgacttatgcttatgtgaaacgcaaaatcaaagtgccgcatgtcggcctgccgaatatcctgttgggtaaggaggctgtgccggaattattgcaatctgaagcaaaaccggaaaaactggcggcggcgttggcggactggtacgaacaccccgataaggttgccgcgctgcaacaggatttcagggcgttgcacctgctgttgaaaaaagatacggcggatttggccgcgcgcgcggttttggaagaggcgggatgttga

SEQ ID NO: 62673 - DNA, 282 bp, Neisseria meningitidis; identical to SEQ ID NO: 38986

SEQ ID NO: 62674 - DNA, 333 bp, Neisseria meningitidis
atgagcagcgaattgattgtacacaccagcgatgccgcttttgaaaaagacgttttaaatgcagatatccccgtcctgctggacttttgggctccgtggtgcggcccctgcaaaatgattgccccgattttggacgacattgccgccgaatttgaaggccgtctgaaagtggtcaaaatcaacatcgacgacaacgaagccaccccgtcccgtttcggcgtgcgcggcattccgaccctgatggtgtttaaaaacggcgaagtcgtcgccaccaaagtcggcgcattggcaaaaggccagctaaccgcctttgtcgaagcctctatcgcctga

SEQ ID NO: 62675 - DNA, 912 bp, Neisseria meningitidis
atggacaccctgttcagcctcaaggttttccgccaagtcgtccaaagcggcggcttcacccgcgccgccgacgcgctcggcatctccaccgcaatggcaagcaaacacgtcagccacttggaaaacaccgtccaagccaaactcctgcaccgcaacagccgcaacctcagcctgaccggagccggggaagaatactaccggcaatgcagttacgcgctcgacacgctcgacgatgccgcgcaaaaagccgccggagggacggaaaaaccgcaggggctgctgcgcgtaacgatgccgctgtggtttgccggcagccagatatgcaactggctggcggaataccgcgaacgttatcccgaagtggcattagaactgattttggacaaccgccacgtcgatttgattgccgaaggcgtggatttggcgttgcgcgtttcccaaaccctgtccccgtcgctgattgcgcgcccactggcggaaatcgaatttgccctgctcgcctcgcccgatttcctgaggcgcaacggcgtgccggaaacgccggaagaagtggcggggctgcccgccgtcctgccgacctacaccaaccagcagaaactcgacctcacccgcaaatcggacggcaaaaaataccggcttgaactgacccccgtcatccgtaccgacaacacgctgatgatgcgcgaaatgattaaggcgggcgcgtgcatcggttatcagccgctttgggcggcggaacacgatttgcgctgcggcacgctggtgaggctgctgcctggatacgccgtcccgaccgaccggctgaatgccgtttatgcagacagggcattcttaagcgcgaaagtccgcagcttcatcgattttctgaacgaaaaaatcgccagcaggaaaggctgccgaaatgccgtctga

SEQ ID NO: 62676 - DNA, 174 bp, Neisseria meningitidis
atgagtttcggacgacgtaatacggattggcaggcttggggacaacaccgcaggcgtgcgacggcgcgaatggcgcaaaaaagtcgggagcgcgaaatcgaggaatatcaggcgcagtttgaagataaggacggcaaaggtcgtctgaaaacgggaggaaacaaagatgaatga

SEQ ID NO: 62677 - DNA, 1488 bp, Neisseria meningitidis
atgctaaagaaaataaaaaaagctctttttcagcctaaaaagttttttcaagattcaatgtggttgacaacatctccattttatcttacccccccacgtaacaatttatttgtcatatctaatttaggtcagcttaaccaagtccaaagcctaattaaaatacaaaaattaaccaataatttactagtaattttatatacttctaaaaacttaaaaatgcctaagttagttcatcaatcagctaacaagaatctatttgaatctatttatctatttgagcttcctagaagccctaataatataactcctaaaaaattactttatatttatagaagttacaaaaaaatccttaatattatacagcctgctcatctctatatgctgtcttttacaggccactactcctatctgattagtattgcaaaaaaaaagaatattacgactcatttaattgatgaagggactggaacatatgctcctttattagaatcattttcatatcatccaacaaaattagaacgttatttgattggaaataatcttaatattaaaggatatatagatcattttgacatattgcatgtcccctttcctgaatatgctaaaaaaatatttaatgcaaaaaaatataaccggttttttgcgcatgctggaggaataagcattaataataacattgcaaacttacagaaaaaatatcaaatatctaaaaatgactatatttttgttagtcaacgctaccccatttcagatgatttgtattataagagtatagtagaaatcttaaacagcataagtttacaaattaaaggaaagatatttattaaactacacccaaaagagatgggcaacaactatgtaatgtctttatttctaaatatggtagaaataaaccctcggctggtagttattaatgaacctccttttctaattgagcccctaatatacttaacaaatcctaaaggaattataggcctggcctctagttctttaatttatacaccattactctcaccctcaacccaatgtctttctattggagagttaattattaacttaattcaaaaatattcaatggtggaaaacactgaaatgatccaaaaacacttagagattattaagaaatttaattttattaatatactaaatgatttaaatggggtaataagtaaccctctctttaaaacagaagaaacatttgaaacacttcttaaatctgcagaattcgcatataaatctaaaaactactttcaggctattttttactggcaacttgccagcaaaaacaatattaccttattagggcataaagcattatggtactacaatgcactttataatgtaaaacaaatttataagatggaatattcagatattttttatatcgataatatctccgtagactttcatagtaaagataaattgacatgggaaaaaattaaacattattactattccgccgacaatagaattggtagagatagataa

SEQ ID NO: 62678 - DNA, 9231 bp, Neisseria meningitidis
ttgaagaagtatcgcggctttacgcaaaaggatgcgtgggcggctgccgacgatacggcgttgacgcgcgggtttaaaaattctatgcgttcggcgcgtatggcgtggaatgatttgacgggcgataaagaggaactcggccaactgaaggctgaggatatggattatcggaagattcaggaagggcgtaaatctcaagcgcgaagggagctgggcgaggcttgggaaaagggcgagggtgtcggcggcggtctgtcgaatgtgtgggaggagcttaagaaagactggcgcgaaaagggtttggacggtgtcttggaagatgtgggcgagatggggggtgcgacgctggagcaggcgcctaatgcgcttgttccgcttgctacgacaactgtcggcggtattttgggcactttggcgggcggtaacacggctgtcggtgcttatgcaggcgcgaccttgggcaatacgctgatggaatacggcgagcagctggacagggcggcagaggcggcgggcgtcgatcctacggacaaggatgcgatgatggcgtttatcgaccgcggtgcgccgggtgcgttgaaaaatgcggcggtcaagggcgcggtggtcggcgcggtggatatggcgacgatgaaacttggcggcagtattttgaatatgggcaagaaggccgccgagaaagccgcattgaagaaaatgggtgttgcggcggcggataaggcggcggttgcggcggctaagggaacgcctgaatttgcggcactggcgaaggagtctgccaagggcggtttgggcggtgcggcacggcacgcggcggcttttgcgctggaaccggccagtgagtttgcgggcgagtatttgggtacggggctggcaaacggggaatgggacgagaagggggcggctttggaggctttctcttctttggggcattctgcggtggagtttgtcggaacgaaggcttatgcggcgataagcgacccgcttaggttgtcggccgaacagaaggcggatgcgttggcggatgcgaaggggaatattgagggcaataggaaggcgggcaagctgaccccggaagaggcgcaggcgttaggtgcggcggtggaggcggctctggacggcggcgtggaacagggcggcgcgggttttgatacggcgcatcacgatcagttgtatctgactttgcagcagtttgtggaccgtacgaagcagaaggaggcggagcagtttttcaacagccctgccgacggcaatacgccccacgcggaggaattggcgcgcgagatggaaaaacagccggatgtttcgggtattccgtcggaggatgaggcggaatttttgaatacgggcgtaatgtcggatggtttggcgcgtcagtatgcggacatggcggccaaatatcgggctaagccgtcggaggcgatggggattgatccggatgacggtgcgatttctgcggccgctgctttggcggtggattcgggcgcggctgtgccgtctgtgccgtctgacgatgtggaaacgccgacggttgcggatgatgtgctgtccggacggtcggcggatgcggacaggggcggtgtttcgtccgcttacggtaatgtgcgttccggcggtgcggcttcggttgcgtcgggtggtgcgggacgttctgccgccgctgcttcgggcgggattgcgcgtgtcgcgccgctgcctgcgggtcaatatttcgacggtttggatactcgggggcgcaaggctttggcgaaggaggcgggctttgatattaagggcgttgcggatttcgggcaaatcgccgagcctgtgcgccaaaaaatcgaggaggcgtatcacgcgcggattgaggcggattatcaggcggcttctgaagccaaacaggggtatctgccgccgcccgtgcgtatggcggatgccgtgcctgttcctaaaaaagggttttccgtccctgccgatgcgttgaataaggaatcgcgtaggcggtttgacgcgctgccggaaacggtgcgccgtcatgcacagacggtggcggactatacggcggacgggattatgcgccaagaggcgggtatggcggatatgcgcggacattatcctgcgggtttggcggaatcggtcagggttgtacgcgcttaccgtgcggaacatccggaatcggcggatgtgttggacaggcttaaccgtgcggtttacggttaccgccgcaacaacggttggcgcgtgccgctgttgagccgtgagggggagcgtttgcaaggggttcggacggcgttgccggatgatggcgcgtctgaggctgttgttggcggcggcaggggtttaccccgggctttacccacggaagataagggtttggcgcaggatgtgcggcaggatgtgcggcagggtttgacccaaggcggcaggggtttgacccctgatacgggggcggatgcaaatgcggctgccttgcagggtttgcccgagtccgccgccgttgcgtccggcaatgcgccaacccatcggcaaaacttacaggttcgggcgcacgcggaaggtgccgcgcccggtctttccgcgtctgaaaaccttgccgaaacggacggcgggaaacgtgcgcctgttgcgggcaaacgccccgatacggtgttgccggtgctgaatccgcaggttgcggaatcggcagtcaaggtatcgcctaagaaacggatggcggatgcggcggcggattttacgcgccgtttggcggcggacaggcgcaagctggaaaaggcgggtgtgcctttgggggacggcgaataccgtttcgagcatacgaaccgtcagcatattgatgcgcttgcgggtgtgctggacaggctgggtaaaggcgggatgttggaggagtttgccgatatggccggttcttcccattctgacggccttgtcttcgacagccgccgttatttgaagggtaaggaggcggaaaccttgcaggcgggcggtttgttggaagccgtgccgtccaagtcgggttgggattatcgtctgacgcaggaaggaagggcgttggccaaggtgatggcgcggtcgcgcgatgccgctgcttctgccgggaaatcggcgggcaaggcgcagtctgcccgggcaaaagatacgcctgttgcaggcaaggcggccgttgcaaaaaatgcggcaaatgaaaagccgtcttcggataaggctgccaagcctgaaacgcttgtgaaaacggctttggacaatccgcaagaggcacgacgcaaggcgcgggtgttgcagggagagcctgtttataccgtgaaagagcgtaccgcgcccggggaaaacaaggcgttgcgcgagtgggcggtcgcgctgttcgataaggcgggcggaaaggcggttaatcctgaggcgggagaaatcctgttaaacgaacgttctgtccgtgattcgattgcacacggtatgaacccgtttaaggctgaagcgtttgccgcgattcccgatgtaatcagtcagggcgtggttatccacgagggcgtgaaccctgaaaacggtacgcgctatgtgtatatcagtgcgcctgtggaaatcgaggggaaagatgatgtggttacgctgcttgcccgaaataccggcaacggcagtcagatgtacctgcacagcgtggctacaaaagaaagtatcctgaatgccagtgataccgagacggctgaaatcagccgcgaaacggggaaggtcaattcaggatacattgccagtgtactcaaaaagctgctgaaatacaagacgcaaggcggtaaaacggaagacacgccgtctgaagggctaaggttcagccgttcggaacagacgaagtcggcgtttgaaaaccgtattgacgcgctgttcggtggtgcgaaggcaaatctaaagggcgtaagggttttggacaagtcagacctgctcgatatgttgggttatggtggtatgcctgttgaactcaatgaatccaaggttgtgctgaatcggaaaaaccatcctgaaatgacggcgcaacaatggaaaaaagttccaaaatggctggacaatcctgttgctgtactgaagtcgaaaacgcatgacaagcgtcttgtatttgtgcctgacgaactgatagacggtgcgcccgtgtatctggtggtagagccgaacagtcgtggcttggacattcacgttttagtcaacggatatgccaaagatggcaatccgcaacagactttccgcgacatttggcgcgatttggctaatggcaatacggaatttgtggacagtaaaaaggctcgtgaacttctcggtcgttcggggctccaattgccccgcctgccgagcttgaacacaagccgtaagaagattctaactgaaaagaatctgcaaggctacagaaaatctgaaaaaactgatacaggtcaacaacacgccgaaagcatcaaaaaacgccttgccgaaagtataggcagactggcggaacaggtggatgtcgccgccgtgtcggaaacagcgccggacaaggcgcagatgctgttgtcggagcgtgtggagggctggtttgacggcaggacgggcaaaattacgctggtggcggaaaaccttacgcccgaacgtgcggtatgggtggcttggcacgagctggggcacaggggctttgcggcggatggctttgccaagtaccgtgcggaattggaacgtgcggacggcaacagcctgattcggcgtattgcggatgcggtacaggaagagcgcgaaggtacgggcgatgcggcggcttcggtgcggtctgccgcggtggaagaggcggtcgtggagctttatgcggcgcagcgtaccggcgattggtcgggcattgaaaaccgttacggcgtgaaggtcggcaacggtttgaaacgcggcattgcgggcgtgttggcgcgtatcggcgcggtattgcgccgtgtgctgcaacggctggcgggtaaggccgacggcgcgatgtcggacgcggatgtgtttgcgatgctggcggatttgcacgggaatgcggaaggggcgcgggatgcatcttcggacggtgtgaagcctagcaggagcgcgatgaaggatacggacgcgaatatccggcgcggacgggcggcgatgaatcgggcgttggtggaaaaggcggatgtgcgccgtgcgatgtaccgcaacgacatcggttggattgatttcgtttggggcggtacgggcagggttttgccgaacggtaagactaagggcgcgatgggcttggcgcacgtgattgaaagccgtatgcgcaaagacgggatgggccgtgacgaagttgtggggatgttgactaatgatattgttgaagctatcgcacgaggcaaggtttacaaacacgttgttaacggtaattccgaacgtttgcagctacggcacaacggttatgaagcgaaccttattaaaaatgccggaaacaacgcttggttgattaccggctatgagctgtatcagaacggtgccgacggggtaggatttgatacctccgccgctacgcacaccacgcctacacctgcgcgtcgtgatgtgggagcgtctgatacgcctaatgtacgcgcgaaggatgaatctgtcaatacggcggacggcacacgcaacagccgggcggcggaacgttccaagtcggaaagccttgagaagctgcgccgtgcggaaaccatccgcatttcgggcagggagattgaggcgggtgatgatttgcgccagtatcgtcgccgtgcaatggagtatgggaaatcgttgcgcgggtcttatgtgaataaggacacggggcgtgaaatttcactcggacgggcgggcataacggaggtgttgcatcacgatgtcagtaaccctgaacatttgcaaagcatagccgccattccgcagattatcgagaagtcgatttatatcgatactttgccgaatgaagacaaagccaaaaatcccgatattcaagagtatgaatattatgttgcaggcttgaatatcggtgggactgattacacggtaaaagcggcaatcgccgttgcgacaacaggcgacaaatactatgaccataaattgacgagaatagaaaaaggcgaccttttggaaatgacctctcgcttatctagtgcggagatttccaatcaatcgcctttatcagatattgatgataaacgcctgttgcagattttgcaagataaagatgcgggcaagggcggcattgccgattttgatacggaggcggtgcgtttttcccgtgcggcgaacatcggggctgcaatcggtcatataacgggtaaaaaatccgatttgagaaacgcgctgaaagaccgctgggatgcttctaaggggattcagcttcagtttttgggcaggcggcagatcgaggacatttacggcggcgatttggacggcctgaaggaatacgggcgtttgtcggaacttttcggcgcggatgcgaacaaggcggttacggaggcggacaaggttgtcagggaatggggcaggttgaagaaggcggatgcgaaagcgcttgcggatctgatgcacgatgcgacgttggcgaaggtggatgccgacccgctgatgcgtggggatgctcagaagcgtttggacggtatccggacggctttggatattgcggacggtaaaatcgtgaaggcgcgggcggtcattgcttccgccgatgcgcgtatcgcccgtgcggatgctgcctacaataaggcttcggaggcggcgaagaaggctcagtcggctttgcttgccgctgaggagaaagccggacgtgagattttggcggatgaggcggatatgcgcctgcgccgtctgttttatgcggattcggaggcgaagcgggcgttgaggcacgctgaggcggatgtgatggcggaaagccgggctaaaacggatgcggtgcagatgttgaagcaggcgcgcgcggatgtgcggcgtttggaaaaggatgaggttggggcgcaaaaggctttggaggggcttgctttgttgaaccgccgttttgccaagctgccggatgcggcgcagagggtgtaccgcaaggcgcgggatgattatagggcgcatttcgggcaggtgcgcgatgcgcttgccgaacggttggcgcgttcggggcaggatgcggaaattgtgcgccgcctgaaggagcgttttgataatgagttgggcggtgtgtatttccctttggcgcgtttcggcgattatttggtggtggttaaggatgcggacgggaatagtgtgaatgtgtcccgcgcggaaactttgagtgaggcggaaaagctgcgcgatgcgctgaaggctgatttcggggcggggtttaaggtttcgcctgtgatgaagtctcgggattatatccaaagccgtgatgcggtaagcggtggatttatgaaggagctgggcgaggcggtcggtatgttggatttggaccctgcgcaacaggctcaattgaatgatacgctgacgcagctttatttgaactccctgcctgatacgtcttgggcgaaacatggtattcaccgcaagggcgtgccgggcttcggtgatgatgcgagacgcgcatatgcgcagaatatgggcagcggtgcgaattatctggcgaagttgcgctatgcggaccgtatggcggaacagttggatgtgatgcaggattttgtggacgggcgcaaatatgtggagggtttcaaccagcgtcagttgcagcgtgtggcggatgagatgaggaaacgccacgaggcggtgatgaatccgaatccttccaagctggcgcaggctttaactggcttcggctttttgtggatgatggggatgtcgccagctttggcgattgtgaacctgtcacagacggcgatggtggcttatccggtgatggcggcgaagtggggttatgccgatgcggcgcgggaattgctgcgggcttcaaaacagatcgggctgaaggtcggggagaagttcaatacgattgaggatagtctgaacgaggatgagaaggcggcgttccaaaaggcggtggattatggtgtgattgatttgtcgcaggcgcatgatttggcgggtgtggcaaacggcgacccgggattggcggggtcggcttggcagaaggtaatggataaggcaagctggctgttccatcatacggagaagtttaaccgtcaggttacgtttgtcgcggcctaccgtttggcgaagcgggcgggggcggacagcgatacggcttttgaacaggcgaaaaaggcgacgtatgacgggcactttgattatgcggcgcaaaaccgtccgcgctttatgatgggcaatgtggcgaaggtggtctttctgtttaagcagtattcgcagaatatcctgtatgcgctggggcgcaatgcttatcttgcgtttaagggcgataaggaggcgcgtaagacgctggcggggctgttggtttcgcatgcgatggcttcgggcatcttggggttgccgtttgtgtcgacgttgcttgcggtagcttcgatgttgggcagtgatgacgatgatccgtgggatgcggaagcggcgttgcgcaatatgttggcggacactttcggggataaggcgggtgaggtgatggccaaggggttcagccgcctgacgccgctggacgtgtcggggcgtttgggtttgaaccagttgattttccctgatattcaagatggtttggcgggtaagaagtgggcggaatcgttggtggtcggcagtacgggcgcggtggtcggtgcgggtatcggtgcggcggacggtgtgcagaagattttggacggccggtatatggagggcttggagtcgatgctgcctgttgccatccgtaatcctttgaaggcggtgcgttatgcgacggatggtcaggtggataagtcgggcattacggtcaaggatgattttaatctgtttgagctggcgggtcaggcggcgggtttccgttcttcggatttggctttgaaacaggagggtaagtctgccgtctatcggcgcgaccgtgctttgtcggcggcaagggcgaaaatcttgtcggcgatggctaaggcggtggtggaacaggacgcggcggctttgcgagagttgcgcggcgtggtggcgcagtggaacaggaagcatccggagcgtgccattaagtcggaaaacattatgtcaagtgtgagaaaccggcaacggcgcgttgcgggggcgaaagacggcatctatttgtcggacaagcactcggatgcgcggacggacggcggatttgccttcgggcattga

SEQ ID NO: 62679 - DNA, 654 bp, Neisseria meningitidis; identical to SEQ ID NO: 44597

SEQ ID NO: 62680 - DNA, 1194 bp, Neisseria meningitidis
atgtctgatcaaaaaaaccgcagaaatgccttaatcggcgctgcattcctgatggcgacttccgccatcggcccgggctttctgacccaaaccgccaccttcacccaagcactggcggcaagtttcggctttgtgattctgctctcgattctgctcgacatcggggcgcagctcaatatttggcggattgtcgccgtttccgaaaaacaggcgcaggatattgccaatcaggtcttgcccggcgcaggctatttcttggctgtgctgattgtgatgggcggtttggcgttcaatattggcaacgtcggcggcgcaggcttgggtctgaacctgctgaccggactgtcgccggaaaccggtgccgtgatcagcggcgtgattgccatcggtgtgtttctgtttaaagaagcaggcaaagtgatggacaaattcgcccaagtgatgggtttcgtaatgattgcgctgacggtttatgtggcatggcaggcgaatccgccgctggcagatgccgccgtgcatacctttatgccggaaaaactcgatgcaatggcgattgttacactggtgggcggcacggtcggcggctacatcaccttcgccggtgcgcaccgtctgctggacgcaggtatcaaaggcaaatcggcgttgccggaagtgagccaaagctcggtgcgggcgatcctgattgcctcgattatgcggattgtattgtttttggcggttttgggcgtggtcagccaaggcgtacagctcaatcccgacaaccctgcttccacaccgtttgaatatgcggcgggatacatcggcctgctgattttcggcgtggtgatttgggcggcttcgattacttcggtgattggtgcggcttatacttcggtgtcgttcttctccggtctcagcccgtctatcgaacgcaataaaaacaaatggattattgcctttatcgccgtgtccaccgccgtattttccaccatcggcaaaccggcgcaggtgctggtgttcgtaggcgcattaaacggcctgattttaccgatttccctcggtctgattctgattgccgcctacaaaaccaaaattgtcggcgactacaaacacccgctgtggctcaccgtttccggcgtgattgtggtcggtttgatggcagtactcagcgccatcaccatcagcaaatatatcggcggcttgttcggctga

SEQ ID NO: 62681 - DNA, 720 bp, Neisseria meningitidis
atgacacagcaaatcaaatacaaacgcgtattactgaaactctccggcgaatccctgatgggttccgatccgttcggcatcaatcacgacaccatcgtccaaaccgtcggcgaaattgccgaagtcgttaaaatgggcgtacaggtcggcatcgtcgtgggcggcggcaatattttccggggcgtatccgcccaagcaggcagcatggaccgcgccactgccgattacatgggtatgatggcgaccgtgatgaacgccttggcactcaaagacgcatttgaaactttaggcatcaaagcgcgcgtacaatccgcactgtctatgcagcaaatcgctgaaacttacgcccgtcctaaagccatccaatatttggaagaaggcaaagtcgtgatttttgccgccggtaccggtaatccgttcttcacgaccgacactgccgccgcattgcgcggtgcagaaatgaactgcgacgtgatgctcaaagccaccaacgttgacggtgtgtacaccgcagacccgaaaaaagacccatctgcaacacgctacgaaaccattacttttgacgaagccttgttgaaaaaccttaaagtgatggatgccaccgctttcgccctctgccgcgaacgcaagctcaatatcgtcgtcttcggcatcgccaaagaaggctcgctcaaacgcgtcattaccagcgaagacgagggaacgctggttcactgctga

SEQ ID NO: 62682 - DNA, 696 bp, Neisseria meningitidis
atgaaagcgatgatactggcggcaggacgcggcgagcgtatgcgccctttgaccgataccactccgaagccgctgcttgatgtggcgggtaagcctctaatcggttggcacctatgccgtctgaagcaggcggggtttaccgaaatcgtcatcaaccacgcttggctgggtcggcagatagaagatgctttgggcgacggctcggcttatggcgtgaacatcgcctattcgcccgaacccgcaggcggtttggaaacggcaggcggcatcgcgcaggcattgccgctgttgggtgggcagccgtttttggtggtcaacggcgacgtgttgaccgacatcgattttaccgccgcgtttcaggcggcatcgtccctgcccgagcacatttccgcccatctgtggctggcggacaatccgccgcacaactccgacggcgatttttccctgctgcccgacggcagcgtgcggccggaagtaaatggcggcaacggattgacatttagcggcgtgggtatttaccgtcctgaaatgtttgacggaatcgaagcgggcagtgtggcgaaactcgcgcccgtattgcggaacgaaatgcggcaaaaccgcgtgagcggacagaagcatacgggcttgtggctggatgtcggcacggtatgccgtctgaaagaggctcaagcccttgcaggggcttggaagtga

SEQ ID NO: 62683 - DNA, 1302 bp, Neisseria meningitidis
atgccgtctgaaaccgcccgccccctttatgcggacacgtgcgccgcacacacgctcgtctggttccgccaaaacctccgcatccgcgacaacgccgccttatgcgccgccgttgccgaaggtttgcccattatcggcatttggattgacgatgccgaaacagacaaccctcgccgcgccgcgttctaccgccaatccgccgccgaactcgcccaagggcttgcagggcgcggcatcccgctctacacggcggcatcgcctgccgagctcgtccggctcgccgtccgcctcaatatccgcgccgtcatcgccgacgaatcccatacttttgccgacaaactcgccgacaacgccctttggcatgaattgaacaaacacggcatcgcgttaaccttcgtcaatgaccgcgccgttttcggcaaaaccgacctgatacccgacggcggcacggcacacaccgatttcgaccgctaccgcgaagtatggctcgaccgcttttccaagcagccccccgccggtccggacctattcgcggcataccgccaacccttccccgaaaacctttccgccccgccgcctgccgccctttcagacggcatcttcctgccgcaaaacagcggcgaaacggcggcttggcggcagtggcggcggtttctcgaacaggcggattcctactccgttttaaaggatttcccctcgcgcaaacacacttcgctgatgggcgcgtatttgagtgccggctgcatctcgccgcgcctgctcgcgcgggaaagcctcgaacgccgtctgaacgcgtgggcggacaacatcatccgccgcgattttttccttcaacttgccttgcagcacacggatgacgacccttcagacggcaatcctgaacacaccctgcgcctgacgctttggcagcagggccagaccggcattccgattatcgatgccgcgatgcgctgtttgcacaaaaccggcagcctccaccccgccctgagacgcttgagcgcggattttttctgccacgttttaaacctcccccgccgcgaaggcgagatatggtttgcccggcagctgaccgatttcgatgcggcaatcaaccaaggcaactggtggcttgccgcctcacggcacacctgccccgacattgccgccgcctcataccgtaccgacccggacggtacttttatcaaacggcacattcccgaactcgcccacctgtccgccgacaccgtccacacgccttggcggtttgcctgttcggtcgatacccacggctatcccgcccatcctgtcgccggtattccctaa

SEQ ID NO: 62684 - DNA, 564 bp, Neisseria meningitidis
atgcaggataaaaacaacctatgctggctcgatatggaaatgacggggcttaatcccgaaaccgaccgcattatcgaagtcgcgatgattattaccgactcggatttgaatgtattggcgcaatccgaagtttacgccatccaccaaagtgacgagctgctcgacaatatggacgagtggaacaccgccacacacggcaggacggggctgacgcagcgcgtacgcgaatcgtcgcataccgaagccgaagtcgaacagaaactgctggactttatgtcggaatgggtacccggacgcgccacgccgatgtgcggcaactccatccaccaagaccggcgttttatggtcaaatatatgccgaaactggaaaactacttccactaccgcaacctcgacgtttccacgctcaaagagcttgccaaacgctggaatccgtccgttgccaaaagcgtcgtcaaacgcggttcgcacaaggcattggacgacattttggagagcatcgaagaaatgcgccactaccgcgaacactttctgatttccgccccgagagccgaagcgcaataa

SEQ ID NO: 62685 - DNA, 1314 bp, Neisseria meningitidis; identical to SEQ ID NO: 49113

SEQ ID NO: 62686 - DNA, 381 bp, Neisseria meningitidis
atggtcatttgtttgcaaaatgattacgccgatgttttacagaaaaacggctatacctatatgggtgcagacggcaaaacttataacagcggatcctactcaatcgtgcatgataaagattttgtggggaacaaatggatacctttcttgctaggaaccaatgacaccacacaaggtacatgtaaggggttgtgctattcgcatagcagttattttgcggaggtgccaaaagcaggtacaaaagaatttgatgactatgtaaaaatatggggtgaagttgaatatgacgctcaaagtaagccaattaacaaatctaaacccatactggtagaaccaaacaaaacaaaagataatgaaaaatatgaaaaagaagctttctaa

SEQ ID NO: 62687 - DNA, 348 bp, Neisseria meningitidis
atgcgcctaaaccacaaacagggcgaggcaggggaagatgccgcgctcgccttcctccaatcccaaggctgcacactgcttgcccgcaactggcactgcgcctacggcgaaatcgacctgattgtcaaaaacggcggcatgattctgtttgttgaagtaaaataccgcaaaaatcggcaattcggcggtgccgcatacagcatttccccatacaaattattgaaactgcaacgaagtgtagagtattatctgcaacagaacaggctgacaaacgtaccgtgccgcctcgacgcggtactcatcgaaggcagccgcccgcccgagtggatacagaatattacaggttga

SEQ ID NO: 62688 - DNA, 492 bp, Neisseria meningitidis
atgagtaccgaaaccaaaaactacattacgcccgccggatggcaggcattgaaagacgagctttatcaactggttaataaagaacgccccgaaatcgtccaaatcgtcaactgggcggcaggcaacggcgaccgcagcgaaaacggcgactatctttacggcaaacgccgtatgcgcgaaatcgaccgccgcatccgtttcctgaccaagcgtttggagtccgccgtcgtcgtcgatcccgaattgcgcgaagcgaccgaccaagtatttttcggcgcgacggtcgggctgttgcgcggcgacgggcgcgagcaaaccgtcaaaattgtcggcatcgatgaaatcgataccgcgcaaaacaaaatttcttggatttcgccgttggctcgttgcctgattaaagcacgcgaaggcgacgaagtggttttgaacacgccggaagggcgtgaggaaattgaaatcctttctgtcgaatacatcaaaatcgactga

SEQ ID NO: 62689 - DNA, 555 bp, Neisseria meningitidis
atgaaaaaaatcatcgcctccgcgcttatcgcaacattcgcactcgccgcctgccaagacgacacgcaggcgcggctcgaacagcagcagaaacagattgaagccctgcaacagcagctcgcacagcaggcagacgatacggtttaccaactgactcccgaagcagtcaaagacaccattcctgccgaagcacaggcaaacggcaataacgggcaacccgttaccggtaaagacgggcagcagtatatttacgaccaatcgacaggaagctggctgctgcaaagcctggtcggcgcggcggcaggcgcgtttatcggcaacgcgctggcaaacaaattcacacgggcaggcaaccaagacagtcccgtcgcccgacgcgcgcgtgcagcctaccatcagtccgcacatcccaatgcgcgcaccagcagggatttgaacacgcgcagcctccgtgcaaaacaacaggcggcgcaggcgcagcgttaccgcccgacaacgcgcccgcccgccaattaccgccgccccgctatgcgcggtttcggcaggaggcggtaa

SEQ ID NO: 62690 - DNA, 1092 bp, Neisseria meningitidis
ttgtatctgtatgtcaatacgggcggcgggaagttatggcggtttgacttttcgcataacggcaaacgtaaaacgctttcaatcggcaaatatccgaccgtatcactggtggaagcccgccaaaccgctgaaaatgcccgccgcttgcttgcagcggggcaagaccccggcgaagccaagcagcaggaaaagcgtgaacggcaagccgctgtcagtaacacatttcggagcattgccgccgaatggcacaaacaccgtgaaacaggattgacgggcaatcatgccgcccgtgtatgggatagtttaaaaaaggacgttttccccatgcttggtggtttgcctgtcagtgaaatcaaagtcagccaagtaaaagaagtgattgaagcggtagcggcaagaggagcacttgaaacggcagggcggatattgcagcgtatcaaggctgttttcacttatgccatacagacggagcgggcagagaataatcccgccgtccctttggtaggtttaattaaagcaccaaagcagaaacaccagcccgcattaccgcaatccgagctgaccgagttttaccgccgtttgatgttggaacaagccgaacggcaaacaaaaatagccatgcagttaatcatgctgacttttgtcaggaatggagagcttagggcggcggaatgggtggaatttgatttaaacggggcagaatggagcatacctgccgccaagatgaagatgaaagccccgcatatcgtcccccttgctgattggacgcttgagcttttggcagaactaaaggaaataacagggcatagccgctatttattcccatcggtaaaagaccctgataagcacatgagtgaaaacatcctgtcttacttaatgggcagaatgggctacaagggcatagcaacaccgcacggctttagaagcctagccacagatgttttgaatgagaacggctttgacagcgatgtgatagagcgacagcttgcccatgtggaacaaaacaaagtcagggcggcataccacagaacggaatatatcccacagcgtaaagagcttatgcaatggtatagtgattgtttgcgggagtga

SEQ ID NO: 62691 - DNA, 1305 bp, Neisseria meningitidis
atgaaaaaacacatatgggcggcatctttgctgccggcatccctatcggcagaacctttaaactggtggaagccttattccgccgtcaattcgggcgataccgcctgggtgatgactgcggctgccttggtactgttgatgacgcttcccgggctggctttattctacggcggtatggtgcggaaaaaaaacctgctctcgacgatgatgcacagcttttccatcgcgacattggtgggaatcctttgggtcgccgtcggctattctttagcgttcacgccgggaaatgcctttatcggcggtttggggcgcgtatttttaagcgggatgcagatagacgctgccgcacagatgctgaccgtgtcgcccaatgcgccgactgttcccgaaccggtatttatgttttttcagatgacgtttgccattatttcgaccgccattattactggcgcgtttgccgaacggatgaaatattcggcaatgatgctgttttcgggcatatggtttttattggtttatgtgccgggagcgcattgggtgtggggcggcggctttatgagcaagggcggcgtattggattatgccggcggtacggtggtgcacatcaatgccggtatcgcgggactcgtcgccgccttggttttgggcaggcgcataggctacgggcgcgaggcgatgcctccgcacaatatggcgatgacactgatcggcgcggcaatgttgtggttcggctggttcggctttaacgccggatcggcgcttgcggcagacgcggcggcgggtatggcgatggcggtaacgcaggtgtcggccgtattcggcgcggcaggctggcttgcctgcgaaaaaatagcgggacacaaaccttccgctttggggctggcttccggcgcggtttccggtctggtcggcatcacccctgccgccggctttaccggcccgtcgggcgcggccgccatcggtatattgactgccgccgcgtgctttgtgtccgtcaccgtcgtcaaacacaaattgcgttacgatgattctttggacgctttcggcatacacggattcggcgggctggtgggcggaatattgaccggcatctttttcgacaaccgcattttcggcggggatgcggcagtttggcagcagttgtggatacaggtaaaagacgggttcgttatggcggcatacagcgggctgatgagttgggcgattttgaaggtcgtggggaaaatctgcggcggcctgcgcgtcggcaaggatgtcgaacgcgaaggtttggatctgaatatccacggcgaacgcgtggaataa

SEQ ID NO: 62692 - DNA, 267 bp, Neisseria meningitidis
atgaatcaagctgttgcacaatttgctcctttagtgttgattatggtggtgttctacttcctgatcatgcgtccgcagcaaaagaaattcaaagcgcatcaggcaatgcttgccgctttgaaagtcggcgacaaagtggtcttggcggcaggtttcaagggtaaggtaaccagagtcggcgaacagttttttaccgtggatatcggacagggtacaaaaatcgaggtcgaagtagaacgcaatgcgattgccgcaaaagtcgattga

SEQ ID NO: 62693 - DNA, 825 bp, Neisseria meningitidis
atgttgaaaaaattcgtactcggcggcattgccgcattggttttggcggcctgcggcggttcggaaagcggcagcggagcatcttccgcgcctgcacaatcggcagtttccggttctttaatcgagcgcatcaacaataaaggcacggttaccgtcggcacggaaggcacttacgcaccgtttacctaccacgacaaggacggcaaactgaccggttacgatgtggaagtaacccgcgccgtggcggaaaaactgggcgtgaaagtcgagtttaaagaaacgcaatgggattcgatgatggcgggtttgaaggcggggcgtttcgacgtggtggcaaaccaagtcggtctgaccagccccgaacgccaagcgacattcgacaaatccgatccttacagctggagcggtgccgtattggttgcccgtaacgacagcaacatcaaatctatcgacgacatcaaaggcgtgaaaaccgcacaatccctgaccagcaactacggcgaaaaagccaaagctgcaggcgcagatttggtggctgttgacggtttggcgcaatcgctgaccctgattgaacaaaaacgtgccgatgcaaccctgaacgacgaattggcggttttggactatctgaagaaaaacccgaatgcgggcgtgaaaatcgtttggtccgcacctgccgatgaaaaagtcggttccggcctgattgtcaacaagggcaatgacgaagccgtggcgaaattcagtacggcaatcaacgagctgaaagccgacggtacgctgaaaaaactgggcgaacaattcttcggaaaagacatcagtgttcaataa

SEQ ID NO: 62694 - DNA, 1458 bp, Neisseria meningitidis
atgtcccggcatcccgcccccaccggagaaaaaacattcttcggccaccccttccagctttccaccctcttccatatcgaattgtgggaacgtttttcattttacggaatgcagggcatcctgctgatttacctctactacaccgccgacaaaggcggcttgggcatagacaaaaccctcgccggcggcattgtcggcgcatacagcggcagcgtgtacctgtccaccattttgggggcgtggtttgccgaccgagtatggggtgcggaaaaaaccctcttcctctcgggcatcgtcgtgatgctcggacacatcgtccttgccgccgccccgggcctgtacggccttttaatcgggctgatattcatcgcattgggcagcggcggcgtgaaatctacggccagttctatggtgggcgcattatacgaacaggacgaaatgcgcccgctgcgcgatgcgggattttccattttctacatcgccatcaatatcggcggcttcctaggcccgctgctgaccggcctgctgcaggaaaacatcggtttccattatggtttcggcgcggcggcggtcggtatggcattcggcttgtggcgttattccttgggacgtaaaaacctgccccatcccatcgtcccccatccgctttcaaaaggacagggcaaaactgcggccgccgtcggcattgctctcatcgccgcacttgcaaccgccatcaaaaccgggcttgtcaacctcgacaatttctccggcatcctcttatctaccgtcatccttgccgtcattgcctattttgcccgcctgctgactaatccccgcgtcagttccgacaacaaacggcacatcatcgcctacatcccgcttttcctgaccatctgtatgttttgggccgtctggtttcagatttacaccgtagcaaccgtctatttcgacgaaaccgtcaaccgcaccatcggttcgtttaccgtgcccgtcgcctggaaagattccatgcaaagcctgtgggtcatcctgttttccggactgatggcggcaatgtggacaaaaatggggcgcaaacagcccaaaaccccgctgaaattcgctatggcggtatttgttaccggcgcgtcgtttttgggattcgtcccctttatttccgccggcacgccgatgcctattgcggttttcgcactgatcgtcctcgccatcacgataggcgaactgatgatttccccgattgcgctgtccatctccaccaaaatcgcaccgcctttattcaaaacccaaatggtcgcccttaatttccttgccttttcattaggcttcactttgggcggcgtattgtttgaaaaaggctatcaggcgggcgacgaaatcggcttctaccggctgctgttctacatcggcgcagccacaggcttcctgctgctcctgctcgtccccaaattgaacaaaatgctcgaaggcacagactaa

SEQ ID NO: 62695 - DNA, 690 bp, Neisseria meningitidis
gtgcaggcggatttagcctacgccgccgaacgcattacccacaattatccggaaccaaccggtgcagacaaagacaaaataagcacagtaagcgattatttcagaaacatccgtgcgcattccatccacccccgggtgtcggtcggctacgacttcggcggctggagaatagcggcagattatgccagttacagaaaatggaaagaaagtaattcttctactaaaaaagttactgaagagataaacaacaactacaaagaaacccaaacaaaacatcagggaaacggcagcttccacgccgcttcttctctcggcttatccgccatttacgatttcaaactcaacgataaattcgataaattcaaaccctatatcggcgcgcgcgtcgcctacggacacgttaaacatcaggttcattcagtggaaagcaaaaacacgattgttacctctaaaccaacgcaaggcgctgcacagggaggtcctgtcccaacaggttttgtccccaaatctgcctatcacgaaagccacagcatcagcagcttgggtcttggtgtcatcgccggtgtcggtttcgacatcacgcccaagctgaccttggacaccggataccgttaccacaactggggacgcttggaaaacacccgcttcaaaacccacgaagtctcattgggcatgcgctaccgcttctga

SEQ ID NO: 62696 - DNA, 2076 bp, Neisseria meningitidis
atgctgtgcgtgttggcgggcgcggcttacggcgtattcaggacggaggcggcattgtcttcccaatggtgggcagaagccgtttcaggcgtgcctttgacggtggaagtggcggatatgccgaggtcggacgggcggcgtgtgcagtttgcggcaaaggctgtggacagcggtggtcggacgtttgatttgctgctgtcggactacaaacggcgcgaatgggcggtcgggagcagatggcggataacggcacgtgtgcaccctgtcgtcggggagttgaacctgcgcggtttgaaccgtgaggcgtgggcattatccaacggaataggcggcgcggggacggtcggtgcggacagggttttgctgcatggcggaagcggttgggggattgcggtttggcgcagccgcatcagccgtaattggcagcaggcggatgcggacggcgggctttcagacggcatcgggctgatgcgcgcgttgagcgtgggcgaacagtcggcattgcgccccgaattgtggcaggcgttccggccgttggggctgacgcatttggtcagtatttcgggtttgcacgttacgatggtggcggtaatgtttgcgtggctggcgaagcggctgcttgcctgttccccgcgccttcctgcccggccgcgcgcgtgggttttggcggcggggtgtgcaggcgcgctgttttacgcgctgcttgccggtttttccgtgccgacgcagcgcagcgttttgatgttggcggcgtttgcgtgggcttggcgcaggggaagattgtcggcgtgggcgacgtggtggcaggcgttggcggcggtgctgctgttcgacccgtcggcggtcttgggtgtggggacttggctgtctttcggtttggtggcggccctgatatgggcgtgctcggggcgtttgcacgagggaaaacggcaaactgctttgcgcgggcagtgggcggcttcggtgttgtcgctggttttgctcggttatctgtttgcttcgctgcctttggtcagccctttggtcaatgcggtggcaattccgtggttttcttgggtattgacgccgctggcgttgctgggttcggtcgtgccgtttgcgcctttgcaacagttgggggcatttttggcggaatatactttgcggtttttggtgtggcttgccgatgtgtcgcccgagtttgccgttgcctccgcacctttgccgctgttggtgttggcggtgtgtgccgctttgctgttgctgctgccgcgcggcttgggtttgcgtccgtgggcggtgttgctgttggcagggtttgtgttttaccgttcacccggcgtgccggaaaatgaggttgcggttacggtttgggatgcggggcagggtttgtcggtgtcggttcagacggcaaatcatcatcttttgtttgacaccggaacggcagcggcggcgcagatggggattgtgccgagtttgaatgcggcgggtgtccgccgtttggacaagctggttctgtcgcatcacgacagcgaccacgacggcggttttcaggcagtcggcaagataccgaacggcgggatttatgccggacagccggaattttatgagggggcgcggcattgtgcggaacagcgttggcaatgggacggcgtggattttgagtttttgatgccgtctgaacgcaaaaacatcgatgataatgggaaaagttgtgttttgcgtgttgtggcgggcggtgcggcactgctggtaacgggcgatttggatacgaagggcgaggaaagcctggtcggcaagtatggaggcaacctgtacagccaggttttggttttgggacatcacggcagcaatacgtcctcgtcgggcgtgttcctcaatgccgtctcgcccgaatatgccgttgcttcaagcggttatgccaacgcctacaaacatccgaccgaagcggtgcagaaccgtgtccgcgcacacggcatcaaattgctgcgtaccgatttgtcgggcgcactgcaattcggcttgggacgcggcggcgtgaaggctcaacgtttgagagggtataaattctattggcagaaaaaaccgtttgaatga

SEQ ID NO: 62697 - DNA, 1479 bp, Neisseria meningitidis
atgttcagcaagttaacccctttggctgaaaccggcatcccgaccctgtcgtgtgcaaacgcggcagggcgtttgttgcattcagacagccgccaaatcaaacaaggcgatattttcgttgcctgtccgggcgaatatgccgacggacgcagttatatccccgccgccgttgccaacggcgcggcttttgttttttgggacgacgacggcaaattcgcgtggaatcccgaatggaaagtccccaatcaaggcatcaaagatttgaaacaccgtgccggcatattggcggcgcaagtttacggcaacgtttcagacggtctcaaattctggggcgtaaccggaaccaacggcaaaacctccatcacgcaatggctggcgcaagctgccgatttgttgggcgaaaaaaccgccattgtcggcacggtcggcaacggcttttggggtgcattggaagaaaccacgcataccacacccgcccccgtcgatgtccaaaccctgctctaccgtttccgtcaacaaggcgcaacagccgccgcgatggaagtctccagccacgggcttgaccagtcgcgcgtcaacggcgtgtcattccgcagcgcaatctttaccaacctcacccgcgaccacctcgactaccacggcacgatggaagcctatggcgccatcaagtcgcgcctgttttactggcatggcttgaaacacgccgttatcaatgtagatgacgaatacggcgcggaactcgtaggtcgtctgaaaaaagactgtcccgatttggccgtttacagctacggcttcagcgaacacgccgacatccgcattaccgactttaccgcctcttcagacggcatagcagccgtattccaaaccccgtggggcgaagggaaatgccgcacgcgcctgctcggacggttcaacgcgcaaaacctcgccgcctgcatcgccttgctgtgcgccaacggctatccgcttgataatgtattggatgtgctggcaaaaatccgtcccgcttcagggcgcatggactgcatcatgaacagcggcaaacctttggtcgttgtcgattatgcccatacgcccgacgcattggaaaaagcactcgccaccttgcaggaaatcaaaccgcagggtgcggctttgtggtgcgtattcggttgcggcggcaaccgcgatcgcggcaaacgcccgctgatgggcgcggcagccgtacagggcgcggataaagtcgtcgtcaccagcgacaatccgcgtttggaaaatccgcacgacatcatcaacgacatcctgcctgccgttcccgcgcccgaatgcgtcgaagccgaccgtgccgccgccatccgttatgcggttgaacaagccgccgcaaacgacatcatcctgattgccggcaaagggcatgaaaactatcaggatgtacaaggcgtgaagcaccgtttttccgatcttgaaatcgtcggacaggctttgttaactcgtaaataa

SEQ ID NO: 62698 - DNA, 654 bp, Neisseria meningitidis
atgaaagccgtatttgtcgaactgccgccgtttgaacgtttccgtgctgactacttcagcagtgaggaataccgcgcctttcaaaatgaattaatagcaaatcccgaaaaaggcgatgtaatacaagggacgggcggtctgcgtaaaatccgcgttgccgattccaagcgcggcaagggcaagcggggcggctctagggttatctactattgggcggtcagccgtgccgttttccttttgttcactgtttacggcaaaaacgttaaagatgatttgtctccaagtgaaaaaagatactttccgccatgcttcataacctcaaggaaaataaccatgtctgaacgcaatttgtttgaagaactgaaagagggcttggaagccgccgaacaatatttgcaagggaaaatcacattgcgggcaatagaagcggaaatacccgaaaacggggcggctgccatttctcctgaagaaatacgcgccattcgcgaaagcctgaatttctcccaagcggtctttgcccgcaaactccgttgctccgtccgtacatatcagggctgggaacaggggaaaacgcgcccgaacccccaagccgccttattgctgcgtatggtgcaaaaatcgcctaaaacgtttaagacgattgccgcgctatga

SEQ ID NO: 62699 - DNA, 1842 bp, Neisseria meningitidis
atgcagacaaattatttgtctgaaacggattcgattatgaaaaaactgatttgcctgttcgccgtatttttgatgttgtgcggacgagctttcgcgctggatgcgaacgatctgctgccgccggaaaaggcattcgtgccggagcttgccgttgccgacgacggtgtgaacgtccgtttcaggattgccgacggatactatatgtatcaggcgaaaatcgtcggcaagaccaatccggcggatttgttgggacagccttctttcagcaagggcgaagagaaggaagacgagtttttcggcaggcagacggtttaccatcacgaagcgcaggttgcctttccttatgcaaaggctgtcggcgaaccgtataaattggttttgacctatcagggctgtgccgaagccggcgtgtgctatccgcccgtggataccgagtttgatattttcggcaacggcacttaccatccgcaaaccgacgaaccggcatccgccaaagaccgctttttgcagccttcctctcaaaacggcagcggggcgctgccgcccccgaagggggatgagggcggcgacagccgtttcaagctgtcttgggatacgctcaacgccaatcttttggcgttttttctcgccggtttgggtctgagttttaccgcctgtatgtatcccctgttgccgattgtttccagtattgtggtcggtgacaaaaaggcgggcaaggcgcgggcgtttgtgctgtccgtcgtttatgttcagggtttgtctctgacttatacgctggtcggcattgttgccggactgacgggcgcgctgctgaccgtatggttgcagcaggcttgggtggtgttggcggcatcggctttaatggtcgtcttggcactgtctatgttcgggctgttcaacatccagcttcccaacgccgtgcagtcgtattttcagaatcaaagcagcaggctttcaggcggtaaaatcgtttccgtctttattatgggcatattgtccgcgctgattgtcgggccgtgtgtcgccccgccgctggcatttgctttgggctacatcggtcagacgggcgatgcggttttaggcggtttggcactttacactttggcgttgggcaccggcgttccgctgattgccatcggcacgttcggcgggcatatcctgcctagggcaggcgattggatgaatgccgtcaaatacgctttcggctttatcctgcttgccgtcgccgtttacctcgccacgccgcacttgccctattatctcgtcgtcgcgctgtacacgctgctgatgctggttcctgcctgtatgctgctggtcaacggacgcaggcagaaacgccgtccgaaagctgtggcattcgcattgggcggcatattgctgataggcggcgcgtggttcggctggcagggcgcaaacggcaaaacgaccgcgctgcaccatttcctgaccctcaatccgccggccgaagcaggcaaatcttcggaacacggaaaaatgtttgccgatactgccgcgctgaaggcagcgatggatacggcgttgaaagaacatcccgacaaacccgtcgttttggatttttatgccgactggtgcatttcctgcaaagaaatggcggcttacacgctcaatcagccggaagtgcatcaggcggttgatatggaacgctttttccaaatcgacgtaaccgccaacatgcccgaacatcaggcgttgttgaaagaatacggtctgttcgggccgccgggcgtgtttgtcgtccgctccgacggcagccgcagcgagccgctgctgggttttgtcaaagcagacaagtttatcgagtggtatgaacaaaaccgctga

SEQ ID NO: 62700 - DNA, 945 bp, Neisseria meningitidis
atgtctgcatctaagaaatttccgattcctttgagctatttcagcatcgcgctgggcttgtttgccttggggctgtcgtggcgttacggcgcgtctgtcgggctgctgcccgccttggccgccgaatcgctgcttgcggcggcttcggtcgtctggctcttgctggtggcggcatacctgatcaaaatgtttgcgtaccgaaacgattttttgtctgatttgcgcgacttggtgcaatgctgcttcatcagcgcgattccgattaccgctatgctggagggactcgcgctgaagccctatcaggcaggcgcggcggcagtcctgatttatgccggcgttgccggacagttggcgttttcgatgtatcgggcggccggtctgtggcgcggcctgcattccttggaggcgacgacgccgattatttatctgcctacggttgcgacaaactttgtcagcgcgtcatctctggccgcgttggggcatcatgattatgcagctttgtttttcggcgcgggtatgttttcctggctgagcttggaagcctccatcttgggcaggctgcgcacggcggcaccggtcggcacggcggcgcgcggcgtggtcggcatccagcttgcgcccgcctttgtcggctgcggcgcgtattttgccgtcggcggtaaagtcgacggttttgcgttggcattaatcggctacggctgcctgcagcttttgttcttgctgcgcctgacccgctggttttgggaaggcggttttacgatgagcttttggggattttcattcggtttcgcggcaatggcaggatgcggtctgcatctggcggcttctggcgtattgtcgggcttggggctgacgcttgccaccgccggatcggcaggcgtggcgctgctgcttgtcggtacgctgcaccggatagcgacggggcgtttcttggtacgcggctga

SEQ ID NO: 62701 - DNA, 1302 bp, Neisseria meningitidis
atgccgtctgaacatcaacatacatcatcattgcttgatttcgaccgtacccatctgcttcatccctatacttccatgaccgatccgcttcccgtttatcctgtcaaacgtgcagaaggggtgtttatcgaattggcggacggcacgcggctgattgacgggatgtcgtcttggtggtgtgcgatacacggttacaatcatcccgttttgaatcaggcggttgagacgcagatgaaacagatgtcgcatgtgatgttcggcggtttgacgcatgagccggcggtggagctgggcaaattgttggtcgggattttgccgcaggggctggatcgtattttttatgcggattcgggttcggtttcggtggaagtcgcgttgaagatggcggtgcaataccagcaggcgcggggtttgcgtgcaaaacaaaatatggcgacggtgcggcgcgggtatcacggcgatacttggaacgcgatgtccgtctgcgatccggaaacggggatgcaccatattttcggcagcgcgttgccgcagcgttattttgtcgataacctgacaagccgtttcgacgatgaatgggacgaggcggatttgcagcctgtccgcgccttgtttgaagcgcatcatacggacattgccgcctttattttggaaccggtcgtgcagggcgcgggcggtatgtatttttatcatccgcagtatcttcgcggattgcgcgatttgtgcgacgagtttgatatcgttttgatttttgatgaaatcgccaccggattcgggcgcacgggcaagatgtttgcctgcgaacacgcggaggtcgtgccggatattatgtgcatcggcaagggtttgagcggcggctatatgacgctggcggcagcaatcacttcgcaaaaagttaccgaaacgatttcgcgcggagaagcgggcgtgttcatgcacggcccgacatttatggcgaacccgctggcgtgtgccgttgcctgcgcttcggtcaaactgcttttgtcccaagattggcaggcaaatatccgccgcatcgaaagcatcttaaaatgccgtctgaaaaccgcgtgggacattcgtggtgtgaaagacgtgcgcgttttgggcgccatcggcgtgatcgagttggaaaaaggcgtggatatggcgcgttttcaagcggattgcgtggcgcagggcatttgggtgcgcccattcggcaggctggtgtacctcatgccgccttacattatttcagacgacctcttgacagaacttgccggcaaaaccgtacacattttgaaggaatacagcaaatga

SEQ ID NO: 62702 - DNA, 1230 bp, Neisseria meningitidis
atggcgttcggcaaatccttatttcatgcgatcggccgcgtcagcctggtcaggcagattgccgccggtttggcgttgggcatcgtaatcggttcggtttcaccgcaactgggcttggcggcaggcttgttcggcagcctgtttgtcggcgcgctcaaagcggtcgcaccggttttggtatttattttggtggcggccacaatcgcacagcaccaaaaaggcaacaaggcgcatatcaggccgattatcgtcctctacctcatcggtacgttttccgcagccctgaccgccgtcatcgccggtatggttttcccgacgcacattgttttggcgggcgcgggcgatgtgtccgccgcgccgccttccggcattgtggaagtattgaaatcgctgctgatgaacctggtcgccaacccgattaacgcgattgctaatgccaactatatcggcattctggcttgggctttggttttgggcgcggcgttgcggaatcacggttcggacgttacgcggcaggtcgttgccgatttggcggaagcggtttccaccgtcgtgaaatggattatccgttttgcccctttgggcattttcgggctggtgtcgtccacaatcgcggagacgggtttcggcgcgctggcggggtacgcgaagctgcttgcagtgctgttgggctgtatggcgtttatcgcgctggcggtcaatcccgccatcgtgtggtggaaaatccgccgcaacccttatccgctggtgttcacctgcctgcgcgaaagcggcgtgtatgccttctttacccgttcttccgccgccaatatccccgtgaatatggctttggcgaaaaaactggggctgcacgaagacacttattcgatttccatcccgttgggggcgaccgtcaatatgggcggcgcggcgattacgattaccgttttggctatggcggcggcgcacacccaaggcatacaggttgattttgccaccgcgctgctgttgagcctggtggcgacggtcagcgcgtgcggcgcgtccggcgtggcgggcggttcgctgctgctgattccgctggcgtgcagcctgttcggtatcgataacgatgtggccatgcaggtggttgccgtcggctttatcatcggcgtaattcaggattcggcggaaacggcgttgaattcttcaaccgacgttttgtttaccgccgccgccgatttgggccgacagaggaaccgggcggaataa

SEQ ID NO: 62703 - DNA, 840 bp, Neisseria meningitidis
atgctggtcgcttttttaattatgttgcgcgagggtattgaagccgcgctcattgtcggcatcgttgccggttttctgaaacagtccggacattccaaactgatgcctaaggtctggttcggggttgtccttgcttctttgatgtgtttggggctggggtacggcatccattcggcaacaggcgagattccccaaaagcagcaggagttcgtcgtcggcatcatcggtttggttgccgttgccatgctgacttatatgattttatggatgaaaaaggcggcgcgttcgatgaagcggcagcttcaggattctgtgcaggcggctttgaaccgtggcagcggccaaggatgggccttggtcggtatggcgtttcttgccgtggcgcgcgaaggtctggagagcgtttttttcctgcttgccgtattcaaacagagtccgacgtggcagatgccggccggtgcggtagcgggggttttggctgccgccgtgattggcgcgttgatttatcagggcgggatgcgcctgaatctggcgaagttttttcgttggacgggggcgtttttgattgccgttgccgccggcctgcttgccggctcgctgcgcgcgctgcatgaggcaggtatttggaacgcgcttcaggacattgtgttcgactcatcaaaatatttgcacgaagacagcccgttgggcgtgctgctcggcggatttttcggctataccgaccatccgacgcagggcgaagccttggtttggctgctgtaccttattcccgtcataacttggtttttgtgcggcagcaggccgtctgaaactttaacccgtaaagaggagctgaaatga

SEQ ID NO: 62704 - DNA, 273 bp, Neisseria meningitidis
gtgaacaattcagtcatcaccgtcatcggtaaagaccgcgtcggcatcgtgtacgatgtttccaaaattttggcggaaaaccaaatcaatattctcaacatcagccaacagctgatggacgatttttttactatgattatcttggtggacacttcaaaatgcagcaaatcgcggcaggaggttttggatttgtttgcggaagagagcaaaaaactcgcgctcgacatccgtatgcaaaacgaagaaatcttccaagcgatgcaccgcatttga

SEQ ID NO: 62705 - DNA, 600 bp, Neisseria meningitidis; identical to SEQ ID NO: 37200

SEQ ID NO: 62706 - DNA, 561 bp, Neisseria meningitidis; identical to SEQ ID NO: 55625

SEQ ID NO: 62707 - DNA, 1329 bp, Neisseria meningitidis
atgaaaaaagtatttatccgcaccttcggctgccagatgaacgaatacgacagcgacaaaatgctcgccgtcctcgccgaagaacacggcggcatcgaacaggttacccaagccgacgaagccgacatcatcttgttcaacacctgctccgtgcgcgaaaaagcgcaagaaaaagtcttctccgatttggggcgcgtgcgtccgctcaaagaaaaaaaccccggcctcatcatcggcgttgccggctgcgtcgcctcgcaagaaggcgaaaacatcatcaaacgcgcgccttatgtggacgtggttttcggcccgcaaacgctgcaccgcctgccaaaaatgattgtggacaaagaaaccagcgggctgtcgcaagtcgatatttccttccccgaaatcgaaaaattcgaccacctgccgcccgcccgcgtcgaaggcggcgcggcatttgtatcgattatggaaggctgttccaaatactgctccttctgcgtcgtcccctacacgcgcggcgaagaattctcccgcccgctcaacgacgtattgacagaaatcgccaaccttgcccagcaaggcgttaaagaaatcaacctcttgggacaaaacgtcaacgcctatcgcggcgaaatggacgacggcgaaatctgcgacttcgccaccctgctgcgcatcgtccacgaaatccccggcattgaacgtatgcgcttcaccaccagccacccgcgcgagtttaccgactcgattatcgagtgctaccgcgacctgcccaaattggtttcccacctgcacctgccgattcaaagcggttccgaccgcgtattgagcgcgatgaaacgcggctacaccgctttggaatacaaatccatcatccgcaaactgcgtgccatccgtcctgatttatgcctgagcagcgatttcatcgtcggcttccccggcgagaccgaacgcgagttcgagcaaaccttgaaactggtgaaagacattgccttcgacttgagcttcgtgtttatttacagtccgcgccccggcacgcctgccgccaacctgcacgacgacacgccgcacgaagaaaaagtgcgccgcctcgaagccttgaacgaagtcatcgaagccgaaaccgcgcgcatcaaccaaacgatgatcggcacggttcaacgctgcctggtcgaaggcatctccaaaaaagaccccgaccagctccaagcccgcaccgccaacaaccgcgtcgtcaactttaccggcacgcccgacatgattaaccaaatgatcgatttggaaatcaccgaggcctacactttctccctgcgcggcaaagttgtcgaagcctaa

SEQ ID NO: 62708 - DNA, 1167 bp, Neisseria meningitidis
atgaatttacacgagtatcaggctaaagaactgctggctggctacggtttgcccgtacaaggcggtattttggcacacaacggcgaagaagccgctgcagcttacgacaaattgggcggcaaattcgctgttgtcaaagcacaagtacacgccggcggccgcggtaaagcgggcggcgtaaaagtcgttaaaagccgcgaagaagctaaagaagtggctgaaagcctgattggcaccaacttggtaacttaccaaaccgatgccaacggtcaacctgtcaacagcgttttggtttgcgaagatatgtatccggttcaaaccgagctgtacttgggcgcagtggttgaccgttctacccgccgcgttacattcatggcttctaccgaaggcggtgtggaaatcgaaaaagttgctgccgaaactccagaaaaaatcttcaaagtaaccgttgatccgctggtcggcctgcaaccttgccaagctcgcgaagttgccttccaactgggcttgaaagacaaacaaatcaacgagttcgtcaaactgatgaccggtgcgtacaaagcgtttgtcgaaaatgacttcgccctgtttgaagtcaacccgctggcagttcgcgaaaacggcgcactggcttgcgtggacggcaaaatcggcatcgacagcaacgcgctctaccgcctgccgaaaatcgctgaattgcgcgacaaatctcaagaaaacgaacgtgaactgaaagcttctgaattcgacctgaactatgttgccctggaaggcaacatcggctgtatggttaacggtgccggtttggcgatggccaccatggacatcatcaaactgaaaggcggccaacctgccaacttcttggacgttggcggcggcgcaaccaaagaccgcgtggttgaagcgttcaaactgattctggaagacaaatccgttcaaggcgtattgatcaacatcttcggcggtatcgtacgttgcgacatgattgcggaagccatcgtggcagccgttaaagaaatcaacgtcgacgttcctgtcgttgttcgtttggaaggcaacaacgccgaactcggcgcgaaaatcctgaacgaatcaggtctgaaactgacttctgcagacggcctgaatgacgcagccgaaaaaattgttgcagccgtaaacgcctaa

SEQ ID NO: 62709 - DNA, 690 bp, Neisseria meningitidis
atgaagcgcaaaaatatcgcgctgattcccgccgccggcatcggggcgcgtttcggtgcggacaaacccaagcaatatgtcgaaatcggaagcaaaaccgttttagaacatacgcttgggatttttgaacggcatgagggcgtcgatttgaccgtcgttgtcgtctcgcccgaagacacgtttgccgataaggttcagacggcatttccacaggttcgggtgtggaaaaacggcggacagacccgcgccgaaaccgtccgaaacggtgtggcaaaattgttggaaaccggtttggcggcggaaaccgacaatattctggtacacgatgccgcgcgttgctgcctgccgtctgaagctttgacgcggttgatagaacaggcgggcaacgctgccgaaggcggaattttggcaattcccgttgccgatacgctcaagcgcgcggacggtgggaacattagtgcaaccgtcgagcggacgagcctttggcaggcacaaacgccgcagcttttccgcgccgggctgctgcaccgcgcattggctgcggaaaacttggacggcattaccgatgaagcgtccgccgtcgaaaaattgggcatccgccctttgctggtgcagggcgacgcgcgcaatttgaaactgacgcagccgcaggacgcatacatcgtcaggctgctgctcgatgccgtctga

SEQ ID NO: 62710 - DNA, 996 bp, Neisseria meningitidis
ttgaaggctgcctatcaaaatattgcaactgtctggcagggcgatttccacaatgccaaacaggtgctttccgcaatgaagaagagggttctcaaacctgccgccgtccgttccgatgcggatatcgccgcccttttccacgcccaccgtatgaagcaggcgcagcagagccgtattctgaatatgcttgccgttgaaatccgccccggttttgtgttggacaacaaacgcgcgcccgatatacgcgccgccctgctcgacgtgtacggagaggcggacggcaaaccgtttttcctgccgctcaatctgctgctggggtttatgggtgcgcacgagtggcataagaaaggggttgccgttccgcagctgggcggcagcatacacgttcctttcggcgtattctcgccgttgcgcggcgaatacctcgacctgctcgcccatgcgccgtcaacgggttttcagacggcattagatatcgggacgggctcgggcgtgcttgccgccattttggcgaaacagggcattccttccgtcatcggcacggataccaatccgaaagccgtcgcctgcgcccgtgccaatattgcccgtttgggctttgaaaaacaggttgaaatccgcgaaaccgatctgtttcccgaagggtttgtcgatctgatcgtctgcaatccgccctggcttcccgccaagccgacttccgccgtcgaatccgcgttatacgaccccgaatctgcgatgctggctgcgtttttgcgggatgcgccgaaacatctgaatcccgacggagaaatccgcctgatcatttccgatcttgccgaacatctgcacctgcgtccgtccgattttctggataaggcatttgctcaggcgggtttgcgcgttgcggatgttttgaaaaccaaaccggttcacaaaaaagctgccgatccgaacaatccgctggcttttgcccgaaacagggaaactactttcctgtaccgtttgaaaaaggcataa

SEQ ID NO: 62711 - DNA, 1386 bp, Neisseria meningitidis
atggtcagcatttttgatattttcaaaatcggtatcgggccttccagttcgcatacggtcggcccgatgaaggcagcagccgcctttgcggcaggtttggatgcacaggctgttcgcatcgtcatcgacatttacggctcgctcgccctgaccggatacggacacggtacatttgacgcgctgatgctcggtttggaaggcagcctgccgcacgacatcccgcttgtcggcattcccgaacgcctcgaacgcatccgcacgcagcacatcctccggctcaacgggcaagaaatccgcttcatccccgaccgcgacctgaacatactcggcaatcaagtgctgcccaaacaccccaacggcctgcgttttaccgcctatgcttcagacggcacggtattgaatgaacaggtttattattcggtcggcggcggctttgtcgttaccgaagaagattttgaccggcaggcggaaacggaaaaagccgttccctatccctataccagttgcgccgaactgcttgcccgatgccgtctgaaccggctcgacatctccgaagtcgtgttggcaaacgaagccgcgcttgccggatgcggcgaagccgaaatccgccgccgcgccgctgccgttgccgaggttatggaaggctgcatcaaacgcggcttgggtgcggacggcgaactgcccggcggattgaacgtccgccgccgcgccccgcagcttgccgccaagctcaaagtcctgcgcgaaaccgaaatcgtcaacacccagctctggccgatggtgtacgccatggcggtcaacgaagaaaacgccgccggcggacgcgtcgttaccgcaccgaccaacggcgcggcaggcatcattcccgccgtattgcactatttccgcaagttcaatccgcacgccacacaggaacgcgtcgaaaacttcctgctcaccgcaggcgcaatcggcatcctctacaagaccaacgcctccatttccggtgcggatgtcggctgtcagggcgaagtcggcgtagcgtgttcgatggcggcgggcgcatacgccgaagtcatcggcggcacgcccaaacaagtggaaaacgccgccgaaatggcgatggaacaccatttggggctgacttgcgaccccgtcggcggactggtgcaaatcccctgcatcgagcgcaacggcatcgccgccgaaaaagccctcaaactcggcacgctcgcgcttttggaagacggcacggacaaaaaagtctcgctcgacgaagtcatccgaaccatgctgcaaaccggccgggatatgaaggcgacctacaaagaaacctcgcttgccggactcgccgccacgctccggaaaaaagccgtccccgtatccgtgcgcgtggtcgagtgctga

SEQ ID NO: 62712 - DNA, 195 bp, Neisseria meningitidis; identical to SEQ ID NO: 42321

SEQ ID NO: 62713 - DNA, 600 bp, Neisseria meningitidis
atgtctgaaaaaccggaaaaaatcgttttggcaagcggcaatgcaggcaaactcaaagaattcggcaacctattcgaaccatacggcattaccgtattgccgcaatccgagttcagcatacccgaatgccccgaaccctattccacctttgttgaaaatgcgctggcaaaagcacgccatgccgccgaatacagcgggctgcccgcactcgccgacgacagcggcatctgtgccgccgccttaaacggtgctccgggcatacattccgcacgttacgccggcagcaatcccaaatccgataccgccaacaacctgaaacttgccgccgaacttgccggcaaagccgacaaaagctgttgctacgtctgcgtattggtttttgtccgccataaagacgacccgcgtccgattattgccgaaggcgtatggcacggacaatggaacggcgttcccgccggtgaaaacggtttcggttacgacccgtatttttatctgcccggacacggcaaaaccgccgccgaattggattcggaggtcaaaaaccgcgaaagccaccgcgcgcaggcacttgccgatttaatccgcaaactcgccctttaa

SEQ ID NO: 62714 - DNA, 2121 bp, Neisseria meningitidis
atgttcgacaaacacgttaaaactttccaatacggcaaccacaccgttactttggaaaccggcgaaatcgcccgccaagccgccgctgccgttaaagtctctatgggcgacaccgtggttttggttgccgttaccaccaacaaagaagtgaaagaaggccaagacttcttccctctgaccgtcgattatttggaacgcacttacgccgcaggcaaaattcccggcggtttcttcaaacgcgaaggcaaacaaagcgaaaaagaaatcctgaccagccgtctgatcgaccgtccgattcgtccgctgttccctgaaggtttctaccacgacatccaaatcgtagcgatggtcgtgtccgtcgatcctgaaatcgattctgatattcctgcaatgttgggtgcatctgccgcgctggtgttgagcggcgtaccgtttgccggcccgatcggcgcggcacgcgtcggttatgtaaacggcgtgtacgttttgaatccgactaaagccgaattggcgaaatcgcaattggacttggtggtcgccggtacttcaaaagccgtgttgatggtggaatccgaagccaaaatcctgcccgaagacgtgatgctgggcgcggtggtttacggccacgatcaaatgcaggttgccatcaatgcaatcaatgaatttgccgacgaagtcaatccggaactttgggattggaaagcacctgaaaccaatgaggaactggttgccaaagtccgcgggattgccggcgaaaccattaaagaagcgttcaaaatccgtcaaaaacaagcgcgttctgccaaattggacgaagcttggagtgcggtaaaagaagccttgattaccgaagaaaccgacactttggcagccaacgaaatcaaaggcattttcaaacacttggaagccgatgtcgtccgcagccaaattttggatggccaaccgcgcatcgacggccgcgacacccgcaccgtccgtccgctgaacatccaaaccagcgtattgccgcgcacgcacggttctgcattgtttacccgtggcgaaacccaagctttggccgttgcaactttgggtacttcgcgcgacgagcaaatcatcgacgcgctgtccggcgaatacaccgaccgctttatgctgcactacaactttccgccgtactctaccggcgaagtgggccgcatgggcgcaccgaaacgccgtgaaatcggtcacggccgtttggctaaacgtgcattgttggccgtattgccgaaacctgaagatttcagctacaccatgcgcgtggtctccgaaattaccgaatccaacggctcttcctctatggcttccgtctgcggcggctgcctgagcctgctgtctgccggcgtgcctttgaaagcacacgttgccggtatcgcgatgggtctgattctggaaggcaacaaatttgccgtcctgaccgacattttgggcgacgaagaccacttgggcgatatggactttaaagtggccggtacgaccgaaggcgttaccgcgctgcaaatggacatcaaaatccaaggcattaccaaagaaattatgcaaatcgctttggcacaggccaaagaagcgcgtctgcacatcttggatcagatgaaagccgccgttgcgggcccgcaagagctgtccgcacacgcgccacgcttgttcacgatgaaaatcaaccaagacaaaatccgcgaagttatcggtaagggcggtgaaaccatccgtgcgattaccgctgaaaccggtacggaaatcaatattgccgaagacggtacgattaccattgccgcgaccactcaagaagccggcgatgcggcgaaaaaacgtatcgagcagattactgccgaagtggaagtgggcaaagtgtatgaaggcactgtggtgaaaatcctcgacaacaacgtcggcgcgattgtcagcgtgatgccgggcaaagacggtttggtacacatcagccaaatcgcccacgagcgcgtacgcaatgtcggcgactacctgaaagtcggtcaggtggtgaacgtgaaagcattggaagtggacgacagaggccgtgtccgtctgtccatcaaagccctgctggacgcgcctgcccgtgaggaaaatgccgccgagtaa

SEQ ID NO: 62715 - DNA, 588 bp, Neisseria meningitidis
atgaacaatatgtttgccgcaaaattgtccaaactggtttataccgcttccgaccatcccgaccccctgtcggagatgggggagtttgaccgcctgattttgctgatacgcaagctgtatcaaatattggacgggcaacataccctctccagagtaacggtttgccttcactaccggagcaggcgcggcctgattgccttggataaagcggctgccggttgcgatgcggcaatgttgcgcgcccaacgttggcgcatctacacgcagattgcggaacgccttgccgggtcggacggcggcttcacggttacggcagaaagcgtgtccgccgcctgcccggagcttgaaggacgctatctcgagcttgtccgccgcgccgccgtctctttcggtttcacgcaaggatgggaaaatccggcaggcgggcaggaaaaaacacaagccgtcccggatgccgcatctggccgtttcgtcagaaaaccaatcaaaatcaatatagaagcaagagtggaacgctatccggcatactgcccgaccgtcgccctgaaagtaacccgccggcggtttttccggctgcaaaaccgataa

SEQ ID NO: 62716 - DNA, 924 bp, Neisseria meningitidis
atgcaatacagcacactggcaggacaaaccgacaactcactcgtttccaataatttcgggtttttgcgcctgccgcttaattttatgccgtatgaaagtcatgccgattgggttattaccggcgtgccttatgatatggcggtttcagggcgttccggcgcgcgtttcggtcctgaagccatccggcgcgcctccgtcaacctcgcttgggagcaccgcaggtttccatggacatttgatgtgcgcgaacgcctgaacattattgattgcggcgacttggttttttcttttggcgacagcagggattttgtcgaaaaaatggaagcgcacgccggcaaattactttcttccggcaaacgctgtttgagtttgggcggcgaccatttcattaccctcccgttgttgcgcgcccacgcccgctatttcggcaaactcgcactgattcattttgacgcgcacaccgacacctacgacaacggcagcgaatacgaccacggtacgatgttctataccgcccccaaggaaggcctcatcgacccgtcccgttccgtacaaatcggcatacgtaccgaacacagtaaaaaattgccttttactgtgttgaccgccccccaagtcaatgaagacagtgttgaagagaccgtccgtaaaatcaaagaaaccgtcggcaatatgcccgtttacctgactttcgacatagactgcctcgacccgtcgttcgcccccgggaccggtacgcccgtatgcggcggcttgagcagcgacagggcattaaaaatcctacgtgggctgacggatctcgacatcgtcggtatggatgttgtagaagttgccccctcttacgaccaatccgacattaccgctttggccggcgccacaattgccttggaaatgctttaccttcaaggtgcgaaaaaggactga

SEQ ID NO: 62717 - DNA, 1218 bp, Neisseria meningitidis; identical to SEQ ID NO: 40304

SEQ ID NO: 62718 - DNA, 924 bp, Neisseria meningitidis
atgacgaaaaccgaaccgaacaacgcccaactcgactggttggaatccgaatccatccacatcatccgcgaagtggcggcggaatgtgaaaaccccgccctgctcttttccggcggcaaagattccgtggtcctgctcgccctcgcctgcaaagccttccggctgggcagccggccggtgaaactgcccttcccgctggtgcatatcgacacgggacacaactaccccgaagtgattgctttccgcgacgcgcaggcggcaaaactcaatgcccgcctgatagtggggcgcgtggaagactccattgccaaaggcacggtggtcttacgcaaagaaaccgattcgcgcaatgcggcacaggcggttaccttgttggaaaccatcgaggcaaacggcttcgacgcgcttatgggcggcgcgcggcgcgacgaagaaaaagcccgcgccaaagaacggattttctcgttccgcgacgagttcggacaatgggatccgaaggcgcaacgccccgagctgtggtcgctgtacaacaccaggctgcacaaaggcgaaaatatgcgcgtcttcccgatttccaactggacggaactcgacatctggcaatacatcgcccgcgaaaacctcgagctgccgccgatttattacagccacaggcgcgaagtggtcagacgcagggggctgctggtccctgtaacgccgctcaccccgaaaatgccgtctgaaacctccgaaatccttgatgtccgcttccgcaccgtcggcgacatcagctgcacctgcccggtagaaagcaccgcgtccacgccggcggagattatcagggaaacggcggttgccgacatttccgaacgcagcgcgacccggctagacgatcaggcaagcgaggcggcaatggaaaaacgcaaaaaagaaggctatttctaa

SEQ ID NO: 62719 - DNA, 294 bp, Neisseria meningitidis; identical to SEQ ID NO: 37088

SEQ ID NO: 62720 - DNA, 306 bp, Neisseria meningitidis; identical to SEQ ID NO: 45752

SEQ ID NO: 62721 - DNA, 291 bp, Neisseria meningitidis; identical to SEQ ID NO: 38154

SEQ ID NO: 62722 - DNA, 369 bp, Neisseria meningitidis; identical to SEQ ID NO: 51331

SEQ ID NO: 62723 - DNA, 975 bp, Neisseria meningitidis
atgccgtctgaaaacaaaattgcatttatgcaaggttccccgcgcccgttgtgggcggcattcgcactcttactaatctgctgcggactgtttttaacgctcaacgtcaaaggcgattgggattttgttttgcaactgcgcctgaccaaacttgccgcgctgctgatggtcgcctatgcggtcggcgtgtccacgcaactcttccaaacgctgaccaacaatccgattctgaccccttcgattttaggtttcgattcgctgtatgtgtttttgcagaccttgctggtgtttacgctcggcggcgtaggctatgcttccctgccgttgacgggtaaattcggctttgaattggtcgttatgatgggcggctcgctgctgctgttttacacgctcatcaaacagggcggacgcgatttgtcgcgcatgattttaatcggcgtgattttcgggattttgttccgcagcctgtcgtcgctgctttcgcgcatgatcgaccccgaagaatttacggcggcgcaggcgaatatgtttgccggattcaataccgtccacagcgagcttttgggcataggcgcgctgattctgctcgtcagcgtggcggcggtttggcgcgaacgctaccgcttggacgtttaccttttggggcgtgaccaagccgtcaatttgggcatcagctacacgcgcaacaccttatggatactgctttggattgccgcgctggtggcgacggcgaccgccgttgtcggcccggtaagctttttcgggcttctcgccgcctcgcttgccaaccacttttccccgtccgtgcgccattccgtccgcctgccgatgacggtttgtgtcggcggcatcctcttggtcggcggacagaccgtgttcgaacacttcttgggcatgaaggcggtattaagcgtggtagtcgaatttgcgggcggactcgttttcctctatctcgttttaaaacacaaaaaatga

SEQ ID NO: 62724 - DNA, 1407 bp, Neisseria meningitidis
atggaaaaaaacaccctatccgcccgcgcaccatccccttggctgccgcttctgctggcaattgccatttttatgcagatgttggatgcgaccattttaaataccgcactgcctgaaattgccgccgacctgaatgagtcgcctctggatatgcaactggcagtcgttgcctatacgctgacggttgccctgctgattcctttgagcggttatttggcggacaggttcggaacgaaaaaagtctttttcggttcgattgccgtttttatgctcggatcggcattgtgcgccgcatcgggttcgctgtttgaattgacgctttcccgtgtcgttcagggcatcggcggttcgatgctggttccgataccgcgtctgaccatcttgcgtatgtacgacaagtccaagctgctcaatgccatcaattatgcggtcatgcctgcattaatcgggccggttttagggcctttggcgggcggttatttggtcgaatacgcttcgtggcactggattttcctgctcaacctgcccatcggtctgctgggtttcatattgggacgcaacatcatgcccgatattaaaggcagcaatatctctttagacttcaaaggttatctgattttttctgccgccgcatgcctcttgttactttcagcggaaagcctgtcgcacgcgctgcctccgtattttgcactgttgccgctgtgcggcggactgctgtttgcacgccgttatttccgacatatgaaaaccgcgtccaaaccgatttattccaccgacctgtttctgatacgcactttccgtctgggactggcgggcaatctgttcagccgtctcggcatcagctcgattccttttctgatgcccctgatgtttcaagtcgctttcggcttcggcgcaagcctgtcgggttggctggtcgcacccgtcgccctgtcttcgctgctggtcaaaccgctgattgcaccgctcatgaaacgtttcggctaccgcacggtactgctttggaacaccaagctgcttgccgccttcatcatgctcctcgccctacctgacggaaactcgccgctgtggatttggattttcctctcgctggcgatcggcgcgtgcaactccctacagttttctgccatgaacacactgaccctcgccgatttgcgcccgcaacagaccggcagcggcaacagcctgatggcggtcaaccaacagcttgccatcagcatgggcattgttgccggcgcattaatccttaaaaactggacatttctgataccggcttcttcaggtctgcattccgccttccgtatgaccctgctcagcatcggcggcatcacccttgcctcatcgctggtattcaatcggctgcacgtttcagacggaaccaacctgacacggaatacaccgtcctga

SEQ ID NO: 62725 - DNA, 675 bp, Neisseria meningitidis
ttggttaaaacggcagacggctacaaagctattgcccgtatccgggtcggcgaccgtgtcttcgccaaggacgaggcaagcggagtaacgggatacaaacctgttaccgcccaatacggcaatccgtatcaggaaaccatttacattaaagtttcagacgacatcggcaacagccaaaccctgatttccaaccgcatccacccattttattcggacggcaaatgggttaaagcagaggatttgaaagcgggaaacaggttgtcgtctgaaagcggcgcggaacagacggttcaaagcattaccgtcaaaccggaaccgctgcaagcctacaatctgaccgttgccgattggcatacctacttcgtcaagggcaatcaggcggaaacggaaggggtttgggttcataatgcgtgtccgatcaaaccaaaaccaaccaatcatgcccaacaaagaaaagaagaagctaaaaacgattctcatcgaagtgtgggagattccaatcgtgtcgttcgcgaaggaaagcaatatttagattccgacacaggaaaccatgtttatgtaaaaggagataaagtggttattctaactcctgatggaagacaggtaactcaatttaagaactcgaaagccaatacgtcaaaaagggtaaaaaatgggaaatggacaccaaaataa

SEQ ID NO: 62726 - DNA, 171 bp, Neisseria meningitidis
atgtattttgaaatctataaagacgcaaaaggcgaataccgttggcgtttgaaggcagccaaccatgaaatcatcgctcagggcgaaggctacaccagcaagcaaaactgccagcacgcagtcgatttgctgaaaagcactaccgccgctacccctgtaaaagaggtataa

SEQ ID NO: 62727 - DNA, 552 bp, Neisseria meningitidis; identical to SEQ ID NO: 54500

SEQ ID NO: 62728 - DNA, 1176 bp, Neisseria meningitidis; identical to SEQ ID NO: 38512

SEQ ID NO: 62729 - DNA, 810 bp, Neisseria meningitidis
atgacaccgctcaaaatcgccatcgccggcgcaaacggccgtatggggcgcgtcctcgtcgaagccgtcaacaaccatcccgacaccgtcctttccggtgcgcttgaacactcaggctcagaagccctcgggctggacgcaggctacgccgtcggactcaaaaccggcatcgccatttcagacgacgttgacaccgttctcgcacaaagcgacgtactcatcgacttcacccgccccgagcccaccctcaaacacctgcaaaaatgcgttgaaaaacaagtcaacatcatcatcggcacaacaggcttcgacgatgcgggcaaagccgccatccgcgctgccgccgaaaaaacaggcatcgttttcgccgccaacttcagcgtcggcgtcaacctcaccttccacatcctcgacaccgtcgcacgcgtattaaacgaaggctacgacatcgaaatcatcgaaggccaccaccgccacaaagttgatgcccccagcggcaccgcgttacgcatgggcgaagtcatcgccggcgcgctcggccgcgacctcaaacaatgcgccgtttacggccgcgaaggccacaccggtccgcgcgatccgtccaccatcggctttgccaccgtccgcgcaggcgacatcgtcggcgaccacaccgccctcttcgccaccgacggcgagcgcgtggaaatcacccacaaagccggcagccgcatgacctttgccgccggcgccgtccgcgccgcagtttgggtaaacggcaaaacgggtttgtacgatatgcaggacgtactcgggctgaacaaccgttaa

SEQ ID NO: 62730 - DNA, 648 bp, Neisseria meningitidis; identical to SEQ ID NO: 37687

SEQ ID NO: 62731 - DNA, 270 bp, Neisseria meningitidis; identical to SEQ ID NO: 56104

SEQ ID NO: 62732 - DNA, 1131 bp, Neisseria meningitidis
atgattaaaatcagcacccgcttcgatgccggctcggtcgtcgtcaaagacctgaccgatccttccaacatccgcctcgccctgcgtcccgacaacgcctccgattttgcacaatggttctacttccggctgcaaggcgcggcatatcaaaactgcatcatgcattttgacaatgcggcagaagccgcctacccgaaaggctgggaaggctatcaggcgtgtgcctcatacgaccgccgcaactggttccgcgtaccgacttcctacgaaaacggcgtactgaccgtcaatcatacgccgctgtccaacagcgtgtattacgcctatttcgaaccttactccgaagaacagcatttaaacctcctcggcgacgcgcaaggcagcggcctgtgccgcatcgacgacttgggcagcaccgttcaagggcgcgacatcaatctgctgaccataggcaaccaggtcgaaagtgatctgaaaatctggattaccgcccgccagcatccgggcgaaaccatggcggaatggtttgtcgaaggactgctcggcagattactcgacccgcaagacccgacagcacgcaccctgctcgaccgcgccacgttctacatcgtgccaaacatgaaccccgacggttcggcactgggcaacctgcgtaccaacgccgccggcgcaaacctcaaccgcgagtgggaaaacccgactttggaaaaaagccccgaagtgttcttcgtgcgcgaaaaaatgctggaaaccggcgtggatttgttcttggacatccacggcgacgaagggctgccctttatctttgttgcaggaactgaaggcgtgccaaactacaatccgcgcatttccgcgttggaaacacagttcaaaaccgcccttttgaacgccagccccgatttccaagacgaatacggttacgaaaaagatgcgcccggtcaggcaaacatgaccttggcaacaaactgggtcggcaaccgtttcaactgccttgcctatacgttggaaatgccgttcaaagacaatgccaacctgcccgacgacgatttcggatggaacggtcaacggtcgttgcgcttgggcgaagccgcgttgtccgccatcctcaacatcatcggcgatttgcgctga

SEQ ID NO: 62733 - DNA, 591 bp, Neisseria meningitidis
atgaaaaaatcctccctcatcagcgcattgggcatcggtattttgagcatcggcatggcatttgccgcccctgccgacgcggtaaaccaaatccgtcaaaacgccactcaagtattgagcatcttaaaaagcggtgatgccaacaccgcccgccaaaaagccgaagcctatgcgattccctatttcgatttccaacgtatgaccgcattggcggtcggcaacccttggcgcaccgcgtccgacgcgcaaaaacaagcgttggccaaagaatttcaaaccctgctgatccgcacctattccggcacgatgctgaaattaaaaaacgccaacgtcaacgtcaaagacaatcccatcgtcaataaaggcggcaaagaaatcatcgtccgcgccgaagtcggcgtacccgggcaaaaacccgtcaacatggacttcaccacctaccaaagcggcggtaaataccgtacctacaacgtcgccatcgaaggcgcgagcctggttaccgtgtaccgcaaccaattcggcgaaattatcaaagcgaaaggcgtggacggactgattgccgagttgaaagccaaaaacggcggcaaataa

SEQ ID NO: 62734 - DNA, 1152 bp, Neisseria meningitidis
atgcagacatggcagcttccggaacatatcgccgacgtactgcccacgaacgcgcggcagcttgaaagcgcgagggagcagttgttggcactgttccgcgtacacggttatgaactggtacagcctccgctgatggagtacgcacattccctgctgacgcatatcgatgcggggctttccctgaaaaccattttggtaacggacaggctcagcggcaggcagttgggcatacgcgccgacatcacgccgcaggtggcgcgtatcgatgcccatcttttatccgccaaccaagggattaatcggttgtgttatgccggtccggtgttgcacgcgcagcccgacggtctgctgaatatgcgcgaacccttgcaggcaggggcggaaatgtacggttttgccgacatccgtggcgacatcgagctgatagacctgatgctgaaaagcatgaaaattgccgatatgggcaaagtgctgctttcgctggggcatatcggcatatttcgcgccttgtccgatgcggcgcatttggatgcggggcagtctgcaacgctgcttgccttgatgcaggataaagataccgggacggtcgaagcgcaggtcaaggcttggaagctggacggcatgtgggcaaaagcattctcgctgctgccgcgcctatacggcgggcgtgaagtgttgtccgacgcgcgcggacggttgccggatttgtcggcggtcggcggcgcgttagacgaattgcaggcggtgtgcgacgcattccccgattgtgaaatccatatcgacttgtccgagctgcgtgtcgacaattaccacacgggcttgctgtatgccgcctatgccgccgatttccacgacgcggtcgcgcgcggcgggcgttatgacggattgggcggatatttcggcagggcgcgcccggcaacgggattcagtttcgacttgcgcagctttatcgggcgtttgcccgccatcgaacggcagcccgccgtgttggtcgatgcggaagatgccgaagcggcgcgcgaagcggtcgaagccttgcgtgaacaagggcagtgtgtcgtaatcgattacggtatcggacacaatgtttcggaagagcttgcaggccgtctgaaaaagacggacggcgtttggcaggtcgtgaaacgctaa

SEQ ID NO: 62735 - DNA, 1218 bp, Neisseria meningitidis
atggagattattttaggtatcgtgatgtttaccgtcatcgttttggctttggcactgatgattctgtttgccaaatccaagctggtcagcgaaggcgacatcaccatcaaagtcaacggcgaaaaagagctgacgatgcccgccggcggcaaactcttgggcgcgcttgccaacgaaggcatctttatcccctccgcctgcggcgggggcggttcgtgcggtcagtgccgcgtcgtcgtaaaaagcggcggcggcgacatcctgccgaccgagctgtcccacatcaacaaacgcgaagcgcgcgaaggctgccggctgtcgtgccaagtcaacgtcaaaaccgatatggagattgaagtccccgaagaagtgttcggtgtgaaaaaatgggaatgcaccgtcatctccaacgacaacaaggccacgttcattaaagaactcaagcttgccattcccgaaggcgaagaagtgcccttccgcgccggcggctacatccaaatcgaagccccgccgcacaccgttgcctacaaagacttcgacattcccgagaaataccacgaagactgggacaaatacaatctgtggcaatacgtttccaaagtggacgaaccgattttgcgcgcctactctatggcttcgtatcctgaggaaaaaggcatcattatgctgaacgtgcgtatcgccacgccgcctccgcgcgtacccgatgcgcctccgggacaaatgtcgtcctacatctggtcgctcaagcccggcgacaaagttacgatttccggcccgttcggcgaattcttcgccaaagacaccgatgccgaaatggtattcatcggcggcggcgcaggtatggcgccgatgcgttcccacattttcgaccagttgaaacgtttgaactccaaacgcaaaatcaccttctggtacggcgcgcgttccaaacgcgagatgttctatgtcgaagacttcgaccgactcgcggcagagtttccgaacttcacgtggcacgtcgccctgtccgacccgttgcccaaagacaactgggacggctacacaggcttcatccacaacgtggtttacgaaaaccacctgaaaaaccacgaagcaccggaagactgcgaattttatatgtgcggccctccgattatgaaccagtccgtcatcaaaatgctcaaagacttgggcgtggaagacgaaaacatcctcttggacgatttcggcggttaa

SEQ ID NO: 62736 - DNA, 777 bp, Neisseria meningitidis
atgtccgacaacgctttgacctcttcgcgacgcttcggcggcatcgccagactctacggagactccgccttggcgcacttttcacaggcacacgtctgcgtagtcggcgtgggcggtgtcggctcgtgggcggtcgaggctttggcgcggacgggcatcggacgtttgactttgattgatttggacaacgttgccgaatccaatgtcaaccgccagctgcacgccctgaccggagacttcggcaaagcaaaagttaccgccttgcgcgaacgcgtcgcccaaatcaacccagaatgccaagtgtttgaaattgaagatttcgttaccgaagacaatttgccggaatacttcggaaaaggttttgatttcgtcatcgacgcgatcgaccaagtgcgcgtcaaagcagcaatggcggcttattttgtggaacgcaaacaaccgtttgtcctcagcggcggcgcgggcggacaaaaaaatccggcgttaatccaaaccgccgatttgagccgcgtaacccacgacccgctgcttgccaacctgcgctacaccttgcggaaacgctacggattcagccgcgatacgaaagcaaatatgcgcgtgccttgcgtgtattcgaccgaaaatatcgtgccgccgcagtctagggaggcttgttcggcagatgccgctccgcaaggcttgtcgtgcgccggctacggtgcaagcatgctcgttaccgcttcgttcgggctatattgcgcacaggcggcggtggaacacatcgcagacaaaaaataa

SEQ ID NO: 62737 - DNA, 2082 bp, Neisseria meningitidis
atgatttacggctcaatgccgtctgaaaagctcacaatttttcagacggcatttgttatgcaagtaaatattcagattccctgtatgctgtacagacgcgggagtgttaagccccccttgtttgaagctccgcggctcctgccgagcttcaccgaccccgttgtgcccaagctctctgcacccggcggctacattgtcgacatccccaaaggcaatctgaaaaccgaaatcgaaaagctggccaaacagcccgaatacgcctacctgaaacagcttcagacggccaagaacgtcgattggaaacaggtgcagctggcctacgacaaatgggactataaacaggaaggcttgaccggagccggtgcagcgattgtggtgattattgtaaccgctctaacttatggatacggagcggctgcagcgggtagcgtaactgccgcaggaagtagtacagccgcagctgcaacaacgacagcggcagcaactaccactgtttctactgcagctgccatgcaaaccgcagctttagcctccttgtatagccaagcagctgtagccatcatcaataataaaggcgatgtaggcaaagcattaaaagatctcggcaccagtgatacggtcaagcagattgttacttccgcactgacggcgggtgcattaaaccagatgggagcagatattgcccaattgaacagcaaggtaagaaccgaactgttcagcagtacgggcaatcaaaccattgccaaccttggaggcagattggccaccaacctcagcaatgcaggtatctcagctggtatcaataccgccgttaacggcggcagcttgaaagacaacttaggcaatgccgcattgggagcattggttaatagcttccaaggggaagccgccagcaaaatcaaaacaaccttcagcgacgattatgttgccaaacagttcgcccacgctttggcgggttgtgttagcggactggtacagggaaaatgtaaagatggggcaattggcgcagcagttggggaaatcgtagctgaatccatacttggcggcagaaaccctgctacactcagcgatgcagaaaagcataaagttatcagttactcgaagattattgcgggcagcgtggcggcactcaacggcggcgatgtgaatactgcggcgaatgcggctgaggtagctgtggtgaataatgctttgaattttgacagcacccctaccaatgcgaaaaagcatcaaccgcagaagcccgacaaaaccgcactggaaaaaatcatccaaagtattatgcctgcacatgcggcaggtgcgatgactaatccgcaggataaggatgctgccatttggataagcaatatccgtaatggcatcacaggcccgattgtgattaccagctatggagtttatgcagcaggttggacagctccgctgatcggtacagctggtaaagcagctatcagcacctgtatggctaatccttctggttgtactgtcatggttacgcaggctgctgaagcgggcgcgggaatcgccacgggtgcggtaacggtaggcaacgcttgggaagctccagtaggagcgttgtcgaaagcgaaggcggctaagcaagctgctcctaaagaaacaataaacaatttggcaaatttagccaaagcagaacagcagattttattccgtattgcccaacgcgatacgcaactggatgcatggaagacgggatttaacaatagagtaaggaaaggagcaggcttgcttgatgcaagtaatattccgataaccattaacggaaaaaccatcaaacctgtacaagccataagcttaaagggagcacccgtttacagcggcgtaagcgaacaggagatttttgcgctttatcggcagatgactggccagaatccgaattttagagttttgcctgacggaagattagcaaatggcattatcagtactggagaatgggcaggaacaaaaattgcattaagaaatttttcaaaaacagagaattcaactcaagcacgatggacattagatttgcagaatcctccatcatttattaaaggtactaaattggagcttaaattccaataa

SEQ ID NO: 62738 - DNA, 447 bp, Neisseria meningitidis
atgctgttgaaggtagtacctgagcgtaccgtttcggcagatgcaaaaaccagagacccgatgtgggacaatgcggctttacagaccagcgaaggcgtaaattttattgctcgtttcctaggattttttagcgatggggaataccgctatgtggatgtcctgcaacccaaccattccgatattattcggtattcaggtaaagattttccgataaatcaaatacttaatcatatacaccccgcccgttatgcggtaacgttcgaaaacaatgtcgattccaagctgcgcaggcactgggtggcaggtgcgaccatacggattatcgaccgccaaactgacgaagtgattgccaagaaaaccatctatgtctttgaaaaaggcttggacggcacgggtggggcgagaatgccgtggaagtttgctatcttgtgcaataaagaaagatag

SEQ ID NO: 62739 - DNA, 324 bp, Neisseria meningitidis; identical to SEQ ID NO: 37053

SEQ ID NO: 62740 - DNA, 246 bp, Neisseria meningitidis; identical to SEQ ID NO: 39751

SEQ ID NO: 62741 - DNA, 1008 bp, Neisseria meningitidis
atgagcaccttcttccggcaaaccgcacaagccatgattgccaaacacatcgaccgtttcccgctattgaagttggaccaggtaattgattggcagccgatcgaacaatacctgaaccgtcaaagaacccgttacctccgagaccaccgcggccgtcccgcctacccgctgttgtccatgttcaaagccgtcctgctcggacaatggcacaacctctccgatcccgaactcgaacacagcctcatcacccgcatcgatttcaacctgttttgccgtttcgacgaactgatcatccccgattacagtaccttatgccgctaccgcaactggctggcgcaagacgacaccctgtccgaattactcaaactgattaactgccaactgaccgaaaaaggcctaaaaatagagaaagcatccgccgccgtcgttgatgccaccattatccagaccgccggcagcaaacagcgtcaggccatagaagttgacgaagaaggacaaatcagcggtcaaaccacaccgagtaaggacagcgatgcccgttggataaagaaaaacggcctctacaaactcggttacaaacaacatacccgtaccgatgcagaaggctatatcgagaaactgcacattactcccgccaatgcccatgagtgcaaacacctgtcgccgttgttggaagggttacccgaaggtacgaccgtctatgccgacaaaggctacgacagtgcggaaaaccggcaacatctggaagaacatcagttgttggacggcattatgcgcaaagcctgccgcaaccgcccgctgtcggaagtgcaaaccaaacgcaaccgatatttgtcgaagacccgttatgtggttgaacagagcttcggtacgctgcaccgtaaattccgctacgctcgggcagcctatttcggactgattaaagtgagtgcgcaaagccacctgaaagcgatgtgtttgaacctgttgaaagcggccaacaggttaagtgcgcccgctgccgcctaa

SEQ ID NO: 62742 - DNA, 687 bp, Neisseria meningitidis
atgtacgcatttaccgacgcacagcaacagaaggcactcttccggctggtgctttttcatatcctcatcatcgccgccagcaactatctggtgcagttccccttccaaattttcggcatccacaccacttggggcgcgttttcctttcccttcatcttcctcgccaccgacctgaccgtccgcattttcggttcgcacttggcacggcagattatcttttgggtcatgttccccgcccttttgctttcctacatcttttccgttttgttccacaacggcagttggacaggcttgggcgcactgtccgaattcaatacctttgtcggacgcatcgccttagccagttttgccgcctacgcgctcggacaaatccttgatatttttgtattcaacaaattacgccgtctgaaagcgtggtggattgccccaaccgcatcaaccgtcatcggcaacgccttggatacgttggtatttttcgccgttgccttctatgcaagcagcgatgaatttatggcggcaaactggcagggcatcgcttttgtcgattacctgttcaaactcaccgtctgcggtctgtttttcctgcccgcctacggcgtgattctgaatctgctgacgaaaaaactgacgaccctgcaaaccaaacaggcgcaagaccgccccgcgccctcgctgcaaaatccgtaa

SEQ ID NO: 62743 - DNA, 1281 bp, Neisseria meningitidis
atgaaatccctttttattcggctgctcctgttgggttcggcggcaggcgttttctatcatacccaaaaccaatccctgcccgcgggcgaacttgtctatccgtccgcaccgcaaatcagggacggcggcgatgcgctgcactacctcaaccgcatccgcgcccaaatcggtttgcacaagctggcacacgcgccggttttggaaaattccgcccgcaggcacgcacgctatctcacgctcaatcccgaagacggacacggcgaacaccatcccgacaatccgcactacaccgcacaaaagctgaccgaacgcacacgccttgccgggtatctctacaacggcgtgcatgaaaacatcagcacggaagaggaagccgccgaatcgtccgacagcgacatccgcacgcagcaacgccaagtggacggattaatgagcgcaatctaccaccgcctttccctacttgaccgccatacggatgaggcaggagcgacatttgtgcgcgaaaacggtaaaaccgttctcgtattcaatcagggcaacggcaggtttgagcggcattgcgcccaaggcagaaatcagccggaagcaggacggaaatattaccgcaacgcctgccataacggtgcggtcgtgtacaccgacgaagccatgcccgcacaggagctgctctatacagcctatcccgtcggcaacggcgcactgccttatttccacggcgagcgtccagaccccgtgccggaatatgaaatcacgggcaatcctgccagcattgatttttccgaggcggcaggcaaaattacgatgaaaagtttcaagctgtatcagggtaaaaacgaaatccgccccgtcagggttttaaccgccggcaacgaccccaacggcaggctgaccgcgtaccaattcgcgcttttcccgctcaagcctttggaatacggtacgctttatacggcggtattcgactatgtccgcaacggacggcgcgcgcaggcgaaatggcagtttagaacccgaaaacccgattacccttattttgaggtaaacggcggcgagacacttgcggttagaaaaggcgaaaaatatttcatccactggcgcggacgctggtgtttggaagcgtgtacccgttatacctaccggcagcgacccggcagccgcctgtccataggaaggcacgaggcgggcggcatcgtcttcagcgttgacggaatggcgggcagccgcatcacgcttgcaccggaaggagaaacggaacgaggcgtaaccctttatttacaggattga

SEQ ID NO: 62744 - DNA, 432 bp, Neisseria meningitidis
atgaaccaactcgaccaacttggcacccgtatcaacctgatttgcaatgtcttcgacaaatggatcgggcagcaggatttgaattacaacctctttgccgtactttataccctggcaaccgaaggcagccgcacgcaaaagcatatcggcgaagagtggagtctgcccaaacagaccgtttcaggcgtatgcaaaacccttgccggacaagggttgattgaatggcaggaaagcgaacaggaccggcgcgaacggttgctgtcgttgaccgaaacaggcaaagcccatgccgcacctttaacagaaagcgcgcaggaattcagcgacaaagtatttgccacattcggcgacaagcgcacaactcggctgtttgccgatttggatgcactggcggaagtgatggaaaaaacaatctcggaaaataaaaaatag

SEQ ID NO: 62745 - DNA, 204 bp, Neisseria meningitidis; identical to SEQ ID NO: 39691

SEQ ID NO: 62746 - DNA, 459 bp, Neisseria meningitidis
atgtcccaagtttttaaagattttgatttgtcctccgtatgggaatccgacagttgggcagatgaaaactacaaagaagccccgtttacccctgaaattttggctgccgtagaaagtgaactgggctataaattgccgcaaagttttattgaattgatggcggtacaaaacggcggaatatttgtcaaaaactgttttccgaccacacagagaaattcgtgggcgaaagatcatgtgcaaatttgcgaggtatcgggaatcggttttgaaaaagaaggaagcctgtgcggcgaaacagggcaaaaactttggctggaagaatgggagtatccgcccatcggtgtgtattttgccaacgacccgtcaggcggtcatgccctatttgccttagactatcgggagtgtggaagagacggagagccgaaagtggtgtttgtcgaacaagaatcggatttttaa

SEQ ID NO: 62747 - DNA, 1008 bp, Neisseria meningitidis
atgagcaccttcttccggcaaaccgcccaagccatgattgccaaacacatcgaccggttcccactattgaagttggaccgggtaattgattggcagccgatcgaacagtacctgaatcgtcaaagaacccgttacctccgagaccaccgcggccgtcccgcctacccgctgttgtccatgttcaaagccgtcctgctcggacaatggcacagcctctccgatcccgaactcgaacacagcctcatcacccgcatcgatttcaacctgttttgccgttttgacgaactgagcatccccgattacagcaccttatgccgctaccgcaactggctggcgcaagataataccctgtccgaattgctcaaactgattaaccgacaactgaccgaaaaaggtttaaaaatagagaaagcatccgccgccgtcattgacgccaccattattcagaccgccggcagcaaacagcgtcaggctatagaagtcgatgaggaaggacaaatcagcggccaaaccacaccgagtaaggacagcgatgcccgttggataaagaaaaacggcctctacaaactcggttacaaacaacatacccgtaccgatgcagaaggctatatcgagaaactgcacatcacccccgccaatgcccatgagtgcaaccacctgttgcctttgctggaaggtatagccgaaggcacgaccgtctatgccgacaaaggctatgacagtgcggaaaaccggcaacatctggaagagcgtcagttgttagacggcattatgcgcaaagcctgccgcaaccgtccgctgtcggaaacgcaaaccaaacataaccagtatttgtcgaagacccgttatgtggtcgaacaaagcttcggtacgctgcaccgtaagttctgctatgttcgggcagcctatttcggactgattaaagtgagtgctcaaagccacctgaaagcgatgtgtttgaacctgttgaaagcggccaacaggttaagtgcgcccgctgccgcctaa

SEQ ID NO: 62748 - DNA, 873 bp, Neisseria meningitidis
atgcccattttgaaccatattgccctcatcggtgtagggctgatcggcggttcgttcgttctcgacctcaaaaggcagggactcgtccgcaccgttaccggtatcgacaccgaccgcgacaacctcgaacgtgcattggaacgcggcgtgattgaccgggcttccgttgccatcgacgcggacagcatcggcggtgcggacttggtactgattgccacgcccgtcgccacctttcccgccattttgaccgcgctgcgccccgttttgccggaacacacttggatttccgatgtcggcagcaccaaatcttcggtcatcgaagccttccgccgctgtctgcccgaccgcctgcaccgctgcatcgccgcccacccgattgccggttcggacagaagcggtgcgcaagccgcgcagttcgggctgttccgccacagaaaactcatcatcacgccacacggcggcgaacattcagacggcattgccttggtagaagaactgtggcacgcggtcggtgcggaaatttatacgatggacgcgcaacgccacgacgcggttttcgccgccgtctcccatatgccccacctgaccgccttcgcctatgtccaccagattctcgaccaccccgacggacaggaatatctgaaattcgccgccacgggctttcgggacttcacccgcatcgcctccggccatcccgccgtgtgggcggacatctgccttgccaacaaagacagcctgctgcaactggttcaaggcttgggcaaacagttggacgttttggcaaacatcctgaccaccgacgaccgcgaagccctgtaccgctattttgaagaagccaaaaccacacgcgaccgctggctggacggcaactga

SEQ ID NO: 62749 - DNA, 267 bp, Neisseria meningitidis
atggcacgcatggtattctgcgttaagctcaacaaagaagccgaaggcatgaaatttccgccgcttcccaacgaattgggcaagcgcatttttgaaaacgtatcgcaagaagcatggatggcgtggacgcgccaccaaacgatgctgattaacgaaaaccgcttaagccttgccgatccgcgcgcgcgcgaatatctggcgcagcagatggagcagtatttcttcggcgacggcgcggatgccgttcagggatatgttccgcaataa

SEQ ID NO: 62750 - DNA, 1197 bp, Neisseria meningitidis
atgggtttgtttgagccgactgccggggatttttcggagatgaaggaaaaggagaaaaaagagaagactagggaggagatggaggcgcaggagcgggaggcggcgctggtgcgtcgtgccgatgtggtgcggcagactgttgcgaattatgaggatgggctggcgcgttatcggaatgtgatggacttgagccgtaacaatattgaggatggggcgcggcggttgcggcaggcgggtgcttttgaacgggatgcggatgccggtttggggttttcgggcggcgataaggtgctttcccccgatgcgcgggctgaggcggattttgcgcggcgtgatacgcgctcgacggatgcgggcggacagacgctgccgtctttgggctttgacgggaatgtgtatcggggcggtaagctggtgcgtgattttgatgcgcagcgtcctttggtgtctgccaagccggatgcgctgtcgccggaggagcaggagctttataagagggcgacgacgcctcatgcgggggctttgaacggtcagttgacggcggcgcagcttaatgcggcgcgggggattgtggcggaacataataaaaatgcggcggacggggaattgggcagggaaaggctggcggcggcggcggcggagaatgcggcgaaccgtgaggcgatgttgcagaaggggcggtttgatgcggcggttaaggcgaatgagggtgcgttgaaccgtgagatggcgcagaggaatgcggacagggcgtttgatgtgcagcaggccgagctggggatgaagcggcaggggtttgagatgaagcgtgaggcggatgcgttggagcttgagaataggaagcgtatcgctgatttgacgcgggcttatggttttgcgaagtcggacgggcaacgtggggagattgcgcggcagattgatgcgcttaatgggaagtttgagcagaaagaggagaagggctttgacccgaatgtgtttaagacaatcagttatgagattaccgacccgaatacgggcttgacggcgaagcgcgaggggattgttgatttgcggacgggcaagcctttggatgtggagtttgcgggagagcgcgagaagcgttatgcggcgttgggctttaagccgaacggtgagaaaacggccgacggtaaaatcatttatgagaatgataggggtgagaagagggttgagcaatga

SEQ ID NO: 62751 - DNA, 171 bp, Neisseria meningitidis
atggcgcaatatatgtgcggcccctgcggctggatttacgatgaagaacacggcgaccccgaacacggcatcccccctgggacaaagtttgaagacatccccgacgactggaaatgccccgaatgcggcgtaggtaaagaagatttctacctgttggatttcgtgatatag

SEQ ID NO: 62752 - DNA, 876 bp, Neisseria meningitidis
atgttacaaggtagcttggttgccctgattaccccgatgaatcaagacggcagcatccattacgaacaactccgcgacttaatcgactggcacattgaaaacggcacggacggcatcgtcgccgtcggcacgacaggcgaatccgccaccctctccgtcgaagaacacaccgccgttatcgaagccgtcgtcaaacacgttgccaaacgcgtccccgtcatcgccggcacaggggcgaacaacaccgtcgaagccatcgccctttcccaagccgccgaaaaagccggcgcggactacaccttatccgtcgtcccctattacaataagccctcccaagaaggcatttaccgccatttcaaagccgttgccgaagccgccgcgattccgatgattatctacaacgtgcccggccgtaccgtcgtcagcatgactaacgacactatcctgcgccttgccgaaatccccaacatcgtcggcgtgaaagaagccagcggcaacatcggcagcaacatcgaactcatcaaccgcgcgcccgaaggcttcgtcgtcctgtccggcgacgaccacaccgccctaccgttcatgctctgcggcggacacggcgttattaccgtagccgccaacgccgcgcccaagctctttgccgatatgtgccgcgccgcgcttcaaggcgatatcgcccttgcacgcgaactcaacgaccggctgattccgatttacgacaccatgttctgcgaacccagccccgccgcaccgaaatgggcggtatccgccctgggcagatgcgaaccgcacgtccgcctgccgctcgttccgctgacggaaggcggacaggcaaaagtccgcgccgccctgaaagcctcaggacaactctaa

SEQ ID NO: 62753 - DNA, 1260 bp, Neisseria meningitidis
atgaaacagaccgtcctccaaaacaacctgcaaaacctgctcgaaagcgcagaaaatatcctgctgcttcaaggtcctgtcggcgatttttttctgcgccttgccgactggctgactgaaaacggcaaaaccgtacataaattcaactttaatgcaggcgacgactatttttatccgcccactcaagcgcataccgttgtttttaacgacaactacgatgcctttcctgaatttttgcaagaatacatcgttcaacatcacatccaggcggttgtctgctttggcgacacacgcccttatcacgtcattgcaaaacgcattgcaaacgaaaaccaagccagtttctgggcgtttgaagaaggctatttccgcccctactacatcacattagaaaaagacggcgtcaacgcattttcaccgttgccgcgccgtgccgacttttttcttgaacaattccccaaactggcccagcaagaatatgaagcgccaacgccggtacgcggcgggtttatgcccatggcaaaaaacgctatccgttactatatcgagttgttccgcaatccacgcaaataccccgactacatccaccaccgcgcacccaatgccggccattacctcaaaccgtggtcgctctccatcctcaagcgtttgaactactatattgaagacatccaaatcgccaaacgtgtggaagcaggcaaatacggcaagttttttattgttcccttacaggtattcaacgacagccaagtccgtatccattgcgactttcccagcgtccgcagcttcctgctccatgttttgagttcatttgccgagcacgcgcctgccgataccaacatcatcatcaagcatcatccgatggaccgcggttttatcgactactggcgcgacattaaacgctttatcaaagaacaccccgaactcaaaggccgcgtgatttatgtccatgatgtccccctgcccgttttcctgcgccacggtctcggcatggttaccatcaacagcaccagcggcctgtccggcctgattcacaatatgcctgtcaaagtgctcggccgtgcccattacgacattcccggcatgactgaccaaaataccttggcagaattttggaatcatccgacaccgcctgacaaagagctgttccatgcctaccgaatgtaccacctcaacgtgacccaaattaacggcaacttctacagtcaggtcttttttcctaacaaaaacacatccgactcttccacaccaacaacctaa

SEQ ID NO: 62754 - DNA, 408 bp, Neisseria meningitidis
ttggctgaaggtcaaaaatcagccgtcaccgagtattacctgaatcacggcaaatggccaaaaaacaatacttctgccggcgtggcatccaccccctccgacatcaaaggcaaatatgttaaggaagttgaagtcaaaaacggcgtcgttaccgccacaatgctttcaagcggcgtaaacaaagaaatccaaggcaaaaaactctccctgtgggccaagcgtcaagacggttcggtaaaatggttctgcggacagccggttacgcgcaacaaagccgccaccgacgacgttgccgccgccaccgacaacaagaagatcgacaccaagcacctgccgtcaacctgccgcgacgcttcatctgccgtttgcatagaaacaccacctacggctttctataaaaatacctaa

SEQ ID NO: 62755 - DNA, 687 bp, Neisseria meningitidis
atgtttgatttcggtttgggcgagctggtttttgtcggcattatcgccctgattgtcctcggccccgaacgcctgcccgaggccgcccgcaccgccggacggctcatcggcaggctgcaacgctttgtcggcagcgtcaaacaggaatttgacacgcaaatcgaactggaagaactaaggaaggcaaagcaggaatttgaagctgccgctgctcaggttcgagacagcctcaaagaaaccggtacggatatggagggtaatctgcacgacatttccgacggtctgaagccttgggaaaaactgcccgaacagcgcacgcctgctgatttcggtgtcgatgaaaacggcaatccctttcccgatgcggcaaacaccctattagacggcatttccgacgttatgccgtccgaacgttcctacgcttccgccgaaacccttggggacagcgggcaaaccggcagtacagccgaacccgcggaaaccgaccaagaccgcgcatggcgggaatacctgactgcttctgccgccgcacccgtcgtacagaccgtcgaagtcagctatatcgatactgctgttgaaacgcctgttccgcacaccacttccctgcgcaaacaggcaataagccgcaaacgcggtttgcgtcccaaatcccgcgccaaacctaaattgcgcgtccgtaaatcataa

SEQ ID NO: 62756 - DNA, 924 bp, Neisseria meningitidis
atggaaaaccaaaggccgctcctaggcttcgcgttggcacttttggcggcgatgacgtggggaacgctgccgattgccgtgcggcaggtattgaagtttgtcgatgcgccgacgctggtgtgggtgcgttttaccgtggcggcggcggtattgtttgttttgctggcattgggcgggcggctgccgaagtggcgggatttttcttggtgctcattcaggctgctgctgctcggcgtggcgggcatttcggcaaactttgtgctgattgcccaagggctgcattatatttcgccgaccacgacgcaggttttgtggcagatttcgccgtttacgatgattgttgtcggtgtgttggtgtttaaagaccggatgactgccgctcagaaaatcggcttggttttgctgcttgccggtttgcttatgttttttaacgataaattcggcgagttgtcgggtttgggcgcgtatgcgaagggcgtgttgctgtgtgcggcaggcagtatggcatgggtgtgttatgccgtggcgcaaaagctgctgtcggcgcaattcgggccgcaacagattctgctgttgatttatgcggcaagtgccgccgtgttcctgccgtttgccgaaccggcacacatcggaagtttggacggtacgttggcgtgggtttgttttgcgtattgctgcttgaatacgttaatcggttacggctcgttcggcgaggcgttgaaacattgggaggcttccaaagtcagcgcggtaacaaccttgctccccgtgtttaccgtaatattttctttgctcgggcattatgtgatgcctgatacttttgccgcgccggatatgaacggtttgggttatgttggcgcactgatcgtggtcgggggtgcggttacggcggcggtgggggacaggctgttcaaacgccgctag

SEQ ID NO: 62757 - DNA, 132 bp, Neisseria meningitidis; identical to SEQ ID NO: 39343

SEQ ID NO: 62758 - DNA, 156 bp, Neisseria meningitidis
ttgacgatgaccgccaaagaattttgtgaaaaacaaatcgcctactggctgaacgaacgccgcaaggcatcagataacgacgatgtgaaggcctttgaatttgccgaacgggaattggcgaattatcgggaaatgttgaaacgctatgccgtctga

SEQ ID NO: 62759 - DNA, 2385 bp, Neisseria meningitidis
atggccgacaactacgtaatttggtttgaaaacctgcgtatgacagatgttgaacgcgtgggcggtaaaaacgcctcgctgggcgaaatgatcagtcagctgaccgaaaaaggcgtgcgcgttcctggcggttttgcaaccacagccgaagcttatcgtgctttcctggctcacaatggtctgagcgagcgtatttccgaagccctgaaacaactggatgttgaagacgttgccgaattggcacgcgtgggtaaagaaatccgtcaatggattttggataccccgttccccgaacagctcgatgccgaaatcgaagcggcatggaacaaaatggttgccgatgccggcggcgcggacatttctgttgccgtacgctcttccgcaaccgccgaagacctgccggacgcatcattcgccggacaacaggaaactttcctgaatatcaatggcttggaaaatgttaaagaagccatgcgccatgtattcgcctccctgtacaacgaccgcgccatctcctaccgcgtacataaaggcttcgaacacgacatcgtcgccctttccgccggcgtacaacgcatggtgcgttccgacagcggcgcgtccggcgtgatgttcaccctcgataccgaatccggttacgaccaagtcgtctttgtcacttcatcctacggtctgggcgaaaacgtcgtacaaggcgcagtcaatcccgacgaattctatgtgttcaaacccacgctgaaagcaggcaaacctgccatcctgcgcaaaaccatgggctcaaaacacatcaaaatgatttttaccgacaaagcagaagccggtaaatccgtaaccaacgtcgatgtccccgaggaagaccgcaaccgcttctccattaccgacgaagaaattactgagttggcgcattacgcactgaccatcgaaaaacactacggccgcccgatggatatcgaatggggacgcgacggcttggacggcaaactctacatcctgcaagcccgtcccgaaaccgtcaaatcccaggaagaaggcagccgcaacctgcgccgcttcgccatcaacggcgaaaaaaccgtattatgcgaaggccgcgccatcggtcagaaagtcggacagggcaaagtacgcctgattaaagatgcttccgagatggattccgtcgaagccggcgacgtactcgttaccgacatgaccgacccggattgggaaccggtgatgaaacgcgcttccgccatcgtgaccaacaggggcggacgtacctgccacgccgccatcatcgcgcgcgaactgggtattcctgccgttgtcggctgcggcaatgcaaccgaattgctgaaaaacggtcaagaagttaccgtatcctgtgccgaaggcgataccggcttcatctactccggcctgctggacgtacaaattaccgatgttgctttggacaacatgcctaaagcacctgtaaaagtcatgatgaacgtcggcaatcccgaactcgcattcagcttcgccaacctgcccagcgaaggcatcggcttggcgcgtatggaatttatcatcaaccgccaaatcggtatccaccccaaagccttgttggaatttgacaaacaagacgacgaattaaaagcggaaattacccgccgtatcgccggttacgcgtcccctgtcgacttctacgtcgataaaatcgccgaaggcgtggcgacattggccgcatcggtttatccgcgtaaaaccatcgtccgtatgtccgacttcaaatccaacgaatacgccaacctggtcggcggcaacgtatacgaaccgcatgaagaaaacccgatgttgggcttccgtggtgcggcgcgttatgtcgccgacaacttcaaagactgtttcgccttggaatgcaaagccttgaaacgcgtccgcgatgaaatggggttgaccaacgttgaaatcatgattccgttcgtccgcactttgggcgaagccgaagccgttgtcaaagccctgaaagaaaacggcttggaacgcggcaaaaacggcctgcgcctgattatgatgtgcgagctgccgagcaacgcggtattggcggaacaattcctgcaatacttcgacggcttctccatcggctcgaacgacatgacccaactgaccctcggtctcgaccgcgacagcggcttggtatccgaatcgtttgacgaacgcaaccctgccgtcaaagtgatgctgcaccttgccatctccgcctgccgcaagcagaacaaatatgtcggcatctgcggtcaaggcccgtccgaccatccggacttcgccaaatggctggttgaggaaggcattgaaagcgtttccctgaacccggataccgtcatcgaaacttggctatatttggcgaatgaattgaacaaataa

SEQ ID NO: 62760 - DNA, 564 bp, Neisseria meningitidis; identical to SEQ ID NO: 59729

SEQ ID NO: 62761 - DNA, 234 bp, Neisseria meningitidis; identical to SEQ ID NO: 41393

SEQ ID NO: 62762 - DNA, 486 bp, Neisseria meningitidis
ttgttgattcaatcggcattatgttttgaggcggaagcccatgaatatactaatattcaagagatggaatgggtgtctttattttctgatccgcaaaaagacgatgatagtcttataacccttaaagatgaaaaaatcactgtaaaaaactatattgtgccttggtggaaaaaaggtgaaaactttagaaaattagaacttattaccactggtaaaaatgataatggaaatttaacggtaaatggaatttacggcatccaatcttttgcagacccgcaattaggatatacgcctgaattatcggtgaaaagcaataatgatattctatttaaaaataatctccaatctgttgacgtgaagccccattccggaaatatccatttggatgccaaaggaaaaattcaatttaatttgaatgtttccgatggtgatggggtacaagatgtagccagtggaaaaaaataccgacaaacaatagtgccttag

SEQ ID NO: 62763 - DNA, 1179 bp, Neisseria meningitidis
atggaatttgtttacgacgtggcagaatcggcagtcagccctgcggtgattaaagtaatcggcttgggcggcggcggttgcaatgcaatcaataacatggttgccaacaatgtgcgcggtgtggagtttatcagtgccaatacggatgcgcagtctctggcaaaaaaccatgcggcgaagagaatccagttgggtacgaatctgacacgcggtttgggcgcgggcgcgaatcccgatatcggccgtgcggcagcccaggaagaccgggaagccattgaagaagccattcgcggtgcgaatatgctgtttatcacgaccggtatgggcggcggtaccggtaccggttccgcgccggttgttgctgagattgccaagtctttgggcattctgaccgttgccgtggttacccgaccgttcgcatatgaaggtaagcgcgtccatgtcgcacaggcagggttggaacagttgaaagaacacgtcgattcgctgatcatcatcccgaacgacaaactgatgactgcattgggtgaagacgtaacgatgcgcgaagccttccgtgccgccgacaatgtattgcgcgatgcggtcgcaggcatttccgaagtggtaacttgcccgagcgaaatcatcaacctcgactttgccgacgtgaaaaccgtgatgagcaaccgcggtatcgctatgatgggttcgggttatgcccaaggtatcgaccgtgcgcgtatggcgaccgaccaggccatttccagtccgctgctggacgatgtaaccttggacggagcgcgcggtgtgctggtcaatattacgaccgcacccggttgcctgaaaatgtccgagttgtctgaagtcatgaaaatcgtcaaccaaagcgcacatcccgatttggaatgcaaattcggtgcggctgaagacgagaccatgagcgaagatgccatccggattaccattatcgctaccggtctgaaagaaaaaggcgcggtcggttttgttccggcaagggaggtagaagcggttgccccgtccaaacaggagcaaagccacaatgtcgaaggtatgatccgcaccaatcgcggtatccgcacgatgaaccttaccgctgcggatttcgacaatcagtccgtacttgacgactttgaaatccctgcgattttgcgtcgtcaacacaattcagacaaataa

SEQ ID NO: 62764 - DNA, 1977 bp, Neisseria meningitidis
atgtccaaactcaaaaccatcgctctgaccgcatcaggtctgtccgtttgtccgggtttcctatacgcccaaaacacctcatcacaccaaatcggtttggcgattatgcgcttaaactcttcaatactcgacctgcccccgacaaaacaatatttccaatccggcagcctgtggagcgagctgcgccaaggcttccggatgggcgaagtcaatcccgaactggtacgccgccacgaaagcaaattcatcgcaagccacagctatttcaacagggtcatcaaccggagtagaccctatatgtaccatatcgccaacgaagtcaaaaaacgcaatatgcccgccgaagccgccctgcttcccttcatcgaaagcgcgttcgtcaccaaagccaaatcacacgtcggcgcatcaggattatggcagtttatgcccgctaccggcaggcattacggcctggaaaaaacaccggtttacgacggcaggcacgacgtttacgccgccaccgatgccgcactcaactatctgcaatacctctatggactgttcggcgactggccgcttgcctttgccgcctacaactggggtgaaggcaacgtcggacgcgccatcaaccgcgcccgcgcccaagggctcgaaccgacctacgaaaacctgcgtatgcccaacgaaacgcgcaactatgtccccaagctgctcgccgtgcgcaacattattgccactccccaatctttcggcatgaatatcagcgacatagacaacaaaccctattttcaggcagtcgaaccggatcgtccgctcgacaacgaagccatcgcccggcttgccggcatcacgcaaagcgagctgctcgccctaaaccccgcattcaacgtccccgcgtttatccccaaaagcaaacgcaaactgctgcttcctgtcgcgtccgtacaaaccttccaaagcaactacctcaacgccgcacccgacagcctgttttcatgggaagtctatacgcctgccgccaaaaccagcctgtccgacatctcgacggcaaccggcatgagcattgccgacatcaaacgcctcaacaacctgaacggcaaccttgtcaacgcaggacgcagcatccttgtcgccaagaacggcaagacccttcagacggcatcggaatccgtcgtttccatcgacatcgacaatacgcccgacacctaccgttccaatatgccggcaggcacggtgaacgtcggcattgcccgaatccgaccctccgccgcacagacagcggacattaccgtcgcacctttgccgcagaaaaccgtccgtacggaacccgatccccttgtccgtattgccgaacctgcccttgcgacagccgcagcgcaacctcaaaccgaaaaacagaccgccatgccgtctgaaacccaaaccgcaacactcgcgcagatcgtcccccaaaacgacatgcaggcggcagacgaactcatgcagcttgttgcccgaaacaacctgcgccgacaggctgaagaaaccatctccgccgtcatcggcacgcctgacacagttgccgaacacaacatttcctcatctccgcaacataccgttgccgccgacggcaaacgccgggtacgtttggaaacgcgcgtagccaaagctgccgacggcgaagccgaaatctccccgctccatgccagcatccaccgcgttgtagaaggcgacaccctgttcaacattgccaaacgctacaacgtcagtgtagccgacctgattgtcgccaacaacatcaaaggcaacaccatccaaaaaggacaggtactccgcctggcgcaggcagcccctgcccaaacccgtattgaaaaagtatcctacaccgcgcacaaaggcgacaccttcaaaagtatcgccgcgcgcttcaatatccatatcgacgacatccgccggctcaatcccaacctgaacaccatcaatccaggacagagggtcaaactgattggaagctga

SEQ ID NO: 62765 - DNA, 285 bp, Neisseria meningitidis
atgttcggcggtcgtctgaaaaacgctccatccattaccgccaaacactttttaaaggaaaatatcatgaaatttattaacacctgccgtaaatacggcgcaaaactggctgttgtaacagctgctcccctggctttggccgcacatgcaaatgcaacgttgcccgatacggcaaaaaacgctttggaagccgcaaaagcggacggtatggaagccggttggattgtcgttggcgttttcgccgcgctttttgtgttttccatcgttaagagagtgatgaagtaa

SEQ ID NO: 62766 - DNA, 1248 bp, Neisseria meningitidis
atgccgtctgaaacctcttccccacgcaaagaaaacgaaacagaagtacacattcctgccgctccttttatcgtcaaacagtccggcagcaacgctttggcagtctgcgccctggtattggcggcattgggtttgggtacaagtggttttttgtttgtccaaggacagaatgtcttgaaaaaccaagagttggcattcaaccaaaaaatcgacaaagccgctttgggcgagtcggaaaacgccgccctgctcaaagacaacctcaaccggcaagccgccatacaatcagagctcgaccgtttggacggaaacgtcaaagcaaacggcgaacaaatcttggaaatgcaaaaatcctatcgcgagttgaccaaaggacgtgccgattggctggtggacgaaaccgataccatactcaatttggcagcgcaacagctggtgttgaccggcaatatccaaacggcagtcggcgtgttggagcatatcgacagccgcctgtcccgtttcaatcaggcagagcttctgccgatcaagcaggcggtcagcagcgacttggcggaactgaaaaaccgtccctatgtcgatatttccggcacggcattgcgcctcgacaggctggaaaccgccgtattcggactgccgctgattttggacggcgtattgaaaccgggcgtacaggtgaagaacgaagccgcttctgcttcatggtggcagaacgtatgggaaaaatccctcggcacattgaaggggctggtcgaaatccgccgtttggaaaacaacgatgccatgctgatttctcccgaacaggcatattttgtgcgtgaaaacctgcgcctccgccttttggatgcgcggactgcattaatgcagcgcaacagcgaagtctatcagggcgatttgaacaatgccgaagccgccgtcagacagtatttcgatgccaagtctcccgccacgcagtcgtggctgaaagaactggcggaattgaaggagttggatgtgcgcatgacggcggatgacggtttgaaggccagtttaaatgccgtccgcgcctatcgcgacggtacgcgcatgatggcggcggaaaatcaagaagcggaacaggcggtttccgaaccgtctgccgcatcggatgtgaagaccatagaagcaccgtccctgccttcggaacgcaaaccggaacagcctgcaaaaaaacagcccgtaccggaaaaggcagggcgttcgccgtccgctaaaggagaacgcgcatga

SEQ ID NO: 62767 - DNA, 663 bp, Neisseria meningitidis
atggattcccaaaaatttaccgaagcatccaaacggcggttgagcgaattgttggatgccaaaagcgaacaaggcaacacgatgcgttgcgacgaggttcaaggttttatgacggcgctgttgagcgggccggacaaattgacaccgctcgactggctgcccgaagtgttgggcgacgaatcgcaatttaccgccgccgaacgttccgaaatcgaacggctggttttggcaatggcgatggaaacaaccgccgcgatgtcggataaaaaactgcccgatttgtggctgtatgaaaacgaagacggcggcagcgatttttacacatggtgcaatgcttatctttacggtttggatattgtgccgaccgattggtttgaagccgtcgatgatgaagcgtttgaagagttgttttatcccatcatggcattgggcggtatttacgatgaagaggacaacggcactatccgtctgcaattcacagaaggcgagctggcggaactggaatccgagttgccttatgcattggcggatatctaccgctactggcaggcggtcatcaacaaaccgcaaaccgtccgcagggaaggcgaaaaaacaggcaggaacgatccctgtccgtgcggcagcggcagaaaatacaaggcgtgttgcggtaagaattga

SEQ ID NO: 62768 - DNA, 777 bp, Neisseria meningitidis
atggctaagaaattcgataaagacagcttcagcggcacgctgattgtcgtgttggcggtcagcctgatttgctcggtcatcgttgccggtgcggtcgtcggcttgaaacccatccaagaaaaacaaaaactccaagacaaacaaggctatattttgagcgtggccggtttgatggataaggacaccgacatcggcaaaacctttgccgagcgtatcgagcaacgcgtggtcgatttggcgaccggcgaatatgtgaaagacgcgccaaaagacttcagcgcgcgcatcgcaggcaaagaccccgcgcaaagcatccgaatcaaacccgaagacgatttggcaggcatcaaaagccgtgccaaatacactgaggtttatttggtaaaaggcgaagacggcaaaatcggccaaatcatcctgccgatgcacggtaacggtttgtggtcggtcatgtacggctttgtcgccattcaaccggacggcaacaccatcaacggcattacctactacgaacaaggcgaaaccccgggcttgggcggcgaaatcggcaatccgttgtggcagcaaaaattcgtcggcaaaaaactgtttgacggacaaggcaaactcgccctgcacgtcggcaaaggcgcgggttcggacaaagaacacggcgtagatgccctctccggcgcgtcgctgacttccaaaggcgtgcaaggttcgttcgcctactggtttggcgaaaacggctatatcccctacctgaacaaattgaaatcagtaggagcacaataa

SEQ ID NO: 62769 - DNA, 270 bp, Neisseria meningitidis
gtgaacaagtctgaattgatcgaagcgattgctcaagaagccgacatttccaaagccgccgcacaaaaagctttggatgccactaccaatgcagtaaccaccgccctgaaacaaggcgacaccgttactttggtcggtttcggtactttctacgtgggcgaacgtgcggaacgccaaggtcgcaaccccaaaaccggcgagcctctgaccattgccgccgccaaaacgcctaaattccgtgcaggtaaagcattgaaagacgcactgtaa

SEQ ID NO: 62770 - DNA, 1176 bp, Neisseria meningitidis
atgcacaccatttcctttccaaaccgcacccgactcaccgccctgccgcccctgtcgctttacatccacatcccgtggtgcatcaaaaaatgcccgtattgcgacttcaattcccacagcctgaaaaacggattgcccgaagccgcctatatcgacgcgctgctgaccgatttgcagcttgaattgcccaatatttggggcaggccggtggaaacgatctttttcggcggcggtacgcccagcctgtttcaggcggaatcgattgaccgtttgttaagcggcgtgcgttcgctgttgcgcttgcagccggaagcggaaattaccttggaagccaatccggggacatttgaaatcgagaagtttcaaggatttaaagacgcgggtattacgcggctttctatcggcgtacagagtttcaacgacgatatgctctcaaggctggggcgcgtccacaacggtaaggaagccttaaccgctatcgataccgccttgaaattatttgataaagtcaatatcgacttgatgtatgccctgccgaaccaaaccgttcagacggcattggacgacgtacaaaccgctatcgctacgggcgcgacccacatcagcgcgtatcatctgacgatggaaccgaacacgccgttcggtcatacgccgccgaaaggtttgccgcaagacgaagccgccctcgacatcgaagacgcggtacacggcgcattggaaaacgccggctttatccattacgaaacatcggcttttgcgaaacccgccatgcggtgccgccacaatttgaactactggcagttcggcgattatttgggcataggcgcgggcgcgcacggcaaaatttcctaccccgaccgcatcgagcgcaccgtccgccgccgccatcccaacgactacctcgccctgatgcaaaaccggccgggtgaagccgtcgaacgcaaaaccgtcgccgccgaagatttgccgttcgagtttatgatgaacgccctgcgcctgaccgacggcgtacccgccgcgatgttgcaggagcgcacgggcgtaccgagtgccaaaatcatggcgcaaatcgaaacggcaaggcaaaaaggtttattggaaaccaaccccgccgtattccgcccgaccgaacgtggacgattgtttttaaacgatttattgcagtgttttttataa

SEQ ID NO: 62771 - DNA, 282 bp, Neisseria meningitidis
atggaaaacgggcaacggaataaccggtttcctttggaaaaacgaattttttatctggagcattcggggcggtatctgatgatttgcgccttatcggattattcccaaaacaaacatactgtcgttatggcaaatttcatctatccggatgaaaaaatggattggcggaatttggatgatttattcaatgagttggttttagaggaattgcaggcttcatttatggattggcatccgactgttgaagaggcaatcagccgtcatttggaagacttttcgtaa

SEQ ID NO: 62772 - DNA, 525 bp, Neisseria meningitidis
gtgttggacagggaaggctatcgccccaatgtcggtatcatcttaatcaacaaccgcaacgaagtcttttggggcaagcgcgtgcgcgaacattcttggcagtttccgcaaggcggcatcaagccgggcgaaagccccgaaaccgcgatgtaccgcgagctttacgaagaagtcggacttctgccgcaacacgtcaaaatcgtcgggcggacgcgcgactggctgcgttacgacgtgccgaacaactgggtacgccgcgaatggcgcggctcttatcgcggacagaagcagatttggtatctcctgcgcctgaccggccgggattgcgatgtcaacctgcgcgccacccgccaccccgaatttgacggctggcgttggcaccaatattgggcgcccgttgacgaagtgattgatttcaaacgcgacgtttatttgggggcattgaaagaactttcttcccgcttcctgcgcggtatggaaagttatgaagactttgccgcccgccaactttccggcaaccggtaa

SEQ ID NO: 62773 - DNA, 876 bp, Neisseria meningitidis
atgccgaccgtccgttttaccgaatccgtcagcaaacaagaccttgatgccctgttcgagtgggcaaaagcaagttacggtgcagaaagttgctggaaaacgctgtatctgaacggcctgcctttgggcaacctgtcgccggaatgggtggaacgcgtcaaaaaagactgggaggcaggctgctcggagtcttcagacggcattttcctgaatgcggacggctggccggatatgggcggacgcttacagcacctcgccctcggttggcactgtgcggggctgttggacggctggcgcaacgagtgtttcgacctgaccgacggcggcggcaaccccttgttcacgctcgaacgcgccgctttccgtccgttcggactgctcagccgcgccgtccatctcaacggactgaccgaatcggacggccgatggcatttctggataggcaggcgcagtccgcacaaagcagtcgatcccgacaaactcgacaatactgccgccggcggtgtttccagcggtgaattgccgtctgaaaccgtgtgtcgcgaaagcagcgaagaagccggtttggataaaacgctgcttccgctcatccgcccggtatcgcagctgcacagcctgcgccccgtcagccggggtgtgcacaatgaaatcctgtatgtattcgatgccgtcctgcccgaaaccttcctgcctgaaaatcaggatggcgaagtggcgggttttgagaaaatggacatcggcggtctgttggctgccatgttgtcgggaaacatgatgcacgacgcgcaactggttacgctggacgcgttttgccgttacggtctgattgatgccgcccatccgctgtccgagtggctggacggcatacgtttatag

SEQ ID NO: 62774 - DNA, 447 bp, Neisseria meningitidis
gtgcgcgcctttcagacagcattgaggccgtcccgcatcctgaacatcctgaccgtatcgctccactcggcttcccttgccgtctgcctgacctggttttacggccggatgatgtggttcggtttggcggctttggcggcaagttacgcatactcgctcaggataacgaatctgaaacaccgccatgccataaccgccattaccatagaccgcgacggacaggcggaaatcgtatccggcaaagaaaaaacagcaaaggcggcaacacttgcgggcagcagtatggttacgccttatgccttattcttacaatgggacaccggcggcaaaaccgtccgccactgcatcatgcccgacatgacggacaaagaatcctaccgcaagctgaaagtctgggtactttggcggcagccgaaaaaaaccgccgaaaccgatacatcagactga

SEQ ID NO: 62775 - DNA, 741 bp, Neisseria meningitidis; identical to SEQ ID NO: 39703

SEQ ID NO: 62776 - DNA, 1089 bp, Neisseria meningitidis
atgagcgactacacgcagcagcttcaagataaaaaagaccaccttaaaaccctttttgcaggtttggatgttcctgagtgggaagtgtacgaatctccggacaaacattaccgtatgcgtgccgagttccgtatttggcacgaaggcggtgaaatgttttatgccatgtttgaaaaaggacaaaaggctggcggggcaagcctgatccgttgcgaccgttttgaagcggcttccgaagccgtcaaccgcctgatgccagaattgattgccgttgccgcccaatctgccgaactgagaaaccgttggtatgccgtcgaatttttgtctacgctcagcggggaaatgctggttaccatgatttaccacaaaaggcttgataatgagtggatgcaggcggcgcaagcgttacagcaacagttggatatttccgtcatcgggcggagcaggggacagaaaatagtcttaaaacaggactatgtaacggaaactttgaaggtcggcaaccgggatttccgttatcggcaaattgaaggcagttttacccaaccgaatgccgccgtgtgtcagaaaatgcttgaatgggcctgcggtgcagcagaaggattggatggggatttgctcgaactgtattgcggaaacggcaactttacgcttcctttatctgaaaagtttgaacgtgttttggcaaccgaaatctccaaaacctccgtcagcgcggcgcaatggaatatcgaagccaaccgcatcggcaacatcaaaatcgcccgtctgtctgccgaagaatttaccgaagcctataccggaaaacgtgagtttaaacgccttaaggatggcggtattgctttgacggattacgcattttccactattttcgtcgatccgccgcgtgccggtatcgatgaggaaactttgaagctggtgtcgcagtttgacaacatcatctacatttcctgcaatcccgaaacgctgcgtgccaatttggacaccttggcggaaacccatgcggtcgaacgtgccgccttgttcgaccaattcccgtttacgcaccatatcgaaagtggtgtattgttgaaaaagaaaatcctttga

SEQ ID NO: 62777 - DNA, 876 bp, Neisseria meningitidis; identical to SEQ ID NO: 45531

SEQ ID NO: 62778 - DNA, 1284 bp, Neisseria meningitidis
atgaaccgtaacgaaattttattcgaccgcgccaaagccatcatccccggcggcgtgaattcccccgtccgcgcattcggcagcgtcggcggcgtgccgcgcttcatcaaaaaagccgaaggcgcgtatgtttgggacgaaaacggcacgcgttataccgactatgtcggctcttgggggcctgcgattgtcggacacgcgcaccccgaagtcgtcgaagccgtgcgcgaagccgcgttgggcggtttgtcgttcggcgcgcccaccgagggcgaaatcgccattgccgaacaaatcgccaaaatcatgccgtccgtcgaacggctgcgcctcgtcagctccggtaccgaagcgacgatgaccgccatccgtttggcacgcggttttaccggtcgcgacaaaatcatcaagtttgaaggctgctaccacgggcattccgacagcctgctggtgaaagccggcagcggcctgctgacgttcggcaatccttcttccgccggtgtgcctgccgactttaccaaacacactttagtccttgagtacaacaacatcgcccaattggaagaagcctttgctcaaagcggcaatgacattgcctgtgtgattttggagccttttgtcggcaatatgaaccttgtccgcccgaccgaagccttcgtcaaagccctgcgcgaattgactgaaaaacacggcgccgtgttgatttacgacgaagtgatgaccggtttccgcgtcgcgctcggcggcgcacaatcgctgcacggcatcatgcccgacctgaccacgatgggcaaagtcatcggcggcggtatgccgcttgccgcgttcggcgggcgcaaagacattatggaatgtatttccccgctgggcggcgtgtatcaggcaggcaccttgtcgggcaacccgattgccgtcgccgccggtttgaaaacgctggaaatcatccgccgcgaagggttttatgaaaacctgacggcgcgtaccgaacagttggttcaaggttttcggacggcagcggatgcggcgggcatcgagttcaccgccgacagcgtgggcggtatgttcggtctgtatttcgccgcacacgcgccgcgaaattatgccgatatggcgcgatccaatatcgacgctttcaaacgcttcttccacggcatgctcgaccgcggcattgccttcggcccgtccgcttatgaagcaggtttcgtttctgccgcgcatacgcccgagctgattgacgaaacggttgcggttgcggttgaagtgttcaaggcgatggctgcatga

SEQ ID NO: 62779 - DNA, 2526 bp, Neisseria meningitidis
atgaatccaaactcaaaacataacactaactttaccaatcttcttaaaccgtctgatagtgatataaaacaatttgccgcacaacacatccgccacctcaccgacctgctcaaccgctatgcctacgaatactacaccctcgacgcgcccagcgtacccgatgccgaatacgacaaattattccgtgaactcgaagcgttggaattaaaccatcccgagctcaaactgcccgacagcccgacccagcgcgtcggcggcgagcctctggcgggatttgccgaagtacgccacgaagtgccgatgctgtcgctgaccaacgccttttccccgcaagatgaaaacggcgtgttcgaccatgcagaaatgtacgctttcgaccaacgcgtgcgcgacggcttggacggcggcaatcccgaatacgttatcgaacccaaattcgacggcctcgccatcagcctgctctaccgcgacggcgtattggtgcaggcggcaacgcgcggcgacggtacgacgggcgaagacgttacccaaaacgtcaaaaccgtcgccaacatccccttgcggctgcacggcgaaaatacgcccgaactcatcgaagtacgcggcgaagtgctgatgcaaaaagccgattttgccaccctcaataaaagacaagccgaaaacgggcaaaaaccctttgccaacccacgcaacgccgccgccggcagcctgcgccaactcgattcacgcatcactgcgcaacgcaaattgcactttttcccctactccgtcgcccgtcagcaaggcggtttcgtcgcggaagagcacatccaagaactcgcctatttccaagaactcggcttcagcctgcctaacggcaatttcggctgtttcaaaaatatcgacgaagtattggcgttttacgaacaaatgcagcaaaaacgccctgagctaccctatgaaatcgacggcatggtcgtcaaagtcaacagcttggcgcaacagcacgaactcggcttcatctcccgcgcgccgcgttgggcggttgcccacaaattccctgccgaagaagccctgaccattgtcgaagcgattgacgtgcaaatcggcaggacgggcgcggtaacgccggttgcccgattacaacccgtattcgtcggtggcgtaactgttaccaacgccaccctgcacaatcaggacgaagtatcgcgcaaagacgttcgcgtcggcgataccgtcgtcgtacgccgtgccggagacgtgattcccgaagttgtgcgcgtgatttttgaacgccgcccgatgcgggaaaccgccgttgccgtttcagacggcatcgggcatcggcaggacgatttgtttgccgaaacaccgtccgctaatcaaacccaatccgttccgctccacaagccctaccgcctgccgacccattgccccatctgccgcagcgaaatcgaacgcgaagaaggcgaagccgtcgcccgatgcagcggcggtatgctttgtcaggcacaacgcgcgcaaggcttaatccacttcgcctcgcgcaaagcgatggacatcgacggcttgggtgaaaaacaaatcgaacagcttgtcgcccaagacctcgtccgccacttcgccgacctctaccgcctcgatattccgaccctgcaaaaaatgaaggaagcggcggacaaaaccgttgccgaatcggatcaaatgccgtctgaaggcagttcggtcggcgcgtcgggcaaacataaaaaacaaccgaccaagtgggcggaaaacatcctcgcaggcatagaatccggcaaaacgcccgaactcgcccgcttcctgttcgcgctcggcatccgccacgtcggcgaacgcaccgccaaaacgctggcacaggcattcggcacattggaacgcgtccgccgcgcccccgaacccgtcctcgcctgcctgcccgacatcggtacggtagtggcgcgttccattgcccacttcttcgcccaagccgaacagcaggcgatgatagacgagctgctcgccgcaggcgttgccccgcaagcccaagccgtcagcctgcctgccgcacaatatgccgaaccgcaacgctggattgcccgcctgcccggtttcaaaattagcgaaaacaaagcccaagccttatgggaactcgccggcaaaagtatagagggtctgcaaaccgacaaatccctccccgccgactggcaagcatggcgcagcgaaccacaaaacgccgccctactcgaaaacctgaaaaccttcttcgcgcaaatgccgtctgaagacgaggcggcgcaaggttcagacggcatcaataaagccgtagcgggcaaaaccttcgtgttaactggcacactgcccaccctcaaacgcgaccaagcccaatccctaatcgaagccgcaggcggcaaagtttccggcagcgtgtccaaaaaaaccgattacgtcgtcgccggagaagccgcgggcagcaagctggaaaaagccaatgccttgggcgtttccgtcctcagcgaagccgaactgcttaccctgctcggctga

SEQ ID NO: 62780 - DNA, 669 bp, Neisseria meningitidis; identical to SEQ ID NO: 42517

SEQ ID NO: 62781 - DNA, 297 bp, Neisseria meningitidis; identical to SEQ ID NO: 38749

SEQ ID NO: 62782 - DNA, 387 bp, Neisseria meningitidis
atgtggaaaatttataaagaaaatagcaccgacttaaattttgccataggcagtatatattgccaagcaatcaatcttaccgaatttgaaatgtgggtcgaaaaaatcataagggaagtggatttagatgaaattccaaattatttttttgatttgatagattttcaatcactatacgatctgattgatattataggatttgttcccgaaaataatttatcaaaaaatcaggataatgcattaaccggtattgcttttttaagggggatagatgtctatgaccctcccgtttcaaaagaaaaagcattaaaagccttagaaaaacatcctgaaatttatcagaggtttcagcatttcttcccatttgtagagctgcccccgctttaa

SEQ ID NO: 62783 - DNA, 1143 bp, Neisseria meningitidis
atgaaggtttttaaacaacagcttgaacaactcggcgcgcaaaaccaatatcgttcgattccggatttgattcatcaagggcggtatattacgcgggaaaaccgcaaaatgctgaatatgtcgtctaatgattatttgggtttggcatcagatgaaaacttgcgccggtcttttttgcagcaatacggcggtaattttccctcttttaccagttcttcatcgcgtttattaacgggcaactttcctatttataccgatttggaagagcttgtcgcacaacgtttccaacgggaaagcgcgttattgttcaacagcggctatcacgccaatctcggtattttgcctgctttgacgacgacgaaaagtttgattttggcagataaatttgttcacgccagtatgattgacggcatccgtttgagccggtgtgcgtttttccgttatcgtcataatgattatgaacatttgaaaaatctgcttgaaaaaaacgtcggaaaatttgaccgcacttttatcgttaccgaatctgttttcagtatggacggcgatgtggcggatttgaaacagcttgtccaattaaaaaaacagtttcccaatacttatctttatgtggatgaagcccacgcaatcggtgtttatgggcaaaacggattggggattgccgaacgggataatttgattgccgagattgatttactggtcggcactttcggtaaagccttagcctcggtgggggcgtatgccgtctgcaaccaagtattgaaagaatgtttgattaatcaaatgcgtccattgattttttcaaccgcattgccgccgtttaatgtggcttggacttattttatttttgaacgattgccgcaattctcaaaagaaagaagccatcttgagcagttaagcgcatttttacggcgggaagtggcgcatcggacgcaaataatgccgagccaaacctgtatcgtcccctatattttaggcgggaatgaagccacccttgccaaagcggaatacctgcaaaggcagggttattattgcctgcccatcagaccaccgacagtaccaaaaggtacatccagaatacgattgtctttgacggcagatatgacaatggatgaagtgcggcagtttgcggcgtgcctgtaa

SEQ ID NO: 62784 - DNA, 954 bp, Neisseria meningitidis
atgacacataccgtccacctgcatttagaagaaaccgacaacttggcgttgcagcgtctgtgcggttcttttgacaacaaccttgatttacttgctaaagcactcgatatccacatcagccgccgttttgaacatttcactttcaacggcgcatttgcacacgccggcaaacgcgcactgctcaaactcttggaaacggcgcagacgcgcgacctaaacgacggcgacatcaggcttgccgccgtcgaagcccaaaccgaagatgccggtcatcaagaaaaaaaccatgaccacgcctattatttccgcaccaagcgcggcagcatcggcggcagaacgccacggcagaacggctatatccgcgccctactcaaccacgacatcatattcggtctcgggccggcaggtacgggcaaaacctatctcgcagtcgccgccgccgtcgatgcgatggaaaaacaccaagtcgaacgcatcattttagtgcggcctgccgtcgaagccggcgagaaactgggcttcctgcccggagacctgacccagaaagtcgatccctaccttcgtccgctttatgatgccctctatgacctgatgggctttgaccgtgtaaccaagctgattgaaaaaggcctgattgaaatcgccccgctcgcctatatgcgcggcaggacgctcaacggcgcatacatcatcctcgacgaagcgcaaaacaccacgcccgaacaaatgaaaatgttcctgacccgcatcggcttcggcgcgaaagccgtcattaccggcgacaccagccaaatcgacctgcccaaaaacatcaaatcgggattaaaagatgcgcgtgagaaactacacggcgtggaagggctgtatttccacacctttaccggcgaagacgttgtccggcatcctttggtgcaaaaaatcgtcgaagcctacgaatcggcagaacacgactga

SEQ ID NO: 62785 - DNA, 492 bp, Neisseria meningitidis
atgaattccctctttgtggacaatactgttttcattacacggctgaaagccgggcatatcggcaggttggttcaggcgttgtttgaggagtggcacggatttgaaccgtggtcttctgtggataagattcgtgcctattacggcagatgtttgaaggatgacgaactgccgctggcatttgcggctgtggatgattccgaaaccctgttgggttcggctgcggtcaagcggcatgatatggaaagttttccacggtatgaatattggttgggggatgtctttgttttacctgaatatcgcggaaaaggcattggcaggaggctggtcgcccactgcataggcgcagcgcgttcgctggggataaagttcttgtatctttatacgcctgatgtgcaaatattttatgaatcattcggctgggcggttgtcgggcgacatttccataacggtgaatgggttacggttatgcgtttggatgtggataaggtttaa

SEQ ID NO: 62786 - DNA, 342 bp, Neisseria meningitidis; identical to SEQ ID NO: 58973

SEQ ID NO: 62787 - DNA, 360 bp, Neisseria meningitidis; identical to SEQ ID NO: 38354

SEQ ID NO: 62788 - DNA, 966 bp, Neisseria meningitidis
atgagctacacgcaactgacccaaggcgaacgataccacatccaatacctgtcccgccactgcaccgtcaccgaaatcgccaaacagctgaaccgccacaaaagcaccatcagccgcgaaatcagacggcaccgcacccaagggcagcaatacagcgccgaaaaagcccagcggcaaagccggactatcaaacagcgtaagcgacaaccctataagctcgattcgcagctgagtcagcacatcgacacccttatccgccgcaaactcagtcccgaacaagtatgcgcctacctgtgcaaacaccaccagatcacgctccaccacagcaccatttaccgctaccttcgccaagacaaaagcaacggcagcacgttgtggcaacatctcagaatatgcagcaaaccctaccgcaaacgctacggcagcacatggaccagaggcaaagtccccaaccgtgtcggcatagaaaaccgacccgctatcgtcgaccagaaatcccgtatcggcgattgggaagccgacaccattgtcggcaaaggacagaaaagcgcattattgaccttggtcgaacgcgttacccgctacaccatcatctgcaaattggatagcctcaaagccgaagacactgcccgggcagctgttagggcattaaaggcacataaagacagggtgcacaccattaccatggataacggcaaagagttctaccaacacaccaaaataaccaaagcattgaaagcggagacttatttttgtcgcccttaccattcttgggagaaagggctgaatgagaacaccaacggactcatccggcaatacttccccaaacaaaccgatttccgtaacatcagtgatcgggagatacgcagggttcaagatgagttgaaccaccgaccaagaaaaacacttggctacgaaacgccaagtgttttattcttgaatctgttccaaccactaatacactag

SEQ ID NO: 62789 - DNA, 687 bp, Neisseria meningitidis; identical to SEQ ID NO: 39393

SEQ ID NO: 62790 - DNA, 1005 bp, Neisseria meningitidis
atgcaacgacaaatcgaactgaaaaattggcttcagaccatctattccggccgcagtttcgaactggcctttgcggcggcagatgctgatttccgccgctatttccgtgcaacgttttcagacggcagcagtgtcgtctgcatggatgcgccgcctgacaagatgagtgtcgcaccttatttgaaagtgcagaaactgtttgacatggtcaatgtgccgcagatattgcacgcggacacggatttggggtttgtggtattgaacgacttgggcaatacgacgtttttaaccgcgatgcttcaggaacagggcgaaacggcgcacaaagcgctgctgctggaggccatcggcgagctggtcgaattgcagaaggcaagccgtgaaggggttttgcccgaatatgaccgtgaaacgatgttgcgcgaaattaacctgttcccggaatggtttgtcgcaaaagaattggggcgcgaattaacattcaaacaacgccaactttggcagcagaccgtcgatacactgctgccgcccctgttggcgcagcccaaagtctatgtgcaccgcgactttatcgtccgcaacctgatgctgacgcgcggcaggccgggcgttttagacttccaagacgcgctttacggcccgatttcctacgatttggtgtcgctgttgcgcgatgcctttatcgagtgggaagaagaatttgtcttggacttggttatccgctactgggaaaaggcgcgggctgccggcctgcccgtccccgaagcgtttgacgagttttaccgctggttcgaatggatgggcgtgcagcggcacttgaaggttgcaggcatcttcgcacgcctgtactaccgcgacggcaaagacaaataccatccggaaatcccgcgtttcttaaactatctgcgccgcgtatcgcgccgttatgccgaactcgccccgctctacgcgctcttggtcgaactggtcggcgatgaagaactggaaacgggctttacgttttaa

SEQ ID NO: 62791 - DNA, 324 bp, Neisseria meningitidis; identical to SEQ ID NO: 37971

SEQ ID NO: 62792 - DNA, 309 bp, Neisseria meningitidis; identical to SEQ ID NO: 36432

SEQ ID NO: 62793 - DNA, 567 bp, Neisseria meningitidis; identical to SEQ ID NO: 37645

SEQ ID NO: 62794 - DNA, 2115 bp, Neisseria meningitidis
atggatttattatcggttttccacaaataccgtctgaaatatgcggtggccgtgctgacgatactgcttttggcggcagtcgggctgcacgcttccgtctatcgcatcttcacacctgaaaacatccgcagccgcctccaacaaagcattgcacacacacaccggaaaatctcgtttgatgcggacattcagcgcaggctcctgccccggccgaccgtcatcctgaaaaacctgaccattaccgaacccggcggcgaccggactgccgtttccgtccaagaaaccaaaatcggattgagctggaaaaacctgtggtcggatcagatacagattgaaaaatgggtggtttcgagtgcggaacttgccctgacgcgcgacgggaaaggtgtttggaacattcaagacctgatcgacagccaaaaacgccaagcctcagtcaaccgcattatcgtcgaaaacagcaccgtccgcctcaatttcctgcaggaacagcttatcctgaaggaaatcaacctcaacctgcaatcccccgattcgtcggggcagccgtttgaaagttcgggcatactagtttggggaaagctgtccgtcccgtggaaaagcagggggctgttcctttcaaacggcatcggcccgcccgaaatctcaccgttccattttgaagcttccacttcgctggacggacacggcattaccatttccaccaccggcagcccttctgtccgcttcaacgccggcggagcggatgccgccggcctcggcctgcgtgcagacacttccttccgcaacctccacctgaccgcccaaatccctacgctggcactcaggaacaacagcattaaaattgaaaccgtcaacggcgcatttaccatcggcggcgaatatgcccgatgggacggttcgttcaaactcgacaaagccaacctgcactccggcatcgccaacatcggcaacgccgaaatctccggcagcttcaaaacaccgcgccaccagaccaacttctccctcaattcgccgctcgtatggacggaaaacaaagggctggaggcgccgcgcctgtatgtatcgacccttcaggataccgtcaaccgcctgccgcaaccccgtttcatcagccggctcgacggttcgctgtccgtaccgaatctgcaaaattggaatgccgaattaaacggcacattcgaccgccaaaccgttgccgcgaaattcagatacacacatgaagacgcaccgcatctggaagccgccgtcgcactgcaaaaattgaacctgaccccctatcttgacgacgtgcggcaacaaaacggcaaaatatttcccgacaccctcgccaagctgtccggcgacatcgaggcgcacctgaaaatcggaaaagtccaacttcccggcctgcaactggacgatatggaaacctacctccacgccgacaaaggccatatcgcgctcagccgtttcaagtcagggctttacggcggccataccgaaggcggcatcagcatcgccaacacccgtcccgccacttaccgcctgcaacagaatgcaagcaacatccaaatccaaccgctgctgcaagacctgttcggcttccacagcttcagcggcaacggcgacgcggtcatcgacctgaccgcgggcggcgaaacccgaaaagagcttatccgctcgcttcagggcagcctgtcgctaaatatttccaacggtgcatggcacggtatcgacatggacaatatcctgaaaaacggcatttcgggcaaaactgccgacaatgccgcacccagcacacccttccaccgattcacgctcaacagcgaaatttcagacggcatcagccgccacatcgataccgaactcttctccgacagcctctatgttaccagcaacggctataccaatctggatacgcaggaattgtctgaagatgtccttatccgcaacgccgtccatccgaaaaacaaaccgattcccctgaaaatcaccggtacggtggacaaaccgtccattaccgtcgattacggcaggctgaccggcggcatcaattcgcgcaaagagaaacagaaaatcctcgaagacaccctgctggaacaatggcagtggctcaaacctaaagaaccgtaa

SEQ ID NO: 62795 - DNA, 291 bp, Neisseria meningitidis; identical to SEQ ID NO: 55030

SEQ ID NO: 62796 - DNA, 894 bp, Neisseria meningitidis
atggtaacgttttcaaaaatcagaccgcttttggcaatcgccgccgccgcgttgcttgccgcctgcggcacggcgggaaataatgccgcccgcaagccggtgcaaaccgccaaacccgccgcagtggtcggtttggcactcggtggcggcgcatctaaaggatttgcccatgtaggtattattaaggttttgaaagaaaacggtattcctgtgaaggtggttaccggtacatcggcaggttcgattgtcggcagcctttttgcatcgggtatgtcgcccgaccgcctcgaattggaagccgaaattttaggcaaaaccgatttagtcgatttaaccttgtccaccagtggttttatcaaaggcgaaaagctgcaaaattacatcaaccgaaaagtcggcggcaggcggattcagcagtttcccatcaaatttgccgctgttgctactgattttgaaaccggcaaggccgtcgctttcaatcaagggaatgccgggcaggctgtgcgcgcttccgccgccattcccaatgtgttccaacccgttatcatcggcaggcatacatatgttgacggcggtctgtcgcagcccgtgcccgtcagtgccgcccggcggcagggggcgaatttcgtgattgccgtcgatatttccgcccgtccgggcaaaaacatcagccaaggtttcttctcttatctcgatcagacgctgaacgtaatgagcgtttctgcgttgcaaaatgagttggggcaggcggatgtggttatcaaaccgcaggttttggatttgggtgcagtcggcggtttcgatcagaaaaaacgcgccattcggttgggcgaggaggcagcgcgtgccgcattgcctgaaatcaaacgcaaactggcggcataccgttattga

SEQ ID NO: 62797 - DNA, 531 bp, Neisseria meningitidis
atgaacgcaatccgaactttccaaaaccgcacgcccgaaatccacgaaagctgtatgatagacgaagcgtgcgtcgtcatcggcgaagtgtcgcttgccgaagacgtttctgtgtggccgtgcgccgtgttgcgcggcgatgtgaacagcatcaccgtcggcgcgcgcagcaatatacaggacggcagcgtcctgcacgtttcccacaaaaccgccgccaaacccgaaggatcgccgctggttatcggcgaagacgttaccgtggggcacaaagtgatgctgcacggctgccgaatcggcaaccgcgtcttggtcggtatgggcagcaccgttttggacgatgctgtgattgaggacgaagtgatgatcggcgcgggcagcctcgttccgccgcgcaaacgcttggcgggcggctacctttatatcggttcgccggtcagacaagtgcgcgtgctgaccgatgaggaaaaagcctttttgaagtattccgccgcgcattatgtgaaactgtcgaaacagtacgggatgtga

SEQ ID NO: 62798 - DNA, 1008 bp, Neisseria meningitidis
atgagcaccttcttccaacaaaccgcgcaagccatgattgccaaacacatcgaccgtttcccgctattgaagttggatcaggtaattgattggcagccgatcgagcagtacctgaaccgtcaaaaaaaccgttacctccgagaccaccgcggccgtcctgcctatcccctgctgtccatgttcaaagccgtcctgctcggacaatggcacagcctctccgatcccgaactcgaacacagcctcatcacccgcatcgatttcaacctgttttgccgtttcgacgaactgatcatccccgattacagtactttatgccgttaccgcaattggctggcgcaagacgacaccctgtctgaattgctggaactgattaaccgacaactgaccgaaaaaggcctaaaaatagagaaagcatccgccgctgtcgttgatgccaccattattcagaccgccggcagcaaacagcgtcaggccatagaagttgacgaagaaggacaaatcagcggtcaaaccacaccgagtaaggacagcgatgcccgttggataaagaaaaacggcctctacaaactcggttacaaacaacatacccgtaccgatgcagaaggctatatcgagaaactgcacattactcccgccaatgcccatgagtgcaaacacctgtcgccgttgttggaagggttacccgaaggtacgaccgtctatgccgacaaaggctacgacagtgcggaaaaccggcaacatctggaagaacatcagttgttggacggcattatgcgcaaagcctgccgcaaccgcccgctgtcggaagtgcaaaccaaacgcaaccgatatttgtcgaagacccgttatgtggttgaacagagcttcggtacgctgcaccgtaaattccgctacgctcgggcagcctatttcggactgattaaagtgagtgcgcaaagccacctgaaagcgatgtgtttgaacctgttgaaagcggccaacaggttaagtgcgcccgctgccgcctaa

SEQ ID NO: 62799 - DNA, 285 bp, Neisseria meningitidis
ttgaaattagctctcaaacgttcaggcaaatataacgtttacaatcccctcgccctagatttggacggtgacggcatagaaactgtcgccgccaaaggcttttcaggcagcttatttgatcacaccaacaacggcatccgcaccgccacgggctggattgctgcatatgacggttttcctgtgcgcaaattaaacagtaacgggggcattattagcacgacagataccatattccaatctttgcatacatggcttgatcatcaaccaaatgatacatgccattga

SEQ ID NO: 62800 - DNA, 435 bp, Neisseria meningitidis
ttgcaccacaaaatcagcaatatccgtaaaaactacttgcaccaaatcagcagccaaatcagccaaagccacgcgattgtgtatgttgaagatttgcaggtaacaaacatgtccaaatccgccaaaggagatgttgaacagcacggcaagaatgtgaaacagaaatcaggtttgaaccggatgatactggatcagtcttggtttgagttcagacagcagttggattacaaattattgtggaatggcggacatctggttgccgtaccgccgcaaaataccagtcgaacctgtccttgttgcggttataccgcaaaggaaaaccgccaaacgcaggctgatttcgaatgcgtagaatgcggctatacagaaaatgcggatgtggctggggcgataaatatattacgacgcggtcatgaaatcttggcggcgcaataa

SEQ ID NO: 62801 - DNA, 261 bp, Neisseria meningitidis
ttgacgaaggcggtacgccgaaaaaatgtgcaaccccccaaaatatgctatgcattccgaacgccctccgcatacgggcaataccttgccgacgcgggattcgactacctcagcttcgccaacaaccacagcaacgacttcggcgcgcaaggcatcacggcaacggcggcgggcggcagctcttttacatactcgatcgcgctaaagccgctgccgataacgaggccaaaattgcggaaaataccgccatcgcccagataa

SEQ ID NO: 62802 - DNA, 147 bp, Neisseria meningitidis; identical to SEQ ID NO: 42194

SEQ ID NO: 62803 - DNA, 852 bp, Neisseria meningitidis
atggcacgacacgtttggcaggcaggacggtttgaaatcggtttggacaaaccgaaaatcatgggtatcgtgaatctcacgcccgattctttttccgacggcggcgcgtattcgcaaaatgcccaaacagctttggcgcacgccgaacggcttttgaaagagggtgcggacattctcgacatcggcggcgaatcgacgcggccgggtgcggattatgtttctcctgaagaagaatgggcgcgggttgagcctgtattggcagaagtggcggggtggggtgttcccgtcagtttggacacgcgccgcacggtggttatggaaaaagcgttggcactcggcggcatcgatattattaacgatgtggcggcgttgatcgacgaaggcgcgctcgaattgctggcgtgtcaggcggatacgggcatttgcctgatgcacatgcggggcttgcctgagaatatgcagattaatccgaaatatcaggatgttgtcggtgaagtggcgcggtatttgaaagcgcgggcggcggaatgcatcgcggcaggcatcgccccgcaacgcattacactcgaccccggtttcggcttcggcaaaaccttgcaacacaatatcgcactgatgcggcatttacccgaattgatggcggaaacgggttttccgctgctcatcggcgtgtcgcgcaaacgtatgataggcgagctgactggcgaggcagacgcggcggaacgcgtacacggcagcgtggcggcggcgctggcttccgtggcgcgcggcgcgcaaatcgtgcgggtgcatgatgtgaaggcgacggcggacgcgttgaaggtgtgggaagcgttgggcatcaatctgtaa

SEQ ID NO: 62804 - DNA, 1035 bp, Neisseria meningitidis
ttggaagacgaagattttattcgcgccgcgtccatgctcgccgaagaagttttcggtttcggtatctacaaagagtccaaaggctcgggcggtcgtttttatgagcgctgttggttgatgggttcggaagacgtcctatacggtcgcgtccattttggcggacaaaacaataccatccttttcgaactgaccggcaccggttgcggcgtcgcaaaagaaggctgggaatcacgacttttcacattcctgactaatgcaatccgcccaaaaatcacacgcgttgacatcgcaaaagactttttcaacggcgaatacagcccgaaccaagcccgtgaagaccgaaataaaggtatgtttacctgtcatcacgtcaaaccaaaaggcgaatgtttggggtcagattgggaagaagacgatgaagccaaaatgaccaaaggcaagacctatggtatcggctcccgtgaatcgtccaaatatgtccgcgtctatgaaaaaggcaagcagttgggcgataaaacaagcacatggacgcgctttgaaattgaattcaaagcaaaagacatcgttatccctttcgaagttttgcagaatccgggcgaatatttcggcggcgcatatccgatttgcgaacgattcgcccaaaaggcaacgcgcatacacgcggttaaggaagataaggtcatttcagccgaccgctaccttgaatgggtaaaaaaacagttcggacgtgcggcaaacggtctgaaattcatttttcccgaattggacaaagccaaactgtttgaactgattgagccgagtcatcacaagctgcccaagtctttggctcccgaagcctacgactgcgcctttttgaaagctcaagccattcatgaacagcccgcattcaaaccgtacaatgacccttactatatgtacgaatattacgagaatcttgaaaaacagcttgaacagcaaaaacacgtcaacaatgaagaaagctataacaacttcatttacgacaaattcgcaagactaccgatttcatgggcttaa

SEQ ID NO: 62805 - DNA, 1929 bp, Neisseria meningitidis
atggcaaaagtaatcggtatcgacttaggtacaaccaactcttgtttggccatttccgaaaacggtcaaaccaaagtgatcgaaaacgcagaaggcgcacgcaccacgccgtccgttatcgcttatttggacggcggcgaaatcctcgtcggtgcgcctgccaaacgccaagccgtaaccaacgctaaaaacaccatttacgccgccaaacgcctgatcggccacaaatttgaagacaaagaagtccaacgcgacatcgaatccatgcctttcgaaatcatcaaagccaacaacggcgacgcatgggtgaaagcgcaaggcaaagagctgtctcctcctcaaatttccgcagaagttttgcgtaaaatgaaagaagccgccgaagcttacttgggcgaaaaagtaaccgaagccgtgattaccgttcccgcctacttcaacgacagccaacgtcaagcgactaaagacgcgggccgcatcgcaggtttggaagtaaaacgtatcatcaacgaaccaaccgctgcagctttggcattcggtatggacaaaggcgacaacaaagaccgcaaagtagccgtatatgacttgggtggcggtactttcgatatctccatcatcgaaatcgccaacctcgacggcgacaaacaatttgaagtattggccaccaacggcgatactttcttgggcggcgaagacttcgaccaacgcttgatcgactacatcattgacgagttcaaaaaagaacaaggcattgatttgaaacaagacgtaatggctctgcaacgtctgaaagaagctgctgagaaagccaaaatcgaattgtccagcggccagcaaactgaaatcaacctgccatacatcactatggacgcaaccggtccgaaacacttggcaatgaaaattacccgtgccaaatttgaaagcctggttgaagatttgatccaacgttctatcgagccttgtaaagtcgcattgaaagatgccggcttgagcaccggcgacatcgacgacgtgatcttagtcggtggtcaaagccgtatgccgaaagtacaagaagccgttaaagccttcttcggtaaagagcctcgtaaagacgtgaaccctgacgaagctgttgccgtaggtgcagcgattcaaggcgaagtattgggcggcggccgcagcgacgtattgctgctggacgtaacacctctgtctttgggtatcgaaaccatgggcggcgtgatgaccaagctgattcaaaagaacactactattccgaccaaagcgtcgcaagtgttctctaccgccgaagacaaccaaagcgcagtaaccatccacgtactgcaaggcgaacgcgaacgcgcttctgccaacaaatctttgggtcagttcaacttgggcgacatcgcacccgcaccgcgcggtatgccgcaaatcgaagtcaccttcgatattgacgccaacggtatcctgcacgtttccgccaaagacaaaggcactggcaaagcagccaacatcaccatccaaggttcttcaggtttgagcgaagaagaaatcgaacgcatggtgaaagatgccgaagccaatgccgaggaagataaaaaactgactgaattggtcgcttcccgcaaccaagccgaagccctgattcactctgtgaaaaaatctttggccgactacggcgacaaactcgacgcagccgagaaagaaaaaatcgaagccgcgctgaaagaagccgaagaagcagttaaaggcgacgacaaagccgctatcgatgccaaaaccgaggcgctgggcgcagccagccaaaaactgggggaaatggtttacgctcaagcacaagctgaagcccaagcaggcgaaagcgaacaagccaatgcttctgcaaagaaagacgatgatgtcgtagatgccgactttgaagaagtaaaagacgacaaaaaataa

SEQ ID NO: 62806 - DNA, 921 bp, Neisseria meningitidis
atgcctaatccgctttacagacagcacatcatctcgatttcggatttgtcgcgcgaacagttggaatgcctgcttcagacggcattgaagctgaaggcgcatccgcgcggcgatttgttggaaggcaaacttatcggttcgtgtttctttgaaccgtccacgcgcacgaggctgtcgtttgaaacggcggtgcagcggctgggcggcaaggtcatcggcttttcggacggcgcgaataccagtgccaaaaaaggcgagacgcttgccgataccgcccgcatcatttccggctacaccgacgcaatcatccaacgccaccccaaagacggcgcggcgcgcgtggcagcggagttttcgcgcgtccccgtcatcaacgccggcgacggcaccaaccagcaccccagccagaccttgttggatctggtaacgatttatgaaacgcaggggcgtttggacaagctcaaaatcgccatggcgggcgacttgaaatacgggcgcaccgtgcattcgctttgtcaggcgttgaaacgctggggctgcgaatttgcctttgtttcgccgcccagcctggccatgcccgactacattaccgaagagctggacgaagtcggctgccgataccgtatcctcggcagtttggaagaggcggcggaatgggcggatatcctgtatatgacccgcgtccagcgcgaacgtttcgacgaacaggaatttgccaaaatccaaggcaaattcaacctcgaagcgtctatgcttgcccgcgccaaaccgaacctgcgcgtgctgcaccctttgccgcgcgtggacgaaatccatcccgatgtcgatgccacgccgcatgcctattatttcgagcaggcgaccaacggcgtttatgcgcgtatggcgatattgtcgctggtgttgaacgaagaagtgtga

SEQ ID NO: 62807 - DNA, 579 bp, Neisseria meningitidis
atgaaaacttttgccctgatactggccgacggtcaggcgagccgtatgggaggcgaggacaaggggcttgctcttttggggggtaaggcactgatagaccatgtcatcgacagggtcaggccgcaggtcagccatatcgccatcagcaccaaccggaatttggaagaatatgctcgaagaagtccgcatatttttcccgatgcgcggcagtggcagcatttcggcccgctttcggcattgtgtaccgcagccaacgatttgcagttggcgactgctgactggcttttggttgtgccgtgcgatatgccgtatctgccggacgatttggtggcgaggtttgaaaccgtgtcgaaacgcacaccgttgtgcaatgcgtattatgtggaaacgccgataacgatgcactacaacattatgtatatccgcccgcagattctgcaaagcgcgattccctatctgttttcgggtatgaaaacattaagaagctggttgcagcagcaaagggcgcggtcggtcagattcgagtttgacgggcattttgccgacttgaacacgcaaatcgatttgcaggagggataa

SEQ ID NO: 62808 - DNA, 2427 bp, Neisseria meningitidis
atgtcggcacaaaccgatccgggctactttttcatgcccaaccacattatcctgataggcgcgagcgaacgtccgtacagcctgggcgaacgcgtactcagcaacctgctgagtacgccctttcaaggaaaaatcacccccgtaaacccgcgccaccacaccatagccgggcttcccgcctacaccagcctcaacaaaatccccggcaatgcagacctgattattgccgttaccctacccgacagttacgacaccctcttcaaaacctgccgcaaaaagcagctccgacacatcatcctcatacaggactgggacaacctgtctaccgcagaactgcacaccgccgaaactgccatccgcaaacaccacggcaacggactcaacatcaccgcctgcaccaccgcaggcatccaactgccctcactcggactcaacatcagtacccaagacggatacgccgcaggccataccgccatactgaccggcaatgccgccgtcagccgccaaatcgacaacatcctgaacaaactccgtcaaggcacatcccgccacatcagcctgcatcccggcatcagccccatcacatccgccgattggctcaaccgcttcggacacagcctgcacaccaaaaccgccgtcctacaccacaaccctgaagagaatcagcgcaaactgttcagcgcaatccgccaatttacccgccatacgccgctgattctccacatcacctgccgcacgacagaaaccgaccgtgccgtactgcactgcctcgcccgacactgcaacttcctcatcagtttcaacgccgacgacctcgaagccgcactgcgcgcccaactgtccgaccttccacccctgtcccgactcgacatcctgtccgacacgcctgccgaatggctgaacgcgcacgcgccaaaaaccctcgccctccactttcccaaccttccccaccacatccgcaacggacacctgaccggcacacccacaccctcaatctgccacgacatcgcctcacgtcagcttgcccgccccgacacccaagccgtcctgaccatcctcagcccctccggacacgaggattacaaaaaaacagcacgcgcccttatccgcctgtccgaacagagcgccaaacccctgctcgtcagcagccccttttcagacggcataacacatttcgacacccccactcaggcaatccgcaccctttcctaccgcaacaccgccgccgccctgaaacaggcacagctcgacattgcaccgccgcagccatgccgtctgaaaacaccgcaaccccaaaacatcaaaaaagccctcgaagccgccgaccccgccctaatcgccgaagccctgcacctccccccctaccggcacaccacccataacgccgtccaattccaattcggcagccactccctctatggcgacatcctgaccgcacgttgcaacggacaaaccactgccgtactcccgccgtttaccacgctcgacagccgccaccttgcccgctttgccgaactcgacggcacacaaaccctcgaccagttcctgcacacactgaccatcattcccgaataccgccaacacattctcggcatcaccctcaacctaaacggcggacaatacagcagcgatttcatcttaaagacacccgaaacacacgacacgcccaaacgcaagaacacaggcaaagccgcccaaaccctcgaacatgccgccgcaaaaatgcagagtgccgccgcatacctgaaacacaaaaacccgacagccgccgaatttctccgccacacaagcgaagccgccgcagaactgctcggcagcaaaaccgaaaccggagcagccgtacccaacgtacttgccccctatcccgcagcataccccaaaacactgtccctaagaaacaacacgaccgttaccattacccccattttgcccgaagacgcagaagccaaacagcagttcgtccgcagcctcggtcccgaagcacggtacacacgcttcatgacccacaccaacgaactgcccgcagccacgttggcacgcctgtgcaaccccgattaccactgtgaagccgcatggacggcaaaggatgccgacagcaacatcgtcgccgtcgtccgccacagccgcctgaaccgcaacgaatgcgaattcggcatcacactggcggaacatatgcgcggcagcggactggcacagaaaatgatggaactcatcatccaaaccgccgcacagcaaggctaccggactatgagtgccgacattctcaaaaccaatacccccatgatcaaacttgctgaaaaatcaggatttaccctcaaggaatcggacaccgaaaaaaacctgtaccgcgcatatctgaaccttgcggcagacaaaacaacagaaaaaacaaataaaaacttgcgcaccgaccacaaaataacctaa

SEQ ID NO: 62809 - DNA, 534 bp, Neisseria meningitidis; identical to SEQ ID NO: 41750

SEQ ID NO: 62810 - DNA, 1677 bp, Neisseria meningitidis
atgagcgtaggtttgctgaggattctggttcaaaaccaggtggttactgttgagcaggccgagcattactacaatgagtcgcaggcgggtaaggaagtgttgccgatgctgttttcagacggtgtcatttcgcccaagtcgcttgcggcattgattgcgagggtgttcagttattcgattcttgatttgcgtcattatccgcgccacagggtgctgatgggggtgttgacggaggagcagatggtggagttccactgtgtgccggttttccgtcggggcgacaaagtattttttgcggtttccgatccgacacagatgccgcaaattcagaaaaccgtttctgccgcagggattgaggttgagttggtcattgtcgaggatgaccagttggcgggtttgctcgattgggtgggttcgcgttcgacatcgctgcttcaggagcttggggaggggcaggaggaagaggaaagccacaccctgtatatcgacaacgaggaggcagaagacggccctgttccgaggtttatccataagactttgtcggatgccttgcgcagcggggcatcggacatccatttcgagttttacgaacacaatgcccgtatccgtttccgtgtggacgggcagctccgcgaggtggttcagccgcccattgcggtaagggggcagcttgcttcccggattaaggtaatgtcgcgtttggacatttccgaaaaacggataccgcaggacggcaggatgcagctgacctttcaaaagggcggcaagcctgtcgatttccgtgtcagcacattgccgacgctgtttggcgaaaaggtcgtgatgcggattttgaattccgatgccgcgtctttgaacattgaccagctcggttttgagccgtttcagaaaaaattgttgttggaagcgattcaccgtccctacgggatggtgctggtaaccggtccgacgggttcgggtaagacggtgtcgctctatacctgtttgaatattttgaatacggagtcggtaaatattgcaacggcggaagaccctgccgagattaacctgccgggcatcaatcaggttaacgtcaatgataagcagggcctgacttttgccgctgctttgaagtctttcctgcgtcaggacccggacatcattatggtcggtgagattcgtgatttggaaactgccgatattgcgattaaggcggcacaaacagggcatatggtgttttccaccctgcacaccaataatgcgccggcgacgttgtcgcgtatgctgaatatgggtgtcgcgccgtttaatattgccagttcggtcagcctgattatggcgcagcgtcttttacgcaggctgtgttcgagctgcaaacaggaagtggaacgcccgtctgcctctgctttgaaggaagtcggcttcaccgatgaggaccttgcaaaagattggaaactttaccgcgccgtcggttgcgaccgttgccgggggcagggttataaggggcgtgcgggcgtgtatgaggttatgcccatcagcgaagaaatgcagcgtgtgattatgaacaacggtacggaagtggatattttggacgttgcctataaggagggtatggtggatttgcgccgggccggtattttgaaagttatgcagggcattacttcattggaagaggtaacggcaaataccaacgattag

SEQ ID NO: 62811 - DNA, 918 bp, Neisseria meningitidis
atgagcatcatccactacctctcgctgcacgtcgaatccgcgcgcaccgcgctcaaacagcttctgcgccaacctttcggcacactgcttaccctcataatgctcgccgtcgccatgaccctgccgctgtttatgtatttgggcatccaaagcgggcaaagcgtgttgggcaaactcaacgagtcgccgcaaatcacaatctatatggaaaccgccgccgcacaaagcgacagcgataccgtgcgcagcctgctggcgcgcgacaaacggctcgacaacatccgcttcatcggcaaagaagacggtctggaagaattacagtccaatctcgaccaaaatctgatttccatgcttgacggcaaccccctgccggatgtctttatcgttacccccgacccggcaaccacgcccgcccaaatgcaggcaatctaccgagacattaccaaactgcctatggtcgaatccgcgtctatggataccgaatgggtgcaaacgctgtaccaaatcaacgaattcatccgcaaaattttatggtttctttcactgacgctggggatggcgttcgtccttgtcgcgcacaacaccatccgactgcaaatcctcagccgaaaagaagaaatcgaaatcaccaaactcttgggcgcgcccgcgtcgtttatccgccgcccattcctttatcaagccatgtggcagagcatcctttccgccgccgtcagcttggggctttgcggttggctgctctctgccgtacgcccattggtcgatgccattttcaaaccctacggcttgaacatcggctggcgtttcttttaccctgaagaaatcgtgctggtgttcggcttcgtcatcgcgttgggcgtattcggcgcgtggcttgccaccacccaacacctgctcggcttcaaagccaaaaaataa

SEQ ID NO: 62812 - DNA, 300 bp, Neisseria meningitidis
atgaagaaaatgttcgtgctgttctgtatgctgttctcctgcgccttctcccttgcggcggtaaacatcaatgcggcttcgctgcaggagttggaggcgctgccgggcataggccctgcgaaggcgaaggccattgcggaataccgtgcgcaaaacggtgcgttcaagtctgtggacgatttgaccaaggtaaagggcatcggccctgcggtgctggcgaagctgaaggatcaggcttccgtcggcgcgcccgcaccaaaaggcccagccaaaccagtgctgcccgcggataaaaaatag

SEQ ID NO: 62813 - DNA, 726 bp, Neisseria meningitidis
atggaaacacaaaacaaacctaccgttaccgacattgaccgccctatactcgtcccgcccggtggacataaaaaagtcttgctgcattcctgctgcgccccgtgcagcggcgaagtgatggaagccatgctggccagcggcatcgactacaccatttatttttacaatcccaatatccatccgcacaaagagtatatgctccgaaaagaggaaaacgtgcgctttgcggaaaagttcggcattcctttcatcgataaagacgacgactacgaaaacgaccgcaaagaatggtttgccaaagccaaaggcatggagtttgagccggaacgcggcatccgctgcaccatgtgtttcgatatgcgttttgaaaaggcggcgcaatacgcgcatgaacacgggttccccgtctttaccagttcgctgggcatttcacgctggaaaaatatggcgcaaatcaacgactgcggacaccgcgccgccgcgccttacgatgatgtggtgtattgggatttcaactggcgcaaaggcggcggcagcgcgcgcatgattgaaatcagcaaacgtgaaaacttctaccagcaggaatattgcggttgtgcctattccctgagggattccaatgcccaccgcaaatcacagggcagaatccccatcaaactcggcgtgctgtattacggcgacgaatcgacacaatacgaacctgcacccatccgggtggacaaataa

SEQ ID NO: 62814 - DNA, 981 bp, Neisseria meningitidis
atgaaaattttgcttgtccgcttgtccagtatgggcgatttaattcacactttgcccgcaatcgaagatttggcgcgacaatgccctgatgtggaactccattggttgtgtgaagccggatttgcggatattgcgcgcctgcatccgttcgtaaaaaaaatccatgtgatgaaatggcggcaatggcgaaaacatctctttcaggctgaaacttggcgggaaataggtcatctgaaacagactttgcggcaggaagcatttgattttgtattggacagtcaaggtctgattaaaagcgcgtgtttcgccaaaatggcaaaatcccctatttatggtttagataaaaacagcgcgcgtgaggggttggctgcgttggcgtatgcgaaaacatacgctgtaccgaaagggaaaaatgccgtttggcgcaaccgtgagctgtttgtccaagtatttggatatgcaatgccggaaacgcaggtatttggcttgactgttcctgaggcaggccgtctgaaaaatttagcgcagccgtattatgcggctttgcatgcgaccagtcgggacagtaagttatggcctgtggaaaactggcgggcgttgctgcaaaagctgaatgaagaacaacaatgcaacgtttacctgacatggggaaatgaaactgaaaaaacgcgtgccgaacaaattgcagacggactgccatttgccattgtgtgcgataaaatgaatttattgcaggcggcgtatctgctgaaacacgcggtcggaattgtcggtgtggataccggtttgctgcatttggcaaatgctttggaaaaacctgtggtcggtatttataccgatactgatccgattaaaacaggcgttcaagtttcggctgttgcaaaaaatttgggcaatattgggcaaattccgactgcagatttggtttatcaaacgttgatggattgtgtggctgctgatgaaggctcaaaggtcgtctaa

SEQ ID NO: 62815 - DNA, 393 bp, Neisseria meningitidis
atggcggacaatcctgccgacaatcctgccgtcgggctgttgggcttcagcaggggcggtgttttgatattgaaacggcacgaacgtaaggatgtgccgtttgtcgggatgggcggcagggggctgcttgccgccaaccattatcagtttggcgacggcttgattgcgggggcgggcaggggcgtggtcacggtggagggtgcgcctgcgagcaggcgggtgtatttgttcgcgctgccggatatggtgtgtatcgatgatgtgtgggcggacgataacggggagtaccggttttcgcaattggacacggaaaagcggtttttggtgctggcacgcgaccatacgggaaagtatgagcctgtgtcggcggacaatgtgaagcctgaaaaatag

SEQ ID NO: 62816 - DNA, 2298 bp, Neisseria meningitidis
atgcaaccgcacgctccacataccgattccaatacgctgatgctcggccgatacgccgaacgcgcctatctcgaatacgccatgagcgtggtcaaaggccgcgcgctgcctgaagtttcagacggccaaaagcccgttcagcggcgcattttgtttgccatgcgcgatatgggtttgacggcgggggcgaagccggtgaaatcggcgcgcgtggtcggcgagattttgggtaaataccacccgcacggcgacagttccgcctatgaggcgatggtgcggatggcgcaggattttaccttgcgctatcccttaatcgacggcatcggcaacttcggctcgcgcgacggcgacggtgcggcggcgatgcgttacaccgaagcgcggctcacgccgattgcggaattgctgttgtccgaaatcaatcagggaacggtggatttcgtgccgaactacgacggcgcgtttgacgagccgctgcacctgcccgcccgcctgcctatggtcttgctcaacggcgcgtcaggcatcgcggtgggcatggcgaccgagattccgtcgcacaatttgaacgaagtgacgcaggcggcgattgcgctgttgaaaaagccgacgctggaaaccgccgacctgatgcaatacattcccgcacctgattttgccggcggcggtcaaatcatcacgccggcggacgaattgcgccgtatttacgaaaccggcaagggcagcgtgcgcgtgcgtgcgcgttatgaaatcgaaaaattggcgcgcggacaatggcgcgtcatcgtaaccgagctgccgccgaacgccaattccgccaaaatccttgccgaaatcgaagagcagaccaacccgaaaccgaaagcgggcaaaaagcagctcaaccaagaccagctcaataccaaaaagctgatgctggatttaatcgaccgcgtgcgcgacgagtccgacggcgaacatcccgtgcgactggtgttcgaaccgaaatccagccgcatcgataccgataccttcatcaacacgctgatggcgcaaacttcgctggaaggcaatgtgtccatgaacttggtgatgatggggctggacaaccgccccgcgcagaaaaacctgaaaacgattttgcaggaatggctggatttccgcaccgtaaccgtaacacgccgtctgaaattccgtttgaaccaagtggaaaaacggctgcacatcctcgaaggccgtctgaaagtctttctgcacatcgacgaagtgattaaagtcatccgcgaatcagacgacccgaaagccgatttgatggcggcgttcgggctgaccgaaatccaagccgaagacattttggaaatccgcctgcgccagttggcgcgtttggaaggtttcaaactcgaaaaagaattgaacgaattgcgcgaagaacaaggccgtctgaacatccttttgggcgacgaaaacgaaaaacgcaagctgattgtcaaagagatgcaggcggacatgaagcagttcggcgacgtgcgccgcacgctggtggaagaggccggacgcgccgtgctgacacaaaccaccgccgacgaacccatcacactgattctgtcggaaaaaggctggatacgcagccgtgccggacacaatctcgatttaagccaaaccgcgttcaaagaaggcgaccgcctcaaacaaacccttgaaggcagaacggttttacccgtcgtcatcctcgattcatcgggcagaacctacacccttgatgccgccgaaatccccggcggacgcggcgacggcgtgccggtttcatccttgatcgagttgcaaaacggcgcgaaacccgttgcgatgttgacaggattgccggaacaacattatttattatcaagcagcggcggctacggcttcatcgccaagttggctgatatggtcggacgcgtaaaagcgggcaaagtggtgatgaccacagacagtggcgaaaccgtcctgccgccgattgccgtctatgcctcctcgttcatcaaccccgactgcaaaatcattgccgccaccagtcaaaaccgcgccctcgccttccccatcggcgaattgaaaattatggcgaaaggcaaagggctgcaaatcatcggattaaacgccggcgaatcgctgacgcataccgccgtttcttccgagccggaaatcctgattgaaagcgaaggcaggcgcggcgcggcgcacaaagaccgcatccccgtctccctgcttgaggcaaaacgcggcaaaaaaggcaaactattacccatatcgggcagcctgaaacagctttcttcccccaaataa

SEQ ID NO: 62817 - DNA, 516 bp, Neisseria meningitidis
atgaaatcaaaactccccttaatcctaatcaacttttccctgatttcaagcccattgggtgcgaatgcggccaaaatctacacctgcacaatcaacggagaaaccgtttacaccaccaagccgtccaaaagctgcctctcaaccgatttgcccccaatcggcaactacagcagcgaacgctatatcccgccccaaacgcccgaaccggtatcatcaccgtcaaacggcggacaggttgtcaaatataaagccccggtcaaaacagtatccaagccggcaaaatccaatacgccgccgccgcaacaagcaccctcaaacaacagcagacgctccattctcgaaacagaattgagcaacgaacgcaaagcattggttgaagcccaaaaaatgttatcacaagcacgtctggcaaagggcggcaacatcaaccatcaagaaataaatgcattacaaagcaatgtattggacaggcagcaaaatattcaagccctgcaaagggaactgggacgtatgtaa

SEQ ID NO: 62818 - DNA, 477 bp, Neisseria meningitidis
atgaacaccatcgcccccaacctcgacggcaaacacctccgcatcggcatcgtacaggcacgtttcaccaacgaaatcggcagcgaaatgctcaaagtctgctgccgcaccctccaagaattgggcgtggcagacgaaaacattaccgtcgccaccgtacccggcgcgcttgaaatccccatcgcgctgatgaaccttgcctcttccgaaaagtttgacgcactgattgccatcggcgtcgtcatccgtggcgaaacctaccatttcgagctggtttccaacgaatccggagcaggggtcagccgcgtcgcactcgactacaacattccgattgccaatgccgtcctgaccaccgaaaacgacgcgcaggcaatcgaacggattgaagaaaaagcctcggatgccgccaaagtcgccgtagaatgcgccaacctcgtcaacctgctgctcgaagaacagtttgaagacgaagaataa

SEQ ID NO: 62819 - DNA, 201 bp, Neisseria meningitidis
atgtccgttcaaaccgttacatataataagttttttatgaacacaaaccaacctgccgtttacgacccgttgacacgtacgctgcactggctgaccgttgccggtttcatcggcattccgaccaccattgtcctgtggacgatttatagtggattaacaaaaatcaggacaaggcgacgaagccgcagacagtacaaatag

SEQ ID NO: 62820 - DNA, 468 bp, Neisseria meningitidis
atggcacaaacgcgacgcgaagccaaagcagaaatcatacctttccaagcacctaccctgccggttgcgccggtatacagcccgccacagcttacagggccgaacgcattcgacttccgccgcatggaaaccgacaaaaaaggggaaaatgcccccgacaccaagcgtattaaagaaacgctggaaaaattcagtttggaaaatatgcgttatgtcggcattttgaagtctggacagaaagtctccggcttcatcgaggctgaaggttatgtctacactgtcggtgtcggcaactatttgggacaaaactacggtagaatcgaaagcattaccgacgacagcatcgtcctgaacgagctgatagaagacagcacgggcaactgggtttcccgtaaagcagaactgctgttgaattcttccgacaaaaacaccgaacaagcggcagcacctgccgcagaacaaaattaa

SEQ ID NO: 62821 - DNA, 2364 bp, Neisseria meningitidis
atgcaattctcctactcatggctgaaaacccaagccgataccgaactttcctccgataagctggaacatctgttaacgatgtccggcttggaagtggaagaggccgaaactgccgcgcctgcgtttgcgggcgtggtgattgccgaagtgaaatccgttgaaaaacatccggatgcagaccgtttgaacgttacccgagttgatgcgggtacgggcgggttggtgcagattgtgtgcggtgcgccgaatgtgaaagcgggcatcaaagtgccgtgttcgttgccgggtgccgttttgccgggtaatttcaaaatcaagccgaccaaaatgcgcggcgtggtgtcggacgggatgttgtgttccaccgacgaactcggtctgcccgacgacggtgtgaacggcctgcacattctgcctgaagatgcgcccgtcggtaccaatatccgcgaatacttggatttggacgatacgctgtttacgttgaaaattacgcctaaccgcgccgactgcttgagcatcaaaggcattgcgcgcgaagtgtccgcattgacggggtgcgcgttcaggcagcccgaaatccataccgcgccgatcacgggcagtcgaaaacagcccgtgcagattaacgcgcctgccgattgcggccgttttatcagccgcgttattgaaaatgtcaatgcgaaagcggctactcccgattggatgaaacaacgtttggagcgcagcggcatccgcagtatttccgcgctggtggacatcggcaattatgtgatgctggaaatcggtcagccgatgcacgtttttgatgccgacaaactttccggcagcctgcacatccgccgcgcgcgcgaaggggaaacgctggaatgcctgaacgagaaaaccgtttccctgtctgaaaacacgctggtcgtggcggacgaaaaaggcgtgttgagtttggcgggcttaatgggcggcgcggcgagcgcggtttcagacggcacgcaaaatatcgtgctggaagcggcttggtttgcgcccgaaatcatcgccggcaaatcgcgccaatacggtttcggttcggattcgtcgttccgcttcgagcgcggcgtggattaccgtttgcaggcggatgccattgaacgtgctaccgaattggtgttgcagatttgcggtggtgcggcaggcgagatggtggaagcgcaaggcgaattgcctgaagcgaagcaggttggattgcgtttggaccgtctgaaaaccgtgttgggcgtggacattcctgccgaacaggtggaaaccattttgcaacacttgggcctgcagcccgagaaaacggcggaaggcttccgcgttaccgcgccgagcttccgttttgacatcgaaattgaggctgatttgattgaagaaatcggacgcgtttacggctatgaaaacatccccgacgattacacgtcaggccgtctgaaaatgctggaactgcccgaaacacgccgcccgcgttttgccgtttacaacgaaatggcggcgcgcggctaccgcgaagtggtcagctatgccttcgttaacgagcagtgggaacaagattttgccgccaacgccgaccccatccgcctgcaaaacccactggcggcgcaatatgccgtgatgcgttccacactcatcggcggcttggtggaaattttgcaaaacaacctgaaccgcaaacaaaaccgcgtgcgcgtgtttgaaatcgcccgcgtgttcggcaaaggttcagacggccggtttgtccaaaacgaacgcatcggcggcttgtggtacggcgcggcaatgcccgaacaatggggcgggaaaacgcgcaatgcagatttttacgacatcaaggcagatgtggaaaatctgttgaaaaacaaagcagtcgagttcgttaaaaccggacatcctgccctgcatcccggacgcgccgccaatatcgtttcagacggcaaagtcatcggctttgtcggcgaactgcatccgaaatggctgcaaaaatacgacctgccgcaagcgccgctggtatttgaaatcgatatggcggccgtgttggaatgcgggaaaacgcgctatcgggccgtatcgaaattccagccggtgcgccgcgatttggcgtttgtgatgccggaagctatgagccatgatgatttgctgcttgtcttgaaaggcgcggcaaacaagttggtacaggaaatcagcgtgtttgacgtgtatcgcggcacgggtttgcccgaagggatgaagagcgtggcggtcaaagtgattttgcaggatatggaaaacacgctgacggatgaggcagtcgagccgcttatcggaaaactgattggcgcggcaacggcggcaggggcgcggcttcgcagttaa

SEQ ID NO: 62822 - DNA, 654 bp, Neisseria meningitidis; identical to SEQ ID NO: 44899

SEQ ID NO: 62823 - DNA, 948 bp, Neisseria meningitidis
atgaatatcctcagtaaaatcagcagctttatcggaaaaacattttccctctgggccgcgctctttgccgccgccgcttttttcgcgcccgacaccttcaaatgggcggggccttatattccttggctgttgggcattattatgttcggtatgggtttgacgctcaaaccttccgacttcgatattttgttcaaacatcccaaagccgtcatcatcggcgtaatcgcacaattcgccattatgccggcaaccgcctggctgctgtccaaactgttgaacctgcctgccgaaatcgcggtcggcgtgattttggtcggctgctgcccgggcggtacggcttccaatgtgatgacctatctggcgcgtggcaatgtggctttgtcggttgccgttacgtctgtttccaccctgatttccccattgctgactcccgccatcttcctgatgcttgccggtgaaatgctggaaatccaagcggccggtatgttgatgtccatcgtcaaaatggttttgctccccattgttttgggtttgattgtccataaggttttgggcagtaaaaccgaaaagctgaccgatgcgctgccgctggtttccgttgccgccatcgtgctgattatcggcgcggttgttggggcaagcaaaggcaagattatggaaagcggtctgctgatttttgcggttgtcgtactccacaacggcatcggctacctgctcggcttctttgccgccaaatggaccggcctgccttatgatgcacaaaaaacgctggccatcgaagtcggtatgcaaaactcgggtctggccgccgcgctggccgccgcacactttgccgctgcgccggtcgttgccgttccgggcgcattgttcagcgtgtggcacaatatctccggctcgctgctggcaacttattgggcggccaaagccggtaaacataaaaaaccctaa

SEQ ID NO: 62824 - DNA, 810 bp, Neisseria meningitidis
atgattgattttgacaaaccggctgaagaagacgccatttatcaaagtcgtttgaaaaaaatcgtttcagacgaccttgtcctctacaacgaaaattcccttaacgtcatgcggaagatattggaaaaatatccaaacggctgttttgatatgattttcgcagacccgccttactttctttccaatgacggcttcagttgtcaaaacggacaaatggtttccgtcaataagggcaactgggataaatccaaaggaatggcggcagatttggaattctacgaagaatggctccgactgtgttacgccttattaaaaccaaacggcacaatttgggtttgcggcacattccataatatttatttaatcggctacctgatgcaaactatcggataccatattttgaacaatattacttgggaaaaacccaatcctccccctaatttgtcctgccgtttttttacccattcgacagaaacaatcttatgggcaaagaaaaataaaaaagccaaacacacgtttcattatgaaatgatgaaagcacaaaatgatggcaaacagatgaaatgtgtttggacatttcctcctccaaacaaagccgaaaaaacattcggcaaacatccgacacaaaaaccactccccttgcttgaacgctgcatactctcagcttcaaacatcggagatttaatttttgaccctttcatgggcagcggcacaacaggcgttgccgccttaaaacatggtcggaaattttgtggttgcgaactggaagaagatttttttgaattagcaaaaaaaaggttagaaaaatga

SEQ ID NO: 62825 - DNA, 471 bp, Neisseria meningitidis
ttgaacatcaccgttttggcagtcggcaccaaaatgccgcgctgggttgatgaggccgtcgccgaatacgccaaacgcttcggacgcgacgtcgcctacgcactcaaagaaatcaaacccgaaaaacgcggcgcgggcgtgaatgccgcccaaggtatggcggcggaagaaaaacgcatccttgaagccgttccgcaaggcgcgttccttgtcgttcttgacgaacgcggcaaagcaccgacctccgtcgagctggcggaacacctcaaaagctggcagcaaaacggcgaacacgtctgcttcgtcatcggcggtgcggacggcatgaccgaccgcctcaaacaacaagcccgcatgatgatgcgcctgtccagcctcaccctgccgcacggcatggtgcgcgtccttctgaccgaacaactctaccgcgccgcctccatcctgcacaaccacccctaccatcgggaataa

SEQ ID NO: 62826 - DNA, 870 bp, Neisseria meningitidis
atgaagcgcatctttttgcccgccttgcccgccatcctgcctttatccgcttatgccgacctgcccttgacgattgaagacataatgaccgacaagggcaaatggaaactggaaacttcccttacctacctgaacagcgaaaacaaccgcgccgaacttgccgcaccggtttacatccaaaccggcgcaacctcgtttatccccattccgaccgaaatccaagaaaacggcagcaataccgatatgctcgttggcacgctcggtttgcgctacggactgaccgggaataccgacatttacggcagcggcagctatctgtggcacgaagaacgcaaactcgacggcaacggcaaaacccgcaacaaacggatgtccgacgtatccctcggcatcagccacaccttccttaaagacgacaaaaaccccgccctaatcagctttcttgaaagcacggtttacgaaaaatcgcgcaacaaagcctcgtcgggaaaatcctggctcatcggcgccaccacctacaaagccatagatccgattgtcctttccctcaccgccgcctaccgcatcaacggcagcaaaaccctttcagacggcatccgctacaaatcgggcaactacctgctgctcaaccccaacatctcatttgccgccaacgacagaatcagcctgaccggaggcatccaatggttgggcaggcagcccgaccggacggacggcaaacgggaatcctccagaaacacatccacctatgcccatttcggcgcaggtttcggtttcaccaaaaccacggctttaaacgcatccgcacgtttcaacgtttcagggcaaagcagttccgaactgaaatttggcgtacagcatacattttaa

SEQ ID NO: 62827 - DNA, 336 bp, Neisseria meningitidis
atgtttaaagattggaaagaacataccgcattggttaaaaaatcgttcggcgagctgggtaaatcccatcctaaaatgctgcaggcatacggcgcattggaacaggccgccgccgccgaagcattggatgccaaaacgcgtgaactgattgccatcgccgttgccattaccacccgttgtgagagctgcatcagcgttcatgccgcagccgccgccaaagccggtgcgaccgacagcgagatcgccggcgcattggcaaccgccatcgccctgaatgccggtgccgcttacacttatgccctgcgtgcattggaagcggttgaaacgcaaaaataa

SEQ ID NO: 62828 - DNA, 978 bp, Neisseria meningitidis; identical to SEQ ID NO: 41766

SEQ ID NO: 62829 - DNA, 663 bp, Neisseria meningitidis
atgatacacgccgtactcttcgacctcgacggcacacttgccgacaccgcccgcgacctcggaggcgcactcaacaccctgctcgctcgccacggactacctgcaaaaagcatggacgagatccgcacccaagccagccacggcgcggcaggactgatcaaactcggcgcaggcatcacccccgaccaccccgactatgcccgatggcgcaccgaatatctggaggaatacgaccgccgctacgcccaagacaccgagctctttgacggcgtgaacgaactcattgccgaactcaaccaacgcggcatcaaatggggcatcatcaccaacaaacccatgcgcttcaccgacaaactcgtccccaaactcggcttcatcatcccacccgccgtcgtcgtcagcggcgacacctgcggcgaacccaagcccagcatcaaacccatgctgtatgcgtgcggacaaatccacgccgacccgcaacacacactctacgtcggtgatgccgaacgcgacatccaagcaggccgcaacgccggcatgaaaaccgtcctcgccgaatggggctacatcgctcccgaagacgataccggctcatggcaggcggatttccacatccgcacgccactcgatctgctcgaatgtctggacaaaatacagccctga

SEQ ID NO: 62830 - DNA, 813 bp, Neisseria meningitidis
atggaaaatatcggcaggcagcgacccatcggcgtttttgactcgggaatcggcggtttgaccaatgtgtgcgcactgatggaacggctgccgatggaaaacatcatttatttcggcgacacggcgcgcgtgccttacgggacgaaatctaaggcgaccatcgaaaatttctcgatgcagattgttgattttttattggaacacgatgtcaaggcgatggttatcgcgtgtaatacgattgcggcggtggcggggcagaaaatccgtcaaaagacgggcaatatgcctgtgttggacgtgatttccgccggcgcgaaagccgcgctagcaaccacgcgcaacaataaaatcggcattatcgccaccaataccacagttaacagcaatgcttatgcgcgcgccatccacaggaacaaccccgatacgctcgtccgcacgcaggccgcgccgctgctcgtccctttggtggaagagggctggctggaacacgaagttacccgcctgaccgtatgcgaatacctcaaaccattacttgcagacggcatcgatacgctggtgttgggctgcacgcactttcccttgctcaaacccttaatcggcagggaggcgcacaatgtcgcgctggtcgattccgcgattacgactgccgaagaaaccgcacgcgtccttgctcaggaagggttgctcaataccgacaacaacaatcccgactaccgtttttacgtcagcgatattcctttgaaattcagaaccatcggcgagcgttttctgggcaggacgatggagcagattgaaatggtgtctttgggttaa

SEQ ID NO: 62831 - DNA, 1185 bp, Neisseria meningitidis
atggctaaggaaaaattcgaacgtagcaaaccgcacgtaaacgttggcaccatcggtcacgttgaccatggtaaaaccaccctgactgccgctttgactactattttggctaaaaaattcggtggtgctgcaaaagcttacgaccaaatcgacaacgcacccgaagaaaaagcacgcggtattaccattaacacctcgcacgtggaatacgaaaccgaaacccgccactacgcacacgtagactgcccggggcacgccgactacgttaaaaacatgattaccggcgccgcacaaatggacggtgcaatcctggtatgttccgcagccgacggccctatgccgcaaacccgcgaacacatcctgctggcccgtcaagtaggcgtaccttacatcatcgtgttcatgaacaaatgcgacatggtcgacgatgccgagctgttggaactggttgaaatggaaatccgcgacctgctgtccagctacgacttccccggcgacgactgcccgattgtacaaggttctgcactgaaagccttggaaggcgatgccgcttatgaagagaaaatcttcgaactggctgccgcattggacagctacatcccgactcccgagcgtgccgtggacaaaccgttcctgctgcctatcgaagacgtgttctccatttccggccgaggtacagtagtaaccggccgtgtagagcgcggtatcatccacgttggtgacgagatcgaaatcgtcggtctgaaagaaacccaaaaaaccacctgtaccggtgttgaaatgttccgcaaactgctggacgaaggtcaggcgggcgacaacgtaggcgtattgctgcgcggtaccaaacgtgaagacgtggaacgcggtcaggtattggccaaaccgggtactatcactcctcacaccaaattcaaagcagaagtgtacgtactgagcaaagaagagggcggccgccatactccgttcttcgccaactaccgtccgcaattctacttccgtaccaccgacgtaaccggcgcggttactttggaagaaggtgtggaaatggtaatgccgggtgagaacgtaaccattaccgtagaactgattgcgcctatcgctatggaagaaggcctgcgctttgcgattcgcgaaggcggtcgtaccgtgggtgccggcgtggtttcttctgttatcgcttaa

SEQ ID NO: 62832 - DNA, 198 bp, Neisseria meningitidis; identical to SEQ ID NO: 38532

SEQ ID NO: 62833 - DNA, 126 bp, Neisseria meningitidis
atgcaggttctgtcttcactcaaaaccgccaaacaacgccaccgcgactgccaaatcgtcaggcgcaggggcaaagtttacgtcatctgcaaaagcaatccgcgttttaaagcacgccaacgctga

SEQ ID NO: 62834 - DNA, 288 bp, Neisseria meningitidis; identical to SEQ ID NO: 36767

SEQ ID NO: 62835 - DNA, 879 bp, Neisseria meningitidis
atgaattacgcaaaagaaatcaatgcgttaaacaacagcctttccgatttgaaaggcgacatcaacgtttcgtttgaatttttcccgccgaaaaacgaacaaatggaaacgatgctgtgggattccatccaccgtctgcaaaccctgcatcccaagttcgtatccgtaacctacggcgcaaattccggcgaacgcgaccgcacgcacggcatcgtcaaacgcattaagcaagaaaccggcttggaagccgcgccgcacctgaccggcatcgacgcttctcccgacgaattgcgccaaatcgccaaagactattgggacagcggcatccgccgcattgtcgccctgcgcggcgacgagccgcccggttacgagaaaaaaccgttttatgccgaagacttggttaagctattacgctccgtcgccgacttcgacatctctgtagcagcatatcccgaagtgcatcccgaagcgaaatccgcacaagccgacctgattaatttgaaacgcaaaatcgatgcgggcgcgaaccacgtcatcacccaatttttctttgacgtagaacgctacctgcgcttccgcgaccgctgcgtgatgttgggtatcgatgtggaaatcgtccccggtattttgcctgttaccaacttcaagcagctcggtaaaatggctcaagtaaccaacgtcaaaatcccaagctggctgtcgcaaatgtatgaaggtttggacgacgaccaaggtacgcgcaatctggtggcggcaagtatcgccatcgatatggtcaaagtcctgtcccgcgaaggcgtgaaagatttccacttctatacgcttaaccgcagcgagctgacttacgccatctgccatattttaggcgtgcgcccttaa

SEQ ID NO: 62836 - DNA, 2274 bp, Neisseria meningitidis
atgaacattactcaaattctttcccaagaactctccgcgactgccgcgcaaatcaccgccgccgtcgagcttttggacgacggcgcgaccgtgccgtttatcgcccgctaccgcaaggaagcgacgggcgggttggacgatacgcagttgcgccggcttgccgagcggctgcaatatctgcgcgagttggaagagcgcaaagccgttgttttaaaaagcattgaagagcaaggcaagctttcagacgacctcagggcgcaaatcgaagccgccgataacaaaaccgcgctggaagacctgtatctgccctacaaacccaaacgccgcaccaaagcgcaaatcgcgcgcgaacacggtttgcagccgctggcggacgtgttgcttgccgagcagtcgcaggacgtggaagccgccgcacaaggctacctgaacgaaaacgtccccgatgccaaagccgcgttggacggcgcgcgtgcgattctgatggagcagtttgccgaagacgcggaactcatcggcacgctgcgcgacaagctgtggaacgaagccgaaatccacgcgcaagttgttggaggcaaagaaaccgaaggcgaaaaattcagcgattatttcgaccaccgcgaacccgtccgcactatgcccggccaccgcgcgttggcggttttgcgcggccgcaacgaaggcgtgttgaacatcgcgctcaaataccggcccgacgacacgccgattacgcagcaaagcgaatacgagcaaatcatcgcccgccgtttcaaggtttcagacggccacaaatggctgcgcgacaccgtgcgcctgacttggcgcgcgaaaatctttttgtcgttggaactcgaagctctcaatcgtttgaaagaagccgccgacaccgacgcgattaccgtgtttgcccgaaatctcaaagacttgctgctcgccgcacccgccggacggctgaccactttgggtctagaccctggatacaagaacggcgtgaaatgtgccgtggtggacgacacgggcaagctgctggataccgtcattgtctatttacatcaagaaaacaatatgttggcaacgctgtcgcgcctgattaaacagcacggcgtgaagctcatcgccatcggtaacggcaccgccagccgtgaaaccgacaaaatcgcgggcgaactggtgcgtgaaatgtcgaaaatggggctgcataaaatcgtcgtgtccgaagccggcgcgtcgatttattccgcgtccgaactggcggcgcgcgagttccccgacttggacgtttccctgcgcggcgcggtgtccatcgcccgcaggctacaagacccgcttgccgagttggtcaaaatcgaccccaaatccatcggcgtggggcagtatcagcacgacgtgaaccaaagccagctcgccaaatcgctggacgcggtggtcgaagactgcgtgaacgccgtcggcgtggacgtgaacaccgcctccgccccgctcttggcgcgaatttccggtttgaatcaaacccttgcccaaaacatcgttgcctaccgcgatgaaaacggcgcgttcgacagccgcaaaaaattgctgaaagtaccgcgtttgggcgaaaaaaccttcgagcaggcggcaggctttttgcggattaacggcggcacagagccgctggacgcgagcgccgtccaccccgaagcctatcccgtcgtcgccaaaatgctggcgcaacaaggcattagcgccgccgaactcatcggcaaccgcgagcgcgtgaagcaaatcaaagcgtccgacttcaccgacgaacgcttcggcctgccgaccattttggacatcctgtccgaactggaaaaacccggccgtgatccgcgcggcgagtttcagacggcatcgtttgccgaaggtatccacgaaatcagcgacttgcaagtcggtatgatactcgaaggcgtggtttccaacgtcgccaacttcggcgcgttcgtggacatcggcgtccatcaggacggcttggtgcacatctccgccctgtccaacaagttcgtccaagacccgcgcgaagtggtgaaagctggcgacgtggtgaaagtgaaagtgctggaagtcgatgctgcacgcaaacgcatcgcgctgaccatgcgcttggatgacgaaccgggcggcgcaaaacataaaatgccgtctgaaaaccgcagccgcgaacggacagccggccgcaaaccccaacgcaacgaccgcgccccagccaattcggcgatggcggatgcgtttgcgaagctgaagcggtaa

SEQ ID NO: 62837 - DNA, 567 bp, Neisseria meningitidis
atgagtctttacgctttgctcttgattgcgctggggatgtcgatggatgcgtttgccgtcgcattggcaaagggtgcggcggtcaggatgcctccgcgcaaaattgcagcaacggccttggtgttcggctcggttgaagcactcacgccgctggcaggctgggtaggcggtttttatgccaaaccgtttatcagcgaatgggaccattgggcggctttcgtcctgctgggcgggctgggtctgaaaatgatgcgcgaagggctgtccggcaaggcggaagatgtgcgcgaaagcaaacgggaaagcctatggatgacggttttgactgcttttggaaccagtattgattccatgatagtcggggtgggcttggcgtttatggaggtaaacatcgcctttgccgccgcaatcatcggtatggcgacgacggtgatggtggcggtcgggctgacggcgggaagggctttgggcgtattgttcggcaggcgtgcggaatttgccggaggtttggtgttgattgccatcggcacatggacgctcttgtcgcatttgggtttgattcaatga

SEQ ID NO: 62838 - DNA, 303 bp, Neisseria meningitidis; identical to SEQ ID NO: 42310

SEQ ID NO: 62839 - DNA, 1410 bp, Neisseria meningitidis; identical to SEQ ID NO: 45817

SEQ ID NO: 62840 - DNA, 1041 bp, Neisseria meningitidis
atgcaggcagttgttgtgaataaaaatgtagcgggcgatgtggaaatagtcgaacgcgaggttcgcccgttggaatacggcgaggcgttggtcgaagtcgaatattgcggcgtgtgccacaccgacctgcacgttgcggcaggcgactacggcgaaaaaccgggccgcgtgctgggacacgagggcatcggtttggttaaagaagttgccgacggtgtgaaaaatctgaaagtcggcgaccgcgtcagcatcgcctggctgttccaaagctgcggctcttgcgaatactgcaataccggccgcgaaaccctgtgccgctctgtattgaacgcgggctacaccgccgacggcggtatggcgacccactgcatcgtcaatgcggattatgcggtcaaagtccccgacggtctcgaccccgcccaagcgtccagcatcacttgtgccggcgtgaccacttataaagccattaaagtttccagtgttcgtccgggacagtggattgccatctacggcgcgggcggtttgggcaacttgggggtccaatacgcgaaaaaagtattcggcgcgcacgttgtcgccatcgacatcaacgacgacaaactggcgtttgccaaagaaagcggcgcggatttggttgtcaacgccgccaaagaagacgctgccaaagtgattcaggaaaaaacaggcggcgcacacgctgcggtcgtaaccgccgtatctgctgccgcattcaactctgccgtgaattgcgtccgcgcgggcggacgtgtggttgccatcggactgccgccggaatcgatggatttgtccatcccgcgtttggttttggacggcatcgaagtggtcggctctttggtcggcacgcgcaaagatttggaagaagccttccaattcggcgcggaaggtttggttgtgccgaaagtccaactgcgtgctttggatgaagcacccgccattttccaagaaatgcgcgaaggcaaaatcaccggccgtatggtgatcgatatgaaaaaagaatgcggctgcggccatcaccactga

SEQ ID NO: 62841 - DNA, 1977 bp, Neisseria meningitidis
atgccacgcattgccgccctgcccgaccatctcgtcaaccaaatcgccgccggcgaagtagtcgaacgccctgccaacgccttgaaagaaatcgttgaaaacagtatcgatgcaggcgcaacggcgattgatgtcgagctggacggcggcggcatccgcctgattcgcgtcagcgacaacggcagcggcatccatccggacgacatcgaactcgcgctccaccgccacgccaccagcaaaatcaaaaccctgaacgacttggaacacgtcgccagcatgggctttcgcggcgaaggcttggcaagcatcgcctccgtcagccgcctgaccctgaccagccgtcaagaagacagttcgcacgcaacccaagtcaaagccgaagacggcaaactcagcagccccaccgccgccgcccaccccgtcggcaccaccatcgaagctgccgaactcttcttcaacacccccgcgcggcgcaagttcctcaaatccgaaaatacagaatacgcccactgcgccaccatgatcgaacgcctcgcgctggcgcatccgcacattgccttctcgctcaaacgcgacggcaaacaagtgttcaaactccctgcacaaagcctgcatgaacggattgccgccattgtcggcgaagactttcagacggcatcattgggaatcgacagcggcaacggcgcgctgcggctctatggtgcgattgccaaaccgactttcgccaaaggtaaaaccgacaaacaatactgcttcgtcaaccaccgcttcgtgcgcgacaaagtcatgctccatgccgtcaagcaggcataccgagacgtattgcacaacgcgctgacgcctgctttcgtcctcttcctcgacctgccgcccgaagccgtggatgtcaacgtccacccgaccaaaaccgaaatccgcttccgcgacagccggcaggtgcaccaactcgtgttccacacgctcaacaaagcccttgccgacacgcgcgccgacttgaccgaaagcgtcagcaacgcaggcgaagtgttgcatgacattaccggcattactcctgcaccaatgtcgtctgaaaacgacagcgaaaatctgtttgatagcgcatccaactatccgacaggcaacaaacccgatacacgcaatacctttggttcatcaggcaaaaccgcacccatgccttaccaagccgcgcgtgcgccgcaacaacgcagcctgtctctgcgcgaaagccgcgcggccatgaatacttatgccgaactctacaaaaaaactgacgacattgaccttgaattgagccaattcgagcaggcacgtttcggcaatatgccgtctgaaacgcctactccccaaacagatacgccgctttcagacggcatcccgtcccaatccgaactgccgccgctcggttttgccattgcccaattactaggcatctacatccttgcccaagccgaagacagcctgttgctcatcgatatgcacgccgccgccgaacgcgtcaactacgagaaaatgaaacgccaacgtcaggaaaacggcaagctgcaaagccaacgcctgcttattcccgtaaccttcgccgcgtcccacgaagaatgcgccgccctcgccgattatgccgaaacactggcaggcttcggcttggaattgtccgatatgggcggcaacaccctcgccgtccgcgcagttcccgcaatgttgggcaaatccgacatcgtctcgctcgcccgcgacgtattgggcgaactcgcccaagtcggcagcagccaaaccatcgaagaacacgaaaaccgcatcctcgccactatgtcctgccacggctcgatccgcgccggccgccggctcaccctgcccgaaatgaacgcccttctgcgcgatatggaaaatacgccgcgcagcaaccagtgcaaccacggcaggccgacttgggtcaaactgactttgaaagaattggacgcactgttcttgcgcggacagtaa

SEQ ID NO: 62842 - DNA, 1413 bp, Neisseria meningitidis
atgaaaatttccagacctccggaatttaccctgttgcaacaggaatatatgcagcatctgactgaaagaatgactcaaattgccaagctgctgaattcttccgcaaacaatcctgatatagacattcccgattttcttactgaaatcaaagattattcagaattttccgtgacagatgaaaatggaacctacctgcattgggacaaattccgccggattcacacggaagatacgcggatgaaatggcgcgccgtcaaggagagccgcagaaaaatccgaaaaccaattgatttcccgtttgaacatcagttttggttctgcattcccgactctttgcaggcacggcttcatttgatcgacaaaagctgcggcagtactatcggcacgtctagcttgggtggcttcggcagaagcgagcaaaacagattcttgctcaagtctctgattatggaagaagcgattacatccgcccaactggaaggtgcggctaccacgcgcaaagtggccaaggatatgctcaaatcgcagcgtaaacccaaaacaaaagacgaaatcatgatagtgaacaactatcacttgatgaaaaaagcggtagaattgaaaaatacgccgttaagtgttgaaatgattttggatttgcaccgcattgctaccagcaacgctattgaaaacaaggccgagcccggacaattcaggcagtatgacgaaatctttatcgccgatatcaatggtaacagcctgtatcaaccaccgccgcacggacaggttcatacgctgatggaagaggtgtgtgcgtttgccaataatacctatgacggcgtggaaaatccgtttatccatccggttgtccaagctattatcctgcatttcctcatcggctacatccacccatttggtgatggcaacgggcggacagcgcgggctttgttctattggtttatgctcaaaaacggctactggctatttgaatacatatccatcagccgtcttctgaaaaacgctcctgcccaatacgccaaatcctatttgtatgcggaaactgacgatttagatttaacctatttcatctattaccaatgcgatattatcaagcgggcggttgctgatttggagcactacatttctgacaaacaaaaacaccaacaggaattcaaagcagcgattgcccaatatactgaaaagataggaaagttgaaccaacggcaaattggtatcctgcaaaaagcagtggaagaaagcggaaaaatctttactgcacaagaaattgccaaccaatacggcatctccctgaatactgcccgtagcgatttgagcaaactgggagaatatagattcctagtgccgttcaaatcaggaaatgctttagagtatgttgctcctcaggatttattggaaaggttagaaaaaaaatag

SEQ ID NO: 62843 - DNA, 975 bp, Neisseria meningitidis
atgacagaatatcccggcatcgggtcgccgttgttttacggcgttttttttgcggcagtgctggtcatgattgccttggatatgttttcgctgaagaaaaacagcagccataaagtcggcgtcaaagaagccttggcatggagcggcttgtgggttgccgtatcctgcctgttcgcaggctggctgtatttcaaactcgccggcaatcccggctacggcgcggcagtcgcaaaagaaaaagtattggaattctttaccggctacattttggaaaaatcgttggcagtcgacaatattttcgtgttcctgatgatattcggctacttcaaagtcgcaccgcagtttcagcaccgcgtgctgctgtacggcgtattgggcgcattggtattgcgcactgtcatgattttcgtcggcgcggcactggttcagcagttcgagtggattctgtatctgttcggcgcgttcctgctctataccggcatacacatgatgaagcccgaaggcgatgaggaaggggatttggcaaacagcaggctgctgaatgccgtcaagaaagtcgttccggtcggcacggaatttcacggcgagaaattttttactgtcgaaaacggtaaaaaaatcgccacgccgctgtttttggtgctggtcatgattgaattgagcgatgtcgtgtttgccgtggacagcatccccgccgtctttgccgttaccaccgatccgtttatcgtgctgacttccaatattttcgcaattctgggcttgcgggcgatgtatttcctgctggcggatgtggcggaacgcttcgtattcctgaaatacggcttggcattcgtgttgggttttatcggtgtgaaaatgctgataatgcattgggtgcatatcccgatttccgtttcgctgtcggtcgtgttcggcgcattgggtgcatcggtgttgacttcattggtttatacgaaaaaacagtccgataaataa

SEQ ID NO: 62844 - DNA, 996 bp, Neisseria meningitidis; identical to SEQ ID NO: 42282

SEQ ID NO: 62845 - DNA, 876 bp, Neisseria meningitidis
atgagcaatgaagttgaagtgatggatgcggtttcagtgcaaaactaccaagtcgcgcacagtgtgctggtgatggagcagtggggtaacggcgagacttatagcgaagagcgttgggttgaacgcggtcgtcaagcagtacggcagacgatggaaggcatgttcgaactgggacgtgcgctgattattttaaaagagcatacggaacacggacggtttatggaaattgtgaaaagccaatttgggctgggtatcgcagaaacatcacgtctgatgtcagccactcgccgctttgcgaccccgcaaatgcagaaagccgcgccgaagctgatggatttgggcaagtcaaagctgctggaactcttggtcgaagaagacgttacgttggtgggacttgccgaaggagaagaagtcaacggcatgacctttgacgatgtggaccgaatgacggtgcgcgagctgcgcgtcgccctgcgcgaaagccgtgaaaacctcgccgccaaagacgaagtgatgaaaaccaaaacagccaaaattgatgagctgaccgagaagctggctaagaagcaaaccgttgtcagagagccgaaggcggaagacgtgggcagtgagttggcgatgcagttaacaagccttgaggtcggtatccgcagtcaagtgagccgtttgaaagatttgttcgaccaacttaatgcgcacagtgaggcacacgagatcagccatcaggcaaagatggtcggcacgctcaatcaaattattttggactgcgagcaactgcgcgaaagctatgccctgccgactgaagcaccgacagacaatgtgccggaatggttgggcggtgaaacgggagaaggcgatgaatccggcaatgattga

SEQ ID NO: 62846 - DNA, 1701 bp, Neisseria meningitidis
atgtccgtcaaaatccaaacccgctccgtcaataccgacgtttttaatcatttgctcaccgccggtgccgatcctttaatcgcccggctttgtgcttcgcgtgatgtgcaaagtccggccgagttggacgacaagcttgctgcgcttttgccgtatcaatcgctgacaaactgcgaagccgccgccggccgtttggcggatgcgattgagcgtcaggaaaaaatcctgattgtcgccgactacgatgccgacggcgcgaccgcttgctccgtcggcatgagcggtttggcggcgatggacgcgaaagtggatttcctcgtgcccaaccgctttgaacacggctacggcttaacgcccgagctggctgaaatcgcggcagagcaaggtgtagatttgctgattacggtcgataacggcattgccagcatcgcaggcgtggcgcgcgcacaggctctgggtttggatgtcatcgttactgaccaccacttgccggccgagaccgtgcccgactgcatcatcgtcaatccgaaccaaaaaggctgcggttttccaagcaaaagcttggcgggcgtgggcgtgattttttatgtattgatggcgttgcgtgccgaattgcgccgccgcaattatttttcagacggcatcaaagagccgaatttgggcgaacttttggatttggtcgcactcggcacggttgccgatgtcgtccctctcgaccacaacaaccgcatcctcgtgtcgcaaggtttgaaacggatgcgctccggcaaaatgcgccccggtatccgcgccttgtttgaagtggcgcggcgcgactggcgcaaggcgcagccgtttgatatgggttttgcgttgggcccgcgcatcaacgccgccggacggctggacgatatgtcggtcggcatcgcctgcctgttggcgcgagatgatgccgaggcgcaggaactggcggctcagttaaacaacctcaatatcgagcgtcgcgaaatcgagcaatctatgctgcaagacgcgctgaatgcttttcctgaaaccctgccttcaggtcagacggctttggcggtgtatcgcgacgacttccatcaaggcgtggtcggcatcgttgccagccgcctcaaagaccgtttttatcgtccgaccatcgtgtttgcgcctgccgacaacggcgaagtgcgcggttcggggcgttccattcccaacctgcacctgcgcgatgctttggacttggtgtccaaacgccatcccgatttgattttgaaattcggcggacacgcgatggcggcgggcttgagcatactcgaacacaatatccccgcgtttcagacggcctttgaagaagccgtgcgcgagatggtgtgcgaagacgatttgtcgcaaaccttcatcaccgacggcagcctgaaagcctgcgacatcacgctggaacaggctcaaaaccttgcccgacacgtttgggggcagggcttcgcgccgccaagctttaccgacgagttccacgtcgtccgccagcagcctttgggcgcggagggtaaacacaaaaaagcgtggctgcaaaaagacggctgcgaatttgaagccatgttttggcgttgcagcgaagacatccccgaatacatccgcacggtttaccgccccgttgccaacgaatggcgcaacaatctcgaattgcagctgtatatcgattactgggaagcggtgtag

SEQ ID NO: 62847 - DNA, 405 bp, Neisseria meningitidis
atgacacaagaaaccgctttgggtgcggcactgaaatccgccgtccaaactatgagcaaaaagaaacagaccgaaatgatcgccgaccacatctacggcaaatacgatgtgttcaaacgcttcaaaccgttggcactcggcatcgatcaggatttgattgccgctttgccgcaatacgatgccgcactgattgcacgcgtcctcgccaaccactgccgccgtccgcgctatctgaaagccttggcgcgcggcggcaaacgtttcgatttgaacaaccgtttcaaaggcgaagttacccccgaagaacaggcgatcgcgcaaaaccatcctttcgtgcagcaggctttgcaacagcagtccgcccaagctgccgccgaagcagccggatcttccgcagcagaataa

SEQ ID NO: 62848 - DNA, 537 bp, Neisseria meningitidis
atgcaggcaatttctcccgaattacaggcgcgcgccgccaaaatcaaactgctgatcttggatgtggacggtgttttgaccgacgggcgcatctttatccgcgataacggcgaagaaatcaaatcgtttcacacactggacggacacggtctgaaaatgcttcaggcaagcggcgtgcagactgcgattatcacaggtcgggacgcgccctccgtcggcatccgcgtcaaacagttgggcataaattactacttcaaaggcatttcggacaaacgcgccgcgtatgaagagctgcgcgctcaggtcggcgtggaagaagccgagtgtgcctttgtcggcgacgacgtggtcgatttgcccgttatggtacgctgcggattgccggttgccgtccccgacgcgcattggtttacgctgcaacacgccgcctatattgccaaacgccccggcggtgcgggcgcggtgcgcgaagtgtgcgacctgattatgcaggcgcaagggactttgggcgcggctttgaacgagtacatcaaatga

SEQ ID NO: 62849 - DNA, 1398 bp, Neisseria meningitidis; identical to SEQ ID NO: 45135

SEQ ID NO: 62850 - DNA, 621 bp, Neisseria meningitidis
atggaattgaaagtaattgacgctaaaggacaagtttcaggcagcctgtctgtttctgatgctttgttcgcccgcgaatacaatgaagcgttggttcatcagctggtaaatgcctacttggcaaacgcccgctctggtaaccgtgctcaaaaaacccgtgccgaagtaaaacactcaaccaaaaaaccatggcgtcaaaaaggtaccggccgcgcccgttccggtatgacttcatctccgctgtggcgtaaaggtggtcgcgcgttcccgaacaaacccgacgaaaacttcactcaaaaagtaaaccgcaaaatgtaccgtgccggtatggcgactattctgtcccaattgactcgtgacgagcgtttgtttgcgattgaggcgttgactgctgaaactcctaaaaccaaagtttttgctgaacaagtgaaaaatctgggtctggagcaagtgttgtttgtaaccaaacagctcgacgagaatgtttacttggcttcacgcaacttgccaaacgtgttggttttggaagctcaacaagttgatccttacagcttgctgcgttacaaaaaagtaatcatcactaaagatgcagttgcacaattagaggagcaatgggtatga

SEQ ID NO: 62851 - DNA, 660 bp, Neisseria meningitidis
atggatacttggcacgatgcactgggcaacgaaaaacggcaaccgtattttcaggaaattttaaatgcagtcaggcaggaacgtttgtcgggacaaatcatctatccgccggcggcggatgtgttcaacgcattccgcctgacagcgttcgaccgggtcaaagccgtcattctcggacaagatccgtatcacggggcagggcaggcgcacggtttggcattttccgtccggcagggtgtccgcataccgccgtctttactcaatatctacaaagaattggaaaccgacatcaacggtttttccattcccgatcacggctgcctgacggcttgggcggagcagggcgtattgcttctgaacacggttttgacggtgcgtgcaggacaggcgcattcgcacgcccttttaggctgggaacgctttaccgataccgttatcaggcagcttgcgacacaccgcaagcaccttgtcttcatgttgtggggtgggtatgcacaacaaaaagggaggctgatagacagtcaaaatcatttgatattgaccgcaccgcatccatctcctctgtcggcatatcgcggtttttttggctgccgccatttttcacaggcaaacagctatttgagccggcacggtatcgatccgataaactggaagctgtga

SEQ ID NO: 62852 - DNA, 300 bp, Neisseria meningitidis
atgacgggattcaatgatgccgccggcgtggcaacctccaccgacattaaaggcaaatatgttcaaagcgttgaagtcaaaaacggcgtcgttaccgccacaatggcttcaagcaacgtaaacaacgaaatcaaaggcaaaaaactctccctgtgggccaagcgtcaaaacggttcggtaaaatggttctgcggacagccggttacgcgcgccaacaccgccaccgacgccgacgtcaccgccgccaacggcaccgacaagaaaatcgacaccaaactagagaaaccgttttcccgataa

SEQ ID NO: 62853 - DNA, 252 bp, Neisseria meningitidis; identical to SEQ ID NO: 37103

SEQ ID NO: 62854 - DNA, 876 bp, Neisseria meningitidis; identical to SEQ ID NO: 50678

SEQ ID NO: 62855 - DNA, 2058 bp, Neisseria meningitidis
atgcccgaacaaaaccgcatcctctgccgcgaactgagcctgctggcattcaaccgccgagtgttggcacaggcggaagacaaaaacgtcccccttttggaacgcctgcgcttcctgtgcatcgtgtcgtccaatcttgacgagtttttcgaagtccgcatggcgtggctcaaacgtgaaaacaagctgcacccccggcgcaggctggacaacggcaaaatgccgtctgaaaccatcgccgacgttaccgaagcggcgcgctccctgatacggcaccagtacgacctgttcaacaacgtccttcagcccgagttggcgcgggaaggcatccatttttaccgccgccgcaactggacgggcgcgcagaaaaagtggatcgaaagctatttcgaccgcgaattgctgccgattctgacccccatcggactcgacccttcccaccccttcccgcgcccgctgaacaaatcgctcaacttcgccgtcgaactcgacggtacagatgcattcggcagaccttcgggtatggcgattgtccaagcaccgcgcatcctgccgcgcgttgttcccctgccgtccgaactgtgtggcggcggacacggcttcgtcttcctgtcgtccatcctccacgcccacgtcggcaaactcttcccgggcatgaacgtcaaaggctgccaccagttccgcctgacgcgcgacagcgacttgaccgttgacgaagaagacctgcaaaacctccgcgccgccatccaaaacgaactgcacgaccgcgaatacggcgacggcgtgcggctcgaagtcgccgacacctgtcccgcctacatccgcgactttctgctcgcgcaattcaaactgaccgccgccgaactctatcaggtcaaaggcccggtcaacctcgtgcgcctcaacgccgtccccgacctagtcaaccgccccgatttgaaatttcccacacacacgccgggcagactgaaagccttgggcaaaaccgcgtccatattcgatttggtgcgccaatcgcccatcctgctgcaccacccctaccaatcgttcgaccccgttgtcgaaatgatgcgcgaagctgccgccgaccccgacgtgcttgccgtcaaaatgacgatttaccgcaccggcacgcgttccgaactcgtccgcgccctgatgaaggcggcactcgccggcaaacaagtaaccgtcgtcgtcgaactgatggcgcgttttgacgaagccaacaacgtcaactgggcgaagcagctcgaagaggcgggtgcgcacgtcgtgtacggcgtgttcggctacaaagtccacgccaagatggcactggtcatccgccgcgaagacggcgtactcaagcgttacgcccacctcggcacgggtaactaccaccaaggcacatcgcgcatctacaccgacttcggcatcattaccgccgacgaacaaatcaccgccgatgtgaacacattgtttatggaaatcacaggcttgggcaaacccgggcggctgaacaaactctaccaaagcccgtttaccctgcacaaaatggttatcgaccgcatcgcacgcgaaaccgaacacgcaaaagccggcaaaccggcgcggattaccgccaagatgaattcgctcatcgaaccgaccgtcatcgaagccctgtatcgggcaagcgcggcaggcgtacaaatcgatttgattgtgcgcggtatgtgcaccttgcgcccgggtgtaaaaggcttgtccgaaaacatccgcgtccgctccatcatcggcaggcagctcgaacacgcgcgcgtgtattgcttccacaacaacggcgcggacgatacctttatctccagcgcggattggatggggcgcaacttcttccgccgcatcgaaaccgccgcgccgattgccgcgcccgaactcaaaaaacgcgtcatccgcgaaggtttggaaatggcactggcagacaatacgcacgcgtggctgatgcagcccgacggcggctatatccgcgccgcgcctgccgagggcgaaagcgaagccgacctgcaaaacgatttgtggacactgctcggaggctga

SEQ ID NO: 62856 - DNA, 1218 bp, Neisseria meningitidis
atgacgcacaccgcatcgaaaacacccaaattttggctgaccatcaccgccgccgcattcatcctgctgattaccatcggcatgaggatgacgctcggactgttcgtccaacccgtcgtcaacaccaccgaattgagcattgcccaattcagcctcatcatcgccgttttccaactgatgtggggcatatcgcaaccattgtccggcgcgcttgccgaccgtttcggcgcgttcagggtattaagcggcggcgccgtcctgctcgtctgcgcctgcctgattgcccccaacatcccgacttattgggggctgatgattgccgtcgggctgctgctcgcattcggcaccggttccggcggtttctccatcattatggggcaggtcgccgcccaagtccccgcacacaaacgcggcttggcatccggactggtcaacgccggcggttcggcaggacaattcctgttcgcaccgctggttcaaggactcgtcgtcctgcccgaagtcggctggacgggcacattttacgtttggggcgcaatcgccctgctgattctgcctgtctcatggtggcttgccggcggcaacaacgccgcccacacccaacacgcccaagccacacacggacaaagcctcggagaagcagtcaaaaccgccttcaaaaccccaagctacatcctgctgcacctaagcttttttgcctgcggcttccacatcgcctttctcgtaacccacctacccacggaagtcgccctgtgcggactgcccgccaccgtcgcatccacagccatcgccatcatcggactggcaaacatcgccggttgtgtgttctcaggctggtgcacaagccgcgttcggggcaaatacgtcctgttcggactgtacgcctcgcgcgccgcgatgatactcatctacattttttcgcccaagaccgacctcaacttctacattttcgccgccgcactcggatttacctggctcgccaccgtcacgccgaccgcctccattaccggcaaactcttcggcacacgctacctcgccaccctgttcggactgacgatgctcagccaccaaatcggcggattcctcggctcgtacatcggcggcatcgtgattacacaattcggcgactacggctggatgtggtacgccgacgcactgctggcgggaaccgccgccctcctcaacctccccatccgcgaaccccgaaccgccgcatga

SEQ ID NO: 62857 - DNA, 120 bp, Neisseria meningitidis
atgagtgataagccaattttattgaaccctgcggcgaaaaaagaggctttggatcgggcggtaaaggaaatccgtgcgaaatatggcgataaggcgattgtgaaaggatgtgtgaaatga

SEQ ID NO: 62858 - DNA, 1008 bp, Neisseria meningitidis
atgtatccacttgcccgccgcatcctgtttgcactcgatgccgagaaagcccaccacttcacgctcgacgcgctcaacatggtttataaattgggtctgattcccgtaaccggcaaccgtaccaaacctgtaaaactgatgggtttggatttgcccaaccctgtcgggcttgccgccggactcgacaaaaacggcgaatacatcgacgcattgggcgcgctcggtttcggcttcatcgaaatcggcacggtaacgcccaacccgcagcccggcaacccgcagccgcgcctctttcgcgttcccgaacaccaaggcatcatcaaccgcatgggtttcaacaaccacggtatcgacaccatgatacgcaacatcgaaaaaagtaaattcagtggcgtattgggcatcaacatcggtaaaaacgcggttacacccatcgaaaacgctgccgatgattatttaatctgccttgaaaaagcctacgcacacgcaagctacattaccgtcaatatttcctcgcccaacaccaaaaacctccgcgcgctgcaaggtggcgacgagttgagcgcattgcttgaggctttgaaaaacaaacaggcacagcttgcctctgtatacgggaaatacgttccgctcgccgtcaaaatcgcccccgatttggatgaagcacaaatcgaagacatcgcccacgttgtcaaatccgtcgaaatggacggcatcatcgctaccaataccaccatcgacaaatcaagtctcggcagccatccgctcgcaggcgagcagggcggtttgagcgggctgcccgttcatgaaaaaagtaatcgggtgttgaagctgttggcagaccacatcgacggcaagctgccgattatcggcgtaggcggcattatggaaggcggggacgcggcagagaaaatccgcttgggcgcgaccgccgtccaagtgtacagcggattgatatacaaaggtccggcattggtcaaagaatgtttgaaggctttggcgcgatga

SEQ ID NO: 62859 - DNA, 423 bp, Neisseria meningitidis; identical to SEQ ID NO: 40586

SEQ ID NO: 62860 - DNA, 579 bp, Neisseria meningitidis; identical to SEQ ID NO: 61148

SEQ ID NO: 62861 - DNA, 990 bp, Neisseria meningitidis
gtgggcatcaatgccaatcctaactgtgctgatgaagcaggaaaactgatatgggaaaacgaccccaataaaaattggtgggctaaccgtatggatgatgttcgcggcatcgtccaaggtgcggttaatccttttttaatgggttttcaaggagtagggattggggcaattacagacagtgcagtaagcccggtcacagatacagccgcgcagcagactctacaaggtattaatcatttaggaaatttaagtcccgaagcacaacttgcggctgcaaccgcattacaagacagtgcttttgcggtaaaagacggtatccactctgccaaacaatgggctgatgcccatccgaatataactgcaacagcccaaactgccctttccgcagcagaggccgcaggtacggtttggggcggtaaaaaagtagaacttaacccgactaaatgggattgggttaaaaataccggctatgaaacaactgttacccgaaagactttagatgggcaaatagctggcaagaacaagcctattaaaccttcttcaggagattatgtcttgccggtaggcagacaaatcatagatcctactcgtacatctttttcacaagctacagttagctatcagaagcgtggtgcaaattacaactatgattctcttgtagctgcaatgaacgaaaaaaaatcatgggttggcgacagggttgatgttgttaatatgcctgatggagcacctactagtatggataacacgcgtattatggcagcacgtgaagcaggggtaaaagtggaagcgaatgttcataattttaatgaccgattatcatcaaaagagagaatcaggtttaagcatgatggtattgagcctcaaacttggggagaagctatccagctacgaattagaaagcaagaaacacaaaaaggagttccagaagggtggagcaaaagatttcctaacggaagtatttatgatgtaaaggtacttaggaaatga

SEQ ID NO: 62862 - DNA, 732 bp, Neisseria meningitidis; identical to SEQ ID NO: 39074

SEQ ID NO: 62863 - DNA, 195 bp, Neisseria meningitidis
ttgccgacaccgcctgccgcattgatggttgcgccggtacgcccaaatccgccgaaagacggcaagacggccacgctgttggaacacgccgccgagtttggcggctatgtggcggagttggaaaaccaaaatcaggcttggcgcgactgggtcaacagtcaagcggaagttgacggttcggagggcgcgcgatga

SEQ ID NO: 62864 - DNA, 618 bp, Neisseria meningitidis
atgaccttcctgccactcaaatccccgctcaaattctacgccgtcgtccccaccgccgattgggtcgagcgcatggtcgaagcaggtgccgacacggtgcaactgcgctgcaaggccctgcacggcgatgaattgaaacgcgaaatcgcccgctgcgccgcagcctgccgtggcagccgtacgcagcttttcatcaacgaccactggcgcgaggcaatcgaagcaggcgcgtacggcgtgcatctcggacaagaagacatggacaccgccgacctcgccgccattgccgctgccggtttgcgtttgggtttgagtacgcactccgtcgccgaactcgaccgcgccctgtccgtgcaccccagctacgtcgccagcggcgcgattttcccgaccacgaccaaacaaatgcccaccgcccctcaaggcttggaaaaactgcgtgaatatgtgaaacaggcaggcagcacgcccgtcgtcgccattggcggcatcgatttgaacaacgcccgagccgtactcgccaccggcgtttcctcactcgccgccgtccgcgccgtaaccgaagcggcaaatcccgaagcggtggttaaagcgtttcaggctttgtgggatggataa

SEQ ID NO: 62865 - DNA, 1128 bp, Neisseria meningitidis
atgaaacacttactcatcgattttgaaaacgtccagccgcaaaacttagacaaattactaaccgaaaatacccatatttggctatttataggtgtattacacaaaatgttacctattagtctggtgcaatccctactacgtttcggcgaacgtgtccatcttgtccagttacaaaaaacggggaaaaacgcattggatttttacctgtcctattacctcggacaaattaccgccacagaccccaatgcccaaatcggcatactctcgcgtgatggaggatacgatgttctggtcgaacatattttgaaaaaccaccaggcgaagggtatcgtgcgcctagccaatatagatgaagtacaacatcagaaaattgctaccgaaccgccgtcagcattgcgggaaaacactcctcagcctgaaaccaccctcaaaccacagcaaccattaacttcctatttccaagcagccctaactgcactgcgccgccccgacgctttccgcccctgccgcctgcataacctgcgacaaaatctgcgtaagcatattttgagtgatttgtttaaagaaaaaaccgatgaagaatgcgaaataaccactgctaacgttatcaataaactcaaagcacaaaacttcatcagcattgatgaacaggaaaccgtttcctaccatctcagtgataatgatttgttacaaagaatccaacgccatattttaagccaacgtcccaaaacctacgctgattttcaagccgtcgtgcaaaaccgagcagatgcacttcacttaacagtcggtaccaacgacattcaatcctttgcgcgacatttgcgcgaccaaaacctgatccgccaaaacaatgggaaaattgaatatgcaccgtttactgaacctaaaccacagccaacgcccaagcagcctaaaaaaaccgcatgggaacctgatgaaattatttggaaaaaagtgattgccgcgttatcgttaaagaaccgtcctaataaaaccaaaactttacgcaatacaatccaggcactcacaaaatccaatgcacaagaaactgacaaactgctacaacatttacaagatacccaagtcctacgtattgacggtactaaaattgtgtatatcaagtag

SEQ ID NO: 62866 - DNA, 1647 bp, Neisseria meningitidis
atgaaacactttcacgacttacccgcatggtcgaaattgtggaaccactttgacgacagcaaaacattgcatatgcgcgaaatgttcgagcaagacccgcagcgtgcggaacgctactggctgcaagtcggcggactgacgctggactactccaaaaaccgcatcaacgacgaaaccatgtcgcttttgttcgagttggcgtgtgaagcaggcgtgccggagcggatgcggcagatgttccacggcgaaaaaatcaataccaccgaaaaccgcgccgtcctgcatgtcgcccttcgcaaccgcaccaattcgccgattgtggttgacggtgaagatgtgatgcccaaagtcaaccgcgttttgcaacgtatgggcgaatttgcacacgaagtccgcagcggaagctggctgggctataccaaccaagtcattaccgacgttgtcaacatcggcatcggcggatcggatttgggcccgctgatgatgtgtaccgcgctcaaacctttcggtcatccgcgcctcaatatgcacttcgtctccaacgtggacggctcgcaactgcgcgacgtattgtccaaagtccaccccgaaaccacgctgttcatcatcgcctccaaaacatttaccacgcaggaaacgctgaccaacgcgctgaccgcgcgcgaatggtttttgaatcatgcgggcgacgaagaagccgttgccaaacacttcgccgccgtttccaccaatcaaaaagccgtcgccgaattcggcatcgacaccgccaatatgtttgaattttgggattgggtcggcggtcggtacagcctgtggtccgccatcggattgccgattatgctgtatctcggcgaagaaaacttcattgaaatgctcaacggcgcgcacctgatggaccaacacttcatcaacacaccgctcgagcgcaacctgcccgtcattctcgccctcatcggcatctggtatatcaactactacggcggcggcagccacgtcatcgcgccttacgaccaacatttgcaccgcctgcccaaattcatccagcagctcgatatggaaagtaacggcaaacaggttacgttggacggcaaagcagtcggacacgaaacctcgccgattatctggggcgaaacgggcattaacggccagcacgcctttttccaactgctgcaccaaggcacgcacattacccccatcgacctgattgcctcgcttgaaaaacgcagcaacctgcccggacaccacgaaatcctgcttgccaacgtcttcgcccaagcagaagcctttatgcgcggcaaaacccccgacgaagtccgcgccgaactcaaagcgcagggtatggatgaggcgcgcatcgaagagctggtcccgcacaaaaccttctccggcaaccgcccgaccaacctcattctcatggacaaggtcaacccgcgcaatatgggcagcctgattgccatgtacgaacacaaaaccttcgtacaaggcatcatttggggcatcaacagcttcgaccagtggggcgtggaactcggcaaacaactggctaaaaccattttgggcgaactgaccggcgaaaccgggccgcaaaagcacgacagttcgaccgaacgcctgatcaacctctacctgcagaccaaccgcaaataa

SEQ ID NO: 62867 - DNA, 579 bp, Neisseria meningitidis; identical to SEQ ID NO: 61948

SEQ ID NO: 62868 - DNA, 729 bp, Neisseria meningitidis; identical to SEQ ID NO: 45825

SEQ ID NO: 62869 - DNA, 417 bp, Neisseria meningitidis
ttgaccgatgatgcggtgcgtttggctttacggcaggcggtaatggcggtgcgcgaacggtatccgtttgaaattttggcatgggtgttgatgcccgatcatctgcataccatatggcggctgccggacaatgattctgcttattcggaacgctggcggcagatcaagcggcacagccaatatttaatcggcggcaatctcaggctttggcaaaaacgcttttgggaacatactatccgcgatgaggccgattttgcctgccattttgattatctgcatttcaatccggtcaaacatggctatgtaggacaaatttccgattggcggttttctacgtttcaccgttatgtcaaacagggtatttatccgcataattggggtggcggcaatgcggacttttctattgaatacgattga

SEQ ID NO: 62870 - DNA, 405 bp, Neisseria meningitidis
gtgtttggcaatcatggcttgggcggtttgctggaagaaggtgctcatggaaaatcccctaaatgtcatggtgggaatttaggggattttggggaattttgcaaaggtctcggaaaatatgttaaggaagttacagtcgcaaacggcgtcgttaccgccacaatgctttcaagcggcgtaaacaaagaaatccaaggcagaaaactctccctgtgggccaagcgtcaagacggttcggtaaaatggttctgcggacagccggttacgcgcgacaaagccgacgccgacgccgacgccgacgccgttaccgccgacaccgccgccgccaacaagaagatcgacaccaatcattcccacgaacctacatcccgtcattcccgcgaaagtgggaatgacgggatttaa

SEQ ID NO: 62871 - DNA, 156 bp, Neisseria meningitidis
atgcgcgataaaatcaaactggaatccagtgcaggtactggtcacttctacaccactaccaaaaacaaacgcactatgcccggcaaactggaaattaaaaaattcgatccggttgcccgcaaacacgtagtgtataaagaaaccaaactgaaataa

SEQ ID NO: 62872 - DNA, 1671 bp, Neisseria meningitidis
atggaaaaaatctggttagacagttacgaacagggcgtgaatgccgaaatcgacatcacgcaatacggttccgtcagcgatgtattttgccaaagtgtcaagaaatttgccggccaacctgcttttcaaaacatgggcaaaacgctgacttatgccgaaaccggcaaactggcgaccgatttcgcctcttatctgcaaaacgtcctcaagctgccgcgcggcgaacgtgttgccattatgatgccgaacgtattgcaatatccgattgcccttttcggtattttgcaggcaggtttggtagcggtgaacaccaatccgctctataccccgcgcgagctggagcatcagttgaaagacagcggcgcggccgccatcatcgttttggaaaatttcgccaacacgctggagctggtgctgccgcgcacgcagatcaaacacgtcatcgtcgcctctgtcggcgaaatgttcgggctgcttaaaggttcgctgatcaatttcatcatccggaaaatcaagaaaatggtgcccgaataccgtattcgggaaaccgtttcctttcagacggcattgaaagaaggggcgaagcacgttttccaacctgtcgcattaaaccgcgaagataccgcgctgttgcaatacacgggcggcacgacaggtgttgccaaaggggcggtgctgagtcacggcaacatctgcgccaatatgcttcaggcaaaagaatggattaaaaaccagttgcgcgagggcaaagaaaccgttatcgccgccctgccgctgtatcatatttttgccttaaccgtgaatctgatgatttttgccaatgccggctcgaaaattgtcctgattaccaacccgcgcgatatgaaaggctttatcggcgaactgaaaaaacagcgggttaatgtatttatcggcgtaaacacgctgtttaacgcgatggttaaccggcccgattttgccgaagtcgatttttcagaattgcggctgactttgggcggcggtatggcgacccaaaaagccgttgccgaaaaatggaaaaaaatcaccggcacgcccatcgtcgaagcctacggtttgaccgaagccagccccggcgtgtgctgcaaccccttaaacatcgaatcatacagcggcagcatcggtttgcccgtctcgtccaccgaagtcgaactgcgcgacgcaaacggcaaagaagtccccgtcgggcagccgggcgaattgtgggtaaaaggccctcaagtgatgcaaggctactggaaccgccccgaagaaaccgccaaagccatagacgcgcgcggcttcttggaaaccggcgatattgccgtcatggacgaaaaaggctggttgaagctggtcgatcgtaagaaagacctcgtcgttgtttccggattcaatgtttatccgaacgaaatcgaggaagtcatcgcgcatcacggcaaagtcatggaagtcgcctgtatcggcgttcccgacgaaaaaaccggcgaggcactcaaagtattcgtcgtcaaaaaagacccgtcattgaccaaagaagaacttatcgccttttgccgcaccgaattaaccgcatataaagtaccgaaaaatatcgaattccgcgacgagttgcccaagtccaacgtcggcaaaatcctgcgccgcgagttgcggcaaagtaccgggaaataa

SEQ ID NO: 62873 - DNA, 2940 bp, Neisseria meningitidis
atgagcggttttaattacgagaaaaaccagccgcaccaaatgcgggcggtttcggcggttttgggcgtgtttgacggggcaacgcccaaatatcgggcggcagacgaaaatcccaaacttttgtttgctgcaaaacaatacgcagacaatatcctaaaagtgcaaagccaaaacggcataggcggccgattccccgaccgttcggacgaccaaaatatccttgatatttccatggaaacgggcacgggcaaaacctatacctacacacaaaccatgttcgagctgcaccgttggctgggcgtgttcaaatttatcgtggtcgtgccgactttgtccattaaggcgggaacgcggcagtttttgcaaagcaaggctttggcagagcattttgaacaggattttggcggagattatgaaggcgtacgcctgaaaacctatgtggtagaaagcgcgaaaaagaataagggcaaaaagtccaatgcgcccataacgattgagcaatttgtcaaagcggaaaataaaaaggaaattcatgtgctgctgattaacgcgggcatggttaattcgccgtccatgaccgatacgggcgacaaggcattgaaggatttgtttgacaatcccgttgatgcattggccgccgtgcgcccgtttgtgattgtggacgaaccgcataaattcccgacccgggagagcgcgaaaacgtggggcaatatcaaacgcttaaaaccgcaatatattttgcgctacggtgcgacatttaacgatgaatattacaacttgctttaccgtttgacggcagtagacgcatttaacgacgggctggtcaaaggcgtgcgcgtgtttcaggaagaaatgcagggcggcatggatgcggcggtaaaactggtgtcgtcggacggcaaagaagcgaaatttgaattaaacgaaaaggacaaaaagcagacgttcaaactggcaaaaggcgaagatttgtcgaaaatccatcccgctgtttcggatttgaaaatcgacaaaatgaataaaaccgtggtggtgttaagcaacggcttggagttgaaaacgggtgccgtcatcaacccttattcctattcgcaaacggtgcaggacgcgatgatgcagagggcggttgccgaacatttcaagctggaacgcgcgcttttggcagaacgcgcgccacagcccaaaatcaagccgctgacgctgttttttattgacgatatcgcgggctaccgcagcggcaacgagctttcaggcagcctgaaagataaatttgaaagctggatccgtgcggaagcggcacgccgcctgaaaacggaaagcgacccgttttatcgtgattacctgcaaaagacgttggacgatgtatccgcctgccacggcggttatttttccaaagacaatacagacagcgacgatagaatcgagcaggaaatcaatgaaatcctgcacgataaggaaaaactgttgtctttggacaacccgcgccgctttattttttccaaatggacgctgcgtgaaggctgggacaatcccaacattttccagatttgcaaactgcgttccagcggcagcacgacttccaagctgcaagaagttggacgcggcctgcgcctgccggtaaacgagctgatggcgcgggtgcgcgatgtgccgtacaaactgaattattttgtcgatagcagcgaaaaagactttgtgaagcagcttgtcggcgaaatcaacgacaattcttttcaggaagaaatctccaaaaagtttaccgaagagctgaaacaaaaaatattgcaaaaataccccgatatcaaaccgctggtattgttaaaccaactgttttcagacggcatcattgacgacaatgaaaactttgccgaagacggctatgacaaattaaaagccgcctatcccgaagccttccccaaaggtttggacaaaggcaaagtcagcaacgccaaagacgagggcaaagacaccatcatcatgcgcgaaggcaaatatgaagaactcaaagccttgtgggagctgattcaccataaagccgttttgcagtacaaaatcaaggatgaagccgaatttgtcgatttatttaccgcctatttgcgtgaaaacgccgccaaattcccgcaggcaggcatacgcacggcggtaaacgaaacttatatcaacaacgggctcatgctttcccgccgcatagacagtattgaagatgaagattttatccgtttcaacacaatgaattaccgagaatttctggaaaaactggcacaaacggcaaaaatccgcatgcagactttgcatcaggcgttttaccgcgtccgcgacgaactgaacattggcgattttttgaatatgcagaccatcgcccaaatcaaaaacggcttcaaccggtttttgcttcatcattccttccataaattcgaactggattaccggcttgtcggcagcaaaatccatccgaccaaatttaccaataaagacggcaaaccgcgcgcggtgaaaaaagcagatttgggcagatttgaagatacggagcaccggcctgccgccggctatctcttcgacgagattttctacgattcggatatagaacatgaaaatgtcgccaacaaccaaattgaaggcgtaaccgtatttaccaaaataccgagaaactccatcaaaatccctgttgccggcggcggcacgtattcgcccgattttgcctatatcgtgaaaaccaaaagcggcgagatcctgaactttgtgattgaagccaaagggactgacggggcggaagatttgcgaaaaagcgaagagcggaaaatcaaacatgccgaaaagctgtttgccgagatttccaaagaaatcaaggtggtgttcaaaacgcagtttgacggcgagaggatagccgaactgatcgggcaaaatatgcccgcaggcgggcattctgaaaacggacactga

SEQ ID NO: 62874 - DNA, 2745 bp, Neisseria meningitidis
atgcaacagcaacatttgttccgattcaatattttatgcctgtctttaatgactgcgctgcccgcttatgcagaaaatgtgcaagccggacaagcacaggaaaaacagttggataccatacaggtaaaagccaaaaaacagaaaacccgccgcgataacgaagtaaccgggctgggcaagttggtcaagtcttccgatacgctaagtaaagaacaggttttgaatatccgagacctgacccgttatgatccgggtattgccgtggtcgaacagggtcggggcgcaagttccggctattcaatacgcggcatggataaaaaccgcgtttccttaacggtggacggcgtttcgcaaatacagtcctacaccgcgcaggcggcattgggcgggacgaggacggcgggcagcagcggcgcaatcaatgaaatcgagtatgaaaacgtcaaagctgtcgaaatcagcaaaggctcaaactcggtcgaacaaggcagcggcgcattggcgggctcggtcgcatttcaaaccaaaaccgccgacgatgttatcggggaaggcaggcagtggggcattcagagtaaaaccgcctattccggcaaaaaccgggggcttacccaatccatcgcgctggcggggcgcatcggcggtgcggaggctttgctgatccacaccgggcggcgcgcgggggaaatccgcgcccacgaagatgcaggacgcggcgttcagagctttaacaggctggtgccggttgaggataccaatcagtacgctcatttcgtggtcgaagaagaatgccctaatggatatgcggcttgtaaagacaaaccgaaaaaagatgttgtcggcaaagacgaacgtcaaacggtttctacccgagactacacgggtcccaaccgcttcctcgccgatccgctttcatacgaaagccggtcgtggttgttccgcccgggttttcgttttgaaaacaaacggcactacatcggcggcatactcgaacacacgcaacaaactttcgacacgcgcgatatgacggttccggcattcctgaccaaggcggtttttgatgcaaattcaaaacaggcgggttctttgcccggtaacggcaaatacgtgggcaaccacaaatacggcggtctgtttaccaacggtgaaaacggtgcgctggtgggcgcggaatacggtacgggcgtgttttacgacgagacgcacaccaaaagccgctacggtttggaatatgtctataccaatgccgataaagacacttgggcggattatgcccgcctctcttacgaccgtcagggcatcggtttggacaatcattttcagcagacgcactgttctgccgacggttcggacaaaaattgccgtccgagtgccgacaagccgtcttcctactacaaatccgaccgcgtgatttacggggaaagccacaggctcttgcaggcggcattcaaaaaatccttcgataccgccaaaatccgccacaacctgagcgtcaacctcggttacgaccgttttggttccgacctccgccatcaggattattattttcaaaacgccaaacgcgcctattcgtcgaatctgccccctcaaagcggcgataaaaaaatcagccccaacggcgaaaaagacaaaccctattgggtcagcataggcggcggcaatgtggttacggggcaaatctgccgctcgggcaacaatacttatacggactgcacgccgcgcagcatcaacggcaaaagctattacgcggcagttcgggacaatgtccgtttgggcaggtgggcggatgtcggcgcggggttgcgctacgactaccgcagtacgcattcggacgacggcagcgtttccaccggaacgcaccgcaccctgtcctggaacgcaggcatcgttctcaaacctgccgactggctggatttgacttaccgcacttcaaccggcttccgcctgccctcgtttgcggaaatgtacggctggcggtcgggcgataaaataaaagccgtcaaaatcgatccggaaaaatcgttcaacaaagaagccggcatcgtgtttaaaggcgatttcggcaacttggaggcaagttggttcaacaatgcctaccgcgatttgattgtccggggttatgaagcgcaaattaaaaacggcaaagaagaagccaaaggcgacccggcttacctcaatgcccaaagcgcgcggattaccggcatcaatattttgggcaaaatcgattggaacggcgtatgggataaattgcccgaaggttggtattctacatttgcctataatcgtgtccatgtccgcgacatcaaaaaacgcgcagaccgcaccgatattcaatcacacctgtttgatgccatccaaccctcgcgctatgtcgtcggcttgggctatgaccaaccggaaggcaaatggggtgtgaacggtatgctgacttattccaaagccaaggaaatcacagagttgttgggcagccgggctttgctcaacggcaacagccgcaatacaaaagccaccgcgcgccgtacccgcccttggtatattgtggacgtgtccggttattacacgattaaaaaacacttcaccctccgtgcgggcgtgtacaacctcctcaactaccgctatgttacttgggaaaatgtgcggcaaactgtcggcggcgcagtcaatcaacacaaaaatgtcggcgtttacaaccgatatgccgcccccggccgaaactacacatttagcttggaaatgaagttttaa

SEQ ID NO: 62875 - DNA, 447 bp, Neisseria meningitidis; identical to SEQ ID NO: 41921

SEQ ID NO: 62876 - DNA, 450 bp, Neisseria meningitidis
atgagtatttatgccgtcgcgcacatcgtccatctgtattgcgctattgcctttgtcggcggcgtgttttttgaagtgctggttttgtccgtcctgcatacgggacgggtgtcgcgcgaggtgcggcgcgaagtggaaaaagccatgtcttaccgcgccgtcagggtgatgccgtttgtggtcggactgctgttcgccagcggcatcgtaatggcggcaaaccgctaccttcctatattgggcgaaccgtttgccacttccttcggtacgatgctgacgctgaaaatcctgttggcgttcagcgtgttggcgcacttcgccatcgccgtcgtcaaaatggcgcattccacgctgaccgtcggctggtcgaaatacatacacgccgtcgtctttacccatatgctgctgattgtctttttggcaaaagcgatgttttatatcagctggtaa

SEQ ID NO: 62877 - DNA, 2751 bp, Neisseria meningitidis
atgctgacaaacattgccaagaaaatcttcggcagccgcaacgaccgcttgctgaaacaataccgtaaatccgttgccagaatcaacgcgctcgaagaacagatgcaagccctaagcgatgctgatctgcaagccaaaactgccgaattcaaacaacgcctcgccgacggtcagactttggacggcattttgcccgaagccttcgccgtctgccgcgaagcgtcccgccgcaccctcggtatgcgccacttcgacgtgcagcttatcggcggtatggtgctgcacgacggcaaaatcgccgaaatgcgtaccggcgaaggcaaaaccctggtcgccaccctcgccgtctatctcaacgcgctggccggcaaaggcgtacacgtcgttaccgtcaacgactacctcgcctcacgcgatgcgggcattatggagccgctctacaatttcctcggccttaccgtgggcgtgattatttcagatatgcagccgttcgaccgtcaaaacgcctatgccgccgatatcacctacggcaccaataatgaattcggcttcgactacctgcgcgacaatatggttaccgaccaatacgacaaagtgcagcgcgaattgaattttgccgttgtcgatgaagtggattccatcttgattgacgaagcgcgcactccgctgattatctccggtcaggcggatgacaacatccagttgtaccaaatcatgaacaccgttccgccccacctcgtccgtcaagagacagaagaaggcgaaggcgactattgggtcgacgaaaaggcacatcaggtcatcctgagcgaagcaggtcacgaacacgccgagcaaatcctgacccaaatgggattgctggcagaaaacgactccctctattccgccgccaatatcgccctgatgcaccaccttatggcggcattgcgcgcgcattccctcttccacaaagaccaacattacgtcatccaagacggcgaaatcgtcatcgtggacgaattcaccggtcggctgatgtccggccgccgctggtccgaaggcctgcatcaagccgtagaagccaaagaaggcgtggaaatcaaacgcgaaaaccaaacccttgcctccatcaccttccaaaactatttccgcctgtacaccaagctctccggtatgaccggtacggcagataccgaggctttcgagttccaaagcatctacaacctcgaaaccgtcattatcccgaccaaccgccccatacagcgcaaagacttcaacgaccagattttccgttccgccgaagaaaaattcgaagccgtcgtcaaagacatcgaggaatgccacaaacgcgggcagcccgtcctcgtcggtacaaccagcatcgaaaactccgaactggtctcccaccttctgcaaaaagccggactgccgcacaacgtcctcaacgccaaagaacacgaacgcgaagcactgattgtcgcccaagccggcaaagtcggcgcgattaccgttgccaccaatatggcgggacgcggtacggacatcgttttaggcggcaacctgaagcaccaaaccgatgccatccgtgccgacgaagccttgagcgacgaagagaaacaggcacaaatctccgcactcgaagacggctggcaggcagaacacgacaaagtgatggaagcaggcggtttgcacatcatcggtacggaacgccacgaaagccgccgtatcgacaaccagttgcgcggacgttccggccgtcagggcgaccccggatccagccgtttctacctctcgtttgaagacccgctgctgcgcctattcgcactcgaccgcgccgccgccatcctcaaccgcctcgcccccgaacgcggcgttgccatcgagcacaacctgctgacgcgccaaatcgaaggggcgcaacgcaaagtcgaaggcagaaacttcgatatgcgcaaacaggttctggaatacgacgacgtcgccaacgagcaacgtaaagtcatttacagccaacgcaacgaaattttaaccagcaaagacatcagcgacctgatgaaggaaatccgttctgatgtcgtcagcgacctcgtggatacctatatgccgcccgacagcatggaagaacaatgggacatcccgactttggagaaccgtctggctgccgaattcagactgcacgaagacatccaatcctggctgaaggcggacaatgcgattgacggtcaagacatcaaagaacgcctgatcgaacgcatcgaaaacgaatatgccgccaaaaccgaactggtcggcaagcaggcaatggccgatttcgagcgcaacgtgatgttgcaggtcatcgacaaccaatggcgcgaacacctcgccgctatggactacctgcgacaaggcatacacctgcgcagctatgcccaaaaaaatccgaagcaggaatataaacgtgaagcctttaccatgttccaagacctgtggaacggcatcaaattccatattgcctccctgcttacctcggttcaaatcgaacaaaaccctgtcgcggtggttgaagagcaacccatcggcaacatccagtccatccattccgaatcgcccgatatggaagaacttttgggtcagtcgcaaaccgatttggttaccgaagcctttaatcccgatgggacagatttcagccccgaagccttggaagcgcgggggcaaatcgtccaccgcaacgacccctgcccctgcggcagcggtttgaaatacaaacaatgccacggcaaactggcttaa

SEQ ID NO: 62878 - DNA, 1260 bp, Neisseria meningitidis
atgagtatggcacttgcccaaaaacttgccgccgacagcattgcggcggttgccgaaggacgcaaccttcaggacgtgttggcgcaaatccgcaccgcgcatcccgaccttacggcgcaggaaaacggcgcgttgcaggacatcgcctacggctgccagcgttatttgggcagtttgaaacatatgctcgcgcagatgctgaaaaagccgattgacaacccgcagctcgaaagcctgcttttggcggcgttgtaccaactgcattacacgcgcaacgcgccgcacgccgtggtcaatgaggcggtggaaagcatcgcgaaaatcgggcgcgggcagtaccgttcgtttgccaacgcggttttgcgccgttttttgcgcgaacgcgacaagctcgcggcttcctgcaaaaaagacgatgtggcaaaacacaacctgccgctgtggtgggtggcttacttgaaaaaccattatccgaaacactggcacaacatcaccgccgcgctgcaatcgcatccgccgatgacgttgcgcgtcaaccgccggcacggcaatgccgaaagctatttggaaaaactggctgcggaaggtatcgccgcaaaggcgttggacgaatatgcggttacgttggaagaagccgtgccggtgaaccgcctgcccggtttttcagacggcattgtttcggtacaggacttcggcgcgcagcaggcggcgtatcttcttaacccgaaagacggcgaacggattttggacgcgtgcgccgcgccgggcggcaagacggggcatatcttggaactggcggattgccgcgttaccgccttggacatcgatgcaggccgtctgaagcgtgtggaggacaatatcgcgcgcctgggctttcagacggcatcggcggcgtgtgccgatgcgcgggatttggcggcgtggtatgatggaaagcctttcgacgcaatccttgccgacgtgccatgcaccgcttccggcgtggcgcggcgcaatcccgacgtgaaatggctgcgccgtccgaccgacgcgctcaaaaccgcccgccagcaggaagccctgctggacgcactttggcagacgctgaaacagggcggcagaatgctgcttgccacctgttccgtgttcgtcgaagaaaacgacgggcaattgcaaaaattcctcaaccgccatgccgatgccgaaccgatcgaatcgcgggtgcttttaccgaacaaacaccaagatggcttttattacgcgcttattcaaaagcattaa

SEQ ID NO: 62879 - DNA, 276 bp, Neisseria meningitidis; identical to SEQ ID NO: 58888

SEQ ID NO: 62880 - DNA, 825 bp, Neisseria meningitidis; identical to SEQ ID NO: 55517

SEQ ID NO: 62881 - DNA, 2088 bp, Neisseria meningitidis; identical to SEQ ID NO: 46523

SEQ ID NO: 62882 - DNA, 330 bp, Neisseria meningitidis; identical to SEQ ID NO: 40413

SEQ ID NO: 62883 - DNA, 411 bp, Neisseria meningitidis
atgcctgtctatttccgcaccccaagcaggaaacgcctgcacaaaatgaaccgccgccagcataaaaagctgcatttgggcgagtttcaaacattgattttcggcgttcaaggcagtttgcaccaagctgaggacgatgccgaagcgttcgaccgctttatggacgagctgattgcgtatcttgcggcaaacggcttggaaatggcgggcgggggcgattgcggcgatttttcgtgcctgtttcaaaaatccggtgcccgaagcttgggcgaaaccgagaaaaaagccattatctcttggctggcaggccgcgaagatgtcgctactttgcacgccaccccgctggttgatggtttttacggggatgacggctgggaaaattacagcgaaacctataaacaggcagattaa

SEQ ID NO: 62884 - DNA, 3210 bp, Neisseria meningitidis
atgttttatctgtatcaatccaaccgtcttgaaacgctggcggcactgtttgcccgcattcaaaaagtcaaaccgctgaaatcggttttacagcccgaacagattattgtgcagagtcaggggatgcgccgctacctcaatacctgcctcgcccgcgatttgggcgtggcggcgaatttgtcgttcagcctgcccgccggtctgacgtggaagctgatgaaaaaactgattcccggtattccggaactcagcccgtttgcgcctgaagtgatgcgctggcggctgttggatttgttccgcagcgaggcatttcggaatacggcagaatttgaagatgtgaggaatgtgctgcaagactatctaggcagcggcgaatcggcagattatcagcttgcgggacagcttgcggacatattcgaccaataccttgtctatcgtccgcagtggatagacgcgtggcagcagggcaggatactcagtttgggcgacgatgaaatctggcagtccaaactgtggcgttatcttgatgacggcaggcagagcgcgccgcaccgtgttgcgttgtgggaaaagctgttggaatctttgagcagtgataagctgcccgagcgttatttcgtgttcggcatttccacgatggcgccgatgtatttgcagcttttgcacaagctgtccgaacattgcgatgtgttcgtgtttgcactcaatccgagtgggatgtattggggcaacgtcatcgaagcggcgcaaatcctcaaaggcggcggcgatcccgatttaactcaggcagggcatccgctgctcgcctcattgggcaagcaggggcgcgactttttcgactttttgaacgaaatggaaatagaaggagaaacgccggtatttgaagaaggcgggcgcgatacgcttttgcacgccctgcaaaccgatattcaaaacctgaaaatgccgtctgaaaatgtgggaagcgtcggtacggatgacggttcgatacgtatcgtctccgcgcacagccctttgcgcgaattgcagatactcaaagacaagctgttgaaaattctgcatgaacatcccgattggcagccgcatgatatcgccgtattaaccccgaatatcgaatcctatacgccttttatcgaggccgtgttcggacaggcgcagcccggtgcgcaggcattgccgtattccgtttcggacgtgaaaataagccgccgacaaccgctgtttcatgctttgtcatgcctgttcgacttgttggaaagccgatttgaagtcgataaagtgcttgtgcttttagaaaccgcacccgtgttgcgccgtttcggactgactgaggacgatttgccgcttttgcacgacatggttgccgatttgaacgtccgctggggtttggacggagaaatgcgcggcggcacggatcagctgtttacctggaagcaggcggtagaacgcatgatattgggctggatgctgcccgaaggcggcaatccgatgtggcaggatgtcagcgcgtggtatgccgacgtgaatcaaaccgccatgttcggacgttttgccgccttcctcgaaaccctgtcggatattgtacggatatggcggcaacctgcgacggttgatgaatgggtaggacgttgccgaggtttgcttgaaacattgttccaagccgaagccgatgaccaaaaggcagtccaaaacctcgaaaacgaatgggtcaaatggcaggcggaaacagaattggcgcaattttccggacagttgccgcaacaaaccgtcatccgccatatccgacgtttcctcgacagcgaaagcgaggcaggctttttacgcggcggcatcaccttttgcagtatggtgccgatgcggagcctgccgttcaaagtcatctgcctgttgggtttgaacgacggagattttccccgcaataccaaagccgccgtattcgacctgattgccaaacatcccgccaaaggcgaccgcgcccgccgcgatgacgaccgctacctcttcctcgaagccctcatcagcgcgcgcgaaatcctctacctgtcctacatcgggcgcgacatccgcaaagacgaagagcttgctccgtcttcgctgttgggcgaactcatcgacacagttgccgctatggcgggcatcggtagccgccaacttgcacaaaactggatagaacagcatccgctgcaagccttctcgcgccgatattttcaagaaggcggacgttcagacggcatattcggcacgcgtaccgactacgccactgcgctcggacaaacgcccgaaccgccgcaaccctttttcgaccaacccgtagaaaacgccgaacctgttgccgaaatcggacaggacgaatttatccgtttctggcgcaaccccgtcaaagtatggcttcagcagcagcttgcgtggagcgaaccccatatcggcgaagcctgggagcctgccgaacccttcgagccgcaacacgccgatcaaatcgccgaaacctacatcgaagcacggcgcgaaggacgggattttgcccaaaccgccgcccgcatcggggcggaaagcctcctgccgtcgggagagttgggcagactttggcagcagaacttccaaactgctgccaaacaaatcgacacggcggttttaaacagccccaaactgccaccgctttcatatgccataccgtcggacgggcaaatcctgaaaggcagcttgggcaatctgtaccgctgcggacaagtgttttacgcctacggcaaacccaacgcgccgcaacgtatcgcttttctgctggaacacctgatattttgcgccgttatgccgtctgaagccgaaacgcggcaaacctttatcgtccaatccggagaaaccgaaatattggcggaaatcgcgcaagacagggcattgcagctattgtcggaatggatggcgtttttcaatatcgggcaaaaccgcccgctgccgttttttgccaagacctcgcttgccgctgccgaagcgtttgcccaaaaacaagattgggaagccgccctgaaaaaagcccaaaccgcctattacggcaacaaagtcagcaaagggcagaaagactataccgaagtcgccctcgtgttcggcaacgcaagccaaaacccactcgaacaacccctgtttgaaaacctcgcccgcctgcttgccgacacgcttgccgcagcggaaaaaagggaaggggccggagcagcctga

SEQ ID NO: 62885 - DNA, 2772 bp, Neisseria meningitidis
atggcgaataataaaactttgtttgaagtgattgaaaatgaacgtaaagcggttaaaaaatacaagcctgaattacttgaaatgcctgagtttacgtccaaaaacttaaaatatgatttttttgaatggcaaaaatccgcccttgaaaactttttgatttttgaccgcacttcagagctagacgatttccctgatttaaaaaataagccaacgcatttgctatttaatatggcaacaggtgccggcaaaacgatgatgatggcggcgttgattttgtattattttgaaaaagggtatcggcattttctgttttttgtgaatcaaaataatatcgtggataaaacggaaaataattttattgacccgacgcacgcaaaatttttatttaccgaaaagattttgcagggcgatacggtaattcccattcgcaaagtggaaacgttcagcccacattcagacggcattgaaattaaatttaccagcattcaaaaactgtataacgatattcacaccgagcgagaaaaccaaaccacattggcagatttgcacgatttgaaccttgtaatgctgggcgatgaagcacaccatttaaacgcgcaaaccaaaggcaaaaaacaaggcgaattagatttagaaaaggaaatgaacgaccgcactagccatgccgaaattgaacgcaaaggctgggagcatatggttttggaattgttgctcaataaaaatggcaatcccggccaaaatgtgctgttggaatttaccgccacgccacctgaaaaagctgacgtgcaacaaaaatacgctgataaaatcatcacaaaatttggtttaaaagaatttttgcaaaaaggttataccaaagaaatcaatttggtatccagtacactgagcaagaaagagcgggtgttgcacgctttattgtttgcttggtatcgccatcaaatcgctttgaaatatggcattgccaatttcaagcctgtgatgttgtttagaagcaagacggttgatgaatcaaaagcggattatttggcatttttaaattgggtagaaaatgtgcaagcagatgatttttcgtttttaaagacattttcaatgagcttaaacgatagcgataacgccaacgaacaaggcaaaacccgcaccgaacaagccctaaaatttatgcaggaaaatggctttgagtttgcacatttagcaaattggataaaacaaaattatcaaaaacacaatatcattattaccaactccgaaaccaacaaaagcaaaaccgaaaaaaccgacagcgaaacggaaaaattgctaaacaatctggaagcggttgataatccgattcgtgctatttttacggtgggtagattaaccgaaggttgggacgttttaaatttgtttgatattgtgcgtttgtatgaagggcaaaacggcggcggttcaaataaaaaatcatgcaaaacggcaaatacaacggtatcagaaaaacagttgattggtcgaggcgtgcgttattttccattttcgtttgaagataaacagccgaataagcgtaaatttgacaacgacatgcaacacgaattgcgtattttggaagaattgttttattacacgcacgatgagcaatcccgctatattacagaactgaaaaacgagttacgaaaagacggttatttgcctgaaaaagacgatgataaggtattggcaacatttaaactcaaatctgaatttgcagataatgaaaattttaaaaacttattgatttgggcgaataaaaaaatccccaatcccaatgctaaaagtaataatgcagacagcctaaaagccaatccgcaaacactttcattccaaattcacggcaatcaactgttgcaggaaacgcaatttacagccgataaaaatgatgaaaaggtcaagcaacttggcatacaaaataatttttctcaaaccataaaaatgagtgaaatggaacggcacatcttcaataaagcattacatatcaaagggaaaaatagtcaatctttattccatttcaaccgtttgcaaagcaaactcaacattcaaaatcgcaatgaattgcaaaataacttgttgaaagactggcaaattgaatttttaggattagagcaagataaacaggttcgcccggatgataaacttgcaggctgcctgaaaatcttggaaatggttgaaaagcatttgaatgaaagtgataagccatttatcggtacaaaagaatttacgcctaaaacattatgggaaattttcggcacgccaaaacaaaaatgggtcaaaaaagatgatataaaaactgctattgccatgcaaaatgattggtatgtgatggataattttgctggaacaagtttggaagaagcgttaattcaatttatttcagcgcgtttgggcgatttgaaatctaaatatgacgtgcatttaatccgaaatgaagaagtgtttaaattgaataactttgccgatagtgaaggatttatgccggactttgttttattgctgaaagataaacaaaaatcttcttccgacagcgtggacggctttttgcattaccaaattttcattgagcccaaaggtgagcatttagtggaaactgataggtggaaagaagaatttttagaagccatcacagcagaatatggcaaggataagatcctgcaaaaagatacaccgcattatcgtttgatcggtttaccgttttttactgatcatcagaaaaatggacaatttacggagtcattccctttaggtgcggcatcgcttgaaaaatag

SEQ ID NO: 62886 - DNA, 1428 bp, Neisseria meningitidis
atgtacatcaacggacgctttgaaaacgacttcaacggcgaatggcgcgacgtattgaacccatccaccgaagaggccatcgcccgtgaacccaaaggcggcagggcggacgttgaccgcgccgtagcggcggcacgcgcggcgcaaccggcatgggagcggctgcctgcggtcgaacgcggcgcgtatttgcgcaaaatcgcccaaggcatacgcgaacgcgccgacgagctgaccgacaccatcgttgccgaaggcggcaaaaccaaagacttggcgcgcgtggaagtgatgttcaccgccgactatctcgattaccaggccgaatgggcgcgccgttacgaaggcgaaatcatccaaagcgaccgcccgcgtgaaaatattttattgttcaaacgtccgctgggcgtaattgccggcattttgccgtggaacttccctttcttcctgattgcccgcaaaatgggtcccgccttagtaacgggcaacaccatcgttgtcaaacccagcagcgtaaccccgatcaactgccacatcttcgccgaaatcgtcgatgcggtcggattgcccgcaggcgtgttcaacgtggtgaacggtccgggtgcggaaatcggcaatgccttgtctgcccatccgcaagtcgatatggtcagcctgaccggctccgtcgaagcaggccgccaagtgatggaagccgcttccgccaacatcaccaaagtttcgctggaactcggcggcaaagcccccgccatcgttttgaaagacgcggatttggatttggcggtgaaatccatcttggcttcgcgcgtcggcaacaccggtcaaatctgcaactgcgccgagcgcgtctatgtccacagcagcctgaaagacgcgttcattgaaaaaatgaccgccgccatgaaaggcgtgcgctacggcaaccctgccgaagccgaagcaggcgcgctggaaatgggtccgctgattgaagagcgcgccgtcaaagccgttgccgaaaaagtggaacgggcagtcaaacaaggtgcgaaactggtctgcggcggcaaacgcgccgaagggcgcggctatttcttcgagccgaccctgctgaccgacaccgacaacagtatggacattatgaaagaagaaaccttcggccccgtgctgcccgtttccgctttcgacacgctcgaccaagtcatcgcactggctaacgattgcgagtttggtctgaccagttctgtttatacgactaatttaaacgaagccttctacgttacccgccgcctgcaattcggcgaaacctacatcaaccgcgaaaacttcgaagccatgcagggtttccacgccggttggaaaaaatccggtatcggcggcgcggacggcaaacacggtttggaagaatatctgcaaacccaagtcgtttatttggaaaccgacatttaa

SEQ ID NO: 62887 - DNA, 402 bp, Neisseria meningitidis; identical to SEQ ID NO: 42182

SEQ ID NO: 62888 - DNA, 1770 bp, Neisseria meningitidis; identical to SEQ ID NO: 45392

SEQ ID NO: 62889 - DNA, 942 bp, Neisseria meningitidis
atgccgaccccgaaagcctttgccctgctcgggccgaccgccggaggcaaaaccgcgctcgccctcaaaattgccgaaaccctgcctgtcgaaatcatcagcctcgattccgcgctggtttaccgcgatatggacatcggcacggcgaaaccgtccgcctccgaacgcgcctttgtcccgcaccaccttatcgacatcatcccgcctaccgaatcatacagcgccgcccgctttgtcgaagactgcacgcgcttggtcggggaaatttcctcacgcggcaggtttgcccttattgtcggcggcacgatgatgtatttccgcgccctgacccaaggtttgaacgatttgcccgaagccgacgcctgcctgcgtgccgacttggacgaacaaaaacagatgtacggcttggatttcctctaccgcaccctgcaaaaagtcgaccctgaaaccgcatgccgtctgaaaccgaacgacagccagcgtatcgaacgcgctttggaagtttattatctgaccggcaaaccgatgagcgaacacctcggcagacaaagcccccatacgctccccttcgatttgcataccgccgccctgattcccgaaaaccgcgcccgcctgcatgaaaatatcgccctgcgtttccacctgatgcttgaacagggctttatcggcgaagtagaaaacctgcgccgccgctatcccggcctgaccgccgactcccccgccatccgctgcgtcggctaccgtcaggcatggaaatatctggatggaaaaaccgatttcccggcatttgtcgagaaaggcattgccgccacccgccaacttgccaaacgccaactgacttggttgcgcaaaacacctttagactgcgttgccgacccgttttcagacggcacttcatgcacacgcctgattgaggcggcaaaacggtttttcggcgcataa

SEQ ID NO: 62890 - DNA, 1527 bp, Neisseria meningitidis; identical to SEQ ID NO: 39669

SEQ ID NO: 62891 - DNA, 219 bp, Neisseria meningitidis
atgttggacgcaagcccaccgcaagagcggggtagccgccgcgaaacgcgcagccaaaaaaaagcgtcacaaataaccgcctttttccgatggctgggcggcttggtctctaatccggccacaggaaaaatcagccataccaaactatgggcaaacgttgccgcagccgccatgacttggaagttcgtgcaggcggcggacgcgcccgaatggctctag

SEQ ID NO: 62892 - DNA, 684 bp, Neisseria meningitidis
atggaattggtatttatccgccacggacaaagcgaatggaacgcgaaaaacctgtttacaggctggcgcgacgtgaagctgagcgagcaggggcttgccgaggctgctgccgccggtaaaaaactgaaagaaaacggctatgagttcgacatcgccttcacatccgtcctgacccgcgcgattaagacctgcaacatcgttttggaagaatccgaccaactgttcgtaccgcaaatcaaaacatggcggctgaacgaacgccactacggccgactgcaaggcctggacaaaaaacaaaccgccgaacaatacggcgacgagcaagtccgcatctggcggcgcagctacgacaccctgccgccgcttttggacaaagacgatgagttttccgcacacaaagaccgccgctatgcccatctgcctgccgatgttatccccgacggcgaaaatttgaaagttactttggagcgcgtattgccgttttgggaagaccaaatcgcccccgcgattttgagcggcaaacgcgtcttggtggcggcgcacggcaactccctgcgcgcgctggcaaaacacatcgagggcatttccgacaaagacatcatgggcttggaaatcccgactggccagccgttggtgtacaaattggacgacaatttgaaagtcatcgaaaaattctacctgtaa

SEQ ID NO: 62893 - DNA, 1443 bp, Neisseria meningitidis
atgaacaatcccgacttaccctatcggcaggccttagaacgcctgtctcaaaaacaatataactttaccgaagtccgccgactgctgacagaagcggcctcggcaggtcatcccgccgccgcattcgagttggcaaaacacctgatggacgcggacagcccctaccaagaccgcgaacaaggtatggaaatgctccgcatcgccgctgaacaggggcatccctatgcgcgttacaatctggcatatatccaagaattggaaggcgcccccccggaaaccctgatatcgctttacaggccattagcagaggaagggctgcctgaagcacaagtccgcctgatgtacctgctgtatgcgtcccggcattttgaagaagccttggaatgggcaaaaacaagcgcaaaaaacaacaacccccacgggcaatacctgcttgcccaatactgccggtacggcacaccgccggattttgaaacggcgcacctgctctaccgaaaagcggcggcacaaggcttgccggaggcacattggcagctcgggctgcaatatcgtttcgggcaagggacgaaagtcgacacggcacaggccgtcaatcatttgcgcgccgccgcgcaacaaggatacattcccgcctacaccccgcttgccgaactcatcctacctacggctcccgatgaagccgtttaccggttccaacaggcggcacaggaaaatgaccccgatgcccatgccgcactggccgacatctacctgcaaggcaagcatccggaaagaaactacaaacttgccctgcatcacgccgaagcagccgccgccgaacgccatcccgaaggtttgcggatactgggcgacatctaccgctacggactgggcatgacttccgataaagaaaaagccctgcattattaccggcaggcagccgaagctggcagccttgccgcacatcagaaactcgtgtccgacagcgcgttaaaccatcctgagcaatatagcggtatcaaagattccgccatcaaacgccaaagggcagaacagctttaccaaaaagcccaagccctgcattacggattacaatgcgtgcccgaatacgcagccgcgctcaaactctacacagaagccgcagaactcggacacagcaaagcccaaaccaatctgggcagtatgtactacttcggacagggcatagccgccgactacggcaaagcccgcaaatggtttgaacaagccgccgcgcaaaaagacagtatggcgttctacaacctcgcctgcatccattacagcggacacggtgtcgggccggacaaagaaaaagcctgccgctacctgcaagaagccataaacaacggatacgggcaaaaaagcgtcctgcaagaactgctgcaacaatggcaaatgccgtctgaacagcgttacacctaccctgccgaaacgaaacaggtataa

SEQ ID NO: 62894 - DNA, 369 bp, Neisseria meningitidis
atgacgcgcggcaacggcggcggcgacaaggacggaaccggcaggcggcggataccggcggttttcggtacgggggcgtgccgaagatgcggggcttatccttgccgccgtggaaaaagccggcggcagccgcctcccccgccgggcgtttcagacggcatcgccacgcacaaaaaaccgtatgcctgcacgcgcgcaaattccgtcatccacgccgtccctccttttcccaaaccgtttgcaagttccgcccatccgctgcgtgatgccgctccgtttaaaggcagggcacggaacaatgcccggtatgccgtcccgcatcttggggcattgaaaatattacgatgcaaaaagaaaatttcagtataa

SEQ ID NO: 62895 - DNA, 438 bp, Neisseria meningitidis
gtggggatgatggggttcgaaaaagttgaacatttattgccggataccgtgttggacattgtggatgtcatcggactggcagcgacggaacagctggtcaaggcgattggcggggcgcggtttaaatttggtaagggcaaggtggacaccgagcgtttggcaattttggtcgaagccatcggcgaagtgaaaacacatgagctgttgcaggtatatggtggcgaggaattgtatatcccacggtgcggcaaggcgttaatacagttgagaaaccataggttttatcaggagtttgtcaaattgcgcgatattgataaggagagcgggcttatggcgatgacgaagctatgccctaaatacggcatcttttcacgaacgggatatacgattatcaatgaaatgagccgacctgcggcacagcaggcagctttattttag

SEQ ID NO: 62896 - DNA, 378 bp, Neisseria meningitidis; identical to SEQ ID NO: 38701

SEQ ID NO: 62897 - DNA, 1257 bp, Neisseria meningitidis
atgaaagtgcttgttttaggtgcgggtgttgccggcgtgtcttccgcgtggtatctggcagaggccggacatgaagtaacggtcatcgaccgcgccaagggtgtggcgatggaaaccagttttgccaatgcaggccagctttcttacggctataccacgccttgggctgcacccggtattccgaccaaagcactgaaatggctgtttaaaagccatccgcctttgctgtttcgccccgacggcagcctgtatcaaatcgaatggctgtggcggatgctgcaaaactgcacggcatcccgctatcaaatcaataaagagcgcatggtcaggatttccgaatacagccgtgaaatgttccgccgttttgaagcgcaaaccggcatgaattttgaagggcgcaaaaaagggacgttgcagattttccgtcaggctaaagaagttgaagcggcagaacaagacattgccgttttggaacgctacggcgtgccgtaccgccgtctgaagcccgaagaatgcgcagaattcgagcctgcgctggcacgcgttaccgccaaaattgccggcggcctgcacctgcctgcggatgcaaccggcgactgccgcctcttcactgaaaacctatacaaattgtgtcaggaaaagggcgtacggtttcatttcaaccaaaacatcagccgcatcgaccacaacgggctgcgcatcaaaaccgttgaaaccgaaacagggcggtttgaagcagatgccgttgtctgcgcgctcggttgtttcagcaggacggttttggcgcagttggatctcaatctgcccatttatcccgtcaaaggctattccttgaccctgccggtcaccaattcagacggcgcaccggtgtccaccgttttagatgaaagctacaaagtcgccatcacgcgctttgacaacagaatccgcgtcggcggtatggcggaattgtcgggctacgaaatcaaactgcccgaaaaacgccgcgaaaccttggctttggtcgtcaacgacttgttcccaaaaggcggcgatttaaaccaaacattgttctggagcggcctcagaccgatgacgcccgacagcacgccgttaatcgggcgcacccgctttgaaaacctgttcctgaataccggccacggcactttgggctggaccatgtcgctgggttcggcaaaattaaccgccgatatcgtaagcggcaaagacaccgaaatccgaagcggcgatttgagcctgtcgcgttatcaggcttaa

SEQ ID NO: 62898 - DNA, 2007 bp, Neisseria meningitidis
atggctgatatgaagaaaattacccctcaaaacctgcgccccctgctttcggaaagcttgggacataccgattttgtcaacgtcctcaacgcactgattaaatttttgcgccgtggcggcaaaaaatgtgcgggggaacgtttcgacctgattatcgacacattcaaacaagacagggaattactgtcccgcttcagccggtgtttttacatctggctcgcgcaaatacacatttatccggcactcatcaaactcggcatcttctcgcgccacagctttgcccgggaaatgggcatacgcatctacgaacgcttcagcccgtcatataaagattttgccaacttgggcgaagtcttcctttatcttttccattccgaaaacgacgacaaatggctgcaaacgctcaatatccgccaatggctggttttatacgaactcatccggagccacgccgagccgtccaaattgcagacggcgggcatccgccttgccgatgcgcgtttgcgcgccatcgaaatgctgtctgtctggacggcatccgaagccatcgaacccgacctcatccgcatcgccccgcgcctgctggaagccgattcttccttcgtcgccctccagcgcgaaaccgccaaactggtcgaacactaccgcaacagcactgcgccttacgacaccgcccacctcgaggtgatgttcgaccaatgtttcagccagattgactatttgcgccgcaaagggacgggcgccggctccggttcgtcggtcaaagtcgcccacctgctcgaacggctccggcagaccgtagaccgtctgaagctgctcaccgacatccaaaccggcgccggcaacagcatccgcctgaccatcgcgctgatgaactccctcatctacgcggcggtcgaacaatacagcacccgccacctgcgccgcagcagcatccgtatgctcgcccgcagcattaccgaaaacaaaagccaccacggcgaacactacatcacccgcaaccgcaaagaatatttcaaaatgttctactcggcggcaggcggcggcgtcatcatcgccctgatggcgctgctcaaaatccgcatcggcacactcggcctcagccccttcctcacttccttgtcggccgggttcaactacggcatcggctttatgatcatccatatgctgcactgcaccgtcgccaccaagcagcccgcgatgactgccgccagctttgccgaacaggtcgatctcaacgaaggcggcaaagcggtggacaacaagctcgccaagctcctcatcgacgtatgccgctcccaaagtgtcgccgtcttcggcaacgtttccatcgccatccttttggcgtgcgccatatcgttcggctatgcccatctgtaccggcagcccatactcgatgcccacaccgccgcctaccagttcaaatccatagacatcatcgcttacccgacgctgtggtatgccgccattgcaggtctgtggctgttctgctccggcatcatcgcaggttttttcgacaaccgcgccgactacctcaacctgcgccaacgcctgcctttcaaccccttgctgcgtaaaatcatgcgccccgggccccgccgcgtcctcgccgcctacatccacaaacactacggctcgttggtaggcaacttcatcttcgggatgctcttgggtatgaccggctatttcggacacctcctcgggctgccgctggacatccgccacgtcgccttttcctccgccaacctcggctatgccgccgtcagcggcaacgtcggtttgggcacgttcgtactcggcattttcagcgtcctcgccatcggcctggtcaacctctgcgtcagtttcagcctcgccctcttcgtcgccctgcgctcgcgcggcacgaaaatcggcagcatccgcaatctgattaaaagtttttggaatcagattaaaagcaatccctgcatacttttcctcccgcccgccaaagaacagggacatcctccttcggacaagccttga

SEQ ID NO: 62899 - DNA, 792 bp, Neisseria meningitidis
atgaatgtttattttctcggcggcggcaatatggcggctgccgttgcgggcggattggtcaaacaaggcggttaccgcatccatattgccaaccggggtgcggaaaagcgcgaacgtttgcaaaaagagttgggtgtcgaaacttctgaaaccttgccggagctttattccgacgatgttttaatccttgccgtcaagccgcaggatatggaagccgcgtgcaaaaatatccgcaccaacggcgcattggtgctttctgtcgcagccggattgccggtcgatacgctcagccgttacctcgggggaacacgccgcattgtccgggttatgccgaatacacccggaaaaatcgggctgggcgtatccggtatgtatgccgaagcggaagtatcggaaacagaccgcaggattgccgatcgaatcatgaaatcagtcggtttgactgtttggttggaagatgaagcgcaaatgcacagcattaccggtatcagcggcagcgggccggcatatgtgttttatctgctggacgcattgcaaaatgccgccatccgacaagggtttgatatggcagaagcacgcgcgctcagtctggcaacgtttaaaggagcggttacccttgccgagcagacgggtgaagatttcgagaagcttcaaaaaaatgtaacgtcaaaaggcgggacaacccacgaagccgtggaagccttcaggcggcatcgtgtcgccgaagccataagtgagggcgtttgtgcctgtgtgcgccgttcgcaggaaatggaacggcaatatcaataa

SEQ ID NO: 62900 - DNA, 1251 bp, Neisseria meningitidis
atgttttcaaaaagcgttaccctcgcacaatatgaccccgatttggcagcagccattgcccaagaagaccaacgccagcaagaccacgtcgagctgattgcctctgaaaactacgtcagctgcgccgtaatggaagcgcaaggttcccagctgaccaacaaatacgccgaaggctaccccggcaaacgctactacggcggctgcgaatacgtcgatattgtcgaacaattggcaatcgaccgcgtcaaaaaactgttcggcgcgcaatacgccaacgttcaaccgcactccggctcgcaagccaaccaagccgtgtacgcttccgttttaaaaccgggcgacaccattttgggtatgtctttggcgcacggcggccacctgacccacggcgcgagcgttaatatttccggcaaactctacaatgccgttacttatggtttggatgaaaacgaagtgctcgattatgccgaagtggaacgcttggctctcgaacacaaacctaaaatgattgtggccggtgcgtctgcctacgcgttgcaaatcgactgggcaaaattccgcgaaatcgccgataaagtcggcgcatacctctttgtcgacatggcgcactacgccggactgattgccggtggcgaatatcccaaccccgtgccattctgcgacttcgtgaccaccaccacccacaaaaccctacgcggccctcgcggcggcgtgattctgtgccgcgacaacacacacgaaaaagcactgaactcttccatcttcccgagcctgcaaggcggtccgctgatgcacgtcatcgccgccaaagccgtagcgtttaaagaagcgttgcaacccgagttcaaacaatacgcaaaacaagtgaaaatcaatgctgccgccatggcggaagaactggtcaaacgcggtttgcgcatcgtttccggccgcaccgaaagccacgttttcctcgtcgacctgcaaccgatgaaaattaccggcaaagccgccgaagccgctttgggcaaagcgcacatcaccgtcaacaaaaacgccattccgaacgatccggaaaaacccttcgttacctccggcatccgcatcggctccgctgccatgaccacacgcggttttaacgaagccgacgcacgcgtattggcgaacttggttgccgacgtattgtctaaccccgaagacgaagcgaatctggaaaacgtccgcaaacagattaccgccctctgcgacaaataccccgtttacggcgcgtaa

SEQ ID NO: 62901 - DNA, 204 bp, Neisseria meningitidis
atggacaatctgaatctgcaggaaatttccgtgttgccggaaaatctgccgctgtattgctcgggacccggcaacgagcagtggaacggacatccgagagtgtttttgcctttgtgcgaaggagaatcgggcagcgttgcctgcccgtattgcggcacgcgctaccgccttgacggcaagatgccgcatcatcattacgcctga

SEQ ID NO: 62902 - DNA, 276 bp, Neisseria meningitidis
atgaaaccgaatattcatcccgacaattaccgaaccgtcctttttttcgatagcagcgccaatgaaggctggttaatccgctcctgtgccgaaacacacggaaaaacgatggtttggacagacggcaaagaatatccgctgttttcgctggatacttcttccgcatcccatcccgtctataccggcaagcagcgcaacgtcaacaccgaaggccgtgccagcaaattcaaccaacgtttccaatccgtcatgtcatcgtttagaaaggacaaataa

SEQ ID NO: 62903 - DNA, 330 bp, Neisseria meningitidis; identical to SEQ ID NO: 40782

SEQ ID NO: 62904 - DNA, 972 bp, Neisseria meningitidis; identical to SEQ ID NO: 39558

SEQ ID NO: 62905 - DNA, 810 bp, Neisseria meningitidis
atgattcaagacacccgaccccttatccgcgtcgttgccggcatcctgctcgattcagacggcaactacctgctcagctcgcgccccgaaggcaaaccctatgccggatattgggaatttgccggcggcaaggtcgaagcgggcgaaaccgacttccaagccttgcaacgcgagtttgaagaagaactcggcatccgcatccttgccgccacgccttggctgaccaaaatccattcctacgaacacgcccgcgtctgcctgaaattcctatgggtcaaccccggccaatggacgggcgaaccgcaatcccgcgaagggcaggaatggtcttggcagaaggcgggtgattttaccgttgcccccatgctgcccgccaacggcgcgcttttgcgttcgctgtccgttccgcgccgtttgtacggcagcctgaaaacgggtttgcacggggagaacagtatgggcgcgtaccgcgtcctgcctttgggttcggcagagggaagcggtgcgaacgttttgatggaggcggcgcaatggcaggacagacccgaacacgccgacagcgtgtggatgatggtgcagacccgcgaacaatggcggcaggcgcaggaaaagggcgcggatgtggtcgtctggcgagtcggtaatgccgcacaagccgcagcggtagacgaagtgttgaagcacggcgtatccgtgccgctcgtacttgcagcaaacggacagacggttgcacgttatggaaaactatggctcggattgggggcgcacgtggtggtaagggatgaaacaatagggaagaatcatgaataa

SEQ ID NO: 62906 - DNA, 1386 bp, Neisseria meningitidis; identical to SEQ ID NO: 46406

SEQ ID NO: 62907 - DNA, 1980 bp, Neisseria meningitidis
atgtctcaactggcaaacgcaatccgcttcctctcggccgatgccgttcaaaaagccaattccggccaccccggcgcgcctatgggtatggcggaaatggcggaaacattgtggacgaaattcctcaatcacaatcccgccaaccccaaattctacaaccgcgaccgcttcgtcctctccaacggccacgcgtctatgctgttgtacagcctgctgcacctgaccggctacaatctgagcattgaagacttgaaaaacttccgccaactgcacagcaaaacccccggccatcccgaatacggctataccgacggcgtggaaaccacgaccggcccgttggggcaagggattgccaacgcggtgggcatggcattagccgaaaaaatccttgccgccgaatttaataaagatggtttgaacatcgtcgatcattacacctacgtcttcatgggcgacggctgcctgatggaaggcgtatcgcacgaagcctgctcactcgccggcactttgggcttgggcaaactgattgttttatatgatgacaacaatatttccattgatggtaaagtggacggctggtttaccgaaaacatcccgcaacgctttgaaagctacggctggcacgtcgttcccaacgtaaacggtcatgacaccgccgccattcaagccgccatcgaagccgcacgtgccgaaaccggcaaaccgtccatcatctgctgtaaaaccttaatcggcaaaggcagtgccaataaagaaggcagccacaaaacccacggcgcacctttgggcgcggacgaaatcgaagccacgcgcaaacatttgggctggacttaccctgcctttgaaatcccgcaagaaatttacgatgcgtggaatgccaaagaaaagggagcgaaactggaagccgaatggaacgaactcttcgcgcaatatcaagccaaatatcctgccgaagccgcagaattcgtgcgccgtatggataaaaaactgccggacaatttcgatgaatacgttcaagccgcattgaaagaagtgtgcgccaaagccgaaaccatcgccacccgcaaagccagccaaaacagcatcgaaatcttggcaaaagagctgcccgaactggtgggcggctctgccgacctgaccccctccaacctgaccgactggtcaaacagcgtttccgttacccgcgacaaaggcggcaactacatccactacggcgtgcgcgagttcggtatgggcgcgattatgaacggtttggtattgcacggcggcgtaaaacccttcggcgcgactttcctgatgttcagcgaatacgagcgcaacgccctgcgtatggcggcactgatgaaaatcaaccctgtatttgtgttcacccacgattccatcggtttgggcgaagacggcccgacccaccagccgattgagcaaaccgccaccctgcgcctgattccgaatatggacgtatggcggccgtgcgacaccgccgaatccttggtcgcttgggcagaagccgtcaaagccgccgatcacccgtcctgcctgattttcagccgtcaaaacctgaaattccaagcgcgcagcgaacaacaactggacgacatcaaacacggcggctacatcatcagcgaagcccaaggcaacgcccaagccgtcatcattgccaccggctcagaagtcgagctggctttggaagcgcaaaaagccctcgccgcgcaaaacatcgccgtgcgcgtcgtttccatgccgtccaccaacgtattcgaccgccaagacgccgcctatcaagccgccgtcctgcccgaaagcctgccgcgcatcgccgtagaagccggccacgccgacggctggtacaaatatgtcggactgaacggcgcagtcgtcggcatcaaccgcttcggcgaatccgcccctgccgatttactcttcaaagcattcggctttaccgtggacaatgtggtcgatacagtgaaatccgtgctgtaa

SEQ ID NO: 62908 - DNA, 354 bp, Neisseria meningitidis; identical to SEQ ID NO: 39616

SEQ ID NO: 62909 - DNA, 516 bp, Neisseria meningitidis; identical to SEQ ID NO: 46758

SEQ ID NO: 62910 - DNA, 1116 bp, Neisseria meningitidis
atgatttatcaaagaaacctcatcaaagaactctcttttaccgccgtcggcattttcgtcgtcctcttggcggtattggtctccacgcaggcaatcaacctgctcggccgtgccgccgacgggcgtgtcgccatcgatgccgtgttggcattggtcggcttctgggtcatcggtatgacgccgcttttgctggtgttgaccgcatttatcagtacattgaccgtgttgacccgctactggcgcgacagcgaaatgtcggtctggctatcctgcggattggcattgaaacaatggatacgcccggtgatgcagtttgccgtgccgtttgccgttttggttgccgtcatgcagctttgggtgataccgtgggcagagctacgcagccgcgaatacgctgaaatcctgaagcagaagcaggaattgtctttggtggaggcaggcgggttcaacagtttgggcaagcgcaacggcagggtttattttgtcgaaaccttcgataccgaatccggcatcatgaaaaacctgttcctgcgcgaacaggacaaaaacggcggcgacaacatcatcttcgccaaagaaggtaacttctcgctgaacgacaacaaacgcacgctcgaattgcgccacggctaccgttacagcggtacgcctggacgcgccgactacaatcaggtttccttccaaaaactcaacctgattatcagcaccacgccaaaactcatcgaccccgtttcccaccgccgtaccattccgaccgcccaactgattggcagcagcaacccgcaacatcaggcggaattgatgtggcgcatctcgctgaccgtcagcgtcctcctactctgcctgcttgccgtgccgctttcctatttcaacccgcgcagcggacatacctacaatatcttgattgccatcggtttgtttttaatttaccaaaacgggctgaccctgctttttgaagccgtggaagacggcaaaatccatttttggctcggactgctgcctatgcacatcatcatgttcgtcatcgcaatcgtacttctgcgcgtccgcagcatgcccagccagcccttctggcaggcggttggcaaaagtctgacattgaaaggcggaaaatga

SEQ ID NO: 62911 - DNA, 498 bp, Neisseria meningitidis
atgtcttcatctgtttcaagtaaaacgcgctattgggtattggcacttgccgccatcgtgctggaccagtggtcgaagtgggcggtgctgtcgtcgtttcagtatcgggaacgcgtcaatgtcattccttcctttttcgatttgaccttggtgtacaacccgggcgcggcgttcagcttccttgccgatcagggcggctggcagaaatacttttttttggtgctggcggtggcggtgagcgcgtatttggtacgcgccatcttgcgcgacgagtttgcagccctcggcaaaacgggtgcggcgatgattatcggcggtgcgttaggcaatgtcatcgatcgcctgatacacggtcatgtcgtcgatttcttattgttttattggcaaaattggttttatcccgcctttaatattgccgacagctttatctgcgtcggtgcggtgttggcagtgttggacaacatcgtccaccgtaaaacccaagaagaaaaatattga

SEQ ID NO: 62912 - DNA, 366 bp, Neisseria meningitidis; identical to SEQ ID NO: 44550

SEQ ID NO: 62913 - DNA, 279 bp, Neisseria meningitidis
atgcttgaaattgagattgtgtacgggctgcccgaccgacaggttttgaaaaccatgcagcttgccgagggaacaaccgtccgcgccgccgcactgcaaagcggtttggacggcatatttgaagatttaaacctgcattccgcgcctttgggcattttcggcaaagccgtcaaagacgacacgcccctgcgcgacggcgaccgcatcgaagtgtaccgcccgctgttgatcgatcccaaagaagtgcgccgcaaacgcgttcaaaatcaagaagaataa

SEQ ID NO: 62914 - DNA, 561 bp, Neisseria meningitidis; identical to SEQ ID NO: 47158

SEQ ID NO: 62915 - DNA, 537 bp, Neisseria meningitidis
atgtcgaaaaaatggtatgttgtacaggcgtattcggggtttgagaagaatgtccaacgaatattggaagagcgcattgcccgtgaggagatgggagattatttcggacaaattctggtgcctgtagagaaagttgttgatatccgcaatggtcgtaagactattagtgaaagaaagtcatatcctggttatgtgctagttgagatggaaatgacagatgactcttggcatcttgtaaaaagcaccccccgtgtttccggttttattggagggagggctaatagacctacgccgattagtcagaaagaggctgaaattattttacagcaggttcagaccggcatagagaagccgaaaccaaaagttgaatttgaggtcggtcaacaggttcgtgtaaatgaaggcccgtttgcggattttaacggggtggttgaggaggtcaattatgaacggaataagttacgcgtgtctgttcagatatttggtagagaaacacccgttgagctggagttcagccaggttgaaaagattaactga

SEQ ID NO: 62916 - DNA, 369 bp, Neisseria meningitidis
atggcggcaatcggcatcggcatgactgttttggtgtacggaatcgtcgccgtcatcgtcaaactcgacgacttaggcatgctgctgatgcgccgcccacaaaccttttcgcgcagtttggggcaaatgctgactgcctttatgccttgctttatgcgcggtttgagcgtggtcggcacgcttgccatgtttcttatcggcggcgtactggtcgcccacaacctcggccttctgcacgatttcctgcacgcgcaacactgggacgctggctgggcggagtacttcgccaacctcgttgtcgggctgctttccggttcgattgcctgcgcccccgccttgccgctgatgaatcgtttcggcaggcattga

SEQ ID NO: 62917 - DNA, 483 bp, Neisseria meningitidis; identical to SEQ ID NO: 45182

SEQ ID NO: 62918 - DNA, 369 bp, Neisseria meningitidis
atgcggatattcaaaaaccagtggatagcgaaatttgccaagaagcacaaaatcaacgattccgagctgctggaagcggtagagcgggcggataacgggctgatagacgcagatttaggcggcggtgtgattaagcagcgcatagcaaggcaaggacaaggcagaagcggcggctatcgcagcctgatattgttcaaacaggcagatagggcatttttcgtttacgcctttgccaagaacgacagggaaaacatttcggataaagaactggacgtttaccgaaaagccgccgcatattatctgaaatacacgcgggcagagctggcggctttgaaagaagacggcattatcacggagatagaatcatga

SEQ ID NO: 62919 - DNA, 786 bp, Neisseria meningitidis
atgaaccatcaggacgcacgctggcaggttcaccgccatcttgccgaacataccgaccaacgcctgacactcgtccgcaacgcgcccaagtatatcctgcttgcaggtgcggatgcggacatcagccgcagcctgctggcgaaacgctatccgcaggcggtatttgaagaatacgattcccgtgcggattttttggcggcagccgccgcccgcaaaggcggtttttggcaaaggtttgcgggtaagggcgtggtgcagcactgccaatccccgaccgcgccgctgcccgaagcgtgtgccgatatgttgtggtcgaatctcggactgttggcggcggaacaaatccttcctgtgctgcacaactgggcgcgcgccttgaagacggacgggctgctgttttttacctgcttcgggcgcgacacttttaccgaactgaaatgccgtctgaaagaaaacggcattgaaagccgcagcgtgatgtttcccgatatgcacgacttgggcgatatgcttgctgaaaacggcttttacgaccccgttaccgatacggcgaagctggtgttggattacaaaaaggcggaaacgttttgggcggatatggacacgctgggcgtttggcgggcgatggcgtggaacgatgaaaacgccgcgcgttcgtgtgtcgggacaatatttgaacgggaaggcggtttgagtattacgctggaaacagtgtacggacacgccgttaaaaaactgatgctgccgcaaggggagaacgtggtgcagttttttccgaagagatga

SEQ ID NO: 62920 - DNA, 1296 bp, Neisseria meningitidis
atgttagatatccaattgctccgcagcaacaccgccgctgtggcggaacgcttggcggcgcgcggttatgactttgataccgcacgttttgacgcactggaagaacgacgcaagtccgttcaggtgaaaaccgaagaattacaggcctcgcgcaacagcatttccaaacaaatcggcgcactgaaaggtcagggcaaacacgaagaggcgcaggcggccatggttcaagtcgctcaaatcaaaaccgatttggaacagaccgccgccgatttggaagccgtgcaaaaggaactggacgcatggctgttgagcatacctaacctgccgcacgaaagcgtacccgccggtaaagacgaaaccgaaaacgtcgaagtccgcaaagtcggcacgccgcgcgaatttgactttgaaatcaaagaccatgtcgatttgggcgaacctttgggcttggatttcgaaggcggcgcaaaactctccggcgcacgatttaccgtgatgcgcggacaaatcgcccgtctgcaccgcgccttggcacagttcatgctggatacgcacacgctgcaacacggctacaccgagcattacacgccttatatcgttgacgatacgacgctgcaaggcacgggccaactgccaaaatttgcggaagatctgttccacgttacccgtggtggcgacgaaaccaaaaccacccaatacctgattccgacagccgaagttaccctgaccaataccgttgccgacagcattatcccgtctgaacaactgccgctgaagctgaccgcgcattcgccctgtttccgcagcgaggcgggttcgtacggcaaagacacgcgcggtctgattcgccagcaccagttcgacaaagtggaaatggttcaaatcgttcatcccgaaaaatcatacgaaacgctggaagaaatggtcggccatgctgaaaacatcctgaaggctttggaactgccctaccgcgtgattaccctgtgtaccggcgacatgggcttcggcgcaaccaaaacgtatgacttggaagtttgggtaccggcgcaaaacacctaccgcgaaatctcaagctgctccaactgcgaagatttccaagcccgccgcatgaaggcgcgtttcaaagacgaaaacggcaaaaaccgcttggtacataccttgaacggttccggtttggcggtcggcagaacgctggtcgccgtattggaaaaccatcaaaacgccgacggcagcatcaacatccctgccgcactgcaaccgtatatgggcggcgttgccaagttggaagtgaaataa

SEQ ID NO: 62921 - DNA, 579 bp, Neisseria meningitidis; identical to SEQ ID NO: 60803

SEQ ID NO: 62922 - DNA, 1041 bp, Neisseria meningitidis
atgcaacccatccgataccgaaccgacctcaccccctacaacaccttcggtcttcgcgcccaagcccgagcctttatcgcgctcgaacatgccgacgagttgtgcgacatcgtccgactgcccgagttcgaccgcgatactgttttatggctgggcggcggcagcaacatccttttgatgcaggattacgccggactggtcgtacacatggaaaacaaaggcatacgcgagattgcgcgttcagacggcattgttcgcatcgaagcgcaggcgggcgaaatctggcacgattttgtcctgcacaccgtcgcgctgggcttgaatgggctggaaaacctgagcctgattccgggtacggtcggcgcgtcgcccgtgcagaacatcggcgcatacggcgtagaggcgaaagatgtgattcacagcgtgcgctgcttcgatttggatacggaaacctttgtaaccctttccaatgccgactgccgcttcgcctaccgcgaaagcctgttcaagcaggagggtaaagggcgttatgtgattgtttcggtcgtatttgcattaaaaacgcattttgtgccgactttgggttacggcgatttggcggccgccgttgccgaactgagcgcgggcagggtcccgacggcgaaagatgtttccgatgcagtgtgtgcaatccgcaacagtaaacttcctaatcctaacgtgcttggcaatgtcggcagtttctttaaaaaccccgtcgtcagcgcagaaaaagccgccaccttgttgcagcggcatcctgatatgccgcattatccgcagccggacggttcggtcaaactcgccgccggctggctgatcgaccaatgccgtctgaaaggcttccaaatcggcggcgcggcggtacacgacaaacaggcattggttttggtaaacaaaaacaacgcctcggcaaacgatgtccggcagttggcgcaacacatcaaatttacagtatttgctcggtttcaggtagaattgcacgccgaacccaattggctgcctgcttcgttcagcctgtaa

SEQ ID NO: 62923 - DNA, 999 bp, Neisseria meningitidis
atgaagattgcgatttacggtacgaaaagctatgaccgcgaacattttacccgcgccaaccggcatttcggcttcgagctggagttttttgattttatgctggatgcgaaaacggcgaaaatggcggaaggcgcggaagcggtttgtatttttgtaaacgacgacggcagccggcccgtgttggaaaaattggcgcaaattggcgtgaaaactgtggcgttgcgttgtgccggcttcaataatgtggatttgaaagcggctgaagagttgggcttgaaagtcgtgcgcgtgcctgcctattcgcccgaatcggttgcggaacatacggtcggtctgatgctgacgttgaaccgccgtatccacaaagcctatcagcgtacccgcgatgcgaatttttcgctggaaggtctgaccggtttcaatatgtacggcaaaacggcgggcgttatcggcacggggaaaatcggtatcgcaacgatgcggattttaaagggtttcggcatgaacctgctggcttacgatccgttttgcaaccccgaagcggaaaaactcggcggcaggtatgtggatttagacgagctgtatgcccgatcggacatcatcacgctgcattgcccctccacgccggaaaaccactatatgctgaacgaagcggcgttcgacaaaatgaaagacggcgtgatgattatcaacaccagccgtggcggtctgattgacagttctgccgcgattgaggcgttgaaacgccggaaaatcggcgcattgggtatggacgtgtacgagaacgaacgcgaattgttttttgaagacaaatccaacgatgtgattaccgacgacgtgttccgccgcctgtcgtcttgtcataatgtgctgtttaccggacatcaggcgtttttgacggaagaggcgttgggtaatatttcggaagttacgctgtccaatatccgcgaggtcggacagaccggcgattgcggcaatgcggttcgtgccgacggttga

SEQ ID NO: 62924 - DNA, 456 bp, Neisseria meningitidis
atgttcggcggcgcacacgaattaagcatcgacagtaaggggcggttggctgttcctgccaaattccgtgacattctgtcgcgcctctatacgcctgccgtagtggtaacgctcgagtcgaaacacaagctgttgatgtaccctgttgcggagtgggaaaaggttgcggcgcaacttttaaacttaaaagtggcggataaccctgttttgcggcggtttcaaaatcttttgctgcataacgcggaaattttggaatgggacagcgccggccgggtgctgcttcctgccggactgaggaaaagggtggatttcgaccgtgaagtcgttttggtcggtcgtgccaaccgtttggagctttggggtcgcgagcagtgggaggctgagatggttcaggctttggatgacgatcctgacgaacttgctttccagttgggtcagacggatttgcaattgtga

SEQ ID NO: 62925 - DNA, 525 bp, Neisseria meningitidis
atgtcattgaacaaagttatccttatcggccgcctcggacgcgatcccgaagtgcgctatatgcccaacggcgaggcggtgtgtaatttcagcgtcgccaccagcgaaacttggaacgaccgcaacggccaacgtgtagagcgtactgagtggcacaacatcacgatgtaccgcaaactggcggaaattgccgggcaatacctcaaaaaaggcgggctggtttatctggaaggcagaatccaaagccgcaaataccaaggcaaagacggcatcgaacgcaccgcttacgatattgtcgccaacgaaatgaaaatgttgggcgggcgcaatgaaaacagcggcggtgcgccttacgaggaaggttacggtcagagtcaggaggcttaccaacgccccgcacagcaaagccggcagcccgcctccgacgcgccgtcccatccccaagaagcaccagccgcgccgcgccgccaacccgtgcctgccgccgccccggtcgaggatattgacgacgacatcccgttctga

SEQ ID NO: 62926 - DNA, 186 bp, Neisseria meningitidis
atgagcaccttcttccggcaaaccgcccaagccatgattgccaaacacatcgaccgcttcccgctattgaagttggatcaagtgattgattggcagccgatcgaacaatacctgaatcgtcaaaaaacccgttaccttcgagaccaccgcggctatcccgcccatcctgtcgccggtattccctaa

SEQ ID NO: 62927 - DNA, 1008 bp, Neisseria meningitidis
atgagcaccttcttccagcaaaccgcccaagccatgattgccaaacacatcgaccgtttcccactattgaagttggaccaggtgattgattggcaaccgatcgaacagtacctgaaccgtcaaaaaacccgttaccttagagaccaccgcggccgtcccgcctgtcccctgttgtccatgttcaaagccgtcctgctcggacaatggcacagcctctccgatcccgaactcgaacacagcctcatcacccgcatcgatttcaacctgttttgccgtttcgacgaactgatcatccccgattacagtaccttatgccgctaccgcaactggctggcgcaagacgacaccctgtccgaattactcaaactgattaactgccaactgaccgaaaaaggcctaaaaatagagaaagcatccgccgccgtcgttgatgccaccattatccagaccgccggcagcaaacagcgtcaggccatagaagttgacgaagaaggacaaatcagcggtcaaaccacaccgagtaaggacagcgatgcccgttggataaagaaaaacggcctctacaaactcggttacaaacaacatacccgtaccgatgcagaaggctatatcgagaaactgcacattactcccgccaatgcccatgagtgcaaacacctgtcgccgttgttggaagggttacccgaaggtacgaccgtctatgccgacaaaggctacgacagtgcggaaaaccggcaacatctggaagaacatcagttgttggacggcattatgcgcaaagcctgccgcaaccgcccgctgtcggaagtgcaaaccaaacgcaaccgatatttgtcgaagacccgttatgtggttgaacagagcttcggtacgctgcaccgtaaattccgctacgctcgggcagcctatttcggactgattaaagtgagtgcgcaaagccacctgaaagcgatgtgtttgaacctgttgaaagcggccaacaggttaagtgcgcccgctgccgcctaa

SEQ ID NO: 62928 - DNA, 1059 bp, Neisseria meningitidis
atgcgccctttgaacgtgcagatcaggttgggcaaccttaggcacaattatcggattttaaaggaaatgcacggaggcaagctgttggcggtagttaaggcggatgcatacggacacggtgcggtcagatgtgctttcgcgctggcagacttggcagacggctttgccgtggcgacaatcgatgagggaatcaggctgcgtgagagcggcattacccatccgattgtccttttggaaggcgtatttgaagcatcggagtacgaagcggtcgaacaatactcgctctggtcggcagtcggaaaccaatggcagcttgaggctttgctggcccgccattggaaaaaacctgtcaaggtctggttgaaaatggattcgggaatgcaccgtaccggatttttccctcatgattacgcttcggcatatgcggcattgaagcagtcggaatatgtggacagtattgtcaaattctcgcatttctcctgtgcggacgaacccgaaagcggtatgacggaaatacagatggaagcattcgatttgggtacggaagggctggaaggcgaagaaagccttgccaactccgccgctattttgaatgttcccgaagcacgcagggactgggggcgagccggcttggcgttgtacggcatttccccgttcggaggcagcgatgacaggctgaaacccgtgatgaggctttccacccgtattttcggcgaacgcgttttacagccgcactcccctatcggttatggcgcaacattttataccagtaaatctacgcgcgtcggcctgattgcctgcggttatgcggacggttatccgcgccgcgccccaagcaattcccccgtcgccgtcgacggtaaattgacccgggtcatcggcagggtctctatggatatgatgaccatcgagctggacgcttcgcaagaaggtttgggacacgaggtcgaactgtggggcgatacggttaatatcaataccgttgccgaagcggccggaaccatcccttacgaattgatgtgcaatatcaaacgtgcaaaattcacttatatcgagtaa

SEQ ID NO: 62929 - DNA, 165 bp, Neisseria meningitidis; identical to SEQ ID NO: 38385

SEQ ID NO: 62930 - DNA, 1434 bp, Neisseria meningitidis
atgaacgaatattcccaattaatcaagcatcccgatatttccctttccccgatttcagacagcatcgggatcggcaatccggcgacgggtgaaattttggcgtatgtccgcaagacggattcggacaagctgaaaaacctgattcaaaaagcagctgcggcacaaaaattatgggcggcgaaaaccgctttggaacgcgccgacatattgtggcgttggtattttttagttaaagaaaacaaggaagcactggcgcgcctgatgacgatggagcagggcaaaagcctgaccgagtcgcgcggcgaaatcgattatgcggcttcgtttgtgcgctggtttgccgaagaggcgcggcggattgacggcgatgtgctgacaagcgtgaaagcgtcgcaaaaactggtcgtgttgaaacagcccgtcggcgttaccgctgcgattacgccgtggaactttccgtccgcgatgattgcgcgcaaggccgcgcctgctttggcggtgggttgcgcgatgatcatcaaacccgcatcgctcacgcctttgagtgcgtatgccttggcttcgttggcttacgaagcgggcataccgcaggatttgttgcccgtcgtcagcggccgcgcatcggaaatcggccgtgaatttgccacgaacccgattatccgcaaaatcagcttcaccggttcgaccgaagtcggcgcgaaaatttttgccgacagcgcggcggacattaaaaaactcagtttggaactgggcggcaacgcgccgtttatcgtgtttgacgatgccgatttggacaaagccgtcgaaggtgcgctcgccagcaagttccgcaacagcggtcagacctgcgtctgcaccaaccgcgtttacgcccaatccggcatttacgacgaattttgtcgcaaattgagtgaaaaagtagccgagctcaaattgggcaacggcttggaggatggcgtcaaccaagggccgctgattgaggaaaaagcggtagaaaaagtcgagcagcacattgctgacgcgctcgctaaaggcgcggtctgtctgaccggcggcaaacgcagcgcattgggcggaacgttttttgagccgaccgtcttaagcggcgtaacggcgcaaatggcggtggctcgcgaagaaaccttcgggcctttgtgtccggtattccgttttgaaaccgaagccgaagtcattgaggctgcgaacaatacggaatacggtttggctgcttacctttttaccgccgacaccgcacgccagtggcgcgtcggcgaagcattggaatacggtatggtcggcatcaatacgggcttaatcagtaatgaagcggcaccgttcggcggcgtgaaacgcagcggtttgggacgtgaaggcagcaaatacggtgcggacgaatatctggaattgaaatatctgtgtatggatgtcgggtga

SEQ ID NO: 62931 - DNA, 795 bp, Neisseria meningitidis
atgaccacgattttggctttcgatattgaaaccgtacccgatgtgcagggtatccgaacattgtacgagctgccgtcctcgctgcccgacgatgaagtggtgctgtttgcccagcaaaaacgccgtgctcagacgggtggggattttatgcagcatcatcttcatcagattgtggcgatttcgtgctgcatgcgttgggggcaggataaagtccatgtcggtacaatcggcgagatggacgatggcgaagaagtcgtgattgccaaatttttcgagttgattgaaaaacatacgccgcaactggtcagttggaacggcggcggtttcgacctgcctgtcctgcattaccgttcattgctgtacggcatcaacgccgcgcgctattgggatatgggcgacggcgatttcggcgacagccgcgatttcaagtggaacaactacatcagccgctaccaccaacgtcattgcgatttgatggatttgctcgcgctttaccagccgagggcgaatgtgccgctggacgatatggcgaaactgtgcggttttccgggtaaattgggtatggacggcagcaaggtctgggaggcattccatgccggtaaattgaaggaaatccgcaattattgtgaaaccgatgccgtgaatacgtatttgatgtatctgcgtttttgtctggtcagcggcagattcgacgcggacgaatacgaaatggaaatcaagcggatcagaaactatctttccgcccaaacagaagacaaaccgcattgggcagaatttgtccaagcgtggaaataa

SEQ ID NO: 62932 - DNA, 1395 bp, Neisseria meningitidis
atgaccgtcaaaacccgtttcgcccccagccccaccggctacctgcacattggcggcgttcgcaccgccttgttttcatgggcgtttgcccgccatcacaaaggcgagttcctattgcgtatcgaagacaccgacttggcgcgttccaccgccgaatccgtcaacatcatcctcgacggcatgaaatgggtcggactggattacgacaacgccgacaacgtcgtgtaccaaacccgccgtttcgaccgttataaagaagtcattgccgaactcttggcaaaaggcgatgcctactactgctattgcagcaaagaagaattggaagcgatgcgcgagaaagccgaaaaagaaggcacggcgacttacgaccgccgctggcgtccggaagaaggcaaaaccctgcccgaaatccctgccgacgtgcaacctgttgtccgtttcaaaacacctttggacggcgtcacccagtggacggacttggtcaaaggcgaaatttccattcccaacgaagcgctcgacgacctgattatcgcccgcgctgatggcacgccgacctacaacttctgcgtcgtggtggacgactacgatatgggcgttacccacgttatccggggcgacgaccatgtgaacaacaccccgaaacaaatcaatatcttgaaagccatcggtgcgaacctgcccgaatacgggcacctgccgatgattctcaacgaacaaggcaaaaaaatctccaaacgcagcggcgataccgttgccattaccgactttggcgcaatgggcatcctgcccgaagccatgctcaactatctggcacgcttgggctgggcgcacggcgacgacgagttctttacgatggaacaattcatcgaatggtttgatttgaaagacgtttccccgtccccaagccgtatggatttgaaaaaactctattggatcaacggcgaacacatcaaaatcacgcccaacgacaaactcgccgaactcgtcaaaccgcgtctcgctctgcgtgatattcatgaaaccgaaaaacctgcgttggaagacgtgttggcacaggttaaagaccgcgcccaagatttgaacgccttggcagacgaatgcctgtatttctacaaaaaacaagtccctgccgaagccgatgttgccaaacactgggacgacgaagcctccgcccgtatgctgcgctttgccgaacgcctcgagggtttggaagactggaataccgaagccatccacgacctcttcaaacctttctgcgacgaagaaggcatcaaaatgggcaaactcggcatgcccctgcgcctcgccgtctgcggtacggcgaaaaccccgagcgtcgatgccgtgttggcattaatcggcaaagaggaagtgttgaaacgcatccgcgcttaa

SEQ ID NO: 62933 - DNA, 759 bp, Neisseria meningitidis; identical to SEQ ID NO: 38830

SEQ ID NO: 62934 - DNA, 1098 bp, Neisseria meningitidis; identical to SEQ ID NO: 36189

SEQ ID NO: 62935 - DNA, 1212 bp, Neisseria meningitidis
atgaaccaactgaaacttaccgtttccggcgcgcagattttatttgtggcattcggcgcaatggtgctggttcccctgctgaccggtctgaatccggctcttgcgcttttgggcgcaggcttgggaacgctgctgttccaaatcacaaccaaacgcaaagtgccgatttttcttggttcttcgtttgcctttatcgcaccgattatctactccgtcggcgaatgggggctgccttccaccatgttcggactgtttgccgccggctttatgtattttgtgtttgccgcgctgatccgttggcgcggactggcagcggtacacaaactgctgcctccggtcgtcatcggccccgtcatcatggtcatcggtctgtctgttgccgtggcggcaagcagcatggcaatgggtcaggcggacggcaaacaggtcatcgactataccgattcgctgattctttccggctttacctttgccgttaccgccatcgtatcggttttcggcagcaggatgatgaagctgattcccatcttgatcggtgtcgcttcgggttatgttttggcactgctgatgggactggtggacacggcaagcattgcacacgcgccctggttcgccgttccccattttgaaacgcctcaggtcaactggcaggctgcactgtttatgctgcccgttgccgtcgcccccgccatcgaacacatcggcggcatcatggcaatcggcaatgtgacggggaaagactatacgaaagacccgggcttggacaaaacccttgcaggcgacggtttgggcgtatgcgttgcgggtctgatcggcggcccgccggttacgacctacggcgaagtaacgggtgcggtgatgattaccaaaaacagcaaccccgtcatcatgacttgggcggcggtttttgccgtctgcatggcgtttttcggcaaattcaatgcgtttttggcttccattccgatgccagtaatgggcggcattatgctgctgctgttcggcacgattgcttctttgggcgtgaaaacgctgattgatgccaaagtcgatttgatgctgccgaaaaacctggtcatcgtcagctcggtactgaccacgggcatcggcggcatgacgctcaaattgggcagcttcagctttgccggcgtgggcttgtgcgccgtacttgccattatgttgaacagcctgctgcccgatccgaaagaatcctga

SEQ ID NO: 62936 - DNA, 1773 bp, Neisseria meningitidis
atgatactgccagcccgtttttcagacggcatcagcctttccctacgcctgaaactcctgaccggactgtgggtcgggttggcggcattgtctgtcgttttgacactgctgctctctttgcgtctggaaaacgcggcctccgtcatcgaagaggcgggcaacttgagaatgcaggcataccgtctggcatacatggcgggtgaaggctcgccccgtgcgcaaattgacaatcaggttgccgaatttgaaaaaagcctgaatcgtatttcacaaagtgatgccatccatccgctgattccttcggacacccctcttgcttatgatttgatacaatccatgctgattatagattggcaggcacacatcctccccccgctccagtcctaccggcgaccgactcaggtcgatctctaccgctttgccggaaacatcgaactgtttttgcaggcattggaaaatgccaacgaaaaaaacacatggtggctcaggcgttttcaatgggcaattatgttgatgacgctggtgtcgtctgtactgatgctgttttggcaccagatttgggttatccggccgctgcaggcgttaagggaaggtgcggaacgcatcggacggaggtgtttcgatattccggttcccgaaggcggtacgccggaattcaaacaggtcgggcgttgtttcaatcaaatgggcggcaggttgaaaattttatatgatgatttggaaggacaagtcgccgagcagacacgcagtctcgaaaaacaaaatcaaaacctgaccctgctgtaccaaactacacgggacctgcaccaatcctacataccgcaacaggctgcagaacattttctaaaccgtatcctgcccgccgtaggagcagattccggcagagtttgtttggacggcggatccgatgtttatgtttccattcatcatgcggattgcggcacagcagcttcggatttggggaagtaccatgaggaaatcttccccattgagtaccagaacgaaacattgggcaggctgttgctcagctttccaaacggcatttctcttgatgaagacgaccgcatcctgcttcaaacactaggcaggcaattgggcgtatcgcttgccggcgcaaaacaggaggaagaaaaacgcctgcttgcagtattgcaggaacgcaacctgattgcgcaaggattacatgacagcatcgcacaagcattaacgttcctaaacctacaggtacagatgctggaaaccgcctttgccgaaaacaaacgggaggaagccgcagaaaacatcggcttcatcaaaacaggcgtgcaggaatgttatgaagatgtccgcgaactgctgctcaacttccgtaccaaaatcagtaataaagaatttcccgaagccgttgccgacctattctcgcgctttacgcaacagaccggcacgactgtcgaaaccgcttgggaaaacggcacgcacctgcctacacaggacgagcagctccaaatgattttcatcctgcaggaaagcctgtccaacatccgcaaacacgcccgcgccacccatgtaaaattcaccctttccgaacacggcggacgctttaccatgaccatccaagacaacggacaaggtttcgacacggagaaaataggagaacctacgggcagccatgtcggactgcacattatgcaggagcgtgccaaacgcatccgtgccgttttagaaatccgttcccaaccccaacaaggaaccaccgtctcattgacgggtgcatctgaagaaagcttgaaatga

SEQ ID NO: 62937 - DNA, 729 bp, Neisseria meningitidis; identical to SEQ ID NO: 40848

SEQ ID NO: 62938 - DNA, 711 bp, Neisseria meningitidis
atgaatgcagccatcgaacacgtccaagccgtcgccttcgatttggacggcacactgtgcgattccgtccccgaccttgccgccgccgcagaagcgatgttggaacaactcggtatgaaaccgctgcccgccaaagtggtcgaaagctatgtgggcgacggcatcggcaaactggttcaccgcgtcctcaccaacgaccgcgaccgcgaagccgattccgaactgtgggaaaaaggtttcgtatcctatatgaaatactaccgcgaccatttgagcgtcttcacccgcccctatcccgaaaccgaagccgggctggcattgctcaaatctttgggcatcccgctggcagtcattaccaacaaaaacgaaatccttgccgtcgaactgttgaaacagctcggacttgccgactacttcagcctgatactcggcggcgacagcctgcccgagaaaaaacccagccccctgccgctgcggcatgccgccgaagttttgggtatcgatgttgcaaacatggttatggtcggcgactcgtgcaacgacatcatcgccgccaaagccgccggctgcctgagcgtcggcgttaccttcggttacggcgatatgacgctgctctcgcaagacgatgcgacccgccccgactggattatcggctcgctgcccgaaatttacgaaaacctgcaaccgcagaaaaacaaagacgaagaataa

SEQ ID NO: 62939 - DNA, 657 bp, Neisseria meningitidis
gtggcttcagtatttttagaaggagaagcagtcgaggtcggcaatattttctgtatcggcaggaactatgccgcacatattgaagagttaaaaaacgaaataccttccgaacctgtggtgtttatgaagccgtcaggcagcattttgaatagcggcggtacaatcttgctgcccgagtttagtagggatgtgcagtttgagtgcgaactcgtgctgctggtcggtaaggattcagacggcatgggagagggtgaagatattttgggatgtgtggcggggtacggcgtgggtttggatttgaccgcgcgagacatccaatgccatctgaaggcgcaggggctgccctggctgaaggcaaaagggttcaggcattccgcgtgcgtgtcggattttgcggcggcagacagaatcggcaatcccgagaaggtgttgttttcattaaaacaaaacggcgtattgaaacagcgcggggataccggtttgatgatttacccgattcgggaaattttacacaaactggcggcggattacggtttggggaaaggggatttggtgtttaccggaacgccctccggcgtgggcgcaatcggtgcgggggacaatttggcattggagctggacggcttggtgcgcgcctctttcacggtagggtgttaa

SEQ ID NO: 62940 - DNA, 816 bp, Neisseria meningitidis
atgagaccatatgctactaccatttatcaactttttattttgtttattgggagtgtttttactatgacctcatgtgaacctgtgaatgaaaagacagatcaaaaagcagtaagtgcgcaacaggctaaagaacaaaccagtttcaacaatcccgagccaatgacaggatttgaacatacggttacatttgattttcagggcaccaaaatggttatcccctatggctatcttgcacggtatacgcaagacaatgccacaaaatggctttccgacacgcccgggcaggatgcttactccattaatttgatagagattagcgtctattacaaaaaaaccgaccaaggctgggttcttgagccatacaaccagcaaaacaaagcacactttatccaatttctacgcgatggtttggatagcgtggacgatattgttatccgaaaagatgcgtgtagtttaagtacgactatgggagaaagattgcttacttacggggttaaaaaaatgccatctgcctatcctgaatatgaagcttatgaagataaaagacatattcctgaaaatccatattttcatgaattttactatattaaaaaaggagaaaatccggcgattattactcattggaataatcgagtaaaccaggctgaagaagataattatagcactagcgtaggttcctgtattaacggtttcacggtacagtattacccgtttattcgggaaaagcagcagctcacacagcaggagttggtaggttatcaccaacaagtagagcaattggtacagagttttgtaaacaattcaagtaaaaaataa

SEQ ID NO: 62941 - DNA, 522 bp, Neisseria meningitidis; identical to SEQ ID NO: 43029

SEQ ID NO: 62942 - DNA, 2301 bp, Neisseria meningitidis
atgcaccgaccgaccgccaaacagattttgcacgaagtattcggttatcccgaatttcgcggcaggcaggaggctgtcatcaatactttggcaggcggcgggagtttgacggtgctgatgccgacgggcggcggcaagtctttgtgttaccagattcccgcgctgatgcgcgaaggcgtggcggttgtcgtatcgccgctgattgcgctgatgaacgaccaagtggccagcctgcatgtagccgggattgaagcggcggcagtcaacagcagcacatcggcagatgaagcgcgcgagattgccgacaagcttgcccaatgccgtctgaaactgctttatgtcgcaccggaacgcttggttaccgaccgctttttgcgttttctcgaccaacaaaccgtcagcctgttcgccattgacgaagcgcactgcgtcagccagtggggacacgatttccgccccgaataccaacagctcggcatgcttgccgaacgctatccgaacgtcccgcgcatcgccctgaccgccaccgccgatgcggccacacgcgccgacatcaagcattatctgcacttggacgatgcgcccgaatttgtctccagctttgaccgcccgaatatttattatcaggttatcgaaaaaaataacggcaaaaaacaactgcttgaatttatccgcaaagaaatggcgggacaaagcggcattgtgtattgtttaagccgcaaaaaggtggaagatgtggcgcggtttttgcgtgaaaacggattaaacgcgattccgtatcatgccggtttgagcatggacgtgcgcgaggaaaaccaacgccgctttacgcatgaagacaatattatcgtggtggcgaccgtggcgttcggcatgggcatagacaaacccgacgtgcgctttgtcgcccatctcgatatgccccagagtgtcgaacatttctatcaggaatcggggcgtgccggccgggacgggctgcctgccgcgagctggctgtgttacggtttgaacgattgggtgttgctgcgcgaacggattgccgaaggcaacagcgacgaggtgcaaaagcaaatcgaaatgcaaaaactcgatgccatgctttccgtctgcgaaaccgccgcctgccgccgcgtactgctgctcaaacatttcggcgaagaatccgaaccctgcggccattgcgacaactgcctgcatccgcccgtacggtttgacggcacggtgttggtgcaaaaattactcagctgcgtgtaccgcgccggacaacgttttgccgccggttacatcaccaaccttttgcgcggcaaaagcgacgattggatacgcggcaaccggcacgaacaactgtccaccttcggcatcggtacggagttgtccgacaaagaatggcgcagcgtcatccgccagtgtatcagcctcggctacctcaccgtcaacattacccgatatcaggcattgcaactgaccgaagccgccaaaaaagtcctcaaaggcgaaaccgaagtgatgctgcgtccgctcaagcgcgacaagcccgccgcccgcaccctcaaagacaactggctgcgtaccgaacgcgaagaacgcctgtggcaggcattgcgcgtttggcgtatgaaacaggcagaagccgaaggcatccccgcctatatgattttcggcgacaaaaccctgcgcgaccttgtcgaaaaaatgccgcaaaacctcaacggactgcacgacatctacggtttgggcgaagccaaaatcgaccgtttcggacacggcatcctcgaagtctgccgcaacgccgccggcttcagccgcgacgcggtcatccgtccgcaaaccgaacgcgaacaacaactgcgtcaaaaactcgaggcctggcggtatgaacaggcaagggcggaaaactgcgccctgcatgccgtcctctccgacgaaagccttgccgatatgcttgccgatacgcccgaaaccgaaaccgacctcgaaggcgtacacggcttgggcagcgtacgcgccgccaaatacggacgggacatcctcgccgtctgccgtccgttttcagacggcatcgatgaaaccgccaaacacaaacgccgcctgatgcgcgccctgatccaatggtgcaacgaaacggcaaaacacgaacagtccgaaccctaccgcattctcagcaaagccgccctacgcgccattgccgccaaacagccggaaggtttggcggagcttgccgccgtatacggcgtaggcgaagaaaaagccgcacgttacggtgcggcggtgttggcggtattggaacgaaatgccgtctga

SEQ ID NO: 62943 - DNA, 1548 bp, Neisseria meningitidis; identical to SEQ ID NO: 45082

SEQ ID NO: 62944 - DNA, 630 bp, Neisseria meningitidis
atgagtgaaaccgaaaatcaagcattgacatttgccaaacgcttgaaggcggataccacggcagttcacgacagcgtggataacctcgttatgtctgtccaaccgtttgtcagcaaagaaaactacattaaatttttggaactccaatccgttttccacaaggccgtcgaccacatctataaagatgccgaattgaacaaagccattcccgagctggaatatatggcgcgatacgatgccgtaacgcaagaccttgcagatttgggcggcaaaccttacgaatacggcaaaccgctgccgcatgaaaccggcaacaaagcaatcggctggctgtattgcgccgaaggatccaatttgggcgcggcgtttttgttcaagcacgcgcaaaaactcgattacaacggcgaacacggcgcgcgccacctcgctccgcatcccgacgggcgcggcaaacactggcgcgccttcgtcgagcatctgaacgctttgaacctgactcccgaagccgaagcggaagccattcaaggcgcgcgcgaagcctttgcattctacaaagtcgtgttgcgcgaaaccttcggcttggcagccgatgccgaagcccccgaaggtatgatgccgcacaggcactaa

SEQ ID NO: 62945 - DNA, 180 bp, Neisseria meningitidis; identical to SEQ ID NO: 41432

SEQ ID NO: 62946 - DNA, 420 bp, Neisseria meningitidis
atgatatctatttttaaagcttattacgatgtttatgaatttaatggggaactattaaaaagatgtatatttttagatgaagaaaataatgaaataattaaagatagaatatatgaatacttaatttatgttttaacaggagacctttatctacaaaaagacatagatgaaaatttagaatttatccatcaagcagaaaataatcccaatgaagtttattcaggaggtggacaaggtttttgctgggatatttctgctgaaaaagtagttttctataacaacgaatttgatgaagaagacggctggcctgatttaagctgttcgctgcatacttttaaaactactttaattgcttggaatgcttttttgcaattgcctaaaagtattcattcagtggtggaaaccgtgattgaggaataa

SEQ ID NO: 62947 - DNA, 696 bp, Neisseria meningitidis; identical to SEQ ID NO: 42672

SEQ ID NO: 62948 - DNA, 624 bp, Neisseria meningitidis; identical to SEQ ID NO: 41010

SEQ ID NO: 62949 - DNA, 1416 bp, Neisseria meningitidis; identical to SEQ ID NO: 55862

SEQ ID NO: 62950 - DNA, 768 bp, Neisseria meningitidis; identical to SEQ ID NO: 39902

SEQ ID NO: 62951 - DNA, 1863 bp, Neisseria meningitidis
atggctcttttgcagatttcagaaccgggtatgtccgccgccccgcaccgacaccgtttggcggcaggcatcgatttgggtacgaccaacagcttggtcgccaccgtccgcagcggcagtgccgcctgtctgcccgatgccgaagggcgcgttaccctgccttccgtcgtccgctatctggaaaacggcggcattgaagtcggcaaaaccgccctgtccgcccaaaaaaccgacccgctgaacaccgtcagctccgccaaacgccttatcgggcggacgcttgccgatctgcatcaaaatacgcattacctgccttaccgtttcggtgacaatcaacgcgttatcgaactgcatacgcggcagggggtgaaaacgcctgtcgaagtgtcggcggaaatcctcaaaacccttaaatcgcgcgccgaagaaaccttgggcggcgatttggtcggcgtggtgattaccgtccccgcctatttcgacgatgcccaacgccaggccaccaaagatgccgcgcgtctggcgggtttgaacgtattgcgcctgctcaacgaacccaccgccgccgcaatcgcctacgggctggacaacgcctcggaaggcacgtttgtcgtgtacgacttagggggcggcacattcgacgtatccgtattgcaactgaccaaaggactgtttgaagtcaaagccaccggcggcaacagcgcgttgggcggcgacgacttcgaccatcgtttgttctgccacctgctcgaacaaaacgagctctccaaactcaacgagcaagacagccggctgctgctttcccttgtccgtagtgccaaagaaaaactgaccgctcaaaccgaagccgtcatcgaaaccacactttcagacggccataaagttcataccgtcattacccgccaagagtttcacaatctgacccaaaatctggtacaaaaaaccatcgagccggtcaaacaggctttgaaagatgcgggcgtgggcaaggcggatgtcaagggcgtgattatggtcggcggttcgacccgtatgctgcacgtccaacaagcagttgccacattctttggtcaaaccccgctgaacaacctcaatcctgacgaagtggtcgcgctcggcgcagccatacaggcaaacgtcctcgccggcaacaaagccgacggcgaatggctgctgctggacgttactcccctgtcgctcggtttggaaacctacggcgggcttgccgaaaaaatcatcccgcgcaattccaccatccccacctcgcgcgcgcaggacttcaccacgttcaaagacggtcagaccgcgatgacgatacacgtcgtacaaggcgaacgcgaactggtttccgactgccgcagccttgccaaatttaccttacgcggcattccgccgatggcagcaggcgcagcgcgtatccgcgtaaccttccaagttgacgctgacggattactatccgtttccgcacaagaacaaagcaccggcgtacaggcgcaaatcgaagtcaaaccttcctacggcttggacgacagcactatcacccaaatgctcaaagacagcatgagcaacgctgccgaagacatggccgcacgcgcacgcgccgaagccgtagtcgaagccgaaagcctgaccgatgccgtcaacgccgccctcgagttggacagcgatttgctggatgccgaagagcttgcacaaatccagcgagacatcgctgatttgcaaggcagtctgaaagacggcaacgccgaagacatccgcgccgccgccgccaaactcagccgcagcaccgacaacttcgccgctaaacgcatgaaccgcaatatccaacgcgcattgactggtcaaagcgttgataatatttga

SEQ ID NO: 62952 - DNA, 378 bp, Neisseria meningitidis
gtgaacaaaaccctcatcctcgccctttccgccctcctcggccttgccgcgtgcagcgtcgaacgcgtttcactgttcccctcgtacaaactcaaaatcatacagggcaacgaactcgaacctcgcgccgtcgcctccctccgccccggtatgaccaaagaccaagtcctgctcctgctcggcagccccatactgcgcgacgcattccataccgaccactgggactataccttcaacacctcccgcaacggcatcatcaaagaccgaagcaatctgaccgtctattttgaaaacggcgtgctcgtccgcaccgaaggcaacgccctgcaaaatgccgccgaagccctccgcgtaaaacaaaacgcagacaaacaataa

SEQ ID NO: 62953 - DNA, 816 bp, Neisseria meningitidis
atgagaccatatgctactaccatttatcaactttttattttgtttattgggagtgtttttactatgacctcatgtgaacctgtgaatgaaaagacagatcaaaaagcagtaagtgcgcaacaggctaaagaacaaaccagtttcaacaatcccgagccaatgacaggatttgaacatacggttacatttgattttcagggcaccaaaatggttatcccctatggctatcttgcacggtatacgcaagacaatgccacaaaatggctttccgacacgcccgggcaggatgcttactccattaatttgatagagattagcgtctattacaaaaaaaccgaccaaggctgggttcttgagccatacaaccagcaaaacaaagcgcactttatccaatttctacgcgacggtttggatagcgtggacgatattgttatccgaaaagatgcgtgtagtttaagcacgactatgggagaaagattgcttacttacggggttaaaaaaatgccatctgcctatcctgaatacgaggcttatgaagataaaagacatattcctgaaaatccatattttcatgaattttactatattaaaaaaggagaaaatccggcgattattactcatcggaataatcgaataaaccaaactgaagaagataattacagcactggcgtaggttcctgtattaacggtttcccggtacggtattacccgtttattcgggaaaagcagcagctcacacagcaggagttggtaggttatcaccaacaagtagagcaattggtacagagttttgtaaacaattcaagtaaaaaataa

SEQ ID NO: 62954 - DNA, 861 bp, Neisseria meningitidis; identical to SEQ ID NO: 38865

SEQ ID NO: 62955 - DNA, 1677 bp, Neisseria meningitidis
atgtcccaacaatacgtctattctatgctgcgcgtgagcaaggttgtgccgccgcagaaaaccatcattaaagatatttccctttctttcttccccggcgcgaaaatcggcctgctcggtttgaacggcgcgggcaagtccaccgtgctgcggattatggcgggcgtggataaggaatttgagggcgaagccgtgccgatgggcggcatcaaaatcggctacctgccgcaagagcctgagcttgatccggaaaaaaccgtgcgcgaggaagtggaaagcggtttgggcgaagtggctgccgcgcagaaacgtttggaggaagtgtatgccgagtacgccaatcctgatgcggattttgacgcgttggcagaagagcagggccgcttggaagcgattattgcggcaggttcgtccacgggcggcggtgcggaacacgaattggaaatcgccgccgacgcgctgcgcctgccggaatgggatgccaaaatcgataatttgtccggcggtgaaaaacgccgcgttgccttgtgcaaactcttgttgagcaaacccgatatgcttttgctggacgagccgaccaaccacttggacgcggaatctgtcgagtggctggagcaatttctcgtgcgcttccccggtacagtcgttgcggtaacacacgaccgctacttcctcgacaacgccgccgaatggattttggaactcgaccgcggccatggtattccgtggaaaggcaattactcgtcttggctggagcagaaagaaaaacgcttggaaaacgaggcaaaatccgaagccgcgcgcgtgaaggcgatgaagcaggaattggaatgggtgcgccaaaatgccaaaggccgccaagccaagtccaaagcgcgtttggcgcgttttgaggaaatgagcaactacgaataccaaaaacgcaatgaaacgcaggaaatctttattcccgttgccgagcgtttgggtaacgaagtgattgaatttgtaaatgtttccaaatcgttcggcgataaagtgctgattgacgatttgagcttcaaagtgcctgcgggcgcgattgtcggcatcatcggtccgaacggcgcgggtaaatctacgctgttcaaaatgattgcgggcaaagagcagcccgattccggtgaagtgaaaatcgggcaaaccgtgaaaatgagcttgattgaccaaagccgcgaaggtttgcaaaacgacaaaaccgtgttcgacaacattgccgaaggccgcgacattttacaggtcggacagtttgaaattccctcccgccaatatttgggacgcttcaactttaaaggcagcgaccaaagcaaaatcgcagggcagctttccggcggcgaacgcggacgtttgcacttagcaaaaaccttgttgagcggcggcaatgtgttgctgctggacgaaccgtctaacgaccttgatgtagaaaccctgcgcgcgctggaagacgcattgttggaatttgccggcagcgtgatggtgatttctcacgaccgttggttcctcgaccgtattgctacgcatatcttggcttgcgaaggcgactccaaatgggtgttcttcgacggcaactatcaggaatacgaagccgataagaaacgccgtttgggcgaagaaggcgcgaaaccgaaacgcatcaaatacaaaccggtaacgcgttaa

SEQ ID NO: 62956 - DNA, 213 bp, Neisseria meningitidis
atggaaacccttatcctcgacatcggcggcatgagctgcggcggctgcgtcaaaagcgttacccggatattggaaggcgtaaaaggcgtggcaagcgtcgaagtcagccttgaaaacaaaagtgcgaccgtcggatacgaccccgcgcaaaccgatgcaggagcgttgattgaagccgttgaagacggcggctatgatgccgcgttgaaataa

SEQ ID NO: 62957 - DNA, 366 bp, Neisseria meningitidis; identical to SEQ ID NO: 37248

SEQ ID NO: 62958 - DNA, 405 bp, Neisseria meningitidis
ttggctgaaggtcaaaaatcagccgtcaccgagtattacctgaatcacggcatatggcccggcggcaacagttctgccggcgtggcaacctcctctgaaatcaaaggcaaatatgttgcaggggttaaagttgaaaacggcgtcgttaccgccgaaatgaaatcaaccggcgtaaacaaagaaatccaaggcaaaaaactctccctgtgggccaagcgtcaaaacggttcggtaaaatggttctgcggacagccggttacgcgcaacgccaacaacaccgccaacgacgccgtcaccgccaccgacaagcagatcgacaccaagcacctgccgtcaacctgccgcgacgcagcatctgtcgtttgcatagaaacaccacctacggctttctataaaaatacctaa

SEQ ID NO: 62959 - DNA, 1065 bp, Neisseria meningitidis; identical to SEQ ID NO: 60431

SEQ ID NO: 62960 - DNA, 564 bp, Neisseria meningitidis
atgaaactcatcattctcgaccgcgacggcgtcatcaatcaggaccgcgacgacttcgtcaaatccgttgacgagtggatacctgtcgaaggcagcatggatgcggtggcatttctgacgcaggcaggctacaccgtcgccgttgccaccaaccaatccggcatcgggcgcaaatattttaccgttcaaaaccttaccgaaatgcacgccaaaatgcaccgcctcgtccgtcaggcaggcggcgaaatcaacggcatctggttctgcccgcacaccgatgccgacaactgcaactgccgcaagcccaaaccgggtatgattgaagacatcatcggacgcttcaacgcccaagcctcggaaacctggctggtcggcgacagcctgcgcgatttgcaggcaatcgatgccgtcggcggaaaacccgcgctggttctgaccggaaaaggcaaaaaaacgctctcccaacacggacacgaattacccgaacacacacaggttttcgataccctgctcgatttctcacaatacatcatgcaggaaaacaccgcaccgcaagccgactga

SEQ ID NO: 62961 - DNA, 702 bp, Neisseria meningitidis
atgttcagacggcatcggcatttgaaaaatatgcagattaaaaaaatcatgaaatggcttcccgtcgccctgtcgcttttgggcgcgttgggttatacggggtacggcagcgaggcggtgcggacggcggttgccgtactcgacgtactcggcgcggcaggggacgcgggttccgacgcgcccgcccgccgccgagcatcggcgaaatccggccaccgctacacaggcacggtgtccaaagtctatgacggcgacacccttcacgttatcgacggcgacggcgcgaaacacaaaatccggatggcgtatatcgacgcgccggagatgaaacaggcttacggcacgcgttcgcgcgacaacctgcgcgcggcggcggaaggcaggaaagtcagcgtgcgcgtgttcgataccgaccgctaccagcgcgaagtggcgcaggtttctgtcggcaaaaccgatttgaacctgatgcaggtgcaggacggggcggcgtggcattataaaagttatgctaaagaacagcaggataaggcggattttgccgactatgccgacgctcaaattcaggcggaaagggaacgcaaaggattgtggaaagctaaaaatccgcaagcgccgtgggcgtaccgccgggcaggcaggagcggcgggggcaataaggattggatggatgccgtgggcgaatggttgggcatttggtaa

SEQ ID NO: 62962 - DNA, 180 bp, Neisseria meningitidis
ttggcagaaggatatacttatttcttcaatgaaaatacggatgattgctatgttttgaaagaggattttattaataatgagcgatatgaaaaaacagaattatattcccaaaaagataaggtaattctatttccaaagtttggtgaatatgatttggtgttaaatccggacattatttaa

SEQ ID NO: 62963 - DNA, 1128 bp, Neisseria meningitidis
atgaacacctcgcaacgcaaccgcctcgtcagccgctggctcaactcctacgaacgctaccgctaccgccgcctcatccacgccgtccggctcggcggggccgtcctgttcgccaccgcctccgcccggctgctccacctccaacacggcgagtggatagggatgaccgtcttcgtcgtcctcggcatgctccagtttcaaggggcgatttactccaaggcggtggaacgtatgctcggcacggtcatcgggctgggcgcgggtttgggcgttttatggctgaaccagcattatttccacggcaacctcctcttctacctcaccgtcggcacggcaagcgcactggccggctgggcggcggtcggcaaaaacggctacgtccctatgctggcggggctgacgatgtgcatgctcatcggcgacaacggcagcgaatggttcgacagcggcctgatgcgcgcgatgaacgtcctcatcggcgcggccatcgccatcgccgccgccaaactgctgccgctgaaatccacactgatgtggcgtttcatgcttgccgacaacctgaccgactgcagcaaaatgattgccgaaatcagcaacggcaggcgcatgacccgcgaacgcctcgaagagaacatggcgaaaatgcgccaaatcaacgcacgcatggtcaaaagccgcagccacctcgccgccacatcgggcgaaagccgcatcagccccgccatgatggaagccatgcagcacgcccaccgtaaaattgtcaacaccaccgagctgctcctgaccactgccgccaagctgcaatctcccaaactcaacggcagcgaaatccggctgctcgaccgccacttcacactgctccaaaccgacctgcaacaaaccgtcgcccttatcaacggcagacacgcccgccgcatccgcatcgacaccgctatcaaccccgaactggaagccctcgccgaacacctccactaccaatggcagggcttcctctggctcagcaccaatatgcgtcaggaaatttccgccctcgtcatcctgctgcaacgcacccgccgcaaatggctgaatgcccacgaacgccaacacctgcgccaaagcctgcttgaaacacgggaacacggctga

SEQ ID NO: 62964 - DNA, 1170 bp, Neisseria meningitidis
atgccgcaaattaaaattcccgccgtttactaccgtggcggtacatcaaaaggcgtgtttttcaaacgttccgacctgcccgaggcggcgcgggaagcgggaagcgcacgcgacaaaatcctcttgcgcgtactcggcagcccggatccctacggcaagcagatagacggtttgggcaacgccagctcgtccaccagcaaggcggtgattttggacaagtccgaacgcgccgatcacgatgtcgattaccttttcgggcaagtttccatcgacaaaccttttgtcgattggagtggcaactgcggcaacctcaccgccgccgtgggcgcatttgccatcgagcaaggcttggtcgataaaggcaagattccttcagacggcatctgcacagtcaaaatctggcagaaaaacatcggcaaaaccattattgcccatgtaccgatgcaaaacggcgcagttttggaaacaggcgattttgagctcgacggcgtaacgttcccggcagccgaagtacaaatcgaatttcttgatccagccgacggcgaaggcagtatgttcccaaccggcaatttggtcgatgaaattgatgtgccgaatataggccgtttgaaagccacgctcatcaacgcgggcattccgaccgttttcctgaatgccgccgacttgggctacacgggcaaagagttgcaagacgacatcaacaacgatgccgcggctttggaaaaattcgagaaaatccgcgcttacggtgcgctgaaaatgggtctgatcagcgacgtatccgaagctgccgcccgcgcgcacacgccgaaagtcgccttcgtcgcgcccgccgccgattacaccgcctccagtggcaaaaccgtgaacgccgccgacatcgatttgctggtacgagccctgagcatgggcaaactgcaccacgcgatgatgggtaccgcctctgttgccattgcgaccgccgccgccgtgcccggtacgctggtcaaccttgccgcaggcggcggaacgcgtaaagaagtgcgcttcgggcatccttccggcacattgcgcgtcggtgcagccgccgaatgtcaggacggacaatggacggccaccaaagcggtcatgagccgtagcgcacgcgtgatgatggaaggttgggtcagggtgcctgaggattgtttttaa

SEQ ID NO: 62965 - DNA, 1245 bp, Neisseria meningitidis
atggaacagcagcaaagatacatcagcgtactggatatcggtacgtctaaagtcctcgcactgatcggggaagttcaagatgacgacaaaatcaacatcgtcggtttggggcaggctccttcacggggcttgcgcgcgggcatggtaaccaatatcgatgccaccgtccaagccatcaggcaggcggtcaatgatgccgagctgatggcggataccaaaattacccacgttaccacaggtatcgcaggcaaccacatccgcagtctcaattcgcaaggtgtggttaaaattaaagacggggaagtcacgcaggcagacatcgaccgcgccattgaaacggcaaaggcaatcaatatcccgcccgatcaaaaaattctcgatgccgtggttcaagactacattatcgacacccaacttggcgtgagggagcccatcggtatgagcggtgtgcgtctggatacgcgggtgcacatcattaccggtgcaagtacggcagtgcagaatgtccaaaaatgtatcgagcggtgtggtttgaaaagcgatcagattatgcttcagccgttggcaagcgggcaggcggtgctgactgaagatgaaaaagacctcggcgtatgcgtcatcgacattggtggcggaacgaccgatattgccgtttatatgaacggtgccatccgccatacgtccgtcattccggccggtggtaatctgattaccaaagatttgtccaaatcgttgagaacacctctcgatgccgccgagtacattaaaatccattatggcgtggcatcatgcgatacggaaggcttgggtgagatgattgaagttccgggcgtgggtgaccggacatcgcgtcaggtttccagtaaggttttggcagcaatcatcagcgcacgtattcaggagatttttggcgtagtgctgggcgagctgcaaaaatcgggtttccccaaagaagtgctgaatgcgggtatcgttctgaccggcggtgtgtccatgatgaccgggattgtggaatttgccgaaaaaatcttcgatttgcctgtacgcaccggtgcaccccaagaaatgggcggtttgtccgaccgcgtccgcacaccgcgtttttctaccgctatcgggctgcttcatgcagcatgcaagctggaaggaaacttgccgcagccggaaaacggtgcagtgcaagagagggaagtgggcggcggtttgttggcaagattgaaacggtggattgaaaacagcttctga

SEQ ID NO: 62966 - DNA, 1161 bp, Neisseria meningitidis
atgaaacgccaagccttagctgcaatgattgcttccttattcgcattagccgcctgcggcggcgaacctgccgcgcaagcccctgccgcttccgcagaagccgcaagttccgccgcacaagctgccgccgaaacgcctgcaggcgaactgcccgtcatcgatgcagttaccacccacgctcctgaagtacctcccgcaatcgaccgcgactatcctgccaaagtacgcgtaaaaatggaaaccgtcgaaaaaaccatgaaaatggacgacggggtggaataccgctactggacatttgacggcgacgttccgggccgtatgattcgcgtacgcgaaggtgataccgtagaagtagaattctctaacaatccttcttctaccgttccccataacgttgacttccatgcagctaccggccaaggtggcggcgcggccgcaacctttaccgctccgggccgtacttccacattcagcttcaaagccctgcaacctggcctgtacatctaccactgcgccgtcgcgccggtcggtatgcacatcgccaacggtatgtacggtctgattttggtcgagcctaaagaaggtctgccgaaagtggataaagagttctacatcgtccaaggcgacttctacaccaaaggcaaaaaaggcgcgcaaggtctgcaaccgttcgatatggacaaagccgttgccgaacagcctgaatacgtcgtattcaacggtcatgtaggttctatcgccggcgataacgcgctgaaagccaaagcaggcgaaaccgtgcgtatgtacgtcggtaacggcggcccgaacctggtgtcttccttccacgtcatcggcgaaatcttcgacaaagtttatgttgaaggcggcaaactgattaacgaaaacgtacaaagcaccatcgttcctgccggcggctctgccatcgtcgaattcaaagtcgacatcccgggcagctacactttggttgaccactctatcttccgcgcattcaacaaaggcgcactgggtcaattgaaagtagagggtgcggaaaaccctgaaatcatgactcaaaaattgagtgataccgcttacgccggtaacggtgcagctcctgctgcttccgctcccgcagcttctgctcctgcagcctctgcatccgaaaaaagcgtttattaa

SEQ ID NO: 62967 - DNA, 729 bp, Neisseria meningitidis
atgtctcaaattactatgcgtcagatgattgaagccggtgtccacttcggccaccaaacccgtttctggaacccgaaaatggcacaatacattttcggcgcacgcaacaaaatccatatcgtaaacttggaaaaaaccctgccgatgttccaagacgcgcaagaagccgtacgccgtttggttgccaacaaaggtacagtattgttcgtaggtaccaaacgccaagcccgcgacatcatccgcgaagaagcgacccgcgccggtatgcctttcgtcgattaccgctggttgggcggtatgctgaccaactacaaaaccgttaagcaatccatcaaacgcctggaagaaaaaaccgcagccttggaaaatgctgccgaaagcggtttcagcaaaaaagaaattctggaaatgcaacgcgatgttgaaaaactggaacgttctttgggcggtatcaaaaacatgaaaggcctgcctgacgcgattttcgttatcgataccggctaccaaaaaggtactctggttgaagctgaaaaattgggcatccctgttatcgccgtagtcgataccaacaacagccccgacggcgtgaaatacgttatccccggcaacgacgactccgccaaagccatccgcctgtactgccgcggcatcgctgacgcagttttggaaggcaaaaaccaagcgctgcaagaaaccgtagccgctgcccaagaagccgctgccgagtaa

SEQ ID NO: 62968 - DNA, 687 bp, Neisseria meningitidis; identical to SEQ ID NO: 54972

SEQ ID NO: 62969 - DNA, 291 bp, Neisseria meningitidis; identical to SEQ ID NO: 44816

SEQ ID NO: 62970 - DNA, 828 bp, Neisseria meningitidis
atgcaaaaccacgttatcagcttagcttccgccgcagaacgcagggcgcacattaccgataccttcggcgtgcgcggcatcccgtttcagtttttcgacgcactgatgccgtctgaaaggctggaacaggcaatggcggaactcgtacccggtttgtcggcgcacccctatttgagcggagtggaaaaagcctgctttatgagccacgccgtattgtggaaacaggcattggacgaaggtctgccgtatatcgccgtatttgaggacgacgttttactcggcgaaggcgcggagaaattccttgccgaagacgcttggctaaaagaacgctttgaccccgattccgcctttatcgtccgcttggaaacgatgtttatgcacgtcctgacctcgccctccggtgtggcggactactgcgggcgtgcctttccgctgttggaaagcgaacactgggggacggcgggctatatcatttccaaaaaagcgatacggtttttcctgcaacatttcgtaatgttgcagccggaacagataaaacctatcgacttaatgatgttcagtgattttttcgataaggaggggatgcctgtttatcaggtcagtccggccttatgcgcccaagagctgcattatgccaagtttcacgaccaaaacagcgcattgggcagcctgatcgaacacgaccgcctcctgaaccgcaaacagcaatggcgcgattcccccgccaacacattcaaacgccgcctgatccgcgccttgaccaaaatcagcagggaaagggaaaaacgccggcaaaggcgcgaacagttcattgtgcctttccaataa

SEQ ID NO: 62971 - DNA, 2214 bp, Neisseria meningitidis
atgaccgccatcagcccgattcaagacacgcaaagcgcgactctgcaagaattgcgcgaatggttcgacagctactgcgccgcgctgccggacaacgataaaaaacttgtcttagccgcccgttcgctggcggaagcacattaccccgccgatgccgtcacgccgtatggcgagccgttgtccgaccacttcctcggcgcggcacaaatggtcgacgaactcgacctgctgcccgatgccgtcgccgccaccctgcttgccgacatcggacgctacgtccccgattggaatctattggtttccgaacgctgcaacagcaccgtcgccgagctggtcaaaggtgtggacgaagtgcagaaactcacccacttcgcccgggtggacagcctcgccacgccagaagaacgcgcccagcaggcagaaactatgcggaaaatgctgctggcgatggttaccgacatccgcgtcgtgttaatcaaactggcgatgcgtacgcgcaccctgcaattcttaagcaacgttcccgacaatcctgaaaagcgcgccgttgctaaagaaaccctcgacatttttgccccactcgccaaccgcttgggcgtgtggcaactcaaatggcagctcgaagatttgggcttccgtcatcaagagccggaaaaataccgcgaaatcgccctgcttttggacgaaaaacgcaccgagcgcctcgaatacatcgaaaacttcctcaatatcctgcgtacggaactcaaaaaatacaatatccactttgaagtcgccggccgcccgaaacacatctactccatttacaaaaaaatggtgaagaaaaaactcagcttcgacggcctctttgacatccgcgccgtgcggattctggttgataccgtccccgagtgttacaccacgctgggcattgtccacagcctttggcagcctatccccggcgagttcgacgactacatcgccaacccgaaaggcaacggctataaaagtttgcacaccgtcatcgtcggtcccgaagacaaaggtgtggaagtgcaaatccgcaccttcgatatgcaccaattcaacgaattcggtgtcgccgcccactggcgttacaaagaaggcggcaaaggcgattccgcctacgagcaaaaaatcgcctggttgcgccaacttttggactggcgcgaaaatatggcggaaagcggcaaggaagacctcgccgccgccttcaaaaccgagcttttcaacgacacgatttatgtcctgaccccgcacggcaaagtcctctccctgcccacgggcgcgacccccatcgacttcgcctacgccctgcacagcagcatcggcgaccgttgccgcggtgcgaaagtcgaagggcagattgtgccgctgtccaccccgctcgaaaacggacagcgcgtcgaaatcattaccgccaaagaagggcatccttccgtcaactggctttacgaaggctgggtcaaatccaacaaggcaatcggcaaaatccgcgcctacatccgccagcaaaacgccgacaccgtgcgcgaagaaggccgcgtccaactcgacaaacagcttgccaaactcacgcccaaacccaacctgcaagagcttgccgaaaatctcggctacaaaaagccagaagacctctacaccgccgtcggacaaggcgaaatttccaaccgcgccatccaaaaagcctgcggcacgctgaacgaaccgccgcccgtacccgtcagcgaaaccaccatcgtcaaacagtccaaaatcaaaaaaggcggcaaaaacggcgtgctcatcgacggcgaagacggtctgatgaccacgcttgccaaatgctgcaaacccgcgccgcccgacgacattgtcggcttcgttacccgcgatcgcggcatttcggtacaccgcaaaacctgcccctctttccgacacctcgccgaacacgcgcccgaaaaagtgctggacgcaagctgggcggcgttgcaggaaggacaagtgttcgccgtcgatatcgaaatccgcgcccaagaccgctccgggcttttgcgcgacgtatccgacgcactcgcccgccacaaactcaacgttaccgccgtgcaaacccagtcccgcgacttggaagccagcatgaggttcacgctcgaagtcaaacaagtcaacgacctcccgcgcgtcctcgccagcctcggcgacgtcaaaggcgtattgagcgttacccggctttaa

SEQ ID NO: 62972 - DNA, 519 bp, Neisseria meningitidis
atgactacgcattttgtcgttatgggcgtatgcggctgcggcaagaccaccgccgcgctgtccctgcagaaacacctcggtcaatgtccccatgccgaaggcgacgagttccacacccaagccaaccgcgacaagatgggcgcgggtattccgctgaccgatgaagaccgctatccgtggttgggcaatctgcgcgactggatgacgcaacaggcgcaaaacggtgcgaaccacaccatcgtaacctgttccgccctcaaacgcggctaccgcgacattctgcgcggagccgaaggcaaagctgccttcatccacctcagtccgccgcaagacatcaacctcgagcgcatgatgtcgcgcaaaggacattacatgaaagcagggatgctcgattcgcaactggaaatcctcgaggaactgggcgaaggcgaatacggggtcaaaatcgccaaccccggcacgcccgaagcggtcgaagccgatattctgaactgggttgcctcggaaaacctgctttga

SEQ ID NO: 62973 - DNA, 729 bp, Neisseria meningitidis
atgatcaaattcaaaaacgtacacaaacatttcaaagacctgcacgtcatcaacggcgtgaacttggaaatcaaaaaaggcgaagtggtcgtcgtctgcggaccttcgggcagcggcaaatccacactcatccgcaccgtcaaccagcttgaaagcatcgaaagcggcgagatttgggtggacggtgtcaacgttgccgaccccaaaaccgatttgaacaaaatccgcgaagaagtcggcttcgtattccaaggcttcaacctctacccccacctgaccgtattggaaaacatcaccctcgcaccgatgaaggttaaaggtcaaaatgcggaacaggcggagaaaaaagcgatggaacttttggaacgcgtcggactggcacacaaaaaagacgccttcccttcccaactttccggcggccagcagcaacgcgtggcgattgcacgcggtttggcgatggaaccgcgcgtaatgttgtttgacgaaccgacctccgcactcgaccccgaaatggtcggcgaagtgttgaaagtgatgaaagacttggcagaaagcggcatgacgatgatgtgcgtaacccacgaaatggggtttgcccgcgaagttgccgaccgcgtgattttcgtcgataaagggcaaatcctcgaagacgaaacgccggaagcgttttttaccaacccgaaacacgaacgcgccaaacaattcctgcaacaggtcatgacccattga

SEQ ID NO: 62974 - DNA, 1239 bp, Neisseria meningitidis
atggttttttatgcttctaaggcgatgcgtgccgccgcgttggctgcctctgtcgcgttggcactgtcatcttgcggcaaagcagatgaagcggcacagggcgggcagcctgcgggtcgggaagctccggctcccgtcgtcggcgttgttaccgtccatccgcaaaccgttgcgttgaccgtcgagttgccgggacgtttggaatcgctgcgtaccgccgatgtccgtgcgcaagttggcggcattatccaaaaacgcctgttccaagaaggcagctatgtccgtgccggacagccgctgtatcagatcgacagttccacttatgaagcaagtctggaaagcgcgcgcgcgcaactggcaacggcacaggcaacgcttgccaaagcggatgccgacttggcgcgttacaaaccgctggttgccgccgatgccatcagtaaacaagagtacgatgctgcggtaacggcgaaacgttctgccgaggcaggcgtcaaagcggcacaggcggcaatcaaatccgccggcatcagtctaaaccgttcgcgcattaccgcaccgatttcgggctttatcggccagtccaaagtttccgaaggtacgttgctgaacgccggcgatgcgaccgtactggcgaccatccgccaaactaatccgatgtatgtgaacgttacccagtctgcatccgaagtaatgaaactgcgccggcagatagccgaaggcaagctgctggcggcagacggtgcggtagcggtcggcatcaaatttgacgacggtacggtttaccctgaaaaaggccgcctgctgtttgctgatccgaccgtcaacgaatcgaccggtcagattaccctgcgcgccgccgtaccgaacgatcagaatatcctgatgcccggcctgtatgtgcgcgtgctgatggatcaagtggcggtggataatgcattcatcgttccgcagcaggcggtaacgcgcggtacgaaagataccgtgataattgtgaacgcccaaggcggtatggaaccccgcgaggtaacggttgcacaacagcagggtgcgaattggattgttacgtcaggtctgaaggacggggacaaggtggttgtggaaggaatcagtatcgccggcatgacgggtgcgaaaaaagtaacgcctaaagaatggatgccgtctgaaaaccaagcctctgctcctcaagtcggcgttcagacggcatctgaagccaaacctgcttctgaagcgaaataa

SEQ ID NO: 62975 - DNA, 867 bp, Neisseria meningitidis
atgaaagcaaaaatcctgacttccgttgcactgcttgcctgttccggcagcctgtttgcccaaacgctggcaaccgtcaacggtcagaaaatcgacagttccgtcatcgatgcgcaggttgccgcattccgtgcggaaaacagccgtgccgaagacacgccgcaactgcgccaatccctgctggaaaacgaagtggtcaacaccgtggtcgcacaggaagtgaaacgcctgaaactcgaccggtcggcagagtttaaaaatgcgcttgccaaattgcgtgccgaagcgaaaaagtcgggcgacgacaagaaaccgtccttcaaaaccgtttggcaggcggtaaaatatggcttgaacggcgaggcatacgcattgcatatcgccaaaacccaaccggtttccgagcaggaagtaaaagccgcatatgacaatatcagcggtttttacaaaggtacgcaggaagtccagttgggcgaaatcctgaccgacaaggaagaaaatgcaaaaaaagcggttgccgacttgaaggcgaaaaaaggtttcgatgccgtcttgaaacaatattccctcaacgaccgtaccaaacagaccggtgcgccggtcggatatgtgccgctgaaagatttggaacagggtgttccgccgctttatcaggcaattaaggacttgaaaaaaggcgaatttacggcaacgccgctgaaaaacggcgatttctacggcgtttattatgtcaacgacagccgcgaggtaaaagtgccttcttttgatgaaatgaaaggacagattgccggcaaccttcaggcggaacggattgaccgtgccgtcggtgcactgttgggcaaggcaaacatcaaacctgcaaaataa

SEQ ID NO: 62976 - DNA, 825 bp, Neisseria meningitidis; identical to SEQ ID NO: 44232

SEQ ID NO: 62977 - DNA, 627 bp, Neisseria meningitidis
atgaggaaaatccgcaccaaaatctgcggcatcaccacaccggaagacgcattggccgccgcagcggcaggtgcagatgccgtcgggctggtctttttccaaggcagcagccgggccgtcgatattgcccgcgccaaaaaaatcaccgccgcactgccgccgtttgtcagcgttgtcgcccttttcgtcaacgaaagcgcgcaaaacatccgccgcatccttgccgaagtgccgatacacatcatccaattccacggcgacgaagacgacgcattctgccgccagttccaccgcccctatattaaagccattcgtgttcagacggcatcagacatccaaaacgccgcccaccgcttccccgacgctcaggcactgctgttcgatgcctatcacccttcggaatacggcggcaccggacaccgcttcgactggacgctgttggcggaatattcgggcaaaccgtgggtgcttgccggcgggctgacccctgaaaacgtcggcgaagccgtccgcattaccggagcggaatcggtcgacgtatccggcggcgtggaagcgtctaaaggcaaaaaagaccccgccaaagttgccgcctttatctcaaccgccaaccgcctatcccgttaa

SEQ ID NO: 62978 - DNA, 2397 bp, Neisseria meningitidis
atgattaaaaagattttaacgacttgttttggtttggtttttgggttttgtgtatttggagtgggtttggttgccattgctattttggtaacgtatccgaaactgccgtctttggattctttgcagcattaccagcctaaaatgccgttgactatttattcggcggatggggaagtcatcggtatgtatggggagcagcggcgcgaatttacaaaaatcggcgatttcccagaggtgttgcggaatgcggttatcgccgccgaggacaaacgcttttaccggcattggggggtggatgtttggggtgttgcccgcgctgccgtcggcaatgtcgtgtccggcagcgtgcagtcgggtgcgagtacgattacgcagcaggtggcgaaaaatttttatttgagcagtgaaaaaacgttcacacgcaaattcaatgaggtgttgcttgcctataaaatcgagcagtctttaagcaaagacaaaatcctcgagttgtatttcaatcagatttacctcggtcagcgcgcctatggttttgcatctgccgcgcaaatctatttcaataagaatgtccgagatttgactttggcggaagccgccatgcttgcgggactgcccaaggctccgtctgcctataatccgattgttaatccagaacgtgccaagttgcgccagaagtatattttgaacaatatgctcgaggagaagatgattaccgtgcaacagcgcgatcaggcgttgaatgaggaactgcattacgagcggtttgttcggaaaatcgatcagagtgctttatatgtggcggaaatggtgcgtcaggaactgtatgagaaatacggtgaagatgcctatacgcagggttttaaggtttataccacggtccgcgccgatcatcagaaggtggcaaccgaggcattgcgcaaggctctacggaatttcgatcgcggcagcagctaccgcggtgcggaaaactatatcgatttgagtaagagtgaagatgtcgaggagactgtcagccagtatctgtcgggactctataccgtcgataaaatggttcccgccgttgtgttggatgtgactaaaaagaaaaatgtcgtcatacagctgcccggcggcaggcgggttacgcttgataggcgcgccttgggctttgcggcccgcgcggtcaataatgaaaaaatgggggaggaccgtatccgcaggggcgcggtcatccgtgtcaaaaacaacggcgggcgttgggcggtggttcaagagccgttgctgcagggggctttggtttcgctggatgcaaaaaccggagctgtgcgcgcgctggtcggcggttatgattttcacagcaaaacattcaatcgtgccgttcaggcaatgcggcagccgggttcgacctttaagccgtttgtctattcggcggcattatctaaggggatgaccgcgtccacagtggttaacgatgcgccgatttccctgccggggaaagggccgaacggttcggtttggacacctaaaaattcagacggcagatattccggctacattactttgagacaggctctgacggcttccaagaatatggtttccatccgtattttgatgtctatcggtgtcggttacgcgcaacagtatatccggcgtttcggcttcaggtcgtccgagctgccggcaagcctgtctatggctttaggtacgggcgagacaacgccgttgaaagtggcggaggcatatagcgtatttgcgaacggcggatatagggtttcttcgcacgtaatcgataagatttatgacagagacggcaggttgcgcgcccaaatgcaacctttggtggccgggcaaaatgcgcctcaggcaatcgatccgcgcaatgcctatattatgtataagattatgcaggatgtggtccgtgtcggtacggcaaggggggcagctgcgttgggaagaacggatattgccggtaaaacgggtacgaccaatgacaataaggatgcgtggtttgtcggttttaaccctgatgtggttactgccgtatatatcggcttcgacaaacctaagagtatggggcgtgtcggctacggcggtacgattgcggtgccggtttgggtggactatatgcgttttgcgttgaaaggaaagcagggcaaggggatgaaaatgcctgaaggtgtggtcagcagcaatggcgaatactatatgaaggaacgtatggtaaccgatccgggcttgacgctggacaacagcggtattgcgccgcaaccttcccgacgggcaaaagaagatgacgggggcgcggcagaaggcggacggcaggcggcggatgacgaagtccgccaagatatgcaggaaacgccggtgcttccgagtaatactggttccaaacagcagcagttggattctctgttttaa

SEQ ID NO: 62979 - DNA, 1026 bp, Neisseria meningitidis
atggattatcagggtaagaaagaccgattggaagaagttgtcggtctttccgaagaccccgaactttggaacgacccgaaacgcgcccaagaaatcggcaaagagcgcaaaatcctcgaaggcatcgtgttgacgctcgacaacatcgcttcgggcatcgaagacaaccgcatgctgattgaaatgaccgtcgaagaaaacgacgaagaaggttttgccgccgtgcaggaagatgtggcggggctggaaaaacagatggcggatttggagttcaaacggatgttcaaccagcccgccgatccgaacaactgctttatcgacattaccgcaggcgcaggcggtacggaagcggaagactgggcgggtatgctgttccgtatgtacagccgctacgccgagcgcaaaggcttcaaaatcgaaatcctcgaagaagacgacggcgaaatcgcgggcatcaaccgcgcgactatccgagtggaaggcgaatatgcctatggtttgctgcgtaccgaaaccggcgttcaccgcttggtgcgctattcaccgtttgactcgaacaacaaacgccatacttcgtttgcctccgtgttcgtttaccctgaaatcgatgattccattgaaatcgaaatcaaccccgccgatttgcgtatcgacacctatcgcgcatcgggcgcgggcggtcagcacatcaataaaaccgactccgccgtgcgtattacccacgagccgacggggattgtggtgcaatgtcaaaacgaccgttcgcaacacgccaacaaagcggccgcgatggaaatgttgaaatccaaactgtatgaattggaaatgcgcaaacgcaacgaagagaaacaggcgttggaagaaggtaaatccgatgtaggttggggcagccaaatccgttcgtatgttttggattcctcacgtatcaaagacttgcgtacaggctacgaagtcggcaacaccaaagccgtattggatggcgatttggacggctttatcgaagccagcctgaaacagggcgtgtag

SEQ ID NO: 62980 - DNA, 777 bp, Neisseria meningitidis
atgaccctcatccacccgaccgccgtcatcgaccccaaagccgaactcgactccagcgtcaaagtcggcgcgtacaccgtcatcggccccaacgtccaaatcggcgcgaataccgaaatcggcccgcacgccgtcatcaacggccacaccagcatcggcgaaaacaaccgcattttccaatttgccagcctcggcgaaatcccgcaggacaaaaaataccgcgacgagccgaccaagctgattatcggcaacggcaacaccatccgcgaattcaccacctttaatttaggcacggtaaccggcatcggcgaaacccgtatcggcgacgacaactggattatggcgtactgccacctcgcgcacgactgcgtggtcggcaaccacaccatcttcgccaacaacgcctcgcttgccggacacgttaccatcggcgactacgtcgttttgggcggctacacgctggttttccaattctgccacatcggcgactacgccatgaccgcgtttgccgcaggcgtacacaaagacgtaccgccctactttatggcatcgggctaccgcgccgaaccggcggggctcaacagcgaaggcatgcgccgcaacggttttaccgcagaacagatttccgccgtcaaaaacgtgtacaaaaccctctaccatcgcggcattccgtttgaagaggccaaggcagacatcctccgccgcgccgaaacccaagccgagcttgccgtattccgagactttttcgcacaatcgacgcgcggcatcatccgctga

SEQ ID NO: 62981 - DNA, 861 bp, Neisseria meningitidis
atgtctgatttgtctgtattgtcgccgtttgccgtgcctttggcagcggtgttcgggctgctggtcggaagtttcttaaacgtcgtcatttaccgcgtgccggtcatgatggaacgcggctggacggtatttgccaaagaatatttaaacctgccgctgaccgaagaggaaagccgtaccttcaacctgatgaagccggattcctgctgtcccaaatgtcgcgtgccgatacgcgcgtggcagaacatcccgattgtcagctacctgctcctgcgcggcaaatgcgcttcctgccaaaccaaaatcagcatacgttatcccttaatcgagctgctgaccggcgtattgttcgggctggttgcctggcaatacggctggtcttggattacattgggcggtttgatactgaccgcgtttctgatttccctgacctttatcgatgcggacacccaatacctgcccgactcgatgaccttacccttgatttggctggggctgatatttaatttggacggcggcttcgtgcctttgcagtctgccgttttaggtgcggttgccggctatggttcgatatggctcttatgtgcagtgtataaactgctcacaagaaaaaccggtatgggcaacggagatttcaaactgattgccgcattgggcgcgtggctcggcatatccgcattgcccgtgctgatttttgtttcctcgctgatcggtttggtcgcggcaatcgttatgcgcgtcgccaaggggcagcattttgccttcggccccgcactgacagtttcgggctggataatttttacggcaaacgattccgtatggcgggcggtcaactggtggctgacccatccggtgctgtaa

SEQ ID NO: 62982 - DNA, 720 bp, Neisseria meningitidis
atgctgaccacaccgccgctcgcccccaaaaccgtcgccgccctgcacaggctcggtatccgtacactcgaagaactgcggcaaaacggttcggtcaaagcctttctgctgctcaaagcatcgggtttgaccctcacgaaaagcacactgtggcaactcgagtcgctgctgaacggcacgccgccgcaagaaatgtcccaagcgcataaagcccgcctgcttgccgagttaaaaaaccatccgcccgtcgccgcctttccgccgcaggaagaaatggaacacttcatgtgcgaagcactgcgccaagcagaacaatcctccgccgacggcgaaatacccgtcggggcagtcatcgtttcagacggcaaaatcatcgcatcggcacacaacacctgcattgccgactgcaatgtcagccgacacgccgaaatcaacgccttggcacaggcaggcagagaaatacaaaactaccgccttgacggatgcgacatatatatcaccctcgaaccctgcgccatgtgcgcgtccgcactgatacaggcacgaatcaggcgtgtgatatatggtgcggcagaacccaaaaccggagcggcaggcagcattgtcaacctgtttgccgacaaacgcctcaatacgcacaccgccatacggggcggaatcctgcaagaagaatgccgcgccgtattaagccgttttttccaaaacaaaagaaaaggttga

SEQ ID NO: 62983 - DNA, 975 bp, Neisseria meningitidis
atggttgttgcagagaatgtgaagcgcgagggtaaaagctgtgccgatagtgattcaggcagcgctcatgtgaaatctgttccttttggtactactcatgcacctgtttgtcgttcaaatatcttttctttttctttattgggcttttctttatgtttggctgtaggtacggccaatattgcttttgctgatggcattattgctgataaagctgctcctaaaactcaacaagccacgattctgcaaacaggtaacggcataccgcaagtcaatattcaaacccctacttcggcaggggtttctgttaatcaatacgcccagtttgatgtgggtaatcgcggggcgattttaaacaacagccgcagcaacacccaaacacagctaggcggttggattcaaggtaatccttggttggcaaggggcgaagcacgtgtggttgtaaaccaaatcaacagcagccattcttcacaaatgaatggctatattgaagtgggcggacgacgtgcagaagtcgttattgccaatccggcagggattgcagtcaatggtggtggttttatcaatgcttcccgtgccactttgacgacaggccaaccgcaatatcaagcaggagaccttagcggctttaagataaggcaaggcaatgttgcgatcacgggacaaggtttggatgcccgtgataccgatttcacgcagatattgagccatgcggttaagattgatgggcctgtgtggggtaaagatgtgcgtgtgtcggcagggaaaaataatgtctcagctgatggctctatccggtcttcacactcccctgctacgaatataaattccgacaactcactgtatgccatcgatacaggggcattgggcggagacctttgcaaaattcctttccctcccgacagccgaaacccaaacacaggttttcggctgttttcgccccaaatatctcctaattttacccaaatacccccttaa

SEQ ID NO: 62984 - DNA, 258 bp, Neisseria meningitidis
atggcttcaagcaacgtaaacaacgaaatcaaagacaaaaaactctccctgtgggccaagcgtcaagccggttcggtaaaatggttctgcggacagccggttacgcgcaacgacaccgccaccgccaccgacgtcgccgccgccaacggcaagaccgacgacaaaatcaacaccaagcacctgccgtcaacctgccgcgatgattcatctaccggttgcatagaaacaccacctacggctttctataaaaatacctaa

SEQ ID NO: 62985 - DNA, 639 bp, Neisseria meningitidis
atgcaaaccgccattatcgattacggtatgggcaacctgcattccgtattgaaatccgtccggacggcggggcagcttgccggaaaaaataccgaaatctttttaagcggcgaccccgaccgcgtgtcccgcgccgacaaagtcatttttcccggtcagggcgcgatgcccgactgtatggcggcattaaaacgagacggtttggacgaggcagtcaaagatgccttaaaaaacaaaccgtttttcggaatctgcgtcggcgcgcaacttttattcgaccacagcgaagaaggaaacaccgacggcttgggctggttcggcggcaaagtcagacgctttgagcgcgacctcctcgacccgcagggatgccgtctgaaagtcccgcatatgggctggaacaccgtgcgccaaacccaaaaccacccgctttttcaaggcatcccccaagacacgcgtttttacttcgtccacagctactatttcgaccccgaaaatcccgaaaccatattgggcgaaagcgactacccgtccccgtttgcctgcatcgtcggcaaagacaacgtattcgccacgcaatttcacaccgaaaaaagccacgatgccgggctgacgatgttgaaaaactttttaaactggtaa

SEQ ID NO: 62986 - DNA, 441 bp, Neisseria meningitidis; identical to SEQ ID NO: 61701

SEQ ID NO: 62987 - DNA, 423 bp, Neisseria meningitidis
atgcgcccaatcttcctatctttcgttttactccctattttgataaccgcctgcagcacaccggacaagtctgcccgatgggaaaatatcggcacaatctcaaacggcaatattcatacatatatcaataaagacagcgtgagaaaaaacggaaatctgatgattttccaagataaaaaagttgttaccaatctaaaacaagaacgttttgccaacacccccgcatacaagactgccattgccgagtgggaaatccactgcaacaacaaaacataccgcttaagttcgctacagttgtttgatacaaaaaacacggaaatttccacacaaaactacacagcctcttccctccgcccgatgagcatcctgtccgggacattaaccgaaaaacaatatgaaaccgtatgcgggaaaaaactctga

SEQ ID NO: 62988 - DNA, 525 bp, Neisseria meningitidis
atgaacaatctgattcccgaacatttagccgcctatgcacatagtgacagcctgcaaattgaaggcgtgcatcgttgcttttcattatcctgccaaggtagagatactttccacatccgttactatggagagccttttgatggattgatgaccgatactgataaggctccggtaaaaattgtggcagtagaagctgtaagcggcgatgaaatcgtattgtttgatggcgcggaacatggctataacgctatgttttgcgacaaatatagtccaaatcaaaagcaaaacagaacgttaactgatttggatgagtatacttaccgagttctgatccatctttattacaatatagactatgaagatgaatatgaagatttcgtcaattctgaaggacaagtccccttaattgatggtcgaatcattagttttgactcattaaaacgaaatggctttgatgcaatcagcgttgatctaattgatgaaaaacactctgttcgtgaattattgaatgaagaattaagctga

SEQ ID NO: 62989 - DNA, 1152 bp, Neisseria meningitidis
atgagtaatagagaccaactttttaaagccccgccgtttgaaaaccacagcccgctgacctggtatcaggctgcctcacaactgcccaacttcatccgcgacgacgcgcaggcagccgccatcgaacacctcgatcggctttggaccgaattgatgatgttcaaacgcaaaagaaaccgttttttaggcaggagtttgcgttccccgcaagtccccaaagggctttatttctatggcggggtcggacgcggcaaaagctttctgatggacgcttttttcggctgcctcccttaccgccgcaaacgccgcgtccactttcatgcatttatggcagaaatccaccagaggctgaaaaccctgaaaagcgaaagcaacccgttgaaatccgttgccgccgagattgccaaagaaacccgcgtattgtgttttgacgaatttcatgtcagcgatattgcggatgcaatgattttaggccgtctgctggaaaacctgcttaacgagggcgttgttttggtggcgacttcaaactacgcgccttccgaactctacccgcaaggtcaaaaccggagcagttttcttcccacaatcgcgctcatcgagtccagcctgaccgtcttaaacgttgacggcggtgaagactaccgactgcgtaccctccgccccgccgagattttctttacgcctgccaatgaagaaaatgaggcaaaactggcaaaactgttcaaagaaatgacaggcattaccgatttgaaccccggcatcagcaccatccacggtcgggagattccccacaaagccgagtccggccgtgccatatggtttgatttccgcgcactgtgcttcggtccccgctcacagtccgactatctgtatttggccgaacattatgaaatggtttttatttcaggtttggaacaactctcaccgcaagaaaaggcggaggcgcggcggctgacttggctgattgacgtactctacgatttccgggtcaaactgtgtgccaccggcgcggtagatgtcaaccatatctatacggaaggcgattttgccgaagaatttacccgcaccgccagccggatggtcgaaatgcagtccgaagtttatttggaacagccgcacctgaccctatctcccaaggcttcaggcggataa

SEQ ID NO: 62990 - DNA, 114 bp, Neisseria meningitidis; identical to SEQ ID NO: 43789

SEQ ID NO: 62991 - DNA, 1518 bp, Neisseria meningitidis
atggtgatttccaacccccgcgaacttgaaaaactcaaagaccggattcccaatctgatcaacatcatccgcgtcgccatcgtttttccgctgatgattatgcacatcctcgggctggaaaccggcagccgtgcgaacctgcacgcttcgtggacggcgtgggcgttttatgtttggctcgccattgcctgctggctgattttcttttccatcatccatccgcattggcaatggcaggctttgagaataccgagtttcagcgcggtggcggacatcacgatgatcggcgtgctgacctacctgttcggcggcatcgactccggcttcggcatcctgattctgcccttcgtcgtctgctcctgcctgctcagctacgggcgctaccccctgctctattccagctacgccgccatcctgctgatattcaacgccattgccgacggcgatatcggcaaatacccgctcatatcggatgcccgaaccgcctcggcaaccttcatccttgtcgccgcctcctatctttccgccatcttcacctcgctgtcggtcagatacatcgaccgtgccggcaaacttgcccatgaaaaccacgccgcctaccgccgcatcaggggcttgaaccaaaccgtactcaaccgcgttcaggaagcggtcgtcgtcatcaacgtcgagcatcagaccatactgttcaataaaaaggcaaaagacctgctacccatgcttgaaatcggacagcataccgccctgttcgaccctattaccgttttatgggacaaggcctcttcgcgtactttcgaacgcaatatcgacacgcccggcctgaacgccggcatccgcgccgttccggtcaacaaagggccggacaagctgctcatcctctacatccgcccgcaaagcgaaattcaggcagaagccctgtccgtcaaacttgccgcgctcggacaactgaccgccaacctcgcccacgaaatccgcaacccgatgtccgccatccgccacgccaacgacctgctgcgcgaaaatatggaagcgggggcggcagatccgttcaacgccaaattgtgcaaaatcatcgacggcaacgtctgccgtatcgacaaaatgctcgaagatatttcctcgctcaacaagcgcaacaaaaccgaacgcgaaaccatcggcctgataccgttttgggaagaattcaaacaagagttcctgctcggccatcccgatgccgccggctgcatccgcctagatatgcagggcaatcacctgactgcctatttcgatcctgcccacctgcggcaaattatgtggaacctcgccaacaacgcgtggcggcacagccgcaaacagcccggctcgatttccgtcaccatccgccccgcgcaaaaaaacaccgtctgcatcctctttgccgaccgcccgaagtgcaggaacacctgttcgaacccttttacaccacggcggaaaacggcaccggcctcgggctgtatgtcgcccgcgaactggcacatgccaacttcggcgatttga

SEQ ID NO: 62992 - DNA, 648 bp, Neisseria meningitidis; identical to SEQ ID NO: 37692

SEQ ID NO: 62993 - DNA, 1140 bp, Neisseria meningitidis
atgaaaaaaacactggtggcggcggcaatcctgagcctcgccttgactgcgtgcggcggcggaagcgataccgccgcccaagccccctccgccaagcccgaagccgaacaatcgggcaaactcaacatctacaactggtcggattatgtcgatcccgaaaccgtcgccgcctttgaaaaagaaaccggcatcaagacgcgttccgattattacgacagcaacgaaacactggaggcaaaagtcctgaccggcaaatccggctacgacctgaccgcgccgtccatcgccaacgtcggccggcaaatcaaagcgggcgcgtatcagaaaatcgacaaggcgcaaatcccccattacggcaacatcgataaagatttgctgaaaatgatggaagccgtcgatccgggcaacgaatacgccgtcccctatttctggggcatcaacaccttggcaatcaacacgcagcaggtgaaaaaggcattgggtacggacaagctgcccgaaaacgaatgggatttggtgttcaaacccgaatacaccgccaagctcaaatcctgcggcattagctatttcgacagcgcaatcgaacagattcccttggcgttgcactatttgggcaaagaccccaacagtgagaatcccgaagacatcaaagccgccgtcgatatgatgaaagccgtccggggcgacgtgaaacgcttcagctcttccggctatatcgacgatatggcggcgggcaacctgtgtgccgccatcggttacggcggcgatttgaacattgccaaaacccgtgccgaagaagcggcaaacggcgtggaaatcaaagtattgaccccgaaaaccggcgtgggcgtgtgggtggattcctttatgattccgcgcgacgcgcaaaacgttgccaatgcccaccgctatatcgactacacgctccggcccgaggtggcggcgaaaaacggcagcttcgttacctacgcgcccgccagccgtcccgcgcgcgagctgatggatgaaaaatacacctccgacgcatcgattttcccgaacaaagaactgatggaaaaaagtttcatcgtatcgcccaaatccgcagaatccgccaaactgggcgtgaagctgtggcaagggctcaaagcgggcaaataa

SEQ ID NO: 62994 - DNA, 780 bp, Neisseria meningitidis; identical to SEQ ID NO: 44868

SEQ ID NO: 62995 - DNA, 2157 bp, Neisseria meningitidis
atgcctgtccctcaacccaccgcaccttacgaccatttaactgccgaagcacgcaccttgcttttccgtaccgcttcctatctcaagcctgaagaacaggttgagctcgagaaggccgttgcctatgcatttcacgctcatgacggacaaacccggaaaagtggcgaaccatacattacgcatccaattgccgttgcgacgcagctcgccctttggcatatggacatacagggtctgtgtgcaggcgtgatgcacgacgtattggaagatacgggcgtgacaaaaggggaaatggcggcggtgttcggcaatacgattgccgagatggtggacggtttgtccaaactcgaaaaactcaaatttgaagatcatgcggaacatcaggcggagagtttccgcaaactgattttggcgatgaccaaagatgtgcgcgtcatcgtcgtcaaacttgccgaccgcctgcacaatatgcggacgctcggttcgatgcgcccggacaaacgccgccggattgcaagggaaacccttgaaatctatgcacagattgccaaccgtataggtttgaataacgcatatcaagagcttcaggatttatcgttccaaaacctgcatcccaaccgctacgagactttaaaaaaagcgatggacaagagccggaagaaccggcaggacgttgtcggcaaagtcttgcgcgcattcggccagcggctggtaggcgcgaatatagaggccaaaatcaaaggcagggaaaaaaacctgtacggcatccatcagaaaatgatggcgaaaaagctgcgctttgccgaggttatggatatttacggtttccgcgtcattgtcaacagcattccagcctgttatgccgcactcggcgcattgcacaccctctatcagcccaagcccgggcggttcaaagactatatcgccattccgaaaagcaacgggtatcaaagtctgcatacgactttggtcggcccttacggcttgccgattgaagttcagatacgtaccaaggaaatggatgctgttgccgaaggtggaatcgccggacattggagctataaatcatattctaagatggtcgatcaggcggtgcttcacacaaaccggtggctgaaaaatatcttagatttgcaggcaagcagtgccaatgccattgagtttctcgaacacgtcaaagtcgatttgtttccgaacgaaatctacatccttacgccaaaaggaaaaatcctaactttgcccaaaggggcaacgcctgtcgattttgcttatgcggtgcataccgatatcgggcacaaaaccgttgccgcacgtatcaacaatatcatgatgccgttgcgtacgaagctcaaaaccggcgattccgtcgaaattattacatccgaacatgccaaacccaatcctgcatggttgaatttcgccgtgtcaggcagggcgcgcagtgccatacgccaatatattaaaaaccttaaccggcacgatgcggtcgttttgggagagagcctcttacaaaaagccctgtccagtttgctgcccaaagatgtcctgctttcagacggcattaaagaaaaataccttgccgatctcaacgacaaacagacttcatttgaggaagtgctgtacaacgtcggtatggggcataccctgcctgtttatgtcgccatgcacattgccgagttggcaggggagcatttcggcagcgaggtcaggctcagttccattaaagttgatggtcaggaaagcgggcatattcattttgcagagtgctgccatccggttcccggcgattccatccgtttgctgttggttaagggaaaaggcatgattatccatagggatacctgcccgacgttgttaaagtccgatcccgaacagcagctggatgcagactgggaaaatatgaacgggcagaactaccgtgtcgggcttcaagtccaatcggaagacagccacggcttgctggcattaatggcgcaagcgatttccgattccggtgcggacattgagtcggtcgaaacaccgtctaaatcccagtcgggaacggaaggttttgtcgaattcaaattcttattgaaagtcaagaatctgaatcaattgaatcagattattcaaaatctgcatagtattccatatatccgcaaagtcatcagaagttga

SEQ ID NO: 62996 - DNA, 594 bp, Neisseria meningitidis
atgacgacattacaagaacgcgttgccgcccattttgccgaaagcatccgtgccaaacaggaagccgaaaaagtactggtcgagccgaccgtacaggctgccgagctgatgctgcaatgcctgatgaatgacggcaaaatcctggcctgcggaaacggcggttcggccgccgatgcccagcacttcgccgccgaaatgaccggtcgttttgaaaaagaacgcatggaactcgccgccgtcgcgctgacaacagacacttccgcgctgaccgccatcggcaacgactacggtttcgaccatatattcagcaaacaagtgcgcgcgctcggacgtgcaggcgacgtcttggtcggcatttccacctccggcaattccgccaacgtcatcgaagccgtcaaagccgcacacgaacgcgatatgcacgtcatcgccctgaccggccgcgacggcggcaaaatcgccgccatgctcaaagacaccgacgttctgctcaacgtcccctatccgcgcaccgcccgcattcaggaaaaccacatcctgctgatacacgccatgtgcgactgtatcgactccgtactgctggaaggaatgtaa

SEQ ID NO: 62997 - DNA, 846 bp, Neisseria meningitidis
atgaaaaacaaaacctcatcacttctcttatggcttgccgcaatgatgctgaccgcgtgttccccgagcaaagaagataaaacgaaagaaaacggcgcatccgccgcctcgtccacggcatccgccgcttcgtcttccgcaccccaaaccgatttgcaaccggccgcatccgcccctgataacgtcaagcaggcagaaagcgcgccgccgtcaaattgcaccgacctgcaccccgccaccggcattgacgatctcatgcagcaaatcgccgaacacatcgactcggactgtctgtttgccctttcccatcacgaactggaaacccgtttcggcttacccggcggcggctatgacaacatacagcggctgctgtttcccgacatccgccctgaagatcccgactaccatcagaaaatcatactggcaattgaagacttgcgttacggaaagcgcacgatcagccggcaggcacaagatgccttgatggaacaggaacgccgcctccgagaagcgacgctgttgctgatacagggcagtcaagaaacccgcggacaaggcgaggagccgaaacgcacgcgttattttgaagtttcggcaacccctgcctattcgagccggcacaacaacggacttggcggcaatttccaatacatcggccaattgcccggctatctgaaaatacacggagaaatgcttgaaaaccaatcactcttccggctgtccaaccgtgaacgcaatcccgacaaaccgtttttagacatccattttgacgaaaatggcaaaatcacgcgtattgtcgtttacgaaaaaaacatctacttcaatccaaacttggggcgaagataa

SEQ ID NO: 62998 - DNA, 174 bp, Neisseria meningitidis; identical to SEQ ID NO: 42248

SEQ ID NO: 62999 - DNA, 294 bp, Neisseria meningitidis
ttgcggcaaaaaaccgtggtattgtgggttcaagtgtttgaaactgatgttttaaaaccccctaatgccttatccgataacgaatggagttttcccatgcctaaaatgaaaaccaagtctagcgcgaaaaaacgctttaaagtactgggtaacggcggtgtgaaacgcgctcatgcgttcaaacgccacatcttgactaaaaagaccaccaaaaacaaacgccaactgcgcggtacctctatggtaaacgatcgcgatttggcttctgttgctaaaatgttaccctacgcttaa

SEQ ID NO: 63000 - DNA, 360 bp, Neisseria meningitidis; identical to SEQ ID NO: 40630

SEQ ID NO: 63001 - DNA, 1407 bp, Neisseria meningitidis
atgaaaaatcgagtgaccaacatccattttgtcggtatcggcggcgtcggcatgagcggcatcgccgaagtcttgcacaatttgggttttaaagtttccggttcggatcaggcgcgaaatgccgctaccgagcatttgggcagcctgggcattcaagtttatcccggccataccgcagaacacgttaacggcgcggatgttgtcgttacctctaccgccgtcaaaaaagaaaatcccgaagttgtcgctgcgttggagcagcaaattcccgttattccgcgcgccctgatgttggcggagttgatgcgcttccgtgacggcatcgccattgccggcacgcacggcaaaaccacgaccaccagcctgaccgcctccatcctcggcgcggcaggacttgacccgactttcgttatcggcggcaaactcaacgccgcaggcaccaacgcccgcttgggcaaaggcgaatacatcgttgccgaagccgacgagtcggatgcatcctttctgcacctgacaccgattatgtccgtcgttaccaatatcgacgaagaccatatggatacctacgggcacagcgtcgaaaaactgcatcaggcgtttatcgatttcatccaccgtatgcccttctacggcaaagcctttttgtgtattgacagcgaacacgtccgcgcgattttgcccaaagtgagcaaaccttatgctacttacggtttggacgataccgccgacatctacgccaccgacatcgaaaacgtcggcgcgcaaatgaaattcaccgtccatgttcaaatgaaaggacatgagcaggggtcgtttgaagtcgtgctgaatatgcccggcagacacaacgtgctgaacgcattggcagccatcggcgtggcgctggaagtcggcgcatcggttgaagcgatccaaaaaggcttgctcggctttgaaggtgtcggccgccgcttccaaaaatacggcgacatcaagttgccaaacggcgggaccgcgctcttggtggacgactacggacaccaccccgtcgaaatggcggcgaccctttccgccgcacgcggcgcgtatccggaaaaacgtttggtactcgccttccagccgcaccgctatacccgcacgcgcgatttgtttgaagactttaccaaagtcctcaataccgttgacgcgctggtgctgaccgaagtttatgccgccggtgaagagccgattgccgccgccgattcccgcgctcttgcccgcgccatccgcgtgttgggcaaactcgagccgatttactgcgaaaacgttgccgatctgcccgaaatgctgttgaacgttttgcaggacggcgacatcgtgttgaatatgggcgcgggaagcatcaaccgcgtccccgccgcgctgctggaattgtcgaaacagatttga

SEQ ID NO: 63002 - DNA, 690 bp, Neisseria meningitidis; identical to SEQ ID NO: 62695

SEQ ID NO: 63003 - DNA, 471 bp, Neisseria meningitidis; identical to SEQ ID NO: 39685

SEQ ID NO: 63004 - DNA, 1518 bp, Neisseria meningitidis
atgtctcctaaaaaaatacccatttggcttaccggcctcatcctactgattgccctaccgcttaccctgccttttttatatgtcgctatgcgttcgtggcaggtcggcatcaaccgcgccgtcgaactgttgttccgcccgcgtatgtgggatttgctctccaacaccttgacgatgatggcgggcgttaccctgatttccattgttttgggcattgcctgcgcccttttgttccaacgttaccgcttcttcggcaaaaccttttttcagacggcaatcaccctgcctttgtgcatccccgcatttgtcagctgtttcacctggatcagcctgaccttccgtgtcgaaggcttttgggggacagtgatgattatgagcctgtcctcgttcccgctcgcctacctgcccgtcgaggcggcactcaaacgcatcagcctgtcttacgaagaagtcagcctgtccttgggcaaaagccgcctgcaaacctttttttccgccatcctcccccagctcaaacccgccatcggcagcagcgtgttactaattgccctgcatatgctggtcgaatttggcgcggtatccattttgaactaccccacttttaccaccgccattttccaagaatacgaaatgtcctacaacaacaataccgccgccctgctttccgctgttttaatggcggtgtgcggcatcgtcgtatttggagaaagcatatttcgcggcaaagccaagatttaccacagcggcaaaggcgttgcccgtccttatcccgtcaaaaccctcaaactgcccggtcagattggcgcgattgtttttttaagcagcttgttgactttgggcattattatcccctttggcgtattgatacattggatgatggtcggcacttccggcacattcgcgctcgtatccgtatttgatgcctttatccgttccttaagcgtatcggctttaggtgcgattttgactatattatgtgccttgccccttgtttgggcatcggttcgctatcgcaattttttaaccgtttggatagacaggctgccgtttttactgcacgccgtccccggtttggttatcgccctatccttggtttatttcagcatcaactacacccctgccgtttaccaaacctttatcgtcgtcatccttgcctatttcatgctttacctgccgatggcgcaaaccaccctgaggacttccttggaacaactcccaaaagggatggaacaggtcggcgcaacattggggcgcggacacttctttattttcaggacgttggtactgccgtccatcctgcccggcattaccgccgcattcgcactcgtcttcctcaaactgatgaaagagctgaccgccaccctgctgctgaccaccgacgatgtccacacactctccaccgccgtttgggaatacacatcggacgcacaatacgccgccgccaccccttacgcgctgatgctggtattattttccggcatccccgtattcctgctgaagaaatacgccttcaaataa

SEQ ID NO: 63005 - DNA, 1395 bp, Neisseria meningitidis
atgaacaaacaacccctttccctcgccgtcgtcggacacaccaacaccggcaaaacctcgctcctgcgtacccttttgcgcgacagcggtttcggcgaagtcaaaaacgccccatcgaccacgcgtcatgtcgaagaagccgccatcagcgacggcgcagacacgctggttttcctgtacgacacgcccggactcgaagacgcgggcggcgtgctggaatggctggaaaaccatacggacaatcgttcagacggcatcgaacggctgcaacagtttctcggcagccacggcgcgcaccatgatttcaatcaggaagccaaagtcttacggcaagtcttgcaaagcgatatggcaatgtacgtcatcgacgcgcgcgaacccgtcctcgacaaatacagggacgagttgaccatcctttcatggtgtgccaaaccggttatgcccgtgttcaactttaccggcggacagcctcccgaatcgtggacaaccatgctggcgaggagaaacctgcacgttttcgcagggttcgacaccgtcgcctttgattttgaaggcgaactacgcctgtgggaaaacctcgccaccatgttgcccgaacgcagcacacttgaccgcctgacagccatgcgccggcgcgaatggcagcggctggacggcgaagcgcgccgcgaaatcgccgactttttaattgatgccgccgccttcaggcaggaagtggacgaaaacgaggataccgccaccgtgctgcaaaccatgcaggcggaaatacgccaactcgaacggcagatgcagcagcggctgtttgccctctaccgtttctaccacagcgaaatcgacggcggcgactggatgccgcaagccttccgccaagacccgttcgacagcgaattgctcaaacaatacggcatccgcaccggcacgggcgcggcaaccggcgcgctcatcggcttggggctggacatcgccacactcggcggctcgctcggattgggtacggcaatcggcggctttttgggcggcatcctgcccaatacccgcaccatttccgacaaactcgctggccgccaaaccctgcacaccgaccctgaaaccctgaccctgctcgccgcccgcgccctcgatttgctccacgtcctgcaaacgcgcggacacgcggcacagtcggatatcgagctgcacagccgcaaagccccgtgggacgccgccagactcccgcccgaactcaacaaagcccgcagtcattggaaatggtcgtcgctcaatacgcaccgccccgaaaccagccgcgccgaacgcgccggatatgtggagaaacttcaaatccgcctgtcgggaaaatatagtgaattaaatttaaatcaggacaaggcggcgagccgcagacagtacaaatag

SEQ ID NO: 63006 - DNA, 627 bp, Neisseria meningitidis
atgattgtttccattgatgttgatgcacaaaaaacttttacgcctttgtgtcctgacgagctgcctgtgaacgaggggcatttgattgttgaagagttgaatgcccaagccgctttggcggatttgcgcgtgatgacgaaagatgcgcatcatatggcggcgaaatggcttgtggataaccctgttgatatgttgaagccgacaggtttgcctgatgcggatttgacttgggtggctcatgcaatgatcggtacgcacggctatgaattgttggacgggctgccttctgctaaagaatacgattattgcgtttggaaaggtgttgatcccgaattgcatccttacggcgcgtgttttcacgatattgaagaaaaactgagcacggggttgattgaatggctgcgttgtcaacatacggatacggtcattgtcggcggattggcaacggattattgtgttaaaacaacggttttgcagttgctcaaaggcggcaattggcaggttatcgtcaatgaagcggcttgtcggggcattgcgccggaaaccatcgaaacggcatggcaggaaatgcgttctgccggtgcaattatcttaaaaaacgctgaagaaattaaaaaaatatattaa

SEQ ID NO: 63007 - DNA, 159 bp, Neisseria meningitidis
atgaaaacactcctcctcatctgcaccctgtcggcactcgccgcctgcgccctttccggacaaggcggcagcagggtttacggcgaaatcaaagcccgagacctttgcgttaccgctcctatcctgctttctgctttctgtcttgcctgctctcgttga

SEQ ID NO: 63008 - DNA, 1110 bp, Neisseria meningitidis
ttggaagcgcaactgggtgcgccgattgaggattacgcgccgccgaaacattggacgcgcaagcagctcagaagtatggggcgcgtgtcgtatttgtgcgtcgatgcggcggagcaggctttgacggatgccggtttgctcggagacgaaagtattaccgacggacggatgggcgttgcctgcggctcttccagcggcagcaccaaagacatcggcgatgtgggcgaattgttgctgaccggcatgtcgcgcaacttcagtgccaacacctatgtgcgtatgatgccgcacaccgccgccgccaatatcggcatctttttcggactgaaaggacgcatcatcccgacatcgagcgcgtgttcgtccggcagccaaggcataggttatgcctacgaagccatcaaatacggtctgaccgatatgatgctggcgggcggaggcgaagaatttttcccgtccgaagtgtatgttttcgactcgctttatgccgccagccgccgcaacggcgaaccggaaaaaaccccgcgcccatacgacgcgaaccgcgacgggctggtcatcggcgaaggcgcggggattttcgtgctggaagaattggaacacgccaaacggcgcggtgcgataatttacgccgaactcgtcggctacggagccaacagcgatgcctaccatatttccacgccccgccccgacgcgcaaggcgcaatccttgcctttcagacggcattgcaacacgcagaccttgcgcccgaagacatcggctggattaatctgcacggcaccgggacgcaccacaacgacagtatggaaagccgcgccgttgcagcggttttcggcaacaatacgccctgcacgtccaccaagccgcaaaccggacacacgctgggcgcggcgggcgcaatcgaagccgcgttcgcgtggggcattgccgaccggaaaagcaatcccgaagggaaacttccgccccagctttgggacgggcagaacgatcccgaccttcccgccatcaacctgaccggcagcggcagccgctgggaaaccgaaaaacgcattgccgccagctcgtcgtttgccttcggaggaagcaactgcgttttactcatcggatga

SEQ ID NO: 63009 - DNA, 936 bp, Neisseria meningitidis
atggaactctttaaaatcaaacgcgatattccgtttatgagctacggcaaactgacgaccttcatttcgttggttacgtttatcgctgccgtgttcttcttggtgaccaaaggcctgaatttctctgtcgaatttaccggcggtacggtaatggaagtccaatatcagcagggtgcggatgtcaataagatgcgcgaacgcctcgatacgctgaaaataggtgatgtacaggttcaggcattgggtacgaacaaacacatcatgatccgcctgccgaacaaagaaggtgttacttccgcacagttgtccaatcaggttatggatttgctgaaaaaagacagtcccgacgttaccttgcgccaagtcgaatttatcggcccgcaagtcggtgaggaattggtaagtaatggattgatggctttaggttttgtcgttatcggcatcattatttacctgtcgatgcgttttgaatggcgttttgccgtatctgccattatcgccaatatgcacgacatcgtgattattctcggctgctttgccttcttccaatgggaattttcgctgaccgtcttggcgggtatccttgccgtattgggctattctgtgaacgaatccgtcgtcgtcttcgaccgtatccgtgaaaacttccgcaagccggcgatgcgcggacatgccgtgccggaagtcatcgacaacgcgattaccgcaacgatgagccgcaccatcattacccacggttcgaccgaggcgatggtcgtatccatgctggtgttcggcggtgcggccttgcacggcttttctatggcgttgaccattggcatcgtgttcggcatttattcttccgtattggttgccagcccgcttctgctaatgttcggtttgagccgcgacaatatcggtaaagaaccgaagaagaaagaagaaatcgtggtttga

SEQ ID NO: 63010 - DNA, 234 bp, Neisseria meningitidis; identical to SEQ ID NO: 42120

SEQ ID NO: 63011 - DNA, 2595 bp, Neisseria meningitidis
atgtccaaatccgccgtttccccaatgatgcagcaatacctcggcatcaaagcgcaacataccgacaaactggtgttttaccgtatgggcgatttttacgagatgtttttcgacgatgcggtagaagcggcaaaacttttggatattaccctgaccacgcgcggacaggtggatggcgagccggtcaaaatggcaggcgtgccgtttcacgccgccgaacaatatctggcgcgcctggtcaagttgggcaaaagcgtggcgatttgcgaacaggtcggcgaagtcggcgcaggcaaaggaccggtggagcgcaaagtcgtgcgcatcgtaacgcccggcacgctgaccgattccgcattgctggaagacaaggaaaccaaccgcatcgttgccgtgtcccccgacaaaaaatacatcggtttggcgtgggcatcgctgcaaagcggcgaattcaaaaccaagctgacaactgtggataaattggacgacgaactggcgcgcctgcaggcggcggaaattctgttgcctgacagtaaaaacgcaccgcaacttcagacggcatcgggtgttacgcgcctgaacgcgtggcagtttgccgccgacgcgggggaaaaactgctgacggaatatttcggctgccaggatttgcgcggcttcggtttggacggcaaagaacacgccgttgcgattggcgcggcaggtgcactgttgaactatatccgtctgacgcaaaacctgatgccgcaacatttggacggcctgtcgctcgaaaccgacagccaatatatcggtatggatgccgccacgcgccgcaatctcgaaatcacgcaaaccctctccggcaaaaaatcgccgaccctgatgtccacgctcgacctttgcgctacccatatgggcagccgcctcttggctctctggctgcaccaccctttacgcaaccgcgcccacatccgagcgcgccaagaagccgttgccgcgctggaaagccaatacaaacccctccaatgccgtctgaaaaacattgcggacattgaacgcattgctgcccgcatcgccgtcggcaacgcccgcccgcgcgatttggcatctttacgcgacagtctgttcgagttggcacaaatcgacttgtccgcaaacggcagcagcctgttggaaaccctcaaagccgttttcccggaaaacctatccacagccgaacagctccgccaagccattttgcccgaaccttccgtctggctgaaagacggcaatgtcatcaaccacggttttcatcccgaactggacgaattgcgccgcattcaaaaccatggcgacgaatttttgctggatttggaagccaaggaacgcgaacgtaccggtttgtccacactcaaagtcgagttcaaccgcgttcacggcttttacattgaattgtccaaaacccaagccgaacaagcacctgccgactaccaacgccggcaaaccctcaaaaacgccgaacgcttcatcacgccggagttgaaagcctttgaagacaaagtgctgactgctcaagagcaagccctcgccttagaaaaacaactctttgacggcgtattgaaaaaccttcagacggcattgccgcagcttcaaaaagccgccaaagccgccgccgcgctggacgtgttgtccacattttcagccttggcaaaagagcggaacttcgtccgccccgagtttgccgactatccggttatccacatcgaaaacggccgccatcccgttgtcgaacagcaggtacgccacttcaccgccaaccacaccgacctcgaccacaaacaccgcctcatgctgctcaccggccccaatatgggcggcaaatccacctatatgcgccaagtcgcgctgattgttttattggcacacaccggctgtttcgtgcctgccgatgccgccacaatcggacccatcgatcaaatcttcacccgcatcggcgcatcggacgatctcgcctccaaccgctccaccttcatggtcgaaatgagcgaaaccgcctacatcctgcatcacgccaccgaacaaagccttgttttaatggacgaagtcggacgtggtacttccactttcgacggcctcgccctcgcgcacgccgttgccgaacacctgctgcaaaaaaacaaatccttcagcctgtttgccacccactatttcgagctgacctacctgcccgaagcccacaccgccgcactcaatatgcacctttccgcgctcgaacagggacaggacatcgtgttcctgcaccaaatccaaccgggtcccgccggcaaaagctacggcatcgccgtcgccaaactcgccggcctgcctgtacgcgcattgaaatccgcccaaaagcatttgaacgaactggaagaccaagccgccgcaaaccgtccccaactggatattttcagtaccatgccgtctgaaaaaggagatgaaccgaatgtgggcaactttgtggacaaagcagaggaaaaacattttgaaggtatattggcagcagccttggaaaaactcgatcccgacagcctgaccccgcgcgaagcattgtcagaactgtaccgtctgaaagatttgtgcaaatccgtatcttaa

SEQ ID NO: 63012 - DNA, 627 bp, Neisseria meningitidis; identical to SEQ ID NO: 41196

SEQ ID NO: 63013 - DNA, 300 bp, Neisseria meningitidis
atgaagaaaatgttcgtgctgttctgtatgctgttctcctgcgccttctcccttgcggcggtaaacatcaatgcggcttcgctgcaggagttggaggcgctgccgggcataggccctgcgaaggcgaaggccattgcggaataccgtgcgcaaaacggtgcgttcaagtctgtggacgatttgaccaaggtaaagggcatcggccctgcggtgctggcgaagctgaaggatcaggcttccgtcggcgcgcccgcaccaaaaggcccagccaaaccagtgctgcccgcagtgaaaaaatag

SEQ ID NO: 63014 - DNA, 990 bp, Neisseria meningitidis; identical to SEQ ID NO: 60407

SEQ ID NO: 63015 - DNA, 1032 bp, Neisseria meningitidis
atgccggattttcaaagaattactattgaaaacatagagtattttattgtcgatagtattcaaaatttacgtgcggaagatagttttattcacaggaataacaagttatctgtttttggtggtaatggggaagcacgcaaatatgtaggtagttatattgatgatagtggtcgaaaactaagtacattttttgagtatgaaaattgggggattactgagacaaaaaatggaaggagggtagaatatcctctcattcagaaaaattgtttttttaataagaaaaatttacagcgttatttggttgatgcaaaagttgaatatcacaaacaagaacagaaatatcatcatgatatttcaaggttttatgatgattacgttttaagtattaataatctgcctacagaaaatattttcttttcaatccatgatgtatcagaccatttggaaaattctaaaggttaccgtaggggttatatccgttcggaggatgatatatggtcaatttggcgtaagattgtattgcccaaaattagttatttatcaattcttaaactattgcctgtcaaagatatagaagattcagaaccattattttatttccgaatatttttggattatcaatttcgctctatcgtgcacccgcaactcttatcaagagaaaaattagaaataccggcttcagaatttaatcaattcgtagagcaagaaatcattaaacagaaaagtagaaaagggcagcagaaatatcgcaaggatgttataaatcatatgtcgcaatgtccatttacattaattacagatgagattttgttaagggctagtcatattaaaccttatatggtttgtattactgagaaaaatgagaaagaggcattagattatttaaatgggttagctttaacgccgacttatgattggttgttcgatcaaggttatattactttcttggatgatggtcgtttgatttgcggtactcgactaagccgttacacatgggaaaaacttaatatcaatccaaatgcaaaaaattaa

SEQ ID NO: 63016 - DNA, 1386 bp, Neisseria meningitidis
atggacggctggacacagacgctgtccgcgcaaaccctgttgggcatttcggcggcggcaatcatcctcattctgattttaatcgtcaaattccgcatccacgcgctgctgacactggtcatcgtcagcctgctgacggctttggcaaccggtttgcccacaggcagcattgtcaacgacgtactggtcaaaaacttcggcggcacgctcggcggcgtggcgcttctggtcggcctgggcgcgatgctcggacgtctggtcgaaacatccggcggcgcacagtcgctggcggacgcgctgatccggatgttcggcgaaaaacgcgcaccgttcgcgctgggcgttgcctcgctgattttcggcttcccgattttcttcgatgccggactaatcgtcatgctgcccatcgtgttcgccaccgcacggcgcatgaaacaggacgtactgcccttcgcgcttgcctccatcggcgcattttccgtcatgcacgtcttcctgccgccccatccgggcccgattgccgcttccgaattttacggcgcgaacatcggccaagttttgattttgggtctgccgaccgccttcatcacatggtatttcagcggctatatgctcggcaaagtgttggggcgcaccatccatgttcccgttcccgaactgctcagcggcggcacgcaagacaacgacctgccgaaagaacctgccaaagcaggaacggtcgtcgccatcatgctgattcccatgctgctgattttcctgaataccggcgtatcggccctcatcagcgaaaaactcgtaagtgcggacgaaacctgggttcagacggcaaaaataatcggttcgacaccgatcgcccttctgatttccgtattggtcgcactgtttgtcttgggacgcaaacgcggcgaaagcggcagcgcgttggaaaaaaccgtggacggcgcactcgcccccgtctgttccgtgattctgattaccggcgcgggcggtatgttcggcggcgttttgcgcgcttccggcatcggcaaggcactcgccgacagcatggcggatttgggcattcccgtccttttgggctgtttccttgtcgccttggcactgcgtatcgcgcaaggttcggcaaccgtcgccctgaccaccgccgccgcgctgatggctcctgccgttaccgccgccggctttaccgactggcagctcgcctgtatcgtattggcaacggcggcaggttcggtcggttgcagccacttcaacgactccggcttctggctggtcggccgcctcttggacatggacgtaccgaccacgctgaaaacctggacggtcaaccaaaccctcatcgcactcatcggctttgccttgtccgcactgctgttcgccatcgtctga

SEQ ID NO: 63017 - DNA, 504 bp, Neisseria meningitidis
atgcacgcgcttcatttttcggcttcggacaaggccgcgctttatcgggaggtgttgccgcagattgagtctgtggtggcggacgagacggattgggtggcgaatttggcgaacacggcggcggttttgaaggaggcgttcggttggttttgggtgggtttttatttggtcgatacgcgttcggacgaattggttttggcaccgtttcaggggcctttggcgtgtacgcggattccgttcggtcgcggggtgtgcggtcaggcttgggcgaagggcgggacggtggtcgtcggggatgtggacgcgcatcccgaccatattgcctgttcgtctttgtcgcgttcggagattgtcgtgccgctgttttcagacggccgctgtatcggcgtgttggacgcggacagcgaatatttggcgcagtttgatgagacagatgctttgtatttgggcgaactggcgaagattttggagaagcgatttgaggcttcgcgtcaggcggcttga

SEQ ID NO: 63018 - DNA, 534 bp, Neisseria meningitidis
atggctcacccgcaagaaatccgtgaaaagttacgccggctctatgtcagcggcgagcaaactttggaaacggcggccttgatgtgcgaaatcccgcaggccactgcgcgtgcgtggaaacgtgcggataaggaaaaaggcgacgactgggataagatgcgcgccgcttacactttggccggtggcggtattgaggatttgagccgtgcgatgttggccggttttatggtgcagtacaacagcacgatgacgatgctgcaggattcgagtaccgaagatttgcctccgtccgaccgcgccaagctgttggccagcctgaccgatgcgtttacgaaaaccgtatccgccaatgcgcgtgtgatgccggaaacgtcaaaactggcgacggctttggaattgattgagttcttgatggcgtttgtgcaagaaaaacatcccaaacatttgcctgcctttggaggtattggagtcgtttggggcggaagtggagaagaagtttggttaatagccgtctgtcaatctcccataacgtga

SEQ ID NO: 63019 - DNA, 966 bp, Neisseria meningitidis
atgagctacacgcaactgacccagggcgaacgataccacatccaatacctgtcccgccactgcaccgtcaccgaaatcgccaaacagctgaaccgccacaaaagcaccatcagccgcgaaatcagacggcaccgcacccaaggacagcaatacagcgccgaaaaagcccagcggcaaagccagactatcaaacagcgtaagcgacaaccctataagctcgattcgcagctgattcagcacatcgacacccttatccgccgcaaactcagtcccgaacaagtatgcgcctacctgtgcaaacaccaccagatcacgctccaccacagcaccatttaccgctaccttcgccaagacaaaagcaacggcagcacgttgtggcaacatctcagaatatgcagcaaaccctaccgcaaacgctacggcagcacatggaccagaggcaaagtacccaaccgtgtcggcatagaaaaccgacccgctatcgtcgaccagaaatcccgtatcggcgattgggaagccgacaccattgtcggcaaaggacagaaaagcgcattattgaccttggtcgaacgcgttacccgctacaccatcatctgcaaattggatagcctcaaagccgaagacactgcccgggcagctgttagggcattaaaggcacataaagacagggtgcacaccattaccatggataacggcaaagagttctaccaacacaccaaaataaccaaagcattgaaagcggagacttatttttgtcgcccttatcattcttgggagaaagggctgaatgagaacaccaacggactcatccggcaatacttccccaaacaaaccgatttccgtaacatcagtgatcgggagatacgcagggttcaagatgagttgaaccaccgaccaagaaaaacacttggctacgaaacgccaagtgttttattcttgaatctgttccaaccactaatacactag

SEQ ID NO: 63020 - DNA, 606 bp, Neisseria meningitidis
atgaccatctatttcaaaaacggcttttacgacgacaccttgggcagcatccccgaaggcgcggttgccgtccgcgccgaagaatacgccgcccttttggcaggacaggcgcagggcgggcagattgccgcagattccgacggccgccccgttttaaccccgccacgcccgtccgaataccacgaatgggacggcaagaaatgggaaatcggcgaagccgctgccgccgcccgtttcgccgaacaaaaaaccgccacggcattccgcctcgcggcaaaggcggacgaactcaaaaacagcctcttggcgggctatccccaagtggaaatcgacagcttttacaggcaggaaaaagaagccctcgcgcggcaggcggacaacaacgccccgaccccgatgctggcgcaaatcgccgccgcaaggggcgtggaattggacgttttgattgaaaaagttgtcgaaaaatccgcccgcctggccgttgccgccggcgcgattatcggaaagcggcagcagctcgaagacaaattgaacaccatcgaaaccgcgccaggattggacgcgctggaaaaggaaatcgaagaatggacgctaaacatcggctga

SEQ ID NO: 63021 - DNA, 519 bp, Neisseria meningitidis
atgcgccttttccccatcgccgccgccctgacgcttgccgcctgcggtactatgcaaagcacacaatatttcgtgttgcccgacagccgctacatccgccctgcaacgcaaggcggcgaaaccgccgtcgaagtccgccttgccgaaccgctcaaacgcggcggactggtctatcaaaccgacccctaccgcctcaacaccgcacaaaaccacgtttgggcagacactttggacgatatgctcgaagcggcgttgagcaatgcattcaaccgtttggacagcgcacgcatctttgttcctgcctcacgcagcggcagtaccgaaaaatggacggtctatatcgacgcattccaaggcagctacacgggcaaaaccctcatcagcggctacgccgtcctacccgacggtatgaacagacccttccatatcgaaaccgaacagcagggtgacggctacgccgcgatgaccgccgcactcgaacagggactgaaacaggcggcgcaacagatggtcgagtaa

SEQ ID NO: 63022 - DNA, 648 bp, Neisseria meningitidis
atgaaaacaaaattttacaatcatcaaggcgaacatttaatcctgtattttgcaggttggggaacgccgcccgatgctgtaaatcatttgattttgccggaaaatcacgatttattgatttgctatgattatcaagatttaaatttggattttgatttttccgcctatcggcacatccgtttggtggcgtggtcaatgggcgtttgggcggcagagagggcattgcaaggaataagattaaaatccgcaacggcagtgaatggcacaggtttgccttgcgatgataatttcggtatcccttgcgccgtttttaaaggcacattggagaacctcacggaaaacacccgtttaaaatttgaacgcagaatgtgtggcgataaagcatcttttgaagattaccaacaatttcccgcccgtccgtttgacgaaattcatcaagaacttatcgcactttttgcgatgatcgggcaagataggcgcgcagatttgattcgctggacaaatgccttggtcggatcgggcgataaaatttttatgcctgccaatcagcaccgatattggacaccgcgttgcaccgttcgggaaattgacggcggacattacctgttttcaagattcacccattggtcggcactatggaatcactga

SEQ ID NO: 63023 - DNA, 1011 bp, Neisseria meningitidis
atgcacatcggcggctattttatcgacaaccccatcgcacttgcaccgatggcgggcattaccgacaaacccttccgccgcctctgccgcgatttcggcgcgggttgggcggtgtgcgaaatgctgaccagcgacccgacacttagaaataccaaaaagaccctgcaccgcagcgattttgccgatgaaggcggcatcgttgccgtgcagattgccggcagcgatccgcagcagatggcggatgcggcgcgttacaacgtcagcctcggggcgcagcttatcgacatcaatatgggctgtcccgccaaaaaagtgtgcaacgtccaagccggcagcgcgctgatgcagaacgagccgctggttgccgccattttggaagccgtcgtccgtgcggcaggcgtacccgttaccctcaaaacccgtttgggctggcacgaagaccatcaaaacctgcccgtcatcgccaaaatcgccgaagattgcggcatcgccgcccttgccgtccacggacgcacgcgcacgcaaatgtacaaaggcgaggcgcgttacgaactcatcgccgaaaccaaatgccgtctgaacatcccggtctgggtcaacggcgacatcacttcgccgcaaaaagccgccgccgtcctcaaacaaaccgccgccgacggcatcatgatagggcgcggcgcgcaaggcagaccgtggttcttccgcgatttgaaacattacgccgaacacggtgttttaccgcctgccttgagtttggcagaatgcgccgccgctattttgaaccacatccgcgccatacacgcgttttacggcgatagtgcaggcgtacgcatcgcacgcaaacacataggttggtacatcggcgaaatgcccgacggcgaacaggcgcggcgtgaaatcaaccgcttggacagtgcggcggcgcaatacgacatgcttgcaggttatcttgaaagacttgccggaaaaaccgaccgttgggcgtgcggctaccgcacaaatgccttctga

SEQ ID NO: 63024 - DNA, 603 bp, Neisseria meningitidis
atgactgatgtgcttcagacggtattttatattatgttatttccgagaattatcgcagcatcagcgcaacgtaagttaagcgtttatttgaaaaaaggcggtttggtcgcttatccgaccgaatcttgttatggcttggggtgtcttccgacattagccaaagcactcggtaagttggcgcatttgaaaaaaaggccgcaacacaagggtatgattgtcatcgggaatcaatttgaacagttgcagcctttacttcaaatgccgtctgaaaatctgcaggctatgcttagaaaagaatggcccgcccctaaaacattcctattatctgccaaatcctgcgtattacctgagttacgcgggaaacagcgcagcaagttggcggtcagggttcccgcccatgtaggtgcgcgccgcttgtgtctggctttgcaaacgcctttggtctcaacttcgtgcaaccgcgcaggcaaacgcgcgtgtcggacggagagggaagtcagaaggcaattcggacgcgatgtgtggattgttggtgggcgaatcggcaggcagaaatcgccgagtcagattattgacggggaaacaggtaaacgtttgcgttag

SEQ ID NO: 63025 - DNA, 486 bp, Neisseria meningitidis; identical to SEQ ID NO: 37367

SEQ ID NO: 63026 - DNA, 777 bp, Neisseria meningitidis
atggcagcattcaatacccaaaaagtattgtccgtacaccactggacagacgcatattttacctttacctgcacccgcgacgaatcgttgcgctttgaaaacggacagttcgttatggtcggattgatggtggacggcaagccgctgatgcgcgcatacagcgtcgcctccgccaactgggaagaacacctcgaatttttcagcattaaagtccaagacggtccgctgaccagccgcctgcaacacctcaaagtcggcgacgacgtgttaatcagcaaaaaaccgaccggaaccctggttgccggcgacctgaatccgggcaaacacctttacttgttgagcaccggtaccggcatcgctcctttcttgagcatcaccaaagaccccgaaatttacgagcaatttgaaaaaatcatcctcgtacacggcgtgcgctacaaaaaagatttggcgtactacgaccgctttaccaaagaattgcccgaacacgaatacctcggtgacttggttaaagaaaaactgatttactacccgattgtttcgcgcgaagaattcgaacaccacggtcgcctaaccgacctgatggtgagcggcaaactgtttgaagacatcggcctgcccaaaatcaacccgcaagacgaccgcgccatgctgtgcggcagccccgcgatgctgaaagacacctgcaaagttttggacgatttcggtctgaccgtctccccgaaaacaggcgtgcgcggcgactacctgattgagcgtgcgtttgtagatcaataa

SEQ ID NO: 63027 - DNA, 201 bp, Neisseria meningitidis; identical to SEQ ID NO: 50300

SEQ ID NO: 63028 - DNA, 669 bp, Neisseria meningitidis
gtgaaccagcttattttcgactttgccgcacacgactatccgagtttcgacaaattcctcggcacggaaaacgcggaactggtctatgtcctccgacacaaacacggacagtttatctatgtctggggtgaagaaggcgcgggcaaaagccatcttttgcaggcgtgggtcgcacaggcgctcgaagccggcaaaaacgccgcctatatcgatgccgcctccatgccgctgaccgatgccgcgttcgaggcggaatacctcgccgtcgatcaagtcgaaaaactgggcaacgaagaacaagccctgcttttttccatcttcaaccgcttccgcaacagcggcaaaggctttttgctgctcggttcggaatacacgccccagcagcttgtcatccgcgaagatttgcggacgcgtatggcgtactgcctcgtttacgaagtcaaacccttaaccgaccaagaaaaaatcgacgcgctcgccagtatggcggcggcacgccaagtaaccgtcgattccgaaattttcgaatacctgctcaaacactggcggcgcgatatggacagcctgatgatgatgctcgacacgctggacaactacgccgtcacaatgggcaaacgcatcaccctgccgcttttgcgccagcttttgaaacaacaggaaacccaatga

SEQ ID NO: 63029 - DNA, 774 bp, Neisseria meningitidis
atgagtgcgaacatccttgccatcgccaatcagaagggcggtgtgggcaaaacgacgacgacggtaaatttggcggcttcgctggcatcgcgcggcaaacgcgtgctggtggttgatttggatccgcagggcaatgcgacgacgggcagcggtatcgacaaggcgggtttgcagtccggcgtttatcaggtcttattgggcgatgcggacgtgaaatcggcgacggtacgcagcaaagagggcggatacgctgtgttgggtgcgaaccgcgcgctggccggtgcggaaatcgagctggtgcaggaaatcgcccgggaagtgcgtttgaaaaacgcactcaaggcagtggcggaagattacgactttatcctgatcgactgtccgccttcgctgacgctgttgacgcttaacggcttggtggcggcgggcggcgtgattgtgccgatgttgtgcgaatattacgcgctggaagggatttccgatttgattgcaaccgtgcgcaaaatccgtcaggcggtcaatcccgatttggacatcacgggcatcgtgcgcacgatgtacgacagccgcagcaggctggttgccgaagtcagcgaacagttgcgcagccatttcggggatttgctttttgaaaccgtcatcccgcgcaatatccgccttgcagaagcaccgagccacggtatgccggtgatggcttacgacgcgcaggcaaagggtaccaaggcgtatcttgccttggcggacgagctgatggcgagggtgtcggggaaatag

SEQ ID NO: 63030 - DNA, 300 bp, Neisseria meningitidis
gtggattatccggactttcctcaagagatccctatgcccaattattcagaatgggtaaaaattaaattcaagcagttcagctatctgaaatttatctatggatacgccacgaagaaccaagataaaaatatcaaaaatgtattggaacttggagaattaaagcaggatgatgaaatcttggattatggaggtgcgctggaagtgataggcggtaggtatgatcttccgaccggttttagtatagatatagtttgccgggaaatagagttagaatttttagatcaggagagttttaattaa

SEQ ID NO: 63031 - DNA, 1569 bp, Neisseria meningitidis
atggcaaaaaagaacaataaaactaaaatccaaaagcccgaagctgcattgcagacggacgtggctcaaattacggcgaccggtcgggttatcgccgagcatccgtccaattttattacaccgcaaaagatgcgggccctcttcgaggatgcggaaagcggcgacatccgcgcccaacacgagcttttcgcggacattgaggagcgcgacagcgacatcgcggcaaatatggggacgcgcaaacgcgcgctgctgacgctcaactggcgcgtcgccccgccgcgaaatgcgacgcccgaagaagaaaagctgtccgaccaagcctacgaaatgatggacagcctgcctaccctcgaagacctgattatggatttgatggacgcggtagggcacggattttctgcgttggaggtcgagtgggtattttcagacggcctttacctaccccgaaactttatccaccgcccgcaaagctggttcaaatgggacaaagacaacgggctgctgctgcgtacccgcgaaaatccggaaggcgaagcgttgtggccgctgggctgggtcgttcatacccaaaaatcgcgcagcgtccagcaggcgcgcaacgggcttttccgcacgctttcctggctgtatatgttcaaacactacgccgtccacgattttgccgagtttttggagctgtacggcatgcccatccgtatcggcaaatacggcgcgggcgcaaccaaagaggaaaaaaacaccctgcttcgagcggtggcggaaatcggtcacaacgcggcaggcatcatgccagaaggtatggaaatagagctccacaacgcggcaaacggtacgacggcaaccagcaatccgtttttgcagatggccgactggtgcgaaaaatcggcggcgcggctgattttggggcaaacgctgaccagcggtgcggacggaaaatccagcaccaacgcgctgggcaatatccacaacgaggtacgccgcgatttgctggtgtcggacgcaaaacaggtggcgcaaaccatcacaagccaaatcatcggaccgttcctgcaaatcaactatccccatgccgacccaaaccgcgtgccgaaatttgaatttgacacgcgcgagccgaaagacatcgcggtctttgccgacgctatcccgaaactggtggatgtcggcgtacaaatccccgaaagctgggtgcgcgacaaactggtcattccagatgtgcaggagggtgaggctgtgttggtgcggcaggtaccggacaatccggtaaacagaactgcattggcggctttatccgcccacaccgtaccatctaaggctacgggcaggcatcaggaaatattggacggcgcgttggatgacgcgctggttgagcccgatttcaattctcagctcaacccgatggtgcgtcaggcggttgccgcacttaatgcttgcaacagctacgaggaggcagatgccgcactgaatgcgctttatccgaatttggacaacgcgaaactgcgtacctatatgcagcaggccttgtttatcagcgatattttgggacaagaccatgcccgcgcctga

SEQ ID NO: 63032 - DNA, 1479 bp, Neisseria meningitidis
atgaaatacaaagacctgcgcgacttcatcgccatgctcgagcagcagggcaaactcaaacgcatcgcgcaccccgtttccccgcatttggaaatgaccgaaatcgccgaccgcgtgctgcgcgccgaagggccggcgttgctgtttgaaaacccggttaagcccgacggtacgcgctacggttatcctgtgttggcaaacctgttcggcacgcccgaacgtgtggcgatgggcatgggcgcggacagcgtgtccaagctgcgtgaaatcgggcagacgctggcgtatttgaaagaacccgaaccgcccaaaggcatcaaagatgcgttttccaaactgccgctactgaaagacatttggagcatggcgccgaacgtggtgaaaaacgcgccgtgtcaggaaatcgtgtgggaaggcgaaaacgttgatttgtataaacttccgattcagcattgctggccggaagacgttgcgccgctggtaacgtggggcttgaccgtaacgcgcgggccgcacaaaaaacgccaaaatctcggcatttaccgccaacaattaatcggcaaaaacaagctgattatgcgctggctgtcgcatcgcggcggcgcgttggattatcaggaattccgcaaactcaatcccgatacgccgtatcccgtcgccgtcgtactcggctgcgaccccgccaccattttgggcgcggtaacgcctgttcccgataccttgagcgaataccagtttgccggactgctgcgcggttcgcggacggagctggtgaaatgtatcggcaacgatttgcaagtgcctgcccgcgcagaaatcgtgttggaaggcgtcatccatccgaacgaaaccgcgttggaaggcccgtacggcgaccacaccggctattacaacgagcaggatcatttccctgtgtttacggtcgaacgcatcaccatgcgcgaaaacccgatttaccattcgacctacacgggcaaaccgcccgatgagcctgccgttttgggtgtggcattgaacgaagtgttcgtaccgcttttgcaaaagcagttccccgaaatcaccgatttctacctgccgcccgaaggctgttcctaccgcatggcggtgatcggcatgaaaaaacagtacgccggacacgccaagcgcgtgatgatgggctgctggtcgttcctgcgccagtttatgtataccaaattcattatcgtggtggatgacgatgtgaacgtgcgcgactggaaagaagtcatctgggcggtcaccacgcgcatggaccccgtgcgcgacactgttttggtagaaaacacgcccatcgattatctcgacttcgccagccccgtcagcggactcggcggcaaaatgggtttggatgcgaccaacaaatggccgggagaaaccgaccgcgaatggggacgggtgattaaaaaagaccctgcggttacggctaagattgatgggatttgggaggaattggggttgtag

SEQ ID NO: 63033 - DNA, 1011 bp, Neisseria meningitidis
atgagcaaaaaacgagttctgaccggcgtaaccaccaccggcatcccgcatctgggcaactacgtcggcgccatccgccccgccgtccgcgcggcgcaaaacctcgataccgaatcattcctctttttggccgactatcacggtatcatcaaatgtcatgagccggaaatgattcatcaatctactcaagctgttgccgccacatggctcgcctgcggactcaatccggaacagactactttctatcgtcaaagcgacattcccgaagtgatggagttgaactggattctgacctgtatcactgcaaaaggcctgatgaaccgcgcccacgcctacaaagccgccgtgcaggcaaatgcggaaaacgggcaggaagaccccgatttcggcgtggaaatgggtttgttcagctatccgattctgatgaccgccgacatccttatgttcaacgccaacgaagtgcccgtcgggcgcgaccaaatccaacacgtcgaaatggcgcgcgacatcgccggccgcttcaatcaccgctttaaagaaatctttaccctgcccgaagtgaaaatcgacgaaaacgtcgaactcttggtcggtttggacggacgcaaaatgtccaaatcctacggcaacaccattccgctttgggaaaacgacaaaaaaacccaaaaatcggtcaacaaaatcatcaccaatatgaaagagccgggcgagccgaaacagcccgacgaaagcccattgtttgaaatctacaaagccttctccacgccgtctgaaaccgcagcgttcacgcaaatgcttgccgaaggcttggcttggggcgaggcaaaaaaacttttggcggcgaaaatcaacgccgaactcgccgaaccgcgcgaacgctacaacgagctgaccgccgacccttcgcaaatcgaagagattttgcaggcaggcgcgcaaaaagcgcgtaaagaagcacgcgaattgttggacaaagtacgcgatgcggtcggcatccgcccgttgaaataa

SEQ ID NO: 63034 - DNA, 1248 bp, Neisseria meningitidis
atgagtcagagaagagtagtcattacaggcttaggtcaggtttcccctgtcggcaacactgtcgcagaggcttgggacaccctgctcgccggcaaaagcggcatcggcgcgattacccgctttgacgcatccgacatcaacagccgtgtcgccggcgaggtgcgcggtttcgacatcggacaatacatcagcgcgaaagaagcgcgccggatggacgtattcatccactacggcattgccgccgcattgcaggcaatcgccgattcgggtttggacgatgtggaaaacctcgacaaagaccgcatcggcgtgaacatcggttccggcatcggcggactgcccggcatcgaggtcaccggcaaagccgtaatcgaaggcggcgcgcgcaaaatcaaccctttctttatccccggttctctgattaatctgatttccggacacgttaccatcctcaaaggctaccgcggcccgagctacgggatggtttccgcctgcaccaccggcgcgcacgccatcggcgattccctccgtatgattaaatacggcgacgcggacataatggttgccggcggcgcggaaggcgcaatcagcactttgggcgtgggcggttttgccgcgatgaaagccctctccacccgcaacgacgaccccgccaccgcttcccgtccgtgggacaaaggccgcgacggcttcgttatcggcgaaggcgcgggcatattggtgttggaagaattggaacacgccaaaaaacgcggcgcgaaaatctacgccgaaatcgtcggcttcggcatgagttccgatgcttaccatatcaccgcgccgaacgaagaaggccccgcccttgccgttacccgcgcgctgaaagatgccggcatcaatcccgaagacgtggattacgtcaacgcgcacggcacgtccacccccttgggcgatgccaacgaaaccaaagccctcaaacgcgcgttcggcgaacacgcctacaaaaccgtcgtcagctcgaccaaatccatgaccggccacctgctcggcgcggcgggcggcgtggaggccgtgtacagcattttggcgatacacgacggcaaaatcccgccgaccatcaacatttttgaacaagacgttgaagccggctgcgatttggactactgcgccaacgaagcgcgcgacgcggaaatcgacgttgccatttccaactccttcggcttcggcggcaccaacggcacgctggtcttcaaacgcttcaaaggctga

SEQ ID NO: 63035 - DNA, 462 bp, Neisseria meningitidis
atgaaaccgcaaaaatccctacgcgcccgcgcgatggacatcctctcgcgccaagaagtcagccgcatcggtctgaaacgcaaacttgcaccgtacgccgaaagcgaagaggagttggaaaacgtgttaaacgaatttgccgaacgcaactggcagtcggatttgcgctatgccgaagcctatatccgcagcaaaagccgcaaacacggttcattgaggctgaaacaggctttggcgcaacagggcatagatgaagaaaccagccgcaacctgcttcccgaccgctcaagcgaaaaacaggccgccatagccgtgttgcgtaaaaaattcaaacaccccgccgccgacctcaaagaaaaacaaaaacaggcgcgtttcctcgcctatcgcggattcgatgccgataccgttcagacggcattgaaacacgcttgggacgaaaattgggaagacggctgctga

SEQ ID NO: 63036 - DNA, 378 bp, Neisseria meningitidis; identical to SEQ ID NO: 37228

SEQ ID NO: 63037 - DNA, 930 bp, Neisseria meningitidis
atgattcacgtttcggcagtgcaggcaccggcgcatattcaggataccggacgctacggacaccggagttacggcatcggtcatgccggtgcgatggacacggttgctttggcggcgggtaatattttattgggcaacgacgaaggcacggccgcaatcgaaatcgctttgggcgggataatgctggtgtttgaacgggatacgccgttttgtctcaccggtgccgtgtatcaggcggaattggacggcgaaccggtctattcgtattggcgttataccgcccgcaaagggcagaccttgaaaatggtgcgtgccgtgcagggcatgtacggctatgtgtgcgtggcgggcggatttgatgtgccggaagtgatgggttcgagaagcaccgacctgaaagccggtttcggcggccatcagggcagaatgctgcaaaaaggtgattgtctccccatcggcaaaggtgcgcaggaattgtccaaagtcggcattgccccgataccgtttaccgataccgtccaccttgttccttcgtcggaatatgccgctttcagtgaaaaagggcgtctgaatctggaacgggaaacgtggacgctgcaaagcgatagcaaccgcatgggctaccgcttcgacggacagccgctgaccctgtcgcaacctttggaaatgctgtcccacgctgttcaggcaggaaccgtgcaggtgccgcccggcggcaaaccgattatcctgctggccgatgcgcaaaccaccggcggttatccgaaaatcgctaccgttgccgccgccgatttgggcaggctggcacaggtgcgcttcggcagcaaagtcaaattcaaaataatcggcttgaaagaagccaccgccctgcggcgcaaaaaccaagtctatctgaaccaaatacggagaatcacccatgaagcaggttga

SEQ ID NO: 63038 - DNA, 2016 bp, Neisseria meningitidis
atgaaatcctaccccgacccctaccgccattttgaagacctcgattccgccgaaacgcaaaacttcgctgctgaagcgaatgccgaaacgcgcacgcgttttttaaacaacgacaaggcacgcgcattgtctgacggcattttggcgcagttgcaggacacgcggcaaattccgttttgtcaggaacaccgtgcgcggatgtaccatttccatcaggacgcggaatatccgaagggcgtgtaccgcgtgtgtaccgcggcgacataccgttccggctatcccgggtggaaaatcctgttttcagtggcggatttcgacgaattgctcggcgacgatgtatatttgggcggcgtgtcgcacttggtggaacagcccaaccgtgcgttgttaacactgagcaaatcgggcggcgatacggcgtacacgctggaagtggatttggaagcaggggagttggtagaaggcggttttcactttccggcaggcaaaaaccatgtgtcgtggcgcgatgaaaacagcgtgtgggtgtgtccggcttggggcgaacgccagttgaccgaatcgggctatccgcgcgaggtgtggctggtggaacgcggcaagagtttcgaggaaagcctgcctgtgtatcaaatcgataaaggtgcaatgatggtgaacgcgtggcgttatctcgatccgcaaggttcgccgattgatttgattgaagcgtcggacggtttttacaccaaaacctatttgcaggtgtcgtcggaaggcgaggcgaaaccgttaaacctgcccaacgattgcgacgtggccggctatctagccggacatcttttgctgacattgcgtaaagactggcaccgcgcgaaccaaagctatccgagcggcgcattggtggcagtaaaattaaaccgaggcgaactcggggcggcgcagcttttgtttgcgcccgatgaaacgcaggcattggaaagcgtggaaacgaccaagcgttttgtggtggcgagcctgctggaaaacgtacaaggccgtctgaaagcgtggcggtttgccgacggcaaatggcaggaagtcgaactaccgcgcctgccttcgggcgcgttggaaatgaccgaccagccatggggcggcgatgtggtttaccttgccgccagtgatttcactacgccgctgacgctgtttgcgctggatttgaacgtgatggaactgaccgtcatgcgccgtcagccgcagcagttcgattcagacggcatcaacgtgcagcagttttggacgacttcggccgacggcgagcgtattccttattttcacgtcggcaaaaacgccgcccccgacacgccgactttggtttatgcatacggcggttttggcattcccgagttgccgcattatttgggcagcgtcggcaaatattggctggaagagggcaatgcctttgtgttggcaaacatccgcggcggcggcgagttcggcccgcgctggcatcaggcggcgcagggaatcagcaaacacaaaagcgtcgacgatttgcttgccgtcgtgcgcgatttgtccgaacgcggcatcagttcgccccaacacatcggcttgcagggcggcagcaacggcggcctgattaccgccgccgccttcgtgcgcgaaccgcaaagcatcggcgcgctggtgtgcgaagtgccgctgaccgatatgatccgctatccgctgctctccgccggcgcaagctggacggacgaatacggcaacccgcagaaatacgaagtctgcaaatgccggttgggcgaattgtcgccgtatcacaatctttcagacggcatcgattatccgccagcgctcattaccaccagcctcagcgacgaccgcgtccatcctgcccacgcgctcaagttctacgccaaactgcgcgaaacctccgcgcaatcttggctctactcacctgacggcggcggccataccggcaacggcacccaacgcgaatccgccgacgaactcgcctgcgtgttgctgtttttgaaagagtttttgggctaa

SEQ ID NO: 63039 - DNA, 225 bp, Neisseria meningitidis
atgaagaaaaacgccccgaaatcgtttgaagaggcactgtcgcgccttgaatcgctgacacaagctatgcagggtgaaatgcccttggaagacgcgcttgccgcctatcaggaaggcaacgagctggtcaggtactgccaaaccaagctggcgcaagtcgaacagaaattacaggttttggacgcggacgggccgaaggagttgaaccttgaatccgacgaatga

SEQ ID NO: 63040 - DNA, 783 bp, Neisseria meningitidis
atgaccgacatcctcaataaaatccttgccaccaaagcacaggaagttgccgcccaaaaagccgccgtcaacaccgaacacatccgcgcacttgccgcagaagccgcgcccgtccgcagcttcatcgattcgatacgcggcaaacaccgcctcaacctgcccgccgtcattgccgaaatcaaaaaagcaagcccgagcaaaggcctgatccgtccggacttccgaccggccgagattgcacgcgcctatgaaaacgccggagcggcgtgtttgtccgtactgaccgacgaaccctatttccaaggttcgcccgaatacctcaaacaggcgcgcgaagccgtatctctgcccattttgcgtaaagacttcatcatcgacgaataccaggtttatcaggcgcgcgcctggggggcggatgctgtcctgctgattgccgccgcactggaacaggaacaattggaacgctttgaagcggtggcgcacgaattgggtatgaccgtcctgctcgagctgcacgatgaaagcgaattggaaaaatgccgcaacctgaccacgccgttgtggggtgtaaacaaccgcaacctgaggacttttgaagtctccctcgaccaaaccctgtcgctgctgcacgcgctggaaggcaaaaccgtcgttaccgaaagcggcattacgggtaaggcggatgtggaatttatgcgggcgcgcggcgtgcacaccttcctgatcggcgaaacgttcatgcgtgccgacgatattgaagcagaagtgggcaaactcttctaa

SEQ ID NO: 63041 - DNA, 1923 bp, Neisseria meningitidis
atgattgaaatcaaaaacctcaccctgcaacgcggtttgaaaatcctgctcgacaaagccaacgccactgtcaatcccggtcagcgcgtcggtttgatcggcaaaaacgggacgggcaaatccagcctgtttgccttactcaagggtgaaatcactcaggacggcggcgatgtctcgattccgaaaaactggcggctcgcttccgtttcccaagaaacgcccgatttggatatttccgctttggattacgttttgcagggcgatgccgagttgcaggcttttcagacggcattgaggcaggcggaagcgcaaaatgacggcatgaagcaggcggaatatcatgctaaattggaagaaatcgacgcttataccgcgccggcccgcgcggcaaaattgttgaacgggctgggtttttcgcaagaagaacacagccgccccgtcaaatccttttccggcggctggcgtatgcgcctgaatcttgcgcaagccctgatttgccgcgccgatttgctcttgcttgacgaaccgaccaaccacttggatttggaaaccgtcttgtggctggaaaaccaccttgcctctttaccctgcacgcaaatcatcatttcccacgaccgcgatttcctcaatgcggcaaccacccaaaccatcgaattgtcccagcaaaagctcacgcaatacggcggcaattacgatttttaccaaaacgaacgcgcgcagcgtctcgcgcagcaacaagccgcctatgtcaaacagcaggcgcaaatcaaacatctgcaatcctttatcgaccgcttcaaagccaaagccaccaaagccgttcaggcgcaaagccgcatgaaggctttggcaaagctcgaacgcatcgctcccgcgcatttggacagcgagttttcctttgagttttacaatcccgagcatctgcccaatcctttgctgaagctggaacacgcagatttgggttacgaaggcaaaactgttttgcacgacattaccctgtcgctggaaagcggcgcgcgctatggtttattgggtgtcaacggcagcggtaaatctacatttatcaaagccttggcgggcaaaatcgatttgctctccggcagcatcgtccgttccgaaaaactcaatatcggctattttgcccaacaccaactcgataccatccgcgccgaccaaaaccctgtttggcatattcagcagctttctcccgaagtacgcgaacaagaaatccgaaatttcctcggcggcttcaattttgttggcgatatggcgttacagaaaaccgaacctttttccggcggagaaaaagcccgcctcgccctcgccatgattatctggcaaaagccgaacctgctgctgcttgacgaaccaaccaaccatctggacttggatatgcgccacgccctgacgctcgctctgcaaagtttccaaggcgccttaatcatcgtatcgcacgaccgcagcctgcttgaagcgactaccgacagcttcctcctgatcgacaaaggccatctgaagaacttcgacggcgatttgaacgattaccgccaatggcgtttggcacaggaaaacgccgccgccgcacccgcagcatccgcacaaagccaaagccgcaaagacaccaagcgcatcgaagcgcaaatccgtcaggaaaaagcccgacgcggcaagccgatacagcagaaaatagaccgtgccgaaaaagaaatggcgcagctttccgaaattcagacggcatgtgaagcatttttagcacaagaagacgcttaccttgaagcaaacaaagaaaaattgcaaaataccttatccctgctggcaaaagtcaaaacacaacttgcccaaatcgaagaggtttggctggcttgtcaagaagaattggaacggattgaaactgaaatcgagaaacagtttgccgagcgataa

SEQ ID NO: 63042 - DNA, 2391 bp, Neisseria meningitidis
atgactgaacaaaaacacgaagaatacggcgccgacagcattcaggtgctcgaaggcttggaagcggtacgcaaacgccccggcatgtacatcggcgacacgcaggacggcagcggcctgcaccatatggtgtttgaagtattggacaacgccattgacgaagcactcgccggacattgcgacaaaatcacggtaacgatacacgccgaccattccgtcagcgtcgccgacaacgggcgcggtatgcccaccggcatccacccgaaagaaggacgctccgccgccgaagtcatcatgaccgtattgcacgcgggcggtaaattcgacaacaacagctacaaaatctccggcggcctgcacggcgtgggcgtgtccgtcgtcaacgcgctgtccgactgggtaacgctgaccatctaccgcgacggcaaagaacacttcgtccgcttcgtgcgcggcgaaaccgaagagccgttgaaggttgtcggcgattccgataaaaaaggcacgaccgtgcgcttcctcgccagtgcggaaaccttcggcaacgtcgaatacagcttcgacatcctcgccaaacgcatccgcgaactttcgttcctgaacaacggcgtggacatcgaattgaccgacgagcgcgacggcaaacacgaaagcttcgccctttccggcggcgtggctggattcgtgcaatacatgaaccgcaaaaaaacgcccttgcacgaaaaaatcttctacgcgttcggcgagaaagacggcatgagcgtcgaatgcgcaatgcaatggaacgacagctatcaggaaagcgtgcagtgcttcaccaacaacatccctcagcgcgacggcggtacgcacctgaccgcgttgcgccaagtgatgacgcgcaccatcaacagctacatcgaagccaacgaagtcgccaaaaaagccaaagtggaaaccgccggcgacgatatgcgcgaaggtttgacctgcgtgttgtccgtcaaactgcccgaccccaaattttcgtcccaaaccaaagacaaactggtttccggcgaaatcggtcccgtcgtcaacgaagtcatcagccaagccctgaccgacttcctcgaagaaaaccctgccgaagccaaaatcatcaccggcaaaatcgtcgatgccgcccgcgcgcgcgaagccgcccgcaaagcccgcgaaatcacccgccgcaaaggcgtaatggacggcttggggctacccggtaaactcgccgactgccaagaaaaagaccccgcattgtcagaactttatctggtcgagggcgattctgcaggcggttccgccatgcaggggcgcgaccgcaaattccaagcgattttgccgcttaagggcaagattttgaacgtcgaaaaagcgcgctttgaaaaaatgctcgccagtcaggaagtagccgctttgattaccgcgttgggcgcgggcatcggcaaagaagaattcaatgccgagaagctgcgttaccaccgcatcattatcatgaccgatgccgatgtggacggtgcgcatatccgcaccttgcttttgaccttcttctaccgccaaatgcccgaactggtcgagcgcggctacatctatatcgcccagccgcctttgtataaagcgaaatacggcaaacaggaacgttacctcaaggacgagttggaaaaagaccaatggctgctcggtcttgccttggaaaaagccaaaatcgtttcagacggccgcaccatcgaaggcgcagaacttgccgacaccgccaaacaattcctgttggcaaaaaccgtcatcgaacaggaaagccgcttcgtagacgaactcgtcctgcacgccatgctacacgcgtcgcccattgatttgacgtcgtctgaaaacgccgataaagccgttgccgaactttccggtctgcttgacgaaaaagaagtcgccctcgaacgcatcgaaggtcatgaaggacaccggttcatcaaaatcacgcgcaagctgcacggcaacgtcatggtcagctacatcgaacccaagttcctcaacagcaaagcctaccaaaccctcacccaaaccgccgccgcgctcaaaggcatggtcggcgagggtgccaagctttacaaaggcgaaaacgggtacgacgcggacagctttgaaaccgctttggacatcttgatgagcgttgcccaaaaaggtatgtccatccaacgatacaaaggcttgggcgagatgaaccccgaacagctgtgggaaaccacgatggatcccgccgtgcgccgcctgttgaaagtgcgcatcgaagatgccattgccgccgacgaagtattcgttaccctgatgggcgacgaggtcgaaccgcgccgcgcctttatcgaaaacaacgcgctgattgcccaaaatatcgacgcataa

SEQ ID NO: 63043 - DNA, 444 bp, Neisseria meningitidis; identical to SEQ ID NO: 38367

SEQ ID NO: 63044 - DNA, 1500 bp, Neisseria meningitidis
gtgttcaaaaaataccaatacctcgctttggcagcactgtgtgccgcctcgctggcaggctgcgacaaagccggcagctttttcggtgcggacaaaaaagaagcatccttcgtagaacgcatcgaacacaccaaagacgacggcagcgtcagtatgctgctgcccgactttgtccaactggttcaaagcgaaggcccggcagtcgtcaatattcaggcagcccccgccccgcgcacccaaaacggcagcggcaatgccgaaaccgattccgacccgcttgccgacagcgacccgttctacgaatttttcaaacgcctcgtcccgaatatgcccgaaatcccccaagaagaagcagatgacggcggattgaacttcggttcgggcttcatcatcagcaaagacggctatattctgaccaatacgcacgtcgttaccggcatgggcagtatcaaagtcctgctcaacgacaagcgcgaatataccgccaaactcatcggttcggatgtccaatccgatgtcgcccttctgaaaatcgacgcaacggaagagctgcccgtcgtcaaaatcggcaatcccaaagatttgaaaccgggcgaatgggtcgccgccatcggcgcgcccttcggcttcgacaacagcgtgaccgccggcatcgtgtccgccaaaggcagaagcctgcccaacgaaagctacacacccttcatccaaaccgacgttgccatcaatccgggcaactccggcggcccgctgttcaacctgaaaggacaggtcgtcggcatcaactcgcaaatatacagccgcagcggcggattcatgggcatttccttcgccatcccgattgacgttgccatgaatgtcgccgaacagctgaaaaacaccggcaaagtccaacgcggacaactgggcgtgattattcaagaagtatcctacggtttggcacaatcgttcggtttggacaaagccggcggcgcactgattgccaaaatcctgcccggcagccccgcagaacgtgccggcctgcaggcgggcgacatcgtcctcagcctcgacggcggagaaatacgttcttccggcgaccttcccgttatggtcggcgccattacgccgggaaaagaagtcagcctcggcgtatggcgcaaaggtaaggaaatcaccgttgccgtcaaactgggcaatgcttccgaacaaaccggttcctcgtccgagccggacaaagccccttatgccgaacaccaatccggtacgttctcggtcgaatccgcaggcattacccttcagacacataccgacagcagcggcggacacctcgtcgtcgtacgggtttccgacgcggcagaacgcgcaggcttgaggcgcggcgacgaaatcctcgccgtcgggcaagtccccgtcaatgacgaagccggtttccgcaaagctatggacaaggcaggcaaaaacgtccccctgctggtcatgcgccgtggcaacacgctgtttatcgcattaaacctgcaataa

SEQ ID NO: 63045 - DNA, 735 bp, Neisseria meningitidis
atgagcgcaaacgtcagccgccttgttgttcaaaacctgcaaaaaagtttcaaaaaacgccaagtcgttaaaagcttctccctcgaaatcgaaagcggagaagtcgtcggcctgctcgggcccaacggcgcgggtaaaaccaccagcttctacatgatagtcggactcattgccgccgacgcaggcagcgtaaccctagacggacaagaattgcgccacctgcccatacacgaacgcgcccgcctcggtgtcggctacctgccgcaggaagcctcgatattccgcaaaatgaccgtcgaacaaaacatccgcgccatcttggaaatcagaaccaaagataaaaatcaaatcgacagggaaatcgaaaaactgctcgccgaccttaatatcggacacttgcgccgcagccccgcgccgtcgctgtccggcggcgaacggcggcgcgtcgaaatcgcccgcgtactcgccatgaaaccgcattttattttgctggatgagccttttgccggtgttgatcccatcgccgtcatcgacatccaaaaaatcatcggatttctcaagtcgcgcggtatcggcgtactgattaccgaccacaacgtacgcgaaaccctcagcatctgcgatcgggcctacatcatttcagacggtgcggtgctggcatcgggaaaacctgatgatttggtcggaaacgaacaggttcgttctgtttatctgggtaagaacttcaaatattga

SEQ ID NO: 63046 - DNA, 138 bp, Neisseria meningitidis; identical to SEQ ID NO: 36823

SEQ ID NO: 63047 - DNA, 951 bp, Neisseria meningitidis
atgtcccaacaccgcaaactgattattttgggttccggccccgccggatacaccgccgccgtctatgccgcgcgcgccaatttaaaccccgtcattattacaggtatcgcgcaaggcgggcaactgatgacaacgaccgaagtggacaactggcctgccgatgccgacggcgtgcaagggccggaattgatggcgcggtttctcgcccacgccgaacgtttcggaacggaaattatttttgaccaaatcaacgccgtcgatctgcaaaaacgcccgttcacactcaaaggcgatatgggcgagtacacttgtgatgccctgattgtcgcaacaggcgcgtccgccaaatacctcggtttgccgagtgaagaagcgtttgcagggaaaggcgtttccgcttgtgccacctgcgacggtttcttctacaaaaaccaagatgttgccgtagtcggcggcggcaatacggcagttgaggaagcactctaccttgccaatatcgccaaaaccgttacgctgattcaccgccgcagcgagttccgcgccgaaaaaatcatgatcgacaaactgatgaaacgcgtagaagagggcaaaatcatcctcaagctggaaagcaacctgcaagaagtcttgggcgacgatcggggcgtaaatggcgcattattaaaaaacaacgatggttctgagcaacaaattgccgtcagcggcatctttatcgccatcgggcacaagccgaataccgatattttcaaagggcagttggaaacggacgaagccggatacctgaaaacaaaaggtggtacggcggacaatgtcggtgcaaccaatatcgaaggcgtatgggcggcgggcgacgtaaaagaccatacctaccgtcaggcaattaccagcgcggcttccggctgtcaggcggctttggacgcggaacgctggctgggcagccaaaacatttga

SEQ ID NO: 63048 - DNA, 1188 bp, Neisseria meningitidis
atgacagaggacgaacgtttcgcgtggctgcaattggcgtttacgccctatatcggcgcggaaagcttcctgctgctgctgcgccgtttcggcagcgcgtcaaacgccctgtccgcaccggcggaacaggtcgccccggcggtgcggcacaagcaggcggccgaggcttggcgcaatgcggaaaaacgcgctttggcgcggcaggcggcagaagcggcgttggaatgggaaatgcgggacggatgccgcctgatgctgcttcaggatgaagatttccccgaaatgctgacgcaggggctgaccgcgccgccggttttgtttttgcgcggcaacgtgcggctgctgcacaagccttccgccgccatcgtcggcagccgccatgccacgccgcaggcgatgcggattgccaaagatttcggcaagtcgttgggcgggcaaaatatccccgttgtgtcgggtatggcttccggtatcgatactgccgcccatcagggcgcactggaggcagaaggcggcaccatcgccgtgtgggggacgggtatagaccgcatttacccgccgtccaataaaaaccttgcctatgaaatcgccgaaaaaggattgattgtcagcgagtttcccatcggtacgcgcccgtatgccggcaattttccgcgccgcaaccgcctgattgccgccctgtcgcaagtaacgctggtggttgaagccgccttggaatccggttcgctgattaccgccggcttggcggcagaaatggggcgcgaagtgatggcggtacccggttcgatagacaatccgcacagcaaaggctgccacaaactgattaaagacggcgcgaaactgacggaatgcctggacgacatcctgaacgaatgcccggggctattgcaaaatacgggtgcttcatcatattctataaataaggatacgcccgacacgggcagtcgcgccgttcagacggcatacgccccgccgcctgccgcaaaaatgccgtctgaaggggcggcaggcggcacagccgtcggcggcatactggataaaatgggtttcgaccccatccatcccgacgtgcttgccggacagttggctatgcctgccgcagatttgtatgccgcactgttggaattggaattggacggcagcgttgccgcaatgcccggcggcagataccagcgtatccgaacttga

SEQ ID NO: 63049 - DNA, 1275 bp, Neisseria meningitidis
atgaaaacactacaagactggctctcgcatttggaaaccgcccacagcggcggtttgatcgacatgggtttggagcgcacgagcgaagtgaaaaaacgcatgaagctcgagccgcaatgccccgtcgtcgttgtcgcgggaaccaacggcaaaggttcggtctgtgcctacctgacacagatttacaaacaggcgggctacaaaaccggtacgctgaccagcccgcatttattgcgttacaacgaacgcatcgccatcaacgccgaacccgtttcggacgatacgattattgcctctttcgagcgcatcgaagcggcgcgcagcgaaatatcgctgacttattttgaattcaatacgttggcggccgtcgacatcttcatgcgcgaacaggttgacgtgatgatattggaagtcggcttgggcggacgcttggacgcggtcaacgcatttgacggcgattgcgcggtggttactagtgtagatttggaccatcaggcgtttttgggcgatacggtcgagcaggtcggctttgaaaaagcaggcatgttccgcagcggcaaacccgcaatctgcggtcaaaaccccgcgcccgaatcgttgctttcacacgccgaagccataggcgcgaaactgctgatggtgcagcgcgatttcgagtttcacgcgatggaaaacatccaatggaactaccgcttccggccgcaacattcagacgaccccgcgcgcaaccgcaatgccctgcccttccccgcattgcgcggcacataccaactttccaacgccgcctgcacgttgaccgtattggaatgcttgaacgccaaattgccggtggacatcggcgccatcaaacgcggattgctgctggttgaaaatcccggacgcttccaagtcctgcccggccgtccgctgaccgttttggatgtcggacacaatccccacgctgcccgcgccctgcgccgcagcctgattaatttggcgtttgcgcaaaaacgcaccgccgtgttcagcatgttgtccgacaaagacatagacggcgtgttggaaaccgttaaagaccagtttgacgagtggtatatcgcaccgttggatgtaccgcgcggcatgacgctcgagagcctgcaaaacaaactgcacgaacacagcatcgaaaacatacaaacattcgccgccgtccgcgaagcataccgggcggcagcctcaaaagcgggcgagaacgacagaatcgtcgttttcggctcatttcataccgttgccgatgtcatgtcggtactttaa

SEQ ID NO: 63050 - DNA, 438 bp, Neisseria meningitidis; identical to SEQ ID NO: 45344

SEQ ID NO: 63051 - DNA, 969 bp, Neisseria meningitidis
atgaacgagaaaaccattatccttgccaatccgcgcggcttctgcgccggagtggatcgggcaatcagtattgtcgagcgtgctttggaagaattcggcgcgccgatttatgtgcgccacgaagtcgtccacaacaaattcgtcgtggacaacctgcgcgaaaaaggcgcggtgtttatcgaagacttggcggaagtgccgccgggcgcgacgctggtttattcggcacacggcgtatcgaaggcggtgcagcaagaagcggcggagcgcggtttccgcgtgtttgatgcgacttgcccgctggtgacgaaagtgcataaggaagtcgcccgactggatgcccaagactgtgaaatcatcatgatcgggcataaggggcacgtcgaggtcgaaggcacgatggggcagcttgcgccgggcaaaatgcttttggtcgaaacggtcggagatgtggcaaaactcgaagtcagaaaccccgacaaactcgcctatgtcagccaaaccacgctctcggtcgatgaaaccaaagacatcatcgccgcgctgaacgcgcgtttccccaatatccgcaatccgcacaaggaagatatctgctatgcgacgaccaaccggcaaaccgccgtcaaagagttggcagaacagtgcgacatcgtgattgtggtcggttcgcccaattcgtctaacagcaaccgcttgcgcgaagtggcggcatcgcgcggaatcgatgcgtatatggtggataatgcaggctacctgcaacgcgcatggtttgagggcaaaaacaaagtcggcgtaacggcaggcgcgtccgcgcccgaagtgttggtgcgggaagtattggcaaccatacgcggatgggggcacgaaaccgtgcgcgaaggggagggcgcggaagaaagcatcgtgttcgtcctgcccaaagagttgcgccgcgagggcgaaaccaaacccgatttgtgcaaacgttga

SEQ ID NO: 63052 - DNA, 585 bp, Neisseria meningitidis
atgcccaaatcaccgccacccaagccgccaccgttcccatcgtcggcaaaaatagaagtcgatgaagaaggacaaatcaacggccaaaccacaccgagtaaggacaaagatgcccgttggatcaagaaaaacggcctctacagactcggttacaaacaacatacccgtaccgatgcggaaggctatatcgagaaactgcacatcacccccgccaatgcccatgagtgcaaacacctgccgcctttgttggaaggactgcccaaaggtacgaccgtctatgccgacaaaagctacgacagtgcggaaaaccggcaacatctggaagagcgtcagttgttagacggcattatgcgcaaagcctgccgcaaccgtccgctgtcggaagcgcaaaccaaacgcaaccgatatttgtcgaagacccgttatgtggtcgaacaaagcttcggtacgctgcaccgtaaattccgctatgcgcgggcagcctatttcggactgattaaagtgagtgcgcaaagccatctgaaggcgatgtgtttgaacctgttgaaagcggccaacaggttaagtgcgcctgttgccgcctaa

SEQ ID NO: 63053 - DNA, 2769 bp, Neisseria meningitidis
atgaaatcttctttccggttgaagccgatttgtttttatcttatgggtgttatgctatatcatcatagttatgccgaagatgcagggcgcgcgggcagcgaggcgcagatacaggttttggaagatgtgcacgtcaaggcgaagcgcgtaccgaaagacaaaaaagtgtttaccgatgcgcgtgccgtatcgacccgtcaggatatattcaaatccagcgaaaacctcgacaacatcgtacgcagcatccccggtgcgtttacacagcaagataaaagctcgggcattgtgtctttgaatattcgcggcgacagcgggttcgggcgggtcaatacgatggtggacggcatcacgcagaccttttattcgacttctaccgatgcgggcagggcaggcggttcatctcaattcggtgcatctgtcgacagcaattttattgccggactggatgtcgtcaaaggcagcttcagcggctcggcaggcatcaacagccttgccggttcggcgaatctgcggactttaggcgtggatgacgtcgttcagggcaataatacctacggcctgctgctaaaaggtctgaccggcaccaattcaaccaaaggtaatgcgatggcggcgataggtgcgcgcaaatggctggaaagcggagcatctgtcggtgtgctttacgggcacagcaggcgcagcgtggcgcaaaattaccgcgtgggcggcggcgggcagcacatcggaaattttggcgcggaatatctggaacggcgcaagcagcgatattttgtacaagaaggcgggttgaaattcaattccaacagcggaaaatgggagcgggatttccaaaggccgtactggaaaaccaagtggtatcaaaaatacaatgacccccaagaactgcaaaaatacatcgaaggtcatgacaaaagctggcgggaaaacctggcgccgcaatacgacatcacccccatcgatccgtccagcctgaagcagcagtcggcaggtaatctgtttaaattggaatacgacggcgtattcaataaatacacggcgcaatttcgcgatttaaacaccaaaatcggcagccgcaaaatcatcaaccgcaattatcaattcaattacggtttgtctttgaacccgtataccaacctcaatctgaccgcagcctacaattcgggcaggcagaaatatccgaaagggtcgaagtttacaggctgggggcttttaaaggattttgaaacctacaacaacgcaaaaatcctcgacctcaacaacaccgccaccttccggctgccccgcgaaaccgagttgcaaaccactttgggcttcaattatttccacaacgaatacggcaaaaaccgctttcctgaagaattggggctgtttttcgacggtcctgatcaggacaacgggctttattcctatttggggcggtttaagggcgataaagggctgctgccccaaaaatcaaccattgtccaaccggccggcagccaatatttcaacacgttctacttcgatgccgcgctcaaaaaagacatttaccgcttaaactacagcaccaataccgtcggctaccgtttcggcggcgaatatacgggctattacagctcggaaggcgaatttaagcgggcattcggagaaaactcgccgacatacagggaacattgcaacccgagctgcgggctttatgaacccgtattgaaaaaatacggcaaaaagcgcgccaacaaccattcggtcagcattagtgcggacttcggcgattatttcatgccgttcgccagctattcgcgcacacaccgtatgcccaacatccaagaaatgtatttttcccaaatcggcgactccggcgttcacaccgccttaaaaccagagcgcgcaaacacttggcaatttggcttcaatacctataaaaaaggactgttaaaacaagatgatacattaggattaaaactggtcggctaccgcagccgcatcgacaactacatccacaacgtttacgggaaatggtgggatttgaacggggatattccgagctgggtcagcagcaccgggcttgcctacaccatccaacatcgcaatttcaaagacaaagtgcacaaacacggttttgagttggagctgaattacgattatgggcgttttttcaccaacctttcttacgcctatcaaaaaagcacgcaaccgaccaacttcagcgatgcgagcgaatcgcccaacaatgcgtccaaagaagaccaactcaaacaaggttatgggttgagcagggtttccgccctgccgcgagattacggacgtttggaagtcggtacgcgctggttgggcaacaaactgactttgggcggcgcgatgcgctatttcggcaagagcatccgcgcgacggctgaagaacgctatatcgacggcaccaacgggggaaataccagcaatgtccggcaactgggcaagcgttccatcaaacaaaccgaaacccttgcccgccagcctttgatttttgatttttacgccgcttacgagccgaagaaaaaccttattttccgcgccgaagtcaaaaatctgttcgacaggcgttatatcgatccgctcgatgcgggcaatgatgcggcaacgcagcgttattacagttcgttcgacccgaaagacaaggacgaagaagtaacgtgtaatgctgataaaacgttgtgcaacggcaaatacggcggcacaagcaaaagcgtattgaccaattttgcacgcggacgcacctttttgatgacgatgagctacaagttttaa

SEQ ID NO: 63054 - DNA, 1407 bp, Neisseria meningitidis
atgaccgccgctcctgatatcctctaccggcaagccgccgcccttttggaacaatccaataccgcccaagccctgcccctgttgcaacaggcggcagagcaaggttatgcggaagctgctttcgtattgggcaaccatctgctgcaaaacggccaaccggagcaggcactttcatggttggaagccgccgcggcccaacgccatcccaaagcactcttctccctgctgcaacaacgcgaacacaacggcaccccgaccggacagcttctcaacgactatgcctggctgggtgagcaggggcactcagaagcccaattaatcctcatgcgttaccacgcgcaacgcaacgatccacaatcgctctactgggcggaacttgctgccgcccgatatgccgcacctgcgtattaccatctggcacgccatcatcaacgccaaggcgacgttgaaacagccatcgaacaatacgaaaaagcggcagcactcggcgtaactgccgcctgctggcaacttggtcaaatctacttctacggtacaggtgtcagccccaaccacgcacaagccgaacactatctcgaaccagccgcacaagccggccacatcgccgcacaaacgctgctggctgaccttcttgccgcccaacgcaaacctgaagccttggaatggtatcgtcgtgccgccgataaggaacaagcggaagcacagtctaagctggcccaatacgccctgaccggcgaactttccgaacgcgatccgttccaagcggcacgatatgccaaagccgctgccgagaaaaaccatcctgaagccctgaaaatcatgggcgacctctaccgctacggcctcggcatcaaagctgacaaccatatcgcgcacgattactaccaccgtgctgccgcgctgggttctgccgccgcagcacaaaaactcatcagcgacgccgcgctgtaccatccgcaacaatacgaacaaatcaaaactgccgccctgcaacaacaacaaaccgaaaccatctaccgtttggcggaagcacaagcctgcgccatcggccgtcccgccgactacaatgccgcgcgaaaaaattacatggaagctgccgggttccaccataaaaacgcagcggcagccttaggccgcatctaccattacggcctcggtacggcgcaagatcctcgggcggctgcacactggtacgccattgctgccgaacaaaaccacccttccgcccaataccacctcgcctgtttttactatcacgggcaaggtgtcggctgtcatgttccgaccgcctgctactggctgcaggccgccatcggcaacggccacacttcggccgaatcattaatatccctattagaacaatggcgacgcgaagcacaccatgccatcggacaaaaggccgtctga

SEQ ID NO: 63055 - DNA, 537 bp, Neisseria meningitidis
gtggatttgagggaagtaaaattaggcggcgaaaccatttacgagggcggtttcgtcagcatcagcaaggataaggtcaggctgcccaacggtaacgaagggcagcgtatcgtcatccgtcatcccggtgcggcatgtgtcttggcggtaacggatgatgaaaagatcgttttggtgcggcagtggcgttatgcggcaaatcaggcgacattggaacttcctgcgggcaagctggatgtggtgggcgaggatatggcagcgtgtgcgctgcgagaattggcggaggaaacgccttatgttgccgatagtgtacgcctgttgtacagtttttatacggcggtcggtttttgcaacgaaaaaatgtatttgtttgaggcggaaggcgtacgcttgggcagtacgcttgccaatgacgaagacgagattacggaaaccgtattgatgtcgaaagaagaagtccgtcaggcattggcaaacgatgaaattaaagacggcaagacattaatcggtttgcaatactggctgatgaaggattga

SEQ ID NO: 63056 - DNA, 957 bp, Neisseria meningitidis
atgattttgacaccgccggacacaccctttttcctccgcaacggcaatgccgacacgattgccgccaaattcctgcaacgccccgcacccacataccgccgcgagctgcttcccgacagcacgggtaaaaccaaagtcgcctacgatttttcagacggcatttcgcccgatgcgccgctggtcgtgctgtttcacggtttggaaggaagcagccgcagccattacgcggtcgaactgatgctcgcggtacgcagccgcggttggcacggcgcagtcgtccatttccgcagctgcggcggcattgccaacaccgctccggtgttctaccacttgggcgataccgccgaaatcgcctttactttggacacgctcgccgcgcgttaccgtgaaatatacgccgtcggcgtatcgctgggcggcaacgcgctggcaaaatatttgggcgaacagggcgaaaacgcgctgccgcaagccgccgccgtcatctccgcccccgtcgatgcagaggcggcaggcagacgcttcgacagcggcatcacgcggctgctctacacgcgctacttcctccgcaccctgatacccaaagcacggtcgctccaaggttttcagacggcatttgccgcagggtgcaaaacactgggcgagtttgacgaccgtttcaccgcaccgctgcacggctttgccgaccggcacgactactaccgccgaacttcctgcaaaccgctgctcaaacacgttgccaaaccgctgctcctgctcaatgccgtcaacgaccccttcctgccgcccgaagcgttgccgacaccggacgaagtgtccgaagccgttaccctgttccagccggcacacggtggtcatgtcggctttgtcggcagcaccggcggcaggctgcacctgcaatggttgccgcagaccgtcctgtcctatttcgacagcttccgcacaaacagtcgttaa

SEQ ID NO: 63057 - DNA, 474 bp, Neisseria meningitidis
atgactgatttttccgtttgggagaccgccccctttggtgcaaccgtcgatcatatcctgcaacgctaccacaatgtccaccgcgcacaatttgaagaattggtgccgctggcgcagaaagtggcccaagtccatgccgatacctttccggcagaaattgccgggctgcttgcctatatgcagaacgaactgctgatgcatatgatgaaggaggagcggatgctgtttccgatgattaatcagggtatcggtcggggtgcggcaatgcccatcagtgtgatgatgcacgaacatgaagaacacgaccgcgccatcgcacggctcaaagagctgaccgatgatttccaagtgcccgaaggagcctgcggaagctggacgcggctttacgctttggccaaagaaatggtggaggatttgaacgaccacattcatttggaaaacgatattctgtttgcccgcgtactcgattcttaa

SEQ ID NO: 63058 - DNA, 384 bp, Neisseria meningitidis
atgttccgtactatgcttggcggaaaaatccaccgcgccaccgtaaccgaagccgatttaaactatgtcggcagcattaccgtcgatcaagacctgttggacgcggcaggcatctaccccaacgaaaaagtcgccatcgtcaacaacaacaacggcgaacgttttgaaacctataccattgcagggaaacgcggcagcggcgtgatttgtctgaacggtgctgcggcaaggctggtgcagaaaggcgatatcgtcatcatcatgtcttacgtccaactctccgaacccgaaatcgccgcacacgaacccaaagtcgtcttggtagacggaaacaacaaaatccgcgacatcatctcctatgagccgccgcacaccgtgctgtaa

SEQ ID NO: 63059 - DNA, 420 bp, Neisseria meningitidis; identical to SEQ ID NO: 44898

SEQ ID NO: 63060 - DNA, 1083 bp, Neisseria meningitidis
atgtttttatggctcgcacatttcagcaactggttaaccggtctgaatatttttcaatacaccacattccgcgccgtcatggcggcgttgaccgccttggcgttttccctgatgttcggcccgtggacgatacgcaggctgaccgcgctcaaatgcgggcaggcagtgcgtaccgacggcccgcaaacccacctcgtcaaaaacggcacgccgacgatgggcggttcgctgattctgaccgccattaccgtgtccactctgttgtggggcaactgggcgaacccgtatatctggattctcttgggcgtactgcttgccaccggtgcgctcggtttttacgacgactggcgcaaagtcgtctataaagaccccaacggcgtgtccgccaaattcaaaatggtgtggcagtcaagcgttgccattatcgccggtttggcattgttttaccttgccgccaattccgccaacaatattttgattgtcccgttcttcaaacaaatcgccctgccgctgggcgtggtcggctttttggtgttgtcctacctgaccatcgtcggcacatccaacgccgtcaacctcaccgacggcttggacggccttgcgaccttccccgtcgtcctcgttgctgccggcctcgccattttcgcctacgtcagcggacactaccaattttcccaatacctccagcttccctatgtcgccggtgcgaacgaagtcgctatattctgtaccgccatgtgcggcgcgtgcctcggtttcttgtggttcaacgcctatcccgcgcaagtctttatgggcgatgtcggcgcgctggcattgggtgccgcgctcggtaccgttgccgtcatcgtccgccaagagtttgttttagtgattatgggcggtctgttcgtcgtagaagctgtgtccgttatgcttcaggtcggctggtataagaaaaccaaaaaacgcatcttcctgatggcgcccatccatcaccactacgaacaaaaaggctggaaagaaacccaagtcgtcgtccgcttttggattatcaccatcgtcttggtgttgatcggtttgagtaccctcaaaatccgctga

SEQ ID NO: 63061 - DNA, 714 bp, Neisseria meningitidis
gtggcattggttaaaggggatgtgaatacggcggcgaatgcggctactgtggcagtggagaataatagtcttttagctcgcaggagggtaaatatacgttggactccgcgacaagaattggaacatgaatatgccattcttgaaatccaggccattaccaatcaaatccgaaggctggatccgaaatttaacgggattgctattatgaggaatcctagagagccgtggacaagacatgatgtacaaacatacaggcaatattataatcaattaagggaatctagaggcattcctgttctcccaatttatagaatgaggataaacaacggcaatgaatttaaccgtatcatgtcatcaaaatacccttataatgagctttatgtagccaatcctaaatcggcgacggggtattttagggtagattcgtatgatcctgcgacaagggaaattatttcaagaaaatttacccaattttctcaaatccaagaaagtacggggattggttatatcaaggaggctgttagaaaatatagccctggtactgtcatttccaatgttccaagtacacctactacgataagaggaagaaagcttgaaggaaaacttattttagaagttcctgctcaggtcaatccaattccacaatctgtattaagggcggcacaagaagaaaatgttatcattagagatacaacaggaaggatttacaaatga

SEQ ID NO: 63062 - DNA, 624 bp, Neisseria meningitidis
atgaaaatcatacacaaaggtttggtcgaatatctgccgacttttgaagcgatgaaaacctttaatgccggacggaatgccgacaccgaagacgaactgtgggtcgtcgaacacccgcccgtgttcacacaaggactggcgggaaaacccgaacacctgctgattcgcgacgacattcccgtcgtccaaatcgaccggggcgggcagattacctatcacgggcccgggcaattggtcgtttatacgatgattgatttcaaacggcgcaaaaccagtgttagaaacatcgtttccgcgcttgaaaacagcatcatcgccacattggcagaatacggcatcgaagcggcggcagaccccaaacgccccggcgtttatgtcggagaacgcaaaatcgcctcactggggctgcgtatcaaaaacggctccgtctatcacgggcttgcgctcaacgtcaatatggatttaagcccgtttacccacatcaacccctgcggctacgccggtatggaaatgacgcaaatcgcgaattttgtccaaccctgccccacgccggacgaagtcgccgccaaactcaccgcacaccttgaaacacaattcacaccgaaagcagacaacaatgagtga

SEQ ID NO: 63063 - DNA, 1392 bp, Neisseria meningitidis
atgagcggtcagttgggcaaaggggcggatgcgcctgatttggtgtacggtttggaagacaggccgccgttcggtaatgcgctcttgagtgccgttacccatcttttggcgatttttgtgccgatgattacgcccgcgctgattgtgggcggcgcgctggaactgccggtggaaatgacggcgtatctcgtgtcgatggcgatggttgcgtcgggtgtcggcacttatttgcaggtcaaccgcttcgggccggtcggttcggggatgctgtccatccagtcggtgaatttctcgttcgttaccgtcatgattgcgctcggcgcggggatgaaagagggcggtttgactaaggatgcgatgatttcgacgctcttgggtgtatcgtttgtcggcgcgtttttggtgtgtttctcggcgtggctgctgccgtatttgaaaaaagtgattacgccgacggtcagtggcgtggtcgtgatgctgattggcttgagtttggtacacgtcggtattaccgatttcggcggcggcttcggcgcgaaggcggacggcacgttcggctcgatggaaaacctggggctggcttcgctggtgttgctgattgtgttgatattcaactgcatgaaaaacccgctgttgcggatgagcggcatcgcggtcggtctgattgccggttacattgtcgcgctgtttttgggcaaggtggatttttccgcgctgcaaaacctgccgctggttacgctgcccgtaccgtttaaatacggttttgctttcgactggcacgcgtttattgtggcgggcgcgattttcttgttgagcgtgtttgaggcggtcggcgatttaaccgcgacggcaatggtgtccgaccagccgattgaaggcgaggaatacaccaaacgcctgcgcggcggcgtgttggcagacggcttggtgtcggtgattgcgacggctttgggttcgctgccgctgacaacgtttgcgcaaaacaacggcgtgattcagatgaccggcgtggcttcgcgccatgtgggcaaatatattgccgtgattttggtgctgttgggtctgttccccgttgtcggtcgcgcgtttacgacgattccgagtccggtgttgggcggcgcgatggttttgatgttcggcttgattgcgattgcgggcgtgcggattttggtcagccacggcatccgcaggcgcgaagcggtaattgcagcaacgtcggtcggtttgggcttgggtgtcgcgtttgagccggaagtgtttaaaaacctgcccgtcttgttccaaaactctatttccgccggcggcattacggcagtcttgctgaatttggtcttgcccgaagataaaaccgaggcggcggtcaagtttgataccgaccacttggaacactga

SEQ ID NO: 63064 - DNA, 621 bp, Neisseria meningitidis
atgacaaagttatacgcagaaatcgccaagagggaggcgcaggacgacggcacggtcaaggtttggggttatgcctcaagcgaggcggtcgattcggacggtgaagtcatcgcgacggcagctatgaaggcggcgattcccgattatatgaagtttgacgcggggcgcgagatgcacggctcaaacgctgcgggaacggcaattgaaatcaacgttgaagacgacggcataacctttttcggtgctcatatcatcgaccccgttgtcgtgtcgaaagtcaaaacaggcgtttacaaaggcttttccatcggcggcagcgttaccgcccgcgatgatttgaacaagtcgcaaatcacgggcttgaagctgacggaaatcagccttgtcgagcgccctgccaatcccgatgcggtgtctacctgctttaaggcggacaaaggtgcggaagcggtaaacaacgatacagaacataatactgcatattttagccatttcccttccaaacaaaaaagcaccggcggcagccgatgccccttcctttacaggttcccctattttttcactgcgggcagcactggtttggctgggccttttggtgcgggcgcgccgacggaagcctga

SEQ ID NO: 63065 - DNA, 942 bp, Neisseria meningitidis
atgtggcatggagaggaaatggaagacgagatcgattacgaggatttgggtttgattctgacccccgaacagcttgcggttttggaggcggacgatggggctgaatctgcgggcgatacggatgcggacggggaaaaagcacctgatgcggaagatgccgccgatgcgcccgacggcgggaaacctgaaacttcggaaagtgatgccgatgcccgggaagacgggtcggacggcggtgtgccggacgatgatgcggacaaggtcattcgtgccaaggacggcaaacacacgatcccttatgaaaagctggtagaggcgcgtgaggcggaaaagtcggcgaaagccgaagcggaagccttgaggaagcgtattgcccagcttgagaagggggcggaaaaacctgaagtgaaaacggctgacgattccggtaattcgttgttcggggatttttccgacgaggatatgaaaaagggcgtggaaaagctgattcaggagaagctggcgggttatgaggcgaacctgaagcagcaggaggcggcaaaggcgcattaccgcgaaatttatacggcgcaccctgatgcggattcgattgtggaaagccgtgagctggaggagtggctggcggggcagaatccgcttgtccgtaaggcgtttcatgatgcgcttaaggacgggactgccgccgaggtcatcggggcgtttgatctgtttaaggcggcaaaatccgccgccgaaccggaaaagcctgatgaaaagcctgatgaaaagcctgatgaaaagccgccggtcaggaagaatacgcccaatacgctctcggatattccggcggggcgcgaccatacggcttcggacagcccgctggatcatttgagcggtaatgcgctggcggaaaaactggcttctatgacggaagagcaggttgagaagtttttaaattcttga

SEQ ID NO: 63066 - DNA, 759 bp, Neisseria meningitidis
atgattaccatccgcaacgtcagctaccgcatcggcacacgccccatcctcgacaacgtcagcctcgacatccccgaaggcggcattaccgccctcgtcggccccaacggtgcgggcaaatccaccctgttttcctttatggcgcggctgcgcccgcttgaaagcggcagcatcgcctaccgaggcaaaaaccttgcctgcacccccaccgccgaactcgcccgcacgctctccatcctcacccaagaaaacagcatcatgagccgcatcaccgtgcgtgacctgctgatgttcggccgctatccctaccaccaaggcaggccgtctgaaaacgacaaaaccatcgtcgaagaagcacttgccgagttccacctgcaagatttttccgaccgctacctgaccgagctctccggcggacaacgccaacgcgccatgattgcgatggtgttctgccaaagcaccgactacgtccttttggacgaaccgctgaacaacctcgatatgtatcacgcccgctcgctcatgcagattctgcaaaagctcacgcgcgaacacaaacgcaccaccgtcgccgtattgcacgacattaaccaggccgccgcttacgccgaccacgtcgtcgccatgaaaaacggcaaagtcgccctgaccggcacgcccgaagaagtgttcaccgtacacaacatcaaagaactgttcgacatggacgtggacgtactcgactacgaaggcaaaaaactcatcgtccaccacatctga

SEQ ID NO: 63067 - DNA, 684 bp, Neisseria meningitidis; identical to SEQ ID NO: 49061

SEQ ID NO: 63068 - DNA, 1200 bp, Neisseria meningitidis; identical to SEQ ID NO: 38506

SEQ ID NO: 63069 - DNA, 1749 bp, Neisseria meningitidis; identical to SEQ ID NO: 44747

SEQ ID NO: 63070 - DNA, 1443 bp, Neisseria meningitidis
atgcatccgacctattccgccgtacaggcgcggctgctcgaagccaaccgcctttcccccgaactgctcgccaaaagcctgtgcatcatcggcgcgcaccacgtcgattacgccgacatctactgccagcgcaccgcttatgaaagctggcatttggaagagggcatcgtcaaatcgggcagcttccaaatcaatcagggcgtgggcgtgcgcgccgtttcgggcgacaaaaccgcctttgcctacgccgacagcctgtgcatcgattcgataaaccgttccgcccgcgccgtccgcgcgattggggcggcaggcggcaaggtgtccgccaaaatgccgtctgaaacgcgcggcaagccggtttgttccgcgtccgaccccattgccggcctcgattccgccgccaaagtcgcgctgttgaacaaagtggaagcaatcgccaaagccgccgatccgcgcatcgtgcaagtgatggccggtttgacctgcgaatacgatatggtttacctcgcccgtctggacggcaaacacgccgccgacatccgcccgatggtgcgcctgaacgttaccgttatcgccaaacagggcgaacgccgcgaacagggcagcgcgggcggcggcggacgctacgacttggcttatttcgatgaaaacttggttcatcggtttgtcgatgccgccgtcaaacaggcactcaccaacctcgaatcccgccccgcgcccgccggcgaaatgaccgtcgttttgggcaacggctggccgggcgtgttgctgcacgaagcggtcggacacggtttggaaggcgatttcaaccgcaaggggaccagcgtcttttccggcagaataggcgagcgcgtcgccgccaaaggcgttaccgtcgtcgatcagggcgatattgccggccggcgcggttcgctcaacatcgacgacgaaggcaacgaaacccgccgcaccgtattgattgaagacggtattttgaccggctatatgcaggacgaaaccaacgcccgcctgacgggtacgcaatcgaccggcaacggccgccgcgaaagctacgcctccgcccctatgccgcgcatgaccaatacctttatggaaaacggcagctatgagccggaagaaatcatcgcgtccatcgacaaaggcatttacgccgtcaacttcggcggcggacaggtggacattaccagcggcaaatttgtgttcagcgcgtccgaagcatggtgggtggaaggcggcaggctgcaatatcccgtcaaaggcgcgaccattatcggcaacggtcccgaagtgctgaaacacgtttcgatgataggcaacgataccgcgctcgacagcggtgtcggcgtgtgcggcaaagaagggcagagcgtccccgtcggcgtggggcaaccgactttgcggattgatgccggactgaccgtcggcggcagcgcaatctga

SEQ ID NO: 63071 - DNA, 753 bp, Neisseria meningitidis; identical to SEQ ID NO: 54232

SEQ ID NO: 63072 - DNA, 870 bp, Neisseria meningitidis
atgaaatttatattttttgtactgtatgttttgcagtttctgccgtttgcgctgctgcacaagattgccgacctgacgggtttgcttgcctaccttctggtcaaaccgcgccgccgtatcggcgaaatcaatttggcaaaatgtttttccgaatggagtgaggaaaagcgtaaaaccgtgttgaaacagcatttcaaacacatggcgaaactgatgttggaatacggtttatattggtacgcgcctgccggacgtttgaaatcgctggtgcgctaccgcaataagcattatttggacgacgcgctggcggcgggggaaaaagtcatcatcctgtatccgcacttcaccgcgttcgagatggcggtgtacgcgcttaatcaggatatcccgctgatcagtatgtattcccatcaaaaaaacaagatattggacgaacagattttgaaaggccgcaaccgctatcacaacgtcttccttatcgggcgcaccgaagggctgcgcgccctcgtcaaacagttccgcaaaagcagcgcgccgtttctgtatctgcccgatcaggatttcggacgcaacgattcggtttttgtggattttttcggtattcagacggcaacgattaccggattgagccgcattgccgcgcttgcaaatgcaaaagtgatacccgccattcccgtcagggaggaggacaatacggttacattgcatttctaccctgcttgggaatcctttccgagtgaagatgcgcaagccgacgcgcagcgcatgaaccgttttatcgaagacagggtgcgcgaacatcccgagcagtatttttggctgcacaagcgttttaaaacccgtccggaaggcagccccgatttttactga

SEQ ID NO: 63073 - DNA, 1419 bp, Neisseria meningitidis
atggaaaatatattgtctgttctggtgggtacagtcaatcggttcctttgggactacctgctgatttacgcgcttttgggtatcggcctgttttttacgctgtatctcggtgcgccgcagattaccaagctgggcgcgggattcaaatccgtatttggcggcttgtttgccaaaggcaataaagacgataagtctttatcgcagtttcaggcgttggcggttgctatatccgcgcaaatcggtacgggcaacgtcgccggtgtgtcgaccgccattaccgcaggcgggccgggcgcgattttttggatgtggctttctgccgttttggggatgtccacgatttttgcggaggcactgctggcgcagaaataccgcgtcgtcagccacggcaaatacatcggcggccccgcgttttatattacgcacggtctgaccccgaaaatcggcaggggcgcggcgcgtttcctgtcgggctttttctccatcgcgctgattgtcgcgttgggctttatcggcaatgcgactcaggcaaactccatcgcttctgccgttaccattgcatttgatgtgccttctttggcagtcggtattgtgcttgccgtccttgcgggcatggttgtgattggcggcgtgaaccgtattgccaatattgcccaatttgtcgtgccgtttatggcggttgtttatattttgtgcgccgtcgttatcctgtttgaattttccgaccatattgtgccgatgttcaaccacatctttaccgccgccttcaatcccgaagccgttttgggcggtgctgcgggtatcggtatgcgcgaagcgatacgtttcggcgtggcgcgcggtctgttttccaacgaagcaggtatgggttcgactccgcacgcccacgcgactgcggatgtgaagcatcctgtgcagcaaggtatggcggcatttgtcggtgtatttatcgatacgattttggtatgtacggctacggcattgattatcctgctgaccgatgccaacctttcgggcgaacagggcgcggcggttactcaatttgcctttaacaaggcatttccgggcttcggttcgcaattgcttgccgtgtgtctgacctttttcgccttgacgaccattatcggctggtattatttcggcgagtccaacatccgttttcttttcaggggaagacacttgggcatctatcgcgcattggttctgcttgccatcgttttaggtacgctcggcaaagtcgatttggtttggagcctgtccgatatgttcaacggctttatggttatcccgaacttgatagccctgtttttgttgcgtaaggaaatccgtgccatttatgatgattatttggcacagaaaaaagcgggtcgggatttgtcctatccgtatgaattccacgagttccacgacaagggctga

SEQ ID NO: 63074 - DNA, 1977 bp, Neisseria meningitidis
atgaacgaattttcgcttgcccctattgtggttgttttgctggtgtcggtcattacggtgatcctgtgccgcaagttcaacattccctccatgctgggctacctgctggtgggctttttggcggggcccggtatgctcagcctgattccgaaaagccatgcgacggattatttgggtgaaatcgggattgtgttcctgatgttcagcatcggtttggagttctcgctgcccaagttgagggcgatgaggcggctggtgttcgggctgggcggtttgcaggtcggcgttacgatgctgtcggtaatgggcatactgatgctgacgggcgtgccgttcaattgggcgtttgccgtgtcgggcgcgttggcgatgtcgtccacggcgattgtgagccggattttgtcggaaaagacggaattggggcagccgcacggtcagatggcgatgggcgtgctgctgatgcaggacatcgccgtcgtgctgctgatgattctgattcccgcgctggcgggcggaggggacggaaatatttgggcggccttgggtttggcgtttgcaaaaatgctgctgacgctggggctgctgtttttcgtcggcagcaaaattatgtcgcgatggttcaggatggtggcaaaacgcaaatcgtccgaactctttatgatcaatgtgctgctggtaaccttgggtgtggcttatctgactgagctggaaggtttgtctatggcgttgggcgcattcgttgccggcatgctgctttcggaaacggaataccgtttccaagtcgaagacgacatccgcccgttccgcgatattttgctcggctttttctttatcacggtcggcatgaagctggacattcaggcattgatcggcggctggcggcaggtattgatgctgttggcaatgctgctggtgttgaaggcactggttgtgtttgccattgccttcaaaatgaaacattcggtcggcgacagcctcaaaacggctttgtatctcgcgcagggcggcgagttcggcttcgtgatgctggccattgccgggcagcttgatatggtttcgccagaatgggaacaggcggcgacagcggcggttctgctgtcgatgattatcgcgcccttcctcttgggcggcagcgatgcgctggtcgggcgtttggtcaagtcaagctgggacatgaagtcgctcgatctgcacagtatgctggtagaaaccatgagcaagtccgaccatgtgctgattgtcggcttcggcaggggcgggcagacggtcggacgcgtccttgcccaagaggatattccgtatttcgcgctcgacttggacattgcgcgggtgcaggttgccagaagtgcgggcgaaccggtgtcgttcggcgatgcgaaacgcagggaagtattggaagccgccggtctgggacgggcgaaaatggtggtggttacgctcaacaatatgcacgaaacgcaacacgttttagacaatgtgctgtccatgtatcccaatatgcccgtatatgtgcgcgccaccaacgacgattatgtgaaaacgtttaccgatataggtgcggaagaagccgtgtcggacaccaaagaaaccggactcgtgctggcaggctatgcgatgttaggcaacggcgcgtcgtatcggcacgtctatcagacgatggcaaatatccgccacagccgttatgccgcgttggagggactgtttgtcggtagtgatgatgaggcaggattcggcgaaaacggcgaaaccgtccgtcacgcctttcctttggctgcagaagcatacgccgtcggcaaaacagtcggcacgcttccgatggcggcttacggcatcaaactcttgttcgtccgccgccgcaccggccggattgaaaacccggatgcctcgtttacattggaaggcggtgacgtgttggtggtcgcaggcaaaaaagaagaaattatctcttttgaaaactggagtttgcagggaatataa

SEQ ID NO: 63075 - DNA, 210 bp, Neisseria meningitidis
ttgttaatccactataaaatcccgcgtgtacggcacgccccgcgctccgcaatgataggggcggtttcgtttgaatcggcgcaccgggatgaatgcccccgcgccgtcccgataccggtttgccggttgttccgtatcggttgccgccgtgaaatgacggacggatacaggaatggcggcaggcgtaaatgggaggaaatgaccgattga

SEQ ID NO: 63076 - DNA, 1539 bp, Neisseria meningitidis
atgttccattccatcgaaaaatacagaacgcccgcccaagtccttttgggcctgattgcattaaccttcgtcggcttcggggtcagcacggtatcccatccgggtgccgactacatcgtccaagtgggcgacgaaaaaatcagcgaccactccatcaacaacgccatacagaacgaacaggcggacggcggcggcccttcgcgcgacgcggtgttccaatccctgctacaacgcgcctacctgaaacagggcgcgaagctgatgggcatttcggtttcttccgaacaaatcaagcagattatcgtggacgatcccaatttccacgacgcaaacggcaaattcgaccacgcgcttttaaaccgctacctttcccaacgtcatatgtctgaagaccagtttgtcgaagaaatccgcgatcagtttgccttgcagaatttggtaaacctcgtccaaaacggcgtattggtcggcgacgcgcaggcggaacagctgatcaggctgacgcaggtcaaccgcaccatccgttcgcacactttcaaccccgacgaattcatcgcccaagtcaaagtgtctgaagccgatttgcagaagttttataacgcaaacaaaaaagactacctgcttcccaaagcggtcaaattggaatatgtcgccttgaatctgaaagactttgcagacaaacagaccgtcagcgaaacagaagtgaaaaatgcgtttgaagagcgcgtggcgcgtttgccggcaaatgaagccaaaccttctttcgagcaggaaaaagccgccgtcgaaaacgaattgaaaatgaaaaaggcggttgccgacttcaataaggcaaaagaaaagctgggcgatgacgcgttcaaccatccttcctcgcttgccgaagccgccaaaaacagcggtttgaaagtcgaaacccaagaaacttggctgagcaggcaggatgcgcaaatgtccggtatgcccgaaaacctgatcaatgccgtattcagcgacgacgtattgaagaaaaaacacaattccgaagtgctgaccatcaacagcgaaaccgcgtgggtcgtccgcgccaaagaagtccgcgaagagaaaaccctgccgtttgccgaagccaaagacgcggtacgtcaggcttatatccgtaccgaagccgccaaacttgccgaaaacaaggcaaaagacgtgcttacccaactgaacggcggcaaggctgttgacgtgaaatggtcggaagtgtccgttttgggcgcgcagcaggcaaggcagtccatgccgcccgaggcttatgcggaactgctgaaagcaaaaccggcaaacggcaaacccgcctacgtcaggctgatcggtctgccggcacccgtgattgtcgaagtacaggctgtaaccccgccggatgatatcgccgcacagcttccgcttgcaaaacaggctttggcgcaacagcagtctgccaatactttcgacttgttgatacgttatttcaacggcaaaatcaaacagaccaaaggagcgcaatcggtcgacaacggcgacggtcagtaa

SEQ ID NO: 63077 - DNA, 924 bp, Neisseria meningitidis
atgaaaaaacgcaataatcctcttccgctgttgaacggtgtcaaacccagttatttggtgctgccgcatgaaaagcagttttacgggctgccgctgctgcattttctgtgcatccgctttccttttgtgggcgcggacgattggcgcaggcggttgaacagcggttttgtggtcggttcggatggtgcggcgttggacgaacattctttgttcgagccgggtaaggtgatgttttattaccgtgaaaccagccgtgagagcgagccgcgtattccgtttgaagaaaagattttgcatattgatgagcatttgattgtggtggacaaaccgcattttctgcccgtcatccccagcggcaggtttttgcgggaaaccctgctcacgcgcctgcgtttgcggcctgaattgcagcatttgaatgttgaggacattacgccgctgcaccgcttggacaaggatacggcaggcgtgatgctgctgtcgcataatcctgccacgcgcggagcctatcagacgatgtttcaaaacaaaacggtatggaaaacgtatgaggcgcttgcgccgacaaggacggatttgccgtatccgctcgatgtggtttcgcgtttggtgaggggtgagaaattttttacgacgcaagaggcggaaggcgaaccaaacgcacatacgacggtcgaactgattgaaaacaggggggaattcagcctttaccgccttacgccgcatacgggcaagaaacaccagttgcgcgtgcatatgatgggtttgggtatgccgctgttgaatgacgcgctctatcccgtgccgtctgaagcgggcagcgaggattatcggaaacctttgaagctattggcaaaaaagattgcgtttgcagatcctttgtcgggtcgggaaagggtgttttgcagcggattttgcctataa

SEQ ID NO: 63078 - DNA, 309 bp, Neisseria meningitidis; identical to SEQ ID NO: 38004

SEQ ID NO: 63079 - DNA, 519 bp, Neisseria meningitidis; identical to SEQ ID NO: 36779

SEQ ID NO: 63080 - DNA, 1128 bp, Neisseria meningitidis
atgaacctgtctgcacgcggcgaatttgaaaccggcccggtaacacataactggagtatggctttcgaccgcgttatccgccagcggaaaaccattcgcggaacggcagccggagctagcaaggtagaagtgaaggcaaacggaaatattgagaatcaattggcatcgtttacagccgactatcccaattcttgggagaactctgccaacttggatgccaatatcaaagtcaacagcctggctttgtccgacaccttgggcttcgtggataacaaataccgcctgactttgggcggacgtttccaagcggttgaatacaccgacaagaaaaaatcacagagcggtaatgccaaacgcttcagcccgatgctgatggcggcttgggtgccgcagcccgatttggtggtttacggcaactatatggaagacttggagcctgccgacattaaaaccgatgattccggtgaaacgacaatggcgaaaccgcgcgtcagccgccagtttgaagtgggcgttcgtaaaaactggggcgactttgttacgacgttgaacgcgtttcaaatcaaacgcccgggctactggcgcggcaataccaaaaaaggtactgattttgcagcatataaagcagcaggaggcgcagacggagatgaacaaggcatggaacgcagccgcggtatcgaattcaatgcctatgccaacctgttaaacaaaaccctgcgcccgactttcggcctgatgtacctgcaatcgaccgtgaaagactacccaaattcacgcgatatgctggttaacggcgtacaagtcgccaatccgcgcgtaattgccaaggcaggtttggaatgggatacaccgtttgccaaaggcttgactttaaacagcaatgtttcgtatttcggcaagtcttaccaagacacgcaaaaacaatacgccttcccatcctataccttggttgatgtaggcgcgcgctacaaaaccaagctcggcaaaaatacgttgaccgtcagcagctcggtggaaaatctgttcaacaaaaactactggcaggtacagcgcggccaatacgaccgcagcttcgccgtcgtcggtctgccgcgtacttactggctgaaggcggaattggatttctga

SEQ ID NO: 63081 - DNA, 495 bp, Neisseria meningitidis
atgaaaaaaaccctgttggcaattgttgccgtttccgccttaagtgcctgccggcaggcggaagaggggccgccgcctttaccccggcagattagcgaccgttcggtcggacactattgcagtatgaacctgaccgaacacaacggccccaaagcccagattttcttgaacggcaaacccgatcagcccgtttggttctcgaccatcaagcagatgttcggctataccaagctgcccgaagagcctaaaggcatccgcgtgatttacgttaccgatatgggcaatgttaccgattggacgaatcccaatgccgacacggagtggatggatgcgaaaaaagccttttacgtcatcgacagcggctttatcggcggtatgggtgcggaagacgcgctaccgttcggcaacaaggagcaggctgaaaaatttgcaaaggataaaggcggtaaggttgtcagtttcgacgatatgcctgatacctatattttcaaataa

SEQ ID NO: 63082 - DNA, 633 bp, Neisseria meningitidis
atgagaaaaaccaaaaccgaagccttgaaaaccaaagaacacctgatgcttgctgccttggaaaccttttaccgcaaagggattgcgcgcacatcgctcaacgaaatcgcccaagccgccggcgtaacgcgcggcgcgctctattggcatttcaaaaataaggaagacttgttcgacgcgctgttccaacgtatctgcgacgacatcgaaaactgcatcgcgcaagatgccgcaaatgccgaaggaggatcttggacggtattccgccacacgctgctgcactttttcgagcggctgcaaagcaacgacatccactacaaattccacaacatcctgtttttaaaatgcgaacacacggagcaaaacgccgccgttatcgccattgcccgcaagcatcaggcaatctggcgcgagaaaattaccgccgttttgaccgaagcggtggaaaatcaggatttggcagacgatttggacaaagaaacggcggtcatcttcatcaagtcgaccttggacgggctgatttggcggtggttctcttcctgcgaacgtttcgatttgggcaaaaccgccccgcgcatcatcgggataatgatggacaacttggaaaaccatcccgacctgcgccggaaataa

SEQ ID NO: 63083 - DNA, 1296 bp, Neisseria meningitidis; identical to SEQ ID NO: 42555

SEQ ID NO: 63084 - DNA, 1326 bp, Neisseria meningitidis
atgaaaaaatacctgttccgcgccgccctgtgcggcatcgccgccgccatcctcgccgcctgccaaagcaagagcatccaaacctttccgcaacccgacacatccgtcatcaacggcccggaccggccggtcggcatccccgaccccgccggaacgacggtcggcggcggcggggccgtctataccgttgtaccgcacctgtccctgccccactgggcggcgcaggatttcgccaaaagcctgcagtctttcaggcttggctgcgccaatttgaaaaaccgccaaggctggcaggatgtgtgcgcccaagcctttcaaacccccgtccattcctttcaggcaaaacagttttttgaacgctatttcacgccgtggcaggttgcaggcaacggaagccttgccggtacggttaccggctattacgaaccggtactgaagggcgacgacaggcggacggcacaagcccgcttcccgatttacggtattcccgacgattttatctccgtccccctgcctgccggtttgcggagcggaaaagcccttgtccgcatcaggcagacgggaaaaaacagcggcacaatcgacaataccggcggcacacataccgccgacctctcccgattccccatcaccgcacgcacaacagcaatcaaaggcaggtttgaaggaagccgcttcctcccctaccacacgcgcaaccaaatcaacggcggcgcgcttgacggcaaagccccgatactcggttacgccgaagaccctgtcgaacttttttttatgcacatccaaggctcgggccgtctgaaaaccccgtccggcaaatacatccgcatcggctatgccgacaaaaacgaacatccctacgtttccatcggacgctatatggcggataagggctacctcaaactcggacaaacctccatgcagggcattaagtcttatatgcggcaaaatccgcaacgcctcgccgaagttttgggtcaaaaccccagctatatctttttccgcgagcttgccggaagcagtaatgacggccctgtcggcgcactgggcacgccgctgatgggggaatatgccggcgcagtcgaccggcactacattaccttgggtgcgcccttatttgtcgccaccgcccatccggttacccgcaaagccctcaaccgcctgattatggcgcaggataccggcagcgcgattaaaggcgcggtgcgcgtggattatttttggggatacggcgacgaagccggcgaacttgccggcaaacagaaaaccacgggatatgtctggcagctcctacccaacggtatgaagcccgaataccgcccgtaa

SEQ ID NO: 63085 - DNA, 939 bp, Neisseria meningitidis
gtgaccgtcggttatggcttcagtgccagtggcgattacagccaaagcaaaatccgagccaatcatgcttcggtaaccgagcaaagcggtatttatgccggagaagacggctatcaaatcaaggtcggaaaccatacagacctcaaaggcggcatcatcaccagtacccaaagcgcagaagacaagggtaaaaaccgattcagcacaggcacactcgccggcagtgatattcaaaattacagccaatacgaaggaaaaagttttggattgggcgcaagtgcgtccataagcggcaaaacactgggacagggcgcacaaaataagcctcaaaacaaacacctgacaagcgtggccgataaaaacggcgcaagttcatcagtaggctacggcagcgacagcgacagccaaagcagcatcacaaaaagcggcatcaatacccaaaacattcaaatcaccgacgaagccgcacaaatccggctgacaggaaaaacagcggcacaaaccaaagccgatattgatacaaacgtaaccacagacaccgccgaacgacattcgggcagcctgaaaaacgtatttgacaaagatagagtgcaaagtgaactggatttacaaagaaccgtcagccaagattttagtaaaaatgttcaacaagccaataccgagattaaccaacatttagacaaactcaaagcagacaaagaagcagccgaaacagcagcagccgaggcattagccaatggcgatatggaaacagccaaacacaaagcccatgaagctcaagatgcggcagcaaaagcagataattggcaacaaggcaaagtcattctcaacatgttagcctcaggtttagctgcgccgacccaaagcggagcgggcatcgctgcggctaccgcatcgccagccgtatcgtatgcgattggacagcactttaaagattga

SEQ ID NO: 63086 - DNA, 2043 bp, Neisseria meningitidis
atgatgtcgcccgaaacccagaaacagctcaaaatcaccgatgtttccgccaagaagctcgacaaactcaacctccataccgcgtgggatttggtgttgcacctgccgctgcgttacgaggacgagacgcacattatgccgattaaggacgcgccgattggcgtgccgtgccaggtcgagggcgaggttatccatcaggaagtaacgttcaaaccgcgcaagcagttgattgtccaaatcgccgacggttccggcagcgtcctttttctgcgcttcatccacttttacgccagccatcagaaacagacggcggtcggtaagcgcatccgcgccgtgggcgaaatcaaacacggcttttacggcgacgagatgattcatcccaaaatccgcgatgccgagggcggcggtttggcggaaagcctcacgccggtttacccgaccgtaaacggtttgaaccagcccactttgcgccgtattattcagacggcgttggacgttacgccgctgcacgacacgctgcccgatgccctgctgtgccgtctgaagctgccacacctcgccgaaagcctgcgtcttttgcattcgccgccgccgagtttcacgattcatcagctttcagacggcacgctgcctgcatggcaacggctcaaattcgatgaacttttggcgcaacagctttcgatgcgcttggcgcgacagaagcgtatcggcggcacggcggcggcattgggcggcgacggcacattgacccaagccctgcgccaagccctgccgtttgccctgaccgatgcgcaagaaaaagttgtttccgaaatctgccgcgatatggcgcaaacctacccgatgcaccgcctgctgcagggcgatgtcggcagcggcaaaaccattgtcgccgccttgtccgcgctgaccgccatcgaatccggtgcgcaggtggctgtaatggcgcccactgaaatccttgccgaacaacattttattaaatttaaacaatggctcgaacctttgggcattgaagttgtccgcctttttggcagtttgcgtaaaaaagccaaagacgaagccaaagccaaactcgccgacggcagcgtcaaaatcgccgtcggcacgcacgccctgttttcagacggcgtggcgtttcacaatttgggcttgaccattgtggacgaacagcaccgtttcggcgttgcccaacgcctcgccctcaaaaacaaagggcgcgaagtccatcagctgatgatgtccgccacgcccatcccgcgcacgcttgcgatgagttttttcgccgatttggacgtgtccgtcatcgacgaactgccgcccgggcgcacgccgattaaaacgcgcctcgtcaacaacgtccgccgcgccgaagtcgaaggcttcgtcctcaatacttgccgcaaagggcggcaggcgtattgggtttgtccgctgattgaagaaagcgaaaccctgcaactgcaaaccgccgccgaaaccctcgcccggcttcagacggcattgcccgaactcaatatcggactggtacacgggcgcatgaaggccgccgaaaaggccgaagtgatggcgcggttttcttcgggggggctgaatgtcttggtcgccaccaccgtcatcgaagtcggcgtagatgtgcccaatgccgccctgatggtcatcgaacacgccgagcgcatgggcttggcgcagctgcaccaattacgcggtcgggtcgggcgcggcgcggcagaaagcgtgtgcgtcctcctgtttgccgaacccttgggcgaactcgccaaagcgcggctgaaagtcatctacgaacacaccgacggctttgaaatcgcccgccaagacctcaacatccgcggccccggcgaatttctcggcgcgcgccaaagcggcgtgcctatgctgcgtttcgccaagctcgaagaagacctgcacctcttggaacaagcgcgcgaaatcgccccgatactgattgagcaaaaccccgaaatcgtcgaagcgcatttggcaagatggctttccggcagggaaggttatttgggcgtgtga

SEQ ID NO: 63087 - DNA, 714 bp, Neisseria meningitidis; identical to SEQ ID NO: 49230

SEQ ID NO: 63088 - DNA, 507 bp, Neisseria meningitidis
atggttgacgcttggtctgtccctgattttgaatcgaaaatctgtccgcccgaggcgttggcggcgcgtttggcgttgttgccgcgcccgctggtgtttaccaacggctgtttcgacatcctccacagggggcacgttacttatctggcgcaggcgcgttcgatgggggacgcgttggtgctggcgttgaataccgatgcttcggtgcggcgtctgggcaagggcggtgaccgcccgattaatcctttggagaaccgtgccgccgttgccgccgcgttggaaagtgtggatttggtaacgtggtttgacggggatacgccggcggcgttgattgaggcggtcaaacctgagattttggtcaagggcggcgattgggctgcggataagattgtcggtgcggcagaaacgttggcgcgcggcggtcaggtgttttcaattccgtttctgcaccagacttcgacaacgaagactttggcaaaaatccgtgcggcagagggcggaaaatga

SEQ ID NO: 63089 - DNA, 444 bp, Neisseria meningitidis
atgagcgaagaactgcaacccgtattcagcatcgagcgactgtatgtcaaagacttgtctttggaagtgccgcacgcgccgcaaatctttttggaacagggcgagcctgaagtggatatgcgcgtttccaccggcagccaaaagctggaagacggctactacaacgtggacgttaccgtaaccgttaccgccaaattggataacgagcgcacgatgtttttgaacgaagtaacccaaagcggcattttccgtttggaaaacatccccgaagaagatgtgcagctgctgttgggcgtggcgtgtccgaacatcctcttcccttacgcgcgcgaagccgtttccagtacggtaacgcgcgccggcttcccgcccgtcctgctcgcgccgattaattttgaggcgatttaccaacaacagcaggaagccgaagccgccggggcttga

SEQ ID NO: 63090 - DNA, 627 bp, Neisseria meningitidis
atggtcattgcagccattatggcgatgatagccctccccaatatgagccaatggattgcatcccgccgcattgccagtcacgcggagcggattgccaaccttttgcgtttctccaggggcgaagccgtccggctcaatctccctgtctatatctgtcctgttcaagttaaaaaagacggtacgcccaacaataaatgtgactccggcaagaaggggcagggaatgttggctttcggcgacaaaaacggcaataagggatatgacaatgatacggcggatgttcttctccgcagtgtggtattgaatgatgatatcaatgataagcggattaattatgccttcaaccatatcgctttcggtcagactcagccgaccgctgaccgtgtagtttggacattcaatcaaaacgggacgttcggttattctaccaatcaggatctcacgaatacttccaaatttgtttactccgacggttatatccaaatcgtgctgacagatgcgagagcagtttcagatgccgataagaaattccgttcggcggtggttttgattgacagcagcggcagggtcgaagtttgccctaggggtgatcggcgtactcggcgtactatgtgccagtataaataa

SEQ ID NO: 63091 - DNA, 1101 bp, Neisseria meningitidis
atgacccgtatcgccatcctcggcggcggcctctcgggaaggctgaccgcactgcagcttgcagaacaaggttatcagattgcacttttcgataaaggctgccgccggggcgaacacgccgccgcctatgttgccgccgccatgctcgcgcctgcggcggaagcggtcgaagccacgcccgaagtggtcaggctgggcaggcagagcatcccgctttggcgcggcatccgatgccgtctgaacacgcacacgatgatgcaggaaaacggcagcctgattgtgtggcacgggcaggacaagccattatccagcgagttcgtccgccatctcaaacgcggcggcgtagcggatgacgaaatcgtccgttggcacgccgacgacatcgccgaacgcgaaccgcaactcggcggacgtttttcagacggcatctacctgccgaccgaaggccagctcgacgggcggcaaatattgtctgcacttgccgacgctttggacgaactgaacgtcccctgccattgggaacacgaatgcgtccccgaagacctgcaagcccaatacgactggctgatcgactgccgcggctacggcgcaaaaaccgcgtggaatgcttctgccgaacacggcagcaccctgcgcggcatacgcggcgaagtggcgcgggtttacacacccgaaatcacgctcaaccgccccgtgcgcctgctgcacccgcgttatccgctctacatcgccccgaaagaaaaccacgtcttcgtcatcggcgcgacccaaatcgaaagcgaaagccaagcccccgccagcgtgcgttcagggttggaactcttgtccgcactctatgccgtccaccccgccttcggcgaagccgacatcctcgaaatcgccaccggcctgcgccccacgctcaaccaccacaaccccgaaatccgctacagccgcaaacgccgcctcatcgaaatcaacggccttttccgccacggtttcatgatctcccccgccgtaaccgccgccgccgtcagattggcagtggcactgtttgacggaaaagatgcacccgaacgcgatgaagaaagcggtttggcgtatatccgaagacaagattaa

SEQ ID NO: 63092 - DNA, 1866 bp, Neisseria meningitidis
atgatagaaaaactgactttcggactgtttaaaaaagaagacgcgcgcagctttatgcgcctgatggcgtacgtccgcccctacaaaatccgcatcgttgccgccctgattgccattttcggcgttgccgccaccgaaagctaccttgccgccttcatcgcccccctgattaaccacggcttttccgcacctgccgcgccgcccgagctgtctgccgccgccggcatcatttccaccctgcaaaactggcgcgaacagtttacctatatggtttgggggacggaaaacaaaatctggaccgtcccgctcttcctcatcatcctcgtcgtcatccgtggcatctgccgctttaccagcacctatctgatgacttgggtctccgtgatgaccatcagcaaaatccgcaaagatatgtttgccaaaatgctgaccctttcctcccgctaccatcaggaaacgccgtccggcaccgtactgatgaatatgctcaacctgaccgaacagtcggtcagcaacgccagcgacatcttcaccgtcctcacgcgcgacacgatgatcgttaccggcctgaccatcgtcctgctttacctcaactggcagctcagcctcatcgtcgtcctgatgttccccctgctctccctgctctcgcgctactaccgcgaccgtctgaaacacgtcatttccgactcgcaaaaaagcataggcacgatgaacaacgtgattgccgaaacccatcagggacaccgcgtcgtcaagctgttcaacgggcaggcgcaggcggcaaaccggttcgacgcggtcaaccgcaccatcgtccgcctcagcaaaaaaatcacgcaggcaacggcggcacattccccgttcagcgaactgatcgcctcgatcgccctcgccgtcgtcatcttcatcgccctgtggcaaagccaaaacggctacaccaccatcggcgaatttatggcattcatcgtcgcgatgctgcaaatgtacgcccccatcaaaagccttgccaacatcagcatccctatgcagacgatgttcctcgccgccgacggtgtatgtgcatttctcgacaccccgcccgaacaggacaaaggcacgctcgcgccgcagcgtgtcgaagggcgcatcagcttccgcaacgtcgatgtcgaataccgttcagacggcatcaaagccctcgacggcttcaacctcgacatcagacaaggcgaacgcgtcgccctggtcggacgttccggcagcggcaaatccaccgtcgtcaacctgctgccccgctttgtcgaaccgtctgccggcaacatctgcatagacagtatcgacatcgccgacatcaaactcgactgcctgcgcgcccaattcgccctcgtctcccaagacgtattcctgtttgacgataccctttttgaaaacgtccgatacagccgtcccgacgcaggcgaagccgaagtcctgtccgccctccaagccgccaacctgcaaagcctgattgacagctccccgctcggactgcaccagcccatcggatcgaacggcagcaacttatccggcggacagcggcaacgcgtcgccattgcccgcgccattttgaaagacgcgccgatattattattggacgaagccaccagcgcattagacaacgaatccgaacgcctcgtccaacaagcgctcgaacgcctgatggaaaaccgcaccggcatcatcgtcgcccaccgcctgaccaccatcgaaggggccgaccgcatcatcgtgatggacgacggcaaaatcatcgaacaaggcacacacgaacaactgatgtcccaaaacggctactacacaatgttacgcaatatctcaaacaaagatgccgccgtccggacggcataa

SEQ ID NO: 63093 - DNA, 669 bp, Neisseria meningitidis
atgacgacccatctgtccaatgtcgcccccgacctgcaaaactatttgaacgccatcggcgaacctgaacatcccgttttgatgcggctgcgcgagaagaccgggcatcaccgtatgggcaaaatggcgattgcgcgcgaacaggcggcggttttggtttggctggcaaagctgatccgtgcggaaaaatatctggaaatcggcgtgtttaccggatacagcagcaccgcgcttgcattggcgttgcccaaacacgggcggattaccgcctgcgacatcaatgtaagctttaccgatacggcgcgtcaggtttggaacgaggccggtgtggcacataaaatcagcctgcacctgcaacccgcattgctgacattggatgatttgattgcacagggtgaagccggaagctacgatttggcactgatagacgcagacaaaccgcccacgccgcaatatttcgagcgttgcctcaagcttgtccggcaaggcggcatcattgccatcgacaatattttgttgaacggaagggtgatgcgcgaagcggcttccgatgcgccgcccagcgtcggcatcctcaaagattttaatcaaaacctgccgaacgatacgcggattgtccccatcaccctgcccgtcggcgacggtttgactctgcttctgaaaaaataa

SEQ ID NO: 63094 - DNA, 252 bp, Neisseria meningitidis
ttgcttttgatttataaaatggtaatttttgcacgaggaataaataaaaatcaaaataaaatagaatttgtaaaaatatttactttttattttatggttattttgtatattgccttaataactctatttagacaggaaaatttttattttaatatgaatatttattctatcatttttatagtgatactattctgtctaactcatttcttttttattattaaattttattttgaggtaaataaaaatgtatga

SEQ ID NO: 63095 - DNA, 492 bp, Neisseria meningitidis
atggcggggccgatttttgtcgtcatcgccagcgtcgctatgttttttgtcgcgcagcagcacgcgacagatttggttacggacgattattataaagacggcaaacatatcgacatccagcttcatcgggatgaagaagccgtcagacggcatatcggggtgcaggttctcatttcccccgatatgaatgcggcaaaagtgtttgtcggcggcgagtttgacggcaaacagcctttgaacctgctgctgatgcacccgacccgcaaggcggacgatcaaaccgtcgccctcaagcccgtcggcagcgcgcagaacggcagggcggaatatgaggcggtgttcaaaaccctttcgccgaccaaccactggtatgtgcgcgtggaggacgcggcaggcgtgtggcgcgtcgagaacaaatggattaccagccaaggcaatgcggtggatctgaccccgatggataaacttttcaataatgccggaagcaaataa

SEQ ID NO: 63096 - DNA, 696 bp, Neisseria meningitidis
atggctaaagtatctaaacgcttgaaagctcttcgctcttctgtggaagccaataaattatatgcaattgatgaagcaattgctttggtaaaaaaagcagcgactgctaaatttgacgagtctgttgacgtatctttcaacttgggcgttgatccgcgtaaatctgaccaagttatccgtggttcggtcgttctgcctaaaggcaccggtaagacaacccgtgtggctgtatttactcaaggtgcaaatgcagaagctgctaaagaagctggtgcagatatcgtcggtttcgaagatttggctgctgaaatcaaagcaggcaatctgaactttgacgttgttattgcttctcccgatgcaatgcgtattgttggtcaattgggtaccatcttgggccctcgtggtctgatgccaaaccctaaagtaggtacggttacccctaatgttgccgaagcagtaaaaaatgcaaaagcaggtcaagtgcagtaccgtaccgacaaggcaggtattgttcatgcaacgattggtcgtgcttcattcgctgaagctgatttgaaagagaactttgatgcgttgctggatgctatcgttaaagccaagcctgctgccgctaaaggtcagtatctgaaaaaagttgctgtgtctagcaccatgggtttgggtattcgcgttgatacatcaagcgtaaataactaa

SEQ ID NO: 63097 - DNA, 729 bp, Neisseria meningitidis
atgggagggaaaatgtccgacaaaaaatataatgtcgatgagggggaaatcgccaaattcagccggattgccgacaaatggtgggacaagtcgggcgagttcaaaaccttgcacgacatcaatccgctgcggctggattatatcgacggacacgcggatttgcgcggcaaacgggttttggacgtgggctgcggcggcggcatcttggcggaaagtatggcgcggcgcggcgcggagtttgtaaagggtatcgacatggcggagcagtcgctggaaaccgcccgcctgcacgcggctttgaacaatgtcgccgatatcgaatacgaatgtatccgcgtggaagaccttgccgaggcggaaccgcactcgttcgatgtggtaacgtgcatggaaatgatggaacacgtccccgatcccgccgccatcgtgcgtgcttgtgccaatctggtcaaaccggacggcatggtgtttttttccaccatcaataaaaacccgaaatcgtacctgcatctgattgtggcggcggaatatctgttgaagtttgtccccaaaggcacgcacgactggaaaaaattcatcgcgcctgccgagctggcgcggatgtgccgtcaggcgggcttggatgtggcggatacgaagggtatgacttaccatgttttgtcgcaaacttatgccctgtgcgattcgaccgatgtgaattatatgtttgcctgccgtccggcgttctga

SEQ ID NO: 63098 - DNA, 1536 bp, Neisseria meningitidis; identical to SEQ ID NO: 40021

SEQ ID NO: 63099 - DNA, 486 bp, Neisseria meningitidis
atgagatttttcggtatcggttttttggtgctgctgtttttggagattatgtcgattgtgtgggttgccgattggctgggcggcggttggacgctgtttctgatggcggcaacctttgccgccggtgtgctgatgctcaggcatacggggctgtccggtcttttattggcgggcgcggcaatgagaagcggcgggagggtatccgtttatcagatgttgtggcctatccgttatacggtggcggcggtgtgtctgatgagtccgggattcgtatcctcggtgttggcggtattgctgctgctgccgtttaagggaggtgcagtgttgcaggcaggaggtgcggaaaattttttcaacatgaaccaatcgggcagaaaagagggcttttcccgcgatgacgatattatcgagggagaatatacggttgaagagccttacggcggcaatcgttcccgaaacgccatcgaacacaaaaaagacgaataa

SEQ ID NO: 63100 - DNA, 867 bp, Neisseria meningitidis
atggcaggtgaaaccattaccgctgccgactacatcaagcaccacttgcagagcttgaccagtttgtcggatgttactcagggtcagggactgaaaaacattgctgatttttcgtttattaaccttgatgccgtcttttttgccgtcctgttgggcgtaatcggcagctttctgttgtggcgcggtgcaaaaaaagcgacggcaggcgttcccggacgtttccaggccgcagtggaaatcttgtttgagtttgtggacgatatgtgtaagagcatcattcacaacgaaaagtctagaaaagccgtcgcgccgttgggtctgacgctgtttgtctggatttttctgatgaacgcgatggatatgctgccggtcgatttgctgccgatggtatggcagggcattaccggcaaccatcacgccctgctgcgcgtcgtaccgactgccgatttgaacaccactttggcactcgctgtcggcgtgttgctgatttgtatctattacaacatcaaaatcaaaggattgggcggctggtttcacgagttgttcagcgcgccgttcggtgcaaaactcgcacctgcgaactttctgttgaatttggtcgagtttctttctaaaaccgtatcccacggtatgcggttgttcggcaatatgtatgcgggcgaattggtattcttgctgatagccttgcttggcggtgcttgggcggcttccggcagcgtcgaagtcatggatccgattctgtttgtattccacattattgccggtttggcatgggcgattttccatattttggtgattaccctgcaggcgtttattttcatggcgttggcgttcgtctatatcggacaggcacatgatgcgcactga

SEQ ID NO: 63101 - DNA, 132 bp, Neisseria meningitidis; identical to SEQ ID NO: 38518

SEQ ID NO: 63102 - DNA, 477 bp, Neisseria meningitidis
atgccgatagaaatcgaacgccgttttttgattggaaacgacaactggcggcaatacgccgacgaaccgctgctgttgaggcagggttatctgtctgttgaaaaagaacgcaccgtccgtgtccgcattgccggacaacgggcgtggctgacgctgaaaggctatatttcggaaatcagccgcagtgagtttgaatacgaaatcccgcttgccgatgcggaaaagatgatggaaacgatgtgcccgtttaaaatggaaaaatggcgttatccggtcagatggaacggcagcctgtttgaagtcgatgttttccttggagaaaacgcacctttggtcgtcgcagaaatcgagctgcccgacgaaaatgccgattttgaccgtccggactggctggggcgcgaaatcactgccgacggtatgtttaccaatgcttatttgagcaaacatccgttctcaagctggaaaaatgccgtctga

SEQ ID NO: 63103 - DNA, 672 bp, Neisseria meningitidis
atgcaaatactcaaagcgttcaaatttgaattgatgccaaacggcgcacaaatccgcagacttaagcagttttgcggttgttcccgttttgtattcaatcgcgctttggcgtatcaaaatgaacagtacgaagcagataaatcattcaaattcagttacaacaaaatcgcgaatttgttgcctgaatggaaacgtgaattaacttggctaaaagactgccacagccaagttttgcagcaatcgctcgaagatttagaaagctcattcaaaaacttcttcgccaaacgttcggactttccaaaattcaaacgcaagggcgaaaaagacagtttcagatttccgcaaggctttaaactggaacaacaaaataaccgcatctatctgcccaaaatcggttggatacgttatcgcaacagccgtgccattgtcggcgaaatgaagaacgtaaccgtcagccgaaaatgcggtaagtggtatatctccgttcaaacagaatttgaacaaaaaacaccgcaacccaaaggcggagaaatcggtatcgatataggtattgttcgttttgcgacactttcaagcagcgaatattttgagccgattaacgcattcaagaacctgaaaggcaaactggcaaaactacaacgccgacttaaaaacaaggttaaatttagctaa

SEQ ID NO: 63104 - DNA, 783 bp, Neisseria meningitidis
atgcaggaaacccatttttccatactgctggacgaactggcggcaaaacaggaggcagccatcgccccccacctgcttgccgacggaaccaaggtatggatacgcaaagcaggcaggcacaatgcgcgatggcgttacgcgctgctcggtatggttgcccgatatttgaaactgggggtgttgaagccggttcccagcctcggcggcgagcctgccattgcaaccgaatcaaaacgcctgtacgaattgcgcgcggcggggatagccgttcccgaattgctcgccgtcaggaaaaatgcccttatgttcggaaatttggaaggtatcccgctcgatacgcaaatccgccaagaagccgaagccggaaaggcggacgcttggcttgccggtttggaagccattgcacgcgtgcataaaaaacagcagttcctcagtcaggcgtttgcacgaaatatgatgtcggacggaaaaaacatcagctttttggattttgaagacgacccttccgaggtcctgaccatagcgcaatgccaagcccgcgattggctctgctacattcattcgaccgcgctgatattgaaaaacggcggactgctggaagcggctgcggaaaaatggggcggcgtattgtcagatcagcctgccgaaatacaaaagctgattgccgccaccgtcaaaccgatcctcccgatacgcaggctggaacacccccgctggggacgggacgcgctcaggctggcagcctcgatttccctgatttcccttgccgatatgccgccgtaa

SEQ ID NO: 63105 - DNA, 345 bp, Neisseria meningitidis; identical to SEQ ID NO: 46056

SEQ ID NO: 63106 - DNA, 2589 bp, Neisseria meningitidis
atgaaaaatcaatatagtaaatcattgcatggcgtgttttaccttgccttctatgataaaatacacgcattttttgcagagcagttgtttcaactcatcataaatatgaacaaaaaacccacctacatcagtttatttagcagtgcaggcgttggttgctatggttttaaaaccaatggttttgaatgcgtagcaaccaacgaacttttagaaaaacgcctaaaaatccaaaaatataatcaaaaatgccgctttgattcaggttatattgctggcgatattaccctgcctgaaacccaagccaaactgtttgccgaaattcgacgctggaatactgaaattgatgttgtgattgctacaccgccttgccaaggaatgtcggttgccaaccataaaaaaaataatgaaatggcaagaaattctttggtcgtggaatcaatcaaaatcgttcgggaagttcagcccaagttttttatttttgaaaacgtcaaagcctttttaaatacaccctgcaccgataccgatcatcaagaaaagccgattgaggaagccatttggtcaaatttgggcggacattacaacattctatccaatgtactaaattttaaagattatggtgcaaattccagtcgtaccagaacgctggtgattggcgtgcgaaaagatattcatcacattacgccgtacgatattttccccaagcaaacaccgccaaaaaccttgcgtacattgctggctgacctgccgcctttaatgcaaatgggcgaaattagcgatgatgatatttaccatagctatcgtgaatttgatccccgtatgttgccgtggattgcacagcttaaagaaggcgagtcagctttccaaaatactgatcctgcacgcattccccatcaaattaaaaatggtgaaattatctacaatcaaaacaaaaatggagacaaatacgcccgttggtttttagatcgtgagggtccgtgcattcatacccgtaatgacattttagccagccaaaacaccatccaccccactgaaaaccgtgtattttccgtgcgtgaactcatgcgtatgatgtcaattccgccatcatttaaatggacggcacaagatgaaaaacagcttaatgcactgtcatttgatgagaaaaaaacctttttgaaaaaagaagagctgaatatccgccattgtatcggtgaatctgtgccaaccgctgttttggccaatgtcgcacaaaacattcaggcagccttgcaacagtccgaactgtcaatgacggaaattcaaaatttaatcaaacgagaaaatttatcccttgccgataatctctaccgatttattgagcaacattttgacgcatatccattcagtcggcttttgcaaattgctgaatacgctaatgctgcccgtagcgaaacggctgcttattttacccgtattgatattgctttcggactggttaatgctcttcctgatttcaaaaagaaaaaaaacttacggattttagaaccctctgtcggcattggtaatttcattccactactggcaaaaaaatatgcagacaaagaaaaagttatttttgatttggtggatattgactcaaacagtttaaatctcctgtcattgctgctgaaaaaattaaatttaggcagtaaatttgagttcaatattattcatcaggattttttaaccgcaacgctgcctgaaaactatgatctagtcatcggcaatccaccatacggcaaagttaaggcaagtgataaaaatttggcactataccgtaaaaatgctaccaataaagatacgcaaaatattttttcattttttattgataaggctctgacgctcagtaaaaccgtggctttggttgttcccaaaagtgtgattaacgcccccgagtttcaaataacccgacaacaacttatcacagccaatatcaaccgcattattgattacggcgagaaagcatttaaaggcgtaaaaatagagacgattgcctttattgccgatcaaaccgacaaagacaatcaacatattacgatagaaagccatatccaagaaacgttgatacaaaactgtaaaaactattttttttctgataattttccctattggttgatttatcgtaatagtgaatttgatcaaattgcacaaaaattggaatttaatgtatttcaatcattccgagatcgccaaattaccaaagcgcatacacagaatagtggcaatgttcgggttttaaaatcccgtaatatcggtaacaacgagattattgatattgagggttatgatagttatgtggattcagttgcccctttttctgtcggcaaatttattaaccgtaaaaatgtcgtgatgattcccaatctgacttacaaacctcgggcagcatttttgcctgaaaacagtattgctgatggctcggttgccctactgacaatgaaaaaacacgaaaaaatcctaacccaacgagatctcgcatactatgcaactcccgaatttgagcagttttaccgtgttgcccgtaattatggttctcgttcaatgaatatagacaatcattctgtgttttttttcggattgctaaaagattag

SEQ ID NO: 63107 - DNA, 1014 bp, Neisseria meningitidis
atgcaagtctattacgataaagatgccgatctgtccctaatcaaaggcaaaaccgttgccatcatcggttacggttcgcaaggtcatgcccatgctgccaacctgaaagattcgggtgtaaacgtggtgatcggtctgcgccaaggttcttcttggaaaaaagccgaagcagccggccatgtcgtcaaaaccgttgctgaagcgaccaaagaagccgatgtcgttatgctgctgctgcctgacgaaaccatgcctgccgtctatcacgccgaagttacagccaatttgaaagaaggcgcaacgctggcatttgcacacggcttcaacgtgcactacaaccaaatcgttccgcgtgccgacttggacgtgattatggttgcccccaaaggtccgggtcataccgtacgcagtgaatacaaacgcggcggcggcgtgccttctctgattgccgtttaccaagacaattccggcaaagccaaagacatcgccctgtcttatgcggctgccaacggcggcaccaaaggcggtgtgattgaaaccactttccgcgaagaaaccgaaaccgatctgttcggcgaacaagccgtattgtgcggcggcgtggtcgagttgatcaaggcgggttttgaaaccctgaccgaagccggttacgcgcctgaaatggcttacttcgaatgtctgcacgaaatgaaactgatcgttgacctgattttcgaaggcggtattgccaatatgaactactccatttccaacaatgcggagtacggcgaatacgttaccggccctgaagtggtcaatgcttccagcaaagaagccatgcgcaatgccctgaaacgcattcaaaccggcgaatacgcaaaaatgtttatccaagagggtaatgtcaactacgcgtctatgactgcccgccgccgtctgaatgccgaccaccaagttgaaaaagtcggcgcacaactgcgtgccatgatgccttggattactgccaacaaattggttgaccaagataaaaactga

SEQ ID NO: 63108 - DNA, 1035 bp, Neisseria meningitidis
atgggtgcctgtgcggcgtttgccgccttggtctggctggttttcgcgctcggcgatactttgactccgtttgcggttgcggcggtgctggcgtatgtattggaccctttggtcgaatggttgcagaaaaagggtttgaaccgtgcatccgcttcgatgtctgtgatggtgttttccttgattttgttgttggcattattgttgattattgtccctatgctggtcgggcagttcaacaatttggcatcgcgcctgccccaattaatcggttttatgcagaacacgctgctgccgtggttgaaaaatacaatcggcggatatgtggaaatcgatcaggcatctattattgcgtggcttcaggcgcatacgggcgagttgagcaacgcgcttaaggcatggtttcccgttttgatgaggcagggcggcaatattgtcagcagtatcggcaacctgctgctgcttcccttgctgctttactatttcctgctggattggcagcggtggtcgtgcggcattgccaaactggttccgaggcgttttgccggtgcttatacgcgcattacaggcaatttgaacgaggtattgggcgaatttttgcgcgggcagcttctggtgatgctgattatgggtttggtttacggcttggggttggtgctggtcgggctggattcggggtttgcaatcggtatggttgccggtattttggtttttgttccctatttgggcgcgtttacaggactgctgctggcaaccgtcgccgccttgctccagttcggttcgtggaacggcatcttggctgtttgggcggtttttgccgtaggacagtttctcgaaagttttttcattacgccgaaaatcgtgggagaccgtatcggcctgtcgccgttttgggttatcttttcgctgatggcgttcgggcagctgatgggctttgtcggaatgttggccggattgcctttggccgccgtaaccttggtcttgcttcgcgagggcgtgcagaaatattttgccggcagtttttaccggggcaggtag

SEQ ID NO: 63109 - DNA, 390 bp, Neisseria meningitidis
atgaacccgcacgagaaactcttgaccaccgacaaccccatcttgcgccaacgcgccaaagccatgcgccaagaaatgagcggggcggaagcaaaattgtggcagcacctgcgggcaggtcgtctgaacggctataaattccgccgccagcagccgatggggaattatattgttgattttatgtgcgtaacgcccaagctgattgtcgaagcagacggcgggcagcacgcggaacaagccgtatacgaccacgcgcggacggcatatctcaacagcctgggctttaccgtgctgcggttttggaatcacgagattttgcagcagacaaacgatgtgctgacagaaatcctgctcgtgttgcaagaattggaaaagcaagctgcacgatag

SEQ ID NO: 63110 - DNA, 1311 bp, Neisseria meningitidis
atgaccgatttgtttgcccgagaacccgacgcgccgcttgccgaacgattgcgtccgcatacgcttgacgacgtggtggggcaggaacacctcatcggcgaaggtaaacctttgcgcgtggcggtagaaggcggcaagccgcattctatgttgctgtgggggccgccgggtgtgggcaagacgacgttggcacggattttggcgcagagtttcaatgcccagtttttgcctgtttccgccgtgttttccggcgtgaaggacatacgcggggcaatcgataaggctgaaatcgctttgcaacagggacgcgcgacgattttgtttgtcgatgaagtccaccgtttcaacaaggcgcagcaggacgcgtttttgccttatgtcgaaagcggcttattaacctttatcggcgctaccacggaaaacccgtcgtttgaagtcaatccagcattgctcagtagggcgcaagtttatgtcttgcaatccttgtcttcagacggcctcaagaaactgattgccaaagtgttggctttgcccgaataccgggatttcacgattgaagccgacgcgcaggagctgctcgtcaataccgccgacggcgatgcgcgcagattgttgaatttgttggaacaacttttacgcgccgccgacacgcgccgtctgaaaaccctgaccgccgaatttctcgccgacagtctcggggcgcaaatccgccgtttcgacaaaggcggcgagagtttctacaaccaaatctccgccctgcacaaatccgtgcgcggttcgcatccaaacgccgcgctgtattggttttgccgtatgctcgacggcggcaccgacccgcgctatctcgcccgccgcattgtccgcatggcatgggaagacatcggcttggccgatccgcgtgccttaacgattgccaatgatgccgccgctacttatgagcgcttaggctcgccagaaggggagctcgctttagcgcaagccgtgttgtatctcgccgccgccgcgaaatccaacgcgggctacaaggcatacaaccaaatgcgccgatttgttgcagaaaacagtagcgacgaagtgcctgtccatcttcgcaacgccccgaccaagctgatgaaggaattgggctacggacgcgaataccgctacgcccacgacgaaccgaacgcctacgccgccggcgaaagctatatgcccgacggcctggacgaacccgatttctaccgacccgtcccgcgcgggctggaaatcaaaatcggcgaaaagctggcgtggttgaaatcgctggacgaagaagtattaaaggcaaaatga

SEQ ID NO: 63111 - DNA, 921 bp, Neisseria meningitidis
atgaccaataaacccaccaaacgcccggtcaacggcgttcttctcctcgacaaacccgaaggcctttccagcaacaccgccctgcaaaaagcgcggcgtttgttccgtgccgaaaaagccgggcataccggcgtgctcgaccctttggcaaccgggcttttgcccgtctgcttcggcgaagcgaccaagttcgcccaatacctgctggatgccgacaaagcctacaccgccacgctgaaactcggcgaagccagcagcacgggcgatgccgaaggcgaaatcgttgccactgcccgcgccgatatttccttagccgaatttcagacggcctgccaagccttaacgggcgacatccgccaagtgccgccgatgttttccgcgctcaagcacgaaggtaaaccgctgtacgaatacgcgcgcaaaggcatcgtcatcgaacgcaaagcgcgcgacattaccgtttacgccatcgatattgccgaatttgatgcgcccaaagccgtgataagcgtgcgttgcagcaaaggtacctatatccgcaccctcagcgaagacatcgccaaacacatcggcacgttcgcccacctgaccgccctgcgccgtgccgaaaccgccggctttactatcgcccaaagccacacgcttgaggccttggcaaatttgaacgaaacagaacgcgacagcttgctgctaccctgcgacgtattggtttcacactttccccaaaccgttttaaacgattatgccgtccatatgctccgctgcggacaacgtccgcgtttcgaggaagacctaccttccgacacgccggtacgcgtttacactgaaaccggagaatttgtcggtttagcagaatatcaaaaggaaatatgccgtctgaaagccttgcgcctgatgaacacggcggcatccgccgcctga

SEQ ID NO: 63112 - DNA, 1503 bp, Neisseria meningitidis
atggcaaaagtactcatcgtacccgtatctgccggactggacgcctccgccgccgcacaagcctttgcaaaagcactggacgcacaaattttccaagccgttgacgcaaccgccgaaaccctgctcgcgcaaggcaaaagcgacgactggttcgacgcactggtcggcaaagttgccgcactcgatgctgccaacctcgtcatcgaaggcttcgcgcccgatgccgacaaaatctacctcgcaggcaaaaacgtcgaactggcattgtcccttgacgcggcagccgtcttcgccgtccgttccgacaacgccgatgccgacgaactggcaaatcgggtgaaccttgccaaacagttcttcgccgccgcgccgggcgtattggaaggttttgtcgtggacggcgcggcagcctccgttgccgaagcggcagccgaaaaaaccggcctgaccttcttcggttcgagcgacgcgctgaaagacgtatccgtattggcaggccgcgaagcaaaacgcctgtcgccggcgcaattccgctacaacctgatcgacttcgcccgccaagccgacaaacgcatcgtcctgcctgagggcgcagaaccccgcaccgtccaagccgccgccatctgccacgaaaaaggcattgcccgctgcgtcctgcttgccaaacgcgaagaagtcgaagccgttgccaaagaacgcggtatcagcctgcccgactctttggaaatcatcgatcccgcctcattggtcgaacaatacgtcgagccgatgtgcgaactgcgcaaatccaaaggcctgacacccgaagacgcgcgcaagcaactgcaagacaccgtggtactcggtacgatgatgatggcgcaaaatgatgtggacggtttggtatccggtgcggttcacaccaccgccaacaccatccgccccgctttgcaactgattaaaaccgcaccgggcgcaagcctcgtgtccagcgtattctttatgctgctgcccaaccaagtcctcgtcttcggcgactgcgcggttaatccgaacccgaccgcgcaacagcttgccgacatcgccatccagtctgccgattccgcaaaagccttcggcatcgacccgaaagtggcgatgatttcctactccaccgtcaactccggcagcggccccgatgtcgataccgtcatcgaagcaaccaaacttgcccgggaaaaacgccccgacctcgccatcgacggcccgctgcaatatgatgcggcaaccgtgccgggcgtgggcaaatccaaagctccgggcagcccggtggcaggacaggcaaccgttttggtcttccccgacctgaacaccggcaactgcacctataaagccgtccaacgcaacgccaacgtcttaagcgtcggcccgctgctgcaaggcctgcgtaaaccggtcaacgacctctcccgcggcgcactggtagaagatatcgtgtttaccatcgccctgactgccgttcaggcaaaacaaatggaaggctga

SEQ ID NO: 63113 - DNA, 558 bp, Neisseria meningitidis
atgaacatcatcgacaccgccctccccgacgtaaaacttttaaaaccgcaagtcttcacagacgggcgcggcttttttatggaaaccttccgcgacgggtggtttaaaacccaagtctgcgaacgcaccttcgtgcaggaaaaccactccaaatccggcaaaggcgtattgcgcggcctgcactaccaaaccgaaaacacacaaggcaaactcgtacgcgtagttgtcggcgaagtgttcgacgtggccgtcgatatgcgtaaagactcccccactttcggcaaatgggtaggcgagattctgtccgcagaaaacaaacgccaactgtgggtacccgaaggtttcgcgcacgggttttacgttttgagcgacacgaccgaacttacctacaaatgcacggactattacaagcctgaagccgaacactcactaatttggaatgatccgaccgtcggcataggctggccgcttcaaaccgcgccgctgctgtcgcccaaagaccttgccggcaaaacgtgggcgcaagccgaaaagctccgccttacactttcccgataa

SEQ ID NO: 63114 - DNA, 1689 bp, Neisseria meningitidis
atgctcaataaagaccaatttgcggacaaccattttatccgcaccttcatcgaagaagacctcaaaagcggcaaacacgaaaccatccaaacccgttttccgccggagcccaacggctacctgcacatcggacacgccaaatccatctgcctgaacttcggtttggcgtatatttacgacggcttgtgcaacctgcgttttgacgataccaaccccgaaaaagaaaacgacgaatacgtcaacgccatcaaagaagacgttgagtggctcggtttccattgggcgggcgagccgcgtttcgcttccaactatttcgaccagctttatgactacgccgtcggtttggttaaagacggcaaagcgtatgtcgatgatttgacgccagaagaaatgcgcgaataccgcggtacgctgaccgaagcaggcaaaaacagcccttatcgcgaccgcagtatcgaagaaaacctcgacctgttcacgcgcatgaaaaacggtgagttccccgacggcagcaaaaccctgcgcctgaaaatcgacatggcatccggcaacatcaatatgcgcgatccggtcatctaccgcatccgccgcgcccatcaccacaacaccggcgacaaatggtgcatctatccgatgtacgactacacgcattgtatttccgatgccatcgaaggcatcacgcattccttgtgtacgctcgaatttgaagcccatcgtccgctgtatgactgggtgttggacaacatccccgcgccgcacgccacacgtccgcgccaatacgagttttcacgcttggagcttttgtacaccattacctccaaacggaaattgaatcagttggttgtggaaaaacacgtttccggctgggacgatccgcgtatgccgaccatttccggtatgcgccgacgcggctacacgcccgaagggctgcgcctgtttgccaaacgcgccggtatttccaaatctgaaaacatcgtcgatatgagcgtgttggaaggcgcgattcgcgaagagttggaaaattccgccccacgcctgatggcggtgttgaacccgctcaaagtaaccctgaccaactttgaaaccggcagaacccaaagccgccgtgccgcgttccatccgaaccacgaagaaatgggcgatcgcgaagtacctgtttcacaaaccatttacatcgaagccgacgactttgccgaaaatccgcccaaaggcttcaaacgcctgattcccggcggcgaagtacgcttgcgccacggctatgtcatcaagtgcgatgaagtcgtcaaagacgaagcaggcaatgtggttgaactcaaatgcagcatcgaccacgacaccttgggcaaaaatccagaaggccgtaaagttaaaggcgtgattcattgggtttccgccgaacacgccgccgaaatcaaagtccgtctgtacgaccgcctctttaccgtcgagcgtcccgatgccgtgcgcggcgaagacggcgaatacctgccgttcaccgatttcctcaatccggaatccgtcaaggaaatcaccgcctacgccgaacctgccgccaaagatttgccggcagaaagccgttggcagttcgagcgtatcggctacttcgtaaccgaccgtaaagaccacggcaaagacacgccggtgtttaaccgcacggtcacgctgaaagattcttggcagcctaagtaa

SEQ ID NO: 63115 - DNA, 345 bp, Neisseria meningitidis
atgaacatcatccgcgcgctcctcatcatcctcggctgcctcgccgccggcgaaaccgccgttttcctagcaggcatcaaactgcccggcagcatcgtcggcatgggcgtgctgtttgcgcttttgcaggcgggttgggtcaaaacgtcttggctgcaacagcttaccgacgcgctgatggcgaatctgacgctgtttctcgtgccgccctgcgtggcggtcatcagctatttggatttgattgccgacgattggttttcgatactggtttccgcctccgccagcactttgtgcgtactgctggttacgggcaaagtccaccgctggatacggagcattatctga

SEQ ID NO: 63116 - DNA, 480 bp, Neisseria meningitidis
atgagcaccttctttcagcaaaccgcccaagccatgattgccaaacacatcggccgtttcccactattgaagttggaccaggtgattgattggcaaccgatcgaacaatacctgaaccgtcaaaaaacccgttacctccgagaccaccgcggtcgtcccgcctacccgctgttgtccatgttcaaagccgttctgctcggacaatggcacagcctctccgatcccgaactcgagcacagcctcatcacccgcatcgacttcaacctgttttgccgctttgacgaactgagcatccccgattacagcaccttatgccgttaccgcaactggctggcgcaagacgacaccctgtccgaattgctcaaactgattaaccgccaactgaccgaaaaaaacctaaaagtagagaaagcatccgctgccgtcgttgacgccaccattattcagaccgccggcagcaaacagcgccaggcccgataa

SEQ ID NO: 63117 - DNA, 192 bp, Neisseria meningitidis
atggcgaaaattgttattacgataaaagacgagatgccagtaaacggcttgaacggcgtgaccatcagttatgacggcgatttggagccgcaaggcgaactgacgatggcgcagatgacggcttataacatcaagaaattgatggatgcggttgagtttgagaccgcaaaaaggctgagtaaagcaaattga

SEQ ID NO: 63118 - DNA, 462 bp, Neisseria meningitidis
atgcctgattttcctcccgtttcccgattccttgccgacgaagccgccacactcgatttgggcgcggcgtggtcttcccgtttaaacgcgccgctggtcatttatctcgagggggatttgggtgcgggtaaaaccacgctgacacgcggcatcctgcgcggattgggtcatcagggcgcagtcaaaagcccgacttacgccatcgtcgaatcttatccgctggaacgcttcaccttgcaccatttcgacctctaccgcttctcgttccccgaagaatgggaagatgcggggcttgacgaactgtttgccgcaaacagcgtctgcctgatcgaatggccgcaacagggtggggaatttacgccgcccgccgacatcaccgcaacattgacacacgacggcggcggcagaaaatgcctgctgaccgcccataccgaacgaggacgcgaaagcctgccgctatga

SEQ ID NO: 63119 - DNA, 297 bp, Neisseria meningitidis; identical to SEQ ID NO: 43641

SEQ ID NO: 63120 - DNA, 702 bp, Neisseria meningitidis; identical to SEQ ID NO: 44996

SEQ ID NO: 63121 - DNA, 1053 bp, Neisseria meningitidis
atgtggaaagaaattttactgaattacggtattttcctgctcgaactgcttaccgtgttcggcgcaattgcgctgattgtgttggctatcgtacagagtaagaaacagtcggaaagcggcagtgtcgtactgacggatttttcggaaaattataaaaaacagcggcaatcgtttgaagcattctttttaagcggggaagaggcaaaacatcaggaaaaagaggaaaagaaaaaggaaaaggcggaagccaaagcagagaaaaagcgtttgaaggagggtggggagaaatctgccgaaacgcaaaaatcccgcctttttgtgttggattttgacggcgatttgtatgcacacgccgtagaatccttgcgtcatgagattacggcggtgcttttgattgccaagcctgaagatgaggttctgcttagattggaaagtccgggcggcgtggttcacggttacggtttggcggcttcacagcttaggcgtttgcgcgaacgcaatattccgctgaccgtcgccgtcgataaggtggcggcgagcggtggttatatgatggcgtgtgtggcggataaaattgtttccgctccgtttgcgattgtcggttcggtgggtgtggtggcggaagtaccgaatatccaccgcctgttgaaaaaacatgatattgatgtggatgtgatgacggcgggcgaatttaagcgcacggttacttttatgggtgaaaatacggaaaagggcaaacagaaattccgacaggaactggaggaaacgcatcagttgttcaagcagtttgtcagcgagaaccgccctcaattggatattgaggaagtggcaacgggcgagcattggttcggtcggcaggcgttggcgttgaacttgattgacgagatttcgaccagtgatgatttgttgttgaaagcgtttgaaaacaaacaggttatcgaagtgaaatatcaggagaagcaaagcctgatccagcgcattggtttgcaggcggaagcttctgttgaaaagttgtttgccaaacttgtcaaccggcgggcggatgtgatgtag

SEQ ID NO: 63122 - DNA, 420 bp, Neisseria meningitidis
atgaatctcgtgaaactgctggcgaataaccggcaaccgattgccattatcgcgcttgtcggcacgggcttggctgtgtcgcaccatcaaggctacaagtcggcatttgcgaagcagcaggcggtcatcgacaagatggagcgcgacaaggcgcaagccctgctgttgtcggctcaaaactatgcgcgcgaactggaactggcacgcgcggaagctaaaaaatatgaagtcaaggcgcacgctgtcggcatggctttggcgaaaaaacaggcggaagtcagccgtctgaaaacggaaaataaaaaggaaatcgaaaatgtccttactcaagaccgtaaaaatgcaggcggcggttgtattgacggctttggctctcacggcttgcagctctacaagcgcgccctcggctacggaaattaa

SEQ ID NO: 63123 - DNA, 822 bp, Neisseria meningitidis; identical to SEQ ID NO: 58515

SEQ ID NO: 63124 - DNA, 198 bp, Neisseria meningitidis; identical to SEQ ID NO: 36305

SEQ ID NO: 63125 - DNA, 1242 bp, Neisseria meningitidis
atgcccaacaaaaccccttccctgttcggcggcgcgatgattatcgccggtacggtcatcggcgccggtatgctcgccaacccaaccgccacatccggcgtatggtttgccggctcgctgattgtattgctctacacttggttttctatgctctccagcggtctgatgattttggaagtcaacacccactacccccacggcgcaagtttcgacacgatggtcaaagacctgctcggacgcggctggaacatcatcaacggcatcgccgtcgccttcgttttatacctgctcacctacgcctacatcttcgttggcggcgacctgaccgccaaaggcatcggcaacgccttgggcggcgacgtttcgcttaccgtcggacaactcgtcttcttcggcattctcgccttttgcgtatgggcatctgcacgcttggtcgaccgattcaccagcgtcctcatcggcggcatggtattaacctttatttgggcaaccggcggcctgattgccgatgccaaactgcccgtcctcttcgacacccaagcccctaccggcacaaactactggatttatgtcgccaccgccctgcccgtctgcctcgcttccttcggcttccacggcaacgtctccagcctgctcaaatactttaaaggcgacgcgcccaaagtggctaaatccatctggatgggcacactgattgcgctggtgatttacgtcctctggcaaaccgccatccaaggcaacctgccgcgcaacgagttcgcccccgtcatcgccgccgaagggcaagtctccgtcctcatcgaaaccctgtccaaattcgcccaaaccggcaatatggacaaaatattgtccctgttttcctatatggcgatcgccacctcgtttttaggcgtaacgctcggactcttcgactacatcgccgacatcttcaaatggaacgacagcgtgtccggccgcaccaaaaccgccgcgctgaccttcctgccgcctctaatttcctgcctgctcttccccaccggcttcgttaccgccatcggctacgtcggcctggcggcaaccgtctggacaggcatcatccccgccatgctgctctaccgttcgcgcaaaaaattcggcgcaggcaaaacctataaagtttacggcggcttgtggctgatggtgtgggtcttccttttcggcatcatcaacatcgccgcacaggtattgagccaaatggaacttgtccccgtatttaaaggataa

SEQ ID NO: 63126 - DNA, 333 bp, Neisseria meningitidis; identical to SEQ ID NO: 44638

SEQ ID NO: 63127 - DNA, 324 bp, Neisseria meningitidis
atgaacgcatttgcacaagcactttcctcggcactcgaccgctgcatcgccaccaacaccgtcgccaaacaaaaccagcctgtcggcttcctctaccgcgaagcccccgtttttgaaaacgacagcggctggcgtttcttcagcggcgacgagaccgacgaatacaccgacgaccccgacaacttcagtatcgtcagcctcgccaacatcgccaaaaccaaccctgaaaccgccgcactgctttcccaacccgaaggcagcgcgtgggaattggcagaagacggcacattccaaaccgttgccgactggcaacctaaggactga

SEQ ID NO: 63128 - DNA, 894 bp, Neisseria meningitidis
atgattattgtcatgagcaggcgtgccgccgaagcggacattgccggcgttgtcgcctttatccgcagcagaggtctgcgagaacacatttctcacggcgacgagcgtactgtcatcggcgcaatcggcgacgatagggttttgagcgtcagggaggtgcagacgctgccggaggtcgagaaagccgtccgcattttggatacatggaaaaccgtcagtcgggaaaatcgggcggaagacagccgcgttgccgccaaaggcgtggctttcggcggcggggaaaccgtccgtatcgccgcagaaccgtcagtatggcgcaatgcggatgcagtgtttctggatccgtttttcacttcggcaaacttatacgacacttcaagtgcggatgaagggcggggacggtgcagacggttggcggaacagaccgcatcggcgcatggcgcagggaaacccgtattggtgcgcgtccgcaacgtccgccatgtcgaagcggctttgaatgcgggggcggacatcctgtatttgggcggcgggctgatgtccgatcttgccgtattgaatgaagccggaagcctgaacattcccttggtgctgtgtaaagacaagcaccattctgccgaagattggttgaatgccgcagaatatgtcgtctcgcgcggcaaccgccacctgattctaggcgagtcgggcgtgttgagccataccaaagaccatccctaccgtttggatgtcgaatccatcgtgaaagtccgccaaatcagccatctgcccgtgattgcgaatattacgggattatggaaccgcgatatgccgcaggaaatcctgtacggcttggcaaaggcggcaggcgcgtgcggaatcgtcggaacctgttttgaaaagtcgggcggatag

SEQ ID NO: 63129 - DNA, 1074 bp, Neisseria meningitidis; identical to SEQ ID NO: 39216

SEQ ID NO: 63130 - DNA, 966 bp, Neisseria meningitidis
atgagctacacgcaactgacccaaggcgaacgataccacatccaatacctgtcccgccactgcaccgtcaccgaaatcgccaaacagctgaaccgccacaaaagcaccatcagccgcgaaatcagacggcaccgcacccaagggcagcaatacagcgccgaaaaagcccagcggcaaagccagactatcaaacagcgtaagcgacaaccctataagctcgattcgcagctgattcagcacatcgacacccttatccgccgcaaactcagtcccgaacaagtatgcgcctacctgtgcaaacaccaccagatcacgctccaccacagcaccatttaccgctaccttcgccaagacaaaagcaacggcagcacgttgtggcaacatctcagaatatgcagcaaaccctaccgcaaacgctacggcagcacatggaccagaggcaaagtacccaaccgtgtcggcatagaaaaccgacccgctatcgtcgaccagaaatcccgtatcggcgattgggaagccgacaccattgtcggcaaaggacagaaaagcgcattattgaccttggtcgaacgcgttacccgctacaccatcatctgcagattggatagcctcaaagccgaagacactgcccgggcagctgttagggcattaaaggcacataaagacagggtgcacaccattaccatggataacggcaaagagttctaccaacacaccaaaataaccaaagcattgaaagcggagacttatttttgtcgcccttaccattcttgggagaaagggctgaatgagaacaccaacggactcatccggcaatacttccccaaacaaaccgatttccgtaacatcagtgatcgggagatacgcagggttcaagatgagttgaaccaccgaccaagaaaaacacttggctacgaaacgccaagtgttttattcttgaatctgttccaaccactaatacactag

SEQ ID NO: 63131 - DNA, 900 bp, Neisseria meningitidis
atgaaaaccaattcagaagaactgaccgtatttgttcaagtggtggaaagcggcagcttcagccgtgcggcggagcagttggcgatggcaaattctgccgtaagccgcatcgtcaaacggctggaggaaaagttgggtgtgaacctgctcaaccgcaccacgcggcaactcagtctgacggaagaaggcgcgcaatatttccgccgcgcgcagagaatcctgcaagaaatggcagcggcggaaaccgaaatgctggcagtgcacgaaataccgcaaggcgtgttgcgcgtggattccgcgatgccgatggtgctgcatctgctggcgccgctggcaacaaaattcaacgaacgctatccgcatatccgactttcgctcgtttcttccgaaggctatatcaatctgattgaacgcaaagtcgatattgccttacgggccggagaattggacgattccgggctgcgtgcacgccatctgtttgacagccgcttccgcgtaatcgccagtcctgaatacctggcaaaacacggcacgccgcaatctacagaagagcttgccggccaccaatgtttaggcttcaccgaacccggttctctaaatacatgggcggttttagatgcgcagggaaatccctataagatttcaccgcactttaccgccagcagcggtgaaatcttacgctcgttgtgcctttcaggttgcggtattgcttgcttatcagattttttggttgacaacgacatcgctgaaggaaagttaattcccctgctcgccgaacaaacctccgataaaacacacccctttaatgctgtttattacagcgataaagccgtcaacctccgcttgcgcgtatttttggattttttagtggaggaactgggaaacaatctctgtggataa

SEQ ID NO: 63132 - DNA, 1008 bp, Neisseria meningitidis; identical to SEQ ID NO: 62927

SEQ ID NO: 63133 - DNA, 330 bp, Neisseria meningitidis
atgtttgatggcgaagtagaagcagatgaaagttattttggcggacaacgcaaaggcaaacgcggtcgcggtgctgccggtaaagtcgccgtattcggtcttttgaagcgaaatggtaaggtttatacggttacagtaccgaatactcaaaccgctactttatttcctattatccgtgaacaagtgaaacctgacagcattgtttatacggattgttatcgtagctatgatgtattagatgtgcgcgaatttagccattttagcttcgctgaaacttcgttttcgtatcaatcacagcacacattttgccgaacgacaaaaccatattaa

SEQ ID NO: 63134 - DNA, 363 bp, Neisseria meningitidis
atgaagctgccgcgcaaccgcttcagcctgctttccgcattgtggtttgccggcggcatctattcgctgctcttcaaagctgccgacaccgcgccgccgccgtttccgcatttcgacaaagcagcacaccttgccctgtttttcgcacaaatctggcttttgaccaaagcattcaaaaccggaaaacttcccatcccctaccgcagcctgatggtctttgccctctgtttcgccctcttcagcgaatgcgcgcaggcatggtttaccgcaacgagaaccggcagtttgggcgatgtccttgccgacctgacgggcgcagcccttgccctctttaccgcgcgagctgccgaccgcccggactga

SEQ ID NO: 63135 - DNA, 462 bp, Neisseria meningitidis
gtgagcggcgagcaaactttggaaacggcggccttgatgtgcgaaatcccgcagaccactgcgcgtgcgtggaaacgtgcggataaggaaaaaggcgacgactgggataagatgcgcgccgcctacactttggccggcggcggtattgaggatttgagccgcgcgatgttggccggttttatggtgcagtacaacagcacgatgacgatgctgcaggattcgagtaccgaagatttgcctccgtccgaccgcgccaagctgttggccagcctgaccgatgcgtttacgaaaaccgtatccgccaatgcccgtgtgatgccggaaacatcaaaactggcgacggctttggaattgattgagttcttgatggcgtttgtgcaagaaaaacatcccaaacatttgcctgtctttgtggaggtattggagccgtttggggcggaagtggagaagaagtttggttag

SEQ ID NO: 63136 - DNA, 927 bp, Neisseria meningitidis
atgaaagtcatcttcgccggcacgcccgattttgccgccgccgccttaagagccgttgccgccgccggttttgaaatcccgctggtgctgacccagcccgaccgtccgaaagggcgcggtatgcaactgactgccccgcccgtcaaacaagccgcgctggaactcggtttgcgcgtcgaacagcccgaaaaactgcgtaacaacgccgaagccctgcaaatgctcaaagaggtcgaggcagacgtaatggtggttgccgcctacggtttgattctgccgcaagacgtgttggatgtgccgaaacacggctgcctcaacatccacgcttcgctgctgccccgttggcgcggcgcggcgccgattcagcgcgcgattgaggccggcgatgccgaaaccggcgtgtgcattatgcagatggatgccggtttggacaccggtgatgtggtcagcgaacaccgctacgccatccaaccgaccgataccgccaacgaagtccacgacgcgctgatggaaatcggtgcggcggcggttgttgccgatttgcaacagcttcaaagcaaaggccgtctgaacgcggtcaaacagcccgaagaaggtgttacttacgcgcaaaaattgcgcaaagaagaggcgcgtatcgattggagcgaaagcgcggcggttatcgaacgcaaaatccgcgccttcaaccccgtgcctgccgcgtgggttgagtatcagggcaagccgatgaaaatccggcgggcggacgtggtggcgcaacaaggcacggcaggcgaagtgttgtcctgttcggcggacggtttggtcgttgcctgcggcgaaaacgcgctgaagattaccgaattgcagcctgccggcggcaggcgtatgaatatcgcggcgtttgcggcgggacggcatatcgaagcagggacgaagctgtaa

SEQ ID NO: 63137 - DNA, 975 bp, Neisseria meningitidis; identical to SEQ ID NO: 60972

SEQ ID NO: 63138 - DNA, 681 bp, Neisseria meningitidis
atggaacggtataaaaatgccgttggggaagacaaagcagctgaattgtatttattgaatttatctttatcaagagaactttttcatgttgtttcaatatttgagattgttttaagaaacaaaattgacatttgccttcagcaggcgtttaaagacagaaactggttatataacagcatacagccacagacgaatcccgcattaaaatatcaaggttgctttttaagaaatggcacgaaagaatctgctgaattaatcaaggttgcattatctaaaatacaaaataatagcgggggaaagtttgaccacaaccaattggttgcaggactaggattcggtttttggcggtatctgtttgcaggagggaaagatgcccaatttgatgctacagggaaagtattgatgaaagtttttccaaaaaagcccaaatctacaccaagtgtgcaatataaccaaaaatggatttttcgagaactttccaatattaacaatttccgtaatcgtttggcacatcacgaaccgatttgttttaaaggtgcaataaaagataccaactacgctagaaatattcaccaatctatttttgaactgcttaattacatggatgtagatactgcttcagtatttagccattttagcgatcaagtgattgcggtctgcgatgaaatcgacaaactgtga

SEQ ID NO: 63139 - DNA, 876 bp, Neisseria meningitidis; identical to SEQ ID NO: 42702

SEQ ID NO: 63140 - DNA, 942 bp, Neisseria meningitidis
atgaaaaccctgctcctcctcatccccctcgtcctaaccgcctgcggcacactgaccggcatacccgcccacggcggcggcaaacgctttgccgtcgaacaagaactcgtcgccgcatcgtcccgcgccgccgtcaaagaaatggatttgtccgccctgaaaggacgcaaagccgccctttacgtctccgttatgggcgaccaaggttcgggcaacataagcggcggacgctactctatcgacgcactgatacgcggtggctaccacaacaaccccgaaagtgccacccaatacagctaccccgcctacgacactaccgccaccaccaaatccgacgcgctctccagcgtaaccacttccacatcgcttttgaacgcccccgccgccgccctgactagaaacagcggacgcaaaggcgaacgctccgccggactgtccgtcaacggcacgggcgactaccgcaacgaaaccctgctcgccaacccccgcgacgtttccttcctgaccaacctcatccaaaccgtcttctacctgcgcggcatcgaagtcgtaccgcccgaatacgccgacaccgacgtattcgtaaccgtcgacgtattcggcaccgtccgcagccgtaccgaactgcacctctacaacgccgaaacccttaaagcccaaaccaagctcgaatatttcgccgtcgaccgcgacagccggaaactgctgattgcccctaaaaccgccgcctacgaatcccaataccaagaacaatacgccctctggaccggcccttacaaagtcagcaaaaccgtcaaagcctcagaccgcctgatggtcgatttctccgacatcaccccctacggcgacacaaccgcccaaaaccgtcccgacttcaaacaaaacaacggtaaaaaccccgatgtcggcaacgaagtcatccgccgccgcaaaggaggataa

SEQ ID NO: 63141 - DNA, 1290 bp, Neisseria meningitidis
atgatgaattctatcctcaccgtatccgaaaatcgtatgcgtaaacccagaatcacccatttggatgtttgggcaaacgatgaaagaatcggtactttggaaaagggggcaatgtaccgtttcacatatgacaaccccggttctccattgttgggtttgcactatcaggataggggtaaagtatatatcagcaacaacatgccgcatatctttgcacagtattttccggaaggctttttggatgcacacatcacaagcaaatatgcttttcatgatgcgccttttgaagacaatgagatgctgcgcttggcaattctgggcagagagactttgggtcggatacatgtgcgctgtaatgacccgctttttaatgaatggattgacgggttggagatgaaaaatccaagaatattgactgaacgggatttgctgggcataaatgcccgacaggtttttcagcaatatatggcagaaatcttccatcacggtcgtttcgtcagtgtatccgggatacagcagaagatgtccttagatgccatcagcagaaataccaagcaaactgcctcatatattgccaaaggttttgatgcatccgaatatccttgcttggctgccaatgaatttttatgcatgcagaccatcaaacaagcaggtattccggttgcacaaaccagcctgtcggaagattcatcagtcttattggtacgtcggtttgatgtcagtgaacaggagtatttcttaggcatggaagactttaccagtctgcgtcagtattcagcagaagataaatataaaggcagttatgcggctattgcacagattatccgacagatatccggcaggcccgatgaagatttaatccatttttttaaccagcttgccgccagttgcatattgaaaaacggggatgcacaccttaaaaatttttcagtactctatcatgacgaatacgatgtacgtcttgcacctacctatgatgtattggatacatcaatatacaggattggaacacaaggaatttttgatgcttatgacgatacgctggcattaaacctgactaaccacggtaagaaaacatatccttccaagaatacattgttggattttgctgagaaatattgcgatttgggaagagaagatgcatcctttatgatagatacaatcgttcaagctaaagaacaggttcttgttaaatactcggatgtattgcgtgagaatgaatggttggcgcagaagtggcattttatcccggatgaaaatgaagaaggtctaccgtttacattccggtag

SEQ ID NO: 63142 - DNA, 270 bp, Neisseria meningitidis
atgatgacggaatcccatggttacctatcaaataatttacctgttaaaatcataaatgatattatttatgcaacccagttagtcgaagatttggttttaggaaaaataaaaattgttgattttttaaaatcatataacaatttttattgttggcttggttttgatgagttgcctcaatctgagaaaataaaattcctaagctatctcaatatattaagtattcataaagaaatacaagatgaaactgtgaatagggtttatacctattga

SEQ ID NO: 63143 - DNA, 249 bp, Neisseria meningitidis
ttggttttttggttgcagcgtttgaaatacccgttgttgctttggattgcggatatgctgctgtaccggttgttgggcggcgcggaaatcgaatgcggccgttgccctgtgccgccgatgacggattggcagcattttttgctggcgatgggaacggtgtcggcttgggtggcggtgatttgggcatatctgattattgaaagtgaaaaaacggaagatattgagtcattcggacacaatgccgtctga

SEQ ID NO: 63144 - DNA, 198 bp, Neisseria meningitidis
atgccgtctgaaaaaatctattacggcgtattgattttcttatgtatcgcttctatgctgctgtcgccgtttttttatgcgggtgctttgaagcccaagaaggcggcattgcggaaggacgagcagtggaaactcatcttattgtccaatgccgtggcggcggcggttttggcttgggtgtggtggaaatggttttga

SEQ ID NO: 63145 - DNA, 2157 bp, Neisseria meningitidis
atgtcagttttccgcatcaatatgaccgccgccacggttttggcagcactttcgtcttcggtttttgccgcacaaacggcggatttggaaaccgtccacatcaaagggcagcgttcgtacaacgcgattgtcaccgagaaaaacggcgattacagctcgtttgccgtcaccgtcggcacaaaaatccccgcttctttgcgcgaaattccgcaatccgtcagtatcatcaccaaccagcaggtcaaagaccgcaatgttgatacgtttgaccagttggcgcgcaaaacgcccggcctgcgcgtgttgagcaacgatgacggacgctcttcggtttacgcgcgcggttacgaatacagcgaatacaacatcgacggcctgcccgcgcagatgcagagtatcaacggcacgctgcccaatctgttcgccttcgaccgcgtggaagtgatgcgcgggccgagcggactgttcgacagcagcggcgagatgggcggtatcgtgaatctggtgcgcaaacgcccgaccaaagcgttccaaggtcatgctgcggcagggttcggtacgcacaaacaatataaagccgaggcggacgtatcgggcagcctcaattcagacggcagcgtgcgcggccgcgtgatggcgcagaccgtcggcgcgtctccgcgtcccgccgagaaaaacaaccggcacgaaaccttctacgcggcggcggattgggacatcaaccccgatacggttttgggcgcgggctatctttaccagcaacgccacctcgcgccgtacaacggcttgccagccgatgccaataacaaattaccgtccctgccgcaacacgtatttgtcggcgcggattggaacaaatttaaaatgaacagccacgacgtgtttgccgatttgaaacattacttcggcaacggcggctacggcaaagtcggtatgcgctattccgaccgcgatgccgactccaactatgcctttgccggcagcaagctgggcatgaaaaccccggcaggccgcccgggctgcaatacggctgacgacaaagcctgcgcggtgggtttgggtacagaaatcaaacaaaaagccctcgcgtttgacgccagctacagcaggcctttccgcttgggcaatacggccaacgaatttgtcatcggcgccgattacaaccgcttccgcagcaccaacgaacaaggccgtactactttatatgcacgcggcggcctggctttaaacgagttccgcagcataccgcaggttgatttgattgccaacgcgcgcaaaggcgtgcgcggttacagccataccgtcgctaccgaaaacctcgacgaattcggcatttacggcaaatccaccttccatcctgccgacgggctgtcgcttatcggcggcggacgtttgggacactataaaatcgagtcgggcgaaggcaaaaccctgcacaaagccagcaaaaccaagttcaccggctacgcaggcgcggtttacgacttgaacgacaacaacagcctctacctgagcctgtcccagctctacacaccgcaaaccaacctcgatgccgacggcaagctgctcaaaccgcgccaaggcaaccagtttgaagtcggttacaaaggcagctacatggacgaccgcctcaatgcccgagtttcgttctaccgcatgaaagacaaaaacgccgccgcaccgttgaacccgaacaacaaaaaaacccgttacgccgcattgggcaaacgcgtgatggaaggcgttgagaccgaaatcagcggcgcggttacaccgaaatggcaaatccatgcaggttacagctatctgcacagccaaatcaaaaccgcctccaattcacgcgacgacggcatcttcctgctgatgcccaaacacagcgcaaacctgtggacgacttaccaagttacgcccgagctgaccatcggcggcggagtgaacgcgatgagcggcattacttcatctgcagggatgcatgcaggcggttatgccacgttcgatgcgatggcggcataccgcttcacgcccaagctgaagctgcaaatcaacgccgacaacatcttcaaccgccattactacgcccgcgtcggcggcgcgaacacctttaacattcccggttcggagcgcagcctgacggcaaacctgcgttacagtttttaa

SEQ ID NO: 63146 - DNA, 1371 bp, Neisseria meningitidis
atgccgcaaaacactttaaacatcgtcatcctcgccgccggcaaaggcacgcgcatgtattccaaaatgcccaaggttttgcacgaaatcggcggcgaaacaatgctcgggcgcgttatcgacaccgccgccgcgctgaatccgcaaaacatctgcgtcgtcgtcggccacggcaaagagcaagttttagacaccgtcaaacgcgatgtcgtctgggttgaacaaaccgaacagctcggcaccggccacgccgtcaaaaccgccctgccccacctttccgccgaaggccgcacgctggtgttgtacggcgacgttcctttaattgacgttgaaaccctcgaaaccctgctcgaagccgcaggcaacgaagtcggcctgttgaccgacgttcccgccgacccgacaggcttgggccgcatcatccgcgacagcagcggcagcgtaaccgccatcgtcgaagaaaaagatgccgacgccgcccaaaaagccgtgaaagaaatcaacacaggcatcctcgtcctgcccaacgccaaactcgaagcctggttgaacagcctttccagcaacaatgcccaaggcgaatattatttaaccgacctcattgccaaagccgttgccgacggcatcaaaattcatcccgtccaagtccgctcctcccatctggccgccggcgtgaacaacaaactccagctcgccgaactcgaacgcatcttccaaactgaacaggcgcaagaattgctcaaagcaggcgtaaccctgcgcgacccggcacgtttcgatttacgaggccgtctgaaacacgggcaagatgtcgtaattgatgtgaactgtatctttgaaggcaaaatcgaactcggcgacaacgtcgaaatcggtgccaactgcgtcatcaaaaacgctaaaatcggcgcaaacagcaaaatcgcccccttctcccacctcgaaggctgcgaagtcggcgaaaacaaccaaatcggcccatacgctcgtttgcgtccgcaagccaaactggctgacgatgtccacgtcggcaacttcgtcgaaattaaaaacgccgccatcggcaaaggcaccaaagccaaccacctcacctacataggcgacgccgaagtcggcagcaaaaccaacttcggcgcaggtacgattattgccaactacgacggcgtgcacaaacacaaaaccgtcatcggcgacgaagttcgcatcggttcaaactgcgtcctagtcgcccccgttaccctcggcaacaaagtaaccacaggcgcaggcagcacgattacccgcaatgtcgaagacaacaaactcgccctcgcccgcgcccgccaaaccgtcatcgaaggctgggtgaggccggaaaaagacaaacaataa

SEQ ID NO: 63147 - DNA, 1266 bp, Neisseria meningitidis
atgttcagcttcttccgtcgcaagaaaaaacaggaaacgccggctcccgaggaggctcaagttcaggaaactgcagcaaaagcagaatccgaagttactcaaatagttgaaaatattaaagaagaagtcgaatctttaacggaaagcgtcaaagggcaggtcgaatcggctgttgaaaccgtcagcggtgcggttgaacaggtaaaggaagccgttgccgagatgctgtctgaagcagaggaagcggcggaaaaagcagcggaacaagtcgaagcggcaaaagaagccattgccgaaaccgtcggcgaggctgtcgggcaagttcaagaagccgttgcaacaactgaagaacacaagctcggttgggcggcgcgtttgaaacaaggtttgaccaaatcgcgcgacaaaatggcgaaatcgctggcgggcgtgttcggcggcggacaaatcgacgaagatttgtacgaagagctggaaaccgtgctgattaccagcgacatgggcatggaagccaccgaatacctgatgaaagacgtgcgcgaccgtgtcagcctcaaagggctgaaagacggcaacgaattgcgcggcgcgttgaaagaagccttgtacgacctgattaagcctctggagaaacctttggttttgcccgaaaccaaagagccgtttgtcatcatgcttgccggcatcaacggcgcgggcaaaaccacgtctatcggcaaactcgccaaatatttccaagcgcagggcaaatctgtgctgcttgccgccggcgatactttccgcgccgccgcccgtgagcagcttcaagcttggggcgaacgcaacaacgtaaccgtgatttcgcaaaccacgggcgattccgccgccgtgtgcttcgatgccgtccaagccgccaaagcgcgcggcatcgacatcgtgcttgccgacaccgccggccgcctgcccacgcagcttcatttgatggaagaaatcaaaaaagtgaaacgcgtgctgcaaaaagccatgcccgacgcgccgcacgaaatcatcgtcgtgcttgatgccaacatcgggcaaaacgccgtcaaccaagtcaaagcctttgacgacgcattagggctgaccggtttaatcgtgaccaaactcgacggcacggcaaaaggcggcatcctcgccgcgcttgcttccgaccgccccgtccccgtccgctacatcggcgtgggcgaaagcatagacgacctgcgcccgtttgacgcgcgcgcgtttgtggacgcactgctggattga

SEQ ID NO: 63148 - DNA, 1386 bp, Neisseria meningitidis
atgatggcaagagataaccgcatccaaatgtttccgcacgaatggcgcgccagtacgacgctttccggcgtgtacgcgctgcgtatgctgggtatgttcctcgtgctgcccgtattggcggtgtatgccgcctcgctgcccggcgcggaagacaacaaaacgctggtcgggctggcaatgggcatttacgggctgacacaggctctgctgcaactgcctttgggcatcgcttccgacaagttcgggcgcaagaaaaccatttatgtcgggctgattgtgtttgcagcgggcagtttccttgccgccgctgccgatacgctgcccatgctggtcgccgcacgcgccatacagggtgcgggagcggtcagtgcggcggttaccgcgctgctggcggatttgacgcgcgacggcgtacgtacccgcgcaatggcgatgatcggtttgagtatcggtctgacgttttcggtcagcctcgtcgttgcccctgtgattgccgacgcggtgggcgtacgcggcttgttcctgctgaccggtattttgaccgttgccagtatcggcgtggtggcgtggatgactcccgacccggaggtttccaagctgcacgaagatacgcaggcgcagccttcgcgcataggcgaagttttgaaaaaccgtaggctgctgacgctcgatttcggcattttcgccctgcacgccgcgcaaatggcattgtttaccgcgctgcctttcgcgatgacccagctcggtttggaaaaaatccagcactggaaagtctatctgccctcgaccattacgggattggtggtgatggttccgctgattatcgtcggtgagacgcgcaacaagctcaaacaggtttttatcttgggtatcgcctgtattgcggcggcgcagctcggtttgctgtccggtatgcgctcggtaggcttgattaccgcttatttggttgtttactttatcggttttaatgtgttggaagcgagcctgccgtctatggtttccaaaatcgcgccgtccgacctgaagggtacggcgatgggcgtgtacaacacgatgcagtcgctcggactgtttgccggcggcgcggcaggcggtttgctgtttcaaaaatacggcttttccggcgtgtttgccttttgcagtatattgatgctgctgtggctggtaattgccgttttatcgcccgcgcccaagcccgtcaaaaacctcagctatcctgtcggcggcgtgtggcaggtcaatcgggacggattgcaacgcgccctgttgcaactcgaaggcgtggaagacatcggtttcagtttcgacgggcagaccgtctatctcaaagtgttgcagaagggtttcgatcaggctgccgctgaaaaaatcattacaggagtttaa

SEQ ID NO: 63149 - DNA, 1857 bp, Neisseria meningitidis
atgttgaacaaaatattttcctggttcgagtcccgaatcgacccttatcccgaagccgccccgaaaacgccagaaaaaggcttgtggcggtttgtctggagcagcatggccggcgtgcggaaatggatagccgccctggctgcgctgaccgccggcatcggcattatggaagccctggtttttcaatttatgggcaaaatcgtggagtggctcggcaaatacgcgcccgccgaactgtttgccgaaaaaggttgggaactggcggcaatggcggcgatgatggtgttttcggtcgtgtgggcgtatgccgcgtccaacgtgcgcctgcaaacccttcagggcgtgttccctatgcgcctgcgctggaacttccaccgcctgatgctgaaccaaagcctcggtttttatcaggacgaatttgccggacgcgtgtccgccaaagtcatgcagaccgcgctggcgttgcgcgacgcggtgatgacggttgccgatatggtcgtttatgtgtcggtgtatttcattacctccggcgtgattctcgcctcgctcgactcatggctgctgctgccctttatcggctggattgtcggtttcgcttcggtgatgcgcctgctgattcccaaattggggcaaaccgccgcatggcaggcggatgcccgctcgctgatgaccggccgcattaccgatgcctattccaatatcgccaccgtcaaactcttctcccacggcgcgcgcgaagccgcctatgccaagcagtcgatggaagaatttatggttacggtgcgcgcccaaatgcggctggcgacgctgctgcattcgtgcagcttcatcgtcaacacctccctgaccctctccaccgccgcactgggcatctggctctggcacaacgggcaggtcggcgtgggcgcggtcgccaccgccaccgcgatggcgttgcgcgtcaacgggctgtcgcaatacattatgtgggaatccgcgcggctgtttgaaaacatcggcaccgtcggcgacggcatggcaaccctgtccaaaccgcacaccatcctcgacaagccgaacgccctgccgctgaaagtgtcgcaaggcgaaatcaaatttgaacacatcgatttctgctacgaagccggcaaaccgctgctcaacggcttcaacctcaccatccgcccgggcgaaaaagtcggcttgatcggacgcagcggcgcgggcaaatccaccatcgtcaacctgcttttgcgcttctacgaaccgcaaagcggcacggtttcgatcgacgggcaggacataagcggcgttacccaagaatctttacgcgcccaaatcggtttggtcacgcaagatacctcgctgctgcaccgttccgtgcgcgacaacattatttacggccgccccgacgcgaccgatgccgaaatggtttccgccgccgaacgcgccgaagccgccggcttcatccccgaactttccgatgccaaagggcggcgcggctatgacgcgcacgtcggcgaacgcggcgtgaaactctccggcgggcaacgccagcgcatcgccattgcccgcgtgatgctcaaagacgcgcccatcctgctgctcgacgaagccaccagcgcgctcgattccgaagtcgaagccgccatccaggaaagcctcgacaaaatgatggacggcaaaaccgtcatcgccatcgcccaccgcctctccaccatcgccgcaatggacaggctcgtcgtcctcgacaaaggccgcatcatcgaagaaggcacacacgccgaactcctcgaaaaacgcgggctttacgccaaactctgggcgcaccagagcggcggcttcctcaacgaacacgtcgagtggcagcacgactga

SEQ ID NO: 63150 - DNA, 966 bp, Neisseria meningitidis; identical to SEQ ID NO: 39688

SEQ ID NO: 63151 - DNA, 876 bp, Neisseria meningitidis
atgaacctctacgacctgctccttgccccctttgcagaatttgactttatgcgctacgccctcgtatccgtcttctgcctgtccctcagtgccgcacccgtcggcgtattcctcgtcatgcgccgtatgagcctgataggcgacgcattgagccacgccgtcttgcccggtgccgccgtcggctacatgtttgccggcttaagcctgcccgccatgggtttgggcggcgtagccgcaggtatgctgatggcactgcttgccggactcgtcagccgcttcaccaccctgaaagaagatgccaactttgccgccttttatctcagcagcctcgccatcggtgtagtcctcgtcagcaaaaacggcagcagcgtcgatctgctgcatctgcttttcggctctgtacttgccgtcgatattcctgccctgcagctcatcgccgccgtatccagcctcacgctcattacccttgccgtcatctaccgcccgctcgtactcgaaagcatcgaccccctgtttctcaaatctgtcggcggcaaaggcgggctttggcacgtcctctttctcgtcctggtcgtcatgaacctcgtatccggctttcaagccctcggcacactcatgtccgtcggactcatgatgctgccagccattaccgcccgcctgtgggcgaagcacatgggcgcactcatcctcctatccgttctgacagccctgctgtgcggcttgagcgggctgctcatttcctaccacatcgaaatcccttccggccccgccatcatcctctgttgcagcgtcctttatctcttttccgtcatactcggcaaagaaggcggcattctgaccaaatggctcaaaaaccaccgccaccacaccacctga

SEQ ID NO: 63152 - DNA, 402 bp, Neisseria meningitidis; identical to SEQ ID NO: 40533

SEQ ID NO: 63153 - DNA, 354 bp, Neisseria meningitidis; identical to SEQ ID NO: 42785

SEQ ID NO: 63154 - DNA, 747 bp, Neisseria meningitidis
atgagcacacaagatttaagcggcaaaatcgctttggtaaccggcgcatcgcgcggtatcggtgcagcaattgccgacacactggcggcagccggtgccaaagtcatcggtacggcgaccagtgagagcggtgcggcggcgattagcgagcggttggcgcaatggggcggcgaaggccgcgtattaaattccgccgaacccgaaaccgtcgaaaacctgattgccgacatcgaaaaaacgttcggcaaactcgatattctggtcaacaacgccggcatcacccgcgacaacctcctgatgcgcatgaaagaagaagagtgggacgacatcatgcaggtcaacctaaaatccgtcttccgcgcctccaaagccgtcttgcgcggcatgatgaagcagcgcgccggccgtatcatcaacatcacatccgtcgtcggcgtgatgggcaatgccggtcaaaccaactatgccgcggcaaaagcaggcttaatcggtttctccaaatccatggcgcgcgaagtcggcagccggggcattaccgtcaactgcgtcgcccccggctttatcgataccgacatgacccgcgccctgccggaagaaacccgccaaacctttaccgcccaaaccgccttgggcagattcggcgacgcgcaagacattgccgatgcagtcttgttcttggcttccgatcaggcaaaatacattaccggtcaaacgctgcacgtcaacggcggcatgctgatgccctga

SEQ ID NO: 63155 - DNA, 258 bp, Neisseria meningitidis; identical to SEQ ID NO: 36717

SEQ ID NO: 63156 - DNA, 480 bp, Neisseria meningitidis
atgccggaaagtattttcaaacagatttcccttgatattttgaaactgcatcgggactctgtttattcgctgcttgccacttccggctgcaactgtcaggtgcatgaagcggcgtatgtcaacatcgacggcaaatattatattgcgctttcatgcgagcccgaggtgggggaagtcaaaacaggcattttgctgattgaggatgaaagccgcaaccttcgtttgagctgggtcggcagtgcgcgggagcttgactgcaaggataatgcctacaaacgcgccctgtctgcgctgtctagaaagatggggcggtgtaaagacaagctgcatacggcggttcagccgtttttgttggagctggtgccggagaaaggcaggttttctgtcggcgatgaagaagtttggatttctcgaaacgatttggtgagggctttatatcctgtcggatacagtatgcggcaggcagtgttgcagatttaa

SEQ ID NO: 63157 - DNA, 483 bp, Neisseria meningitidis
atgaaatacttgaatcttgccgcaatcacccttgccgccacatttgccgcacataccgcctcggcagacgaactggccggatggaaagacaacaccccgcaaagcctgcaatcactcaaagcccccgtacgcatcgtcaacctttgggcaacctggtgcggtccgtgccgaaaagagatgcctgccatgtccaaatggtacaaagcgcagaaaaaaggcagcgtcgatatggtcggcatcgcgctcgacacatccgacaatatcggcaacttcctcaaacaaactcctgtttcctacccgatttggcgttacaccggggcgaacagccgaaactttatgaaaacctacggaaacactgtcggcgtactgccctttaccgtcgtcgaagcaccgaaatgcggatacaggcagaccattaccggggaagtgaacgaaaaaagcctgaccgaagccgtcaaactcgcccattcaaaatgccgttaa

SEQ ID NO: 63158 - DNA, 426 bp, Neisseria meningitidis
ttgtggctgctgcgcgccctgactgccaaactgccccaacagcgttatgcggctttgtttattacactgttttttgccgcagtattggtgttcgggcggcatgattcgatgtattggtatcccgtcctcgtcaatctgatgatgttggcggtgttcggcggcagcctgtttgccgggcagacggtgattgaaaaacttgcgcggctgcaacagcccgacctgcctgaaaaagctgtgcgctatacccgccgggtaacgcaggtttggtgcgtattctttattgccaacgggacgcttgccgctttgttggcacggttggggcgatatgattggtgggcggtttataccggcgtgattgcctatgtattgatggggatgccgtttgccggcgaatggctttaccgcaaactcgttttgaaagtctga

SEQ ID NO: 63159 - DNA, 504 bp, Neisseria meningitidis
atgtcagacaagttcaaccaattcatcaaccgcgtcctctctcacgagggtggttacgccaaccatcccaaagaccccggcggcgaaaccaattggggcatcactaagcgcaccgcacaggcaaacggctacaacggctccatgcgtgccatgacgcgtgaacaggcaatcagcatttaccgtaaagcgttttgggagcgttaccgcgccgaccaaatgccggaagcggtcgcgttccaattttttgatgcctgcgtcaaccacggttacggcaatgccgcccgtatgctccaacgcgccgcaggcgtaccggacgacggcgttatcggagcagtcagcctcaaagccatcaattcccttcccgaaaacgaccttttattgcggttcaacgccgagcgtctggtcttttataccaagctcggtacgttcacctctttcggcaagggctgggtacgccgtgtggcgcaaaacctgattcacgcgtctgcagataacactgattaa

SEQ ID NO: 63160 - DNA, 1065 bp, Neisseria meningitidis
atgttggtattaggaatcgagtcttcttgcgacgaaacaggtgttgcgctttacgatacggaacgtggattgcgggcgcactgcctgcacactcaaatggcaatgcacgccgaatacggcggggttgtgccggaattggcaagccgcgaccatatccgccgccttgttccgttgactgaaggctgtttggcgcaggcaggcgcatcgtatggcgacattgacgcggttgcctttacgcaggggcctggtttgggcggtgcgctgctggcgggttcgagctacgccaatgcactggctttggcattgggcaagcccgtcatccccgtccatcatttggaaggacatctgctgtcgccgctgttggcggaggaaaaacccgactttccttttgtcgcgctgttggtttcgggcgggcatacgcagattatggcggtcaggggcataggcgactacgcgcttttgggcgagagcgtcgatgatgcggcgggcgaggcattcgacaaaacggcgaaactgctgggcttgccgtatccgggcggtgcgaaactgtcggaacttgcggaatcgggcaggttcgaagcgtttgtttttccgcgcccgatgattcattccgacgatttgcagatgagtttttcaggtttgaaaaccgccgtattgaccgccgtcgagaaagtgcgcgcggaaaacggggcggatgacattcctgagcagacacgcaacgacatctgccgtgcgtttcaagatgcggtagtcgatgtgttggcggcgaaagtgaaaaaagccctgttgcagacagggttcagaaccgtagtggtcgccggcggggtcggtgcaaaccgcaagctccgtgaaactttcggcaacatgacggtgcaaatcccgacccccaaaggcaagccgaaacatccgtccgaaaaagtcagcgtgtttttcccgccgatggcatactgcacggacaacggtgccatgattgcctttgccggtgcgatgcacctgggcaagggcagggaggtcggtgcgttcaatgtccgtccgcgctggccgctgtcggaaatcgtcagatga

SEQ ID NO: 63161 - DNA, 729 bp, Neisseria meningitidis
atgtgggataatgccgaagcgatggaacggctgacgcgctggctgcttgtcatgatggcgatgctgcttgctgcgtccgggctggtttggttttacaattcgaatcatctgcccgtcaagcaggtgtcgctgaagggcaacctggtttattccgataagaagacattgggcagtttggcgaaagaatacatccatgggaatattttgaggacggacatcaatggcgcacaggaagcctaccgccggtatccgtggattgcgtcggtcatggtgcgccgccgttttcccgatacggttgaggtcgtcctgaccgagcgcaagccggtcgcgcgttggggtgaccatgccttggtggacggcgaaggcaatgtttttgaagcccgcttggacagacccggaatgccggtattcagaggcgcggaaggaacgtctgccgaaatgctccgccgttatgacgaattttcgactgttttggcaaaacagggtttgggcatcaaagagatgacctatacggcacgttcggcgtggattgtcgttttggacaacggcatcaccgtcaggctcggacgggaaaacgagatgaaacgcctccggctttttaccgaagcgtggcagcatctgttgcgtaaaaataaaaatcggttatcctatgtggatatgaggtataaggacggattttcagtccgctatgcttccgacggtttacccgaaaaagaatccgaagaatag

SEQ ID NO: 63162 - DNA, 516 bp, Neisseria meningitidis
atgatgatactgaaaaccgccccgctcaaacgccgctttgccgccatgctgtacgaaatgctgctggtcggtgcggcaacctgtttggcagcattgattgccggtattgccgccatttttctgaatcccgtttctatcgcggtttctgcatgggtaacaagtatcctgataatggaatcatggtggctttatttccgtgccaactggcacgggcagggacagaccttggcgatgaggacatggaggataggcttgtgcgatgttaacggtatgcagccgtctctacacttgctccgcctgcgctttatttgggcgtgcatattcatcgtcttcattcctatgcttgcttatgccggattgcgccacttcctcggcattccgcccaagggcgcggccggtgcggcattgatttggctgattttaccgtgggggttcgcactgctgaatcccgatcggcagtttctgtatgattttcttgcaggaacaagattggtggcggtcaaaggaaagccttaa

SEQ ID NO: 63163 - DNA, 396 bp, Neisseria meningitidis; identical to SEQ ID NO: 58361

SEQ ID NO: 63164 - DNA, 858 bp, Neisseria meningitidis
atgaattacgccctagacgcattatggtggaagctcaccagccaacccgtccgcgacctcgcctcgctgctgaccgcgccgcctttgtggcaaagcggttgcgaattgggcgtgcgcgaactactgggggaacgcggtttccgttaccttttgacattggatgccgatcccgcgccgctgacggaacacctcacccgacgcgccccgttcggacaccgcttgggcatttacgctgaagaactgctggcattttggtttgccaacgcgccacacgccgaactgctcgcgcacaacctcacggtttccggttcggacggcaatacgcaaggcgcggcggattttgtggcaaggcttaacggcaaaccctaccatatcgagctgacctgcaaatattacggcggcggcacgggcagacccgaagacatgagcggactcgaccccaaagacacgctgttgggaaaagccgccaaactgaccgcccaactcggtctgccgcacacttcagacggcatccgaaccttgcggcaacacggtctgccgcttgacgtaaaacccgtttccatcgtgcgcggcatcggattttttccacacggtttccatgcttttgagccaccgcttaatccatacggttggcgcgacgtctatattcaagattgggcggaatacgggtttaaacgccaagaagtccgctaccatctgctcgaccgtatggcctacctcgcgcctgcgcgtgtcgccgaaaccgaaacattgaacgcaaccgaaatccgccgtatcgaccaaggcttgattgccgttttggaatgtcggccggacggcttttggcacgaaatcgaacgcattatgaaggccgtctga

SEQ ID NO: 63165 - DNA, 387 bp, Neisseria meningitidis; identical to SEQ ID NO: 36745

SEQ ID NO: 63166 - DNA, 180 bp, Neisseria meningitidis
atgttttggtatgtgattggcttttgcgcctttgtcgtcgcgctgctgtcgctgtgggtcaatgccggcgcgttcggtatgcaggaagacgatactccgcaatcggattatgaaaggcgtttgggcttgggtgcgaagctgaaaaacaaaaatccggatacggacgaaaaacggcaataa

SEQ ID NO: 63167 - DNA, 1161 bp, Neisseria meningitidis
ttgagcaaaatgacctgcatcgaagacttgcgccgcgttgccaagcgcaaaatgccgcgtatgttttacgattacatcgattcgggttcgtggacggaaacgacttatcgggaaaatacttcggatttcaaagacatccgcttccgtcaaaaagtattggtcaatatggaaggccgaagccttgagactaaaatgatcgggcaggatgtgaaaatgccggtggcgattgcgccgacgggttttaccggcatggcacacgcagacggcgaaattttggcggcgcgggcggcggagaagttcggtattccgtttacgttgtccaccatgtccatctgctcgattgaagacgttgccgagaacaccagcgcgccgttttggtttcagctttatgtgatgcgcgaccgcgagtttatggaaaacctgattaagcgcgcgaaggatgccaaatgttcggcattggttttgaccgccgatttgcaggttttggggcaacgccacaaagacatcaaaaacggcctgtccgcgccgccgaaaccgaccatcgccaatttaatcaatctggcgaccaaaccggaatggtgcatgaaaatgctgaacacggaacgccgcacgttccgcaatatcgtcggacacgcgaagaacgtcggcgatttgtcttcgctgtcttcatggacttccgaacaattcgacccgcgcctgagctgggacgatgtggcgcgtattaaagatttgtggggcggcaagctgattatcaaaggcattatggaacccgaagacgcggaaaaagcagcgaaaagcggcgcggacgcattgattgtttccaaccacggcggccgacagctcgacgataccgtgtctgccatcaaagccttgcccgacatcgtcagcgcagtgggcagcgacatcgaagtttggatggacagcggtatccgcagcggtcaggatattttgaaggcgtgggctttgggcgcgaaaggtacgatgataggccgggcgtttctgtatggtttgggtgcgtatggtgaagaaggcgtaacccgtgcgctggaaatcctgtataaagaaatggatatatctatggcgtttacgggacaccgcgatattcaagatgtcgatgcttcgattttgagaggcaaagattggggcagggaaacggtttag

SEQ ID NO: 63168 - DNA, 1554 bp, Neisseria meningitidis
atgacacaggccaaccgcgttatcattttcgacaccaccctgcgcgacggcgaacaatcgcccggcgccgctatgaccaaagaggaaaaaatccgcgtcgcccgccagctggaaaaattgggtgtggacatcatcgaagcgggttttgccgctgccagcccgggcgatttcgaggcggtcaatgcgattgcgaaaaccattaccaaatcaacggtctgttcattgtcccgcgccatcgagcgggacatccgtcaggcgggtgaggccgttgcgcccgcgccgaaaaaacgcatccacaccttcatcgccaccagccccatccatatggagtacaaattgaagatgaagccgaagcaggtgattgaggcggcggtcaaagcggtgaaaatcgctcgtgaatacaccgacgatgtggaattttcctgcgaagacgcgttgcgttcggaaatcgattttcttgccgaaatctgcggcgcggtgattgaagcgggcgcgaccaccatcaatattcccgataccgtcggctattcaatcccgtacaaaaccgaagaatttttccgcgaactgattgccaaaacgcccaacggcggcaaagtcgtttggtcggcacactgccacaacgatttgggcttggcggttgccaattcgcttgccgcattaaaaggcggcgcgcgtcaggtggaatgtactgtcaacggcttgggcgaacgtgcaggcaatgcttcggttgaagaaatcgtgatggcgttgaaagtgcgccacgacttgttcggcttggaaaccggcatcgataccacgcaaatcgtgccttcgtccaaactggtgtccaccattacgggctatcccgtgcagcccaacaaagccattgtcggtgccaatgccttttcgcatgaatcgggcatccatcaggatggggtgctgaaacaccgcgaaacttacgagattatgtccgccgaatcggtcggctgggcaacaaaccgtttgagcttgggcaaattgtccggccgcaacgccttcaaaaccaagctggcggatttgggcatcgagttggaaagcgaagaggcactgaacgccgcgtttgcccgcttcaaagaactcgccgacaaaaaacgcgaaatcttcgatgaagacctgcacgcactggtatccgacgaaatgggcagcatgaatgccgagagctacaaattcatctcccaaaaaatcagcaccgaaaccggcgaagagccgcgcgccgacatcgtgttcagcatcaaaggcgaagaaaaacgcgcttccgccacaggctccggccccgtggatgcgattttcaaagcgattgaaagcgtggcgcaaagcggcgcggctttgcagatttattccgtcaacgccgtcacgcaaggtacggaaagccagggcgaaaccagcgtccgtctggcgcgcggcaaccgcgtcgtcaacggtcagggcgcggataccgacgttttggtcgctaccgccaaagcctacctttccgccttgagcaaactggaatttagtgccgccaaaccgaaagcgcaaggcagcggtacgatttga

SEQ ID NO: 63169 - DNA, 903 bp, Neisseria meningitidis
atggacagcctgatgacattgatttcggttttgataccgatgtttgccggattttttatccgtgtgcccaagccttacctgcccgctttggataaggtgctatcggttttggtgtatgccgtgctgctgctgatcggcgtatcgttgtcgcgcgtggaggatttgggttcgcggttggacgatatggcgttgacggttctgtggctgtttgtttgtacggtcgggacgaacctgcttgcttttgcagtgttgggaaagttattcccgtggcggataaaggggaaagggaagggcgtttcggtcggtgtgtcgggcagtgtggggcagctcggatgcgtgctgctcggatttgcatccggcaaactgatgcgcgatatttggatgccgtctgaaagcgcgggcatgtattgtctgatgctgctggtgttcctcatcggcgtacagctcaaaagcagcggcctatcgttgcggcaggttttggtcaaccgcaggggtattcggttgtcggtctggtttatgctttcatctctttcgggcgggctgctgtttgccgcatcggcagacggtgtgtcgtggacgaaaggtttggcgatggcttccggcttcggttggtattccctctcgggtttggtcatgaccgaggcttacggcgcggtatggggcagcatcatgctgctgaacgatttggcacgagagctgtttgcactggcatttatcccgctgctgatgaagcgttttccggatgcggcggtgggggttggcggtgcgaccagtatggattttacattgcccgtgattcagggtgcgggcggtttggaagtcgtgccggtagcggtcagcttcggcgtggtggtcaatattgccgccccgtttctgatggtggtgttttccacgctgggctga

SEQ ID NO: 63170 - DNA, 966 bp, Neisseria meningitidis
atgaaccttaataaactgaaaaacaaactgttccgccgtccggggcagcgtgcggtgattgccgtaccgtatatttggcttttggtgctgtttctgattccgttcgccatcgtgctgaaaatcagctttgccgaacaagaaatcgccattccgccgtttacgccgctgaccagcatcgacgaagatttaggtcgtctgaatatcgccatcagttatcaaaactatgccgatattttccaaaatttttggcatacccttaacccgttcggcgacagtgaaaacagcaatatctatctgatgacctactggtcttcaatcaaaaccgcattgatgacgacagtgatttgcctgttggtcggttatccgaccgcctatgcgatttctcgtgccaatccttctgtccgcaatggtttgctgcttgccattatgctgcccttttggacatcgttcctgttgcgcgtctatgcgtggatgggtctgctcgggcataacggtattgtaaacaacctgttgattaaaatgggtattatcagcgagcctttggatttgttctacaatgccttttcgctcaatttggtgatggtttacgcctatctgccgtttatgattctgccgctatacacgcaactggtgaaactcgacaaccgcctgcttgaagcggcttccgatttgggcgcgggaccggtcaaatcgttcttgacgattaccctgcctttgtcgaaaaccggcattattgcaggctccatgctggttttcgtccctgctgtcggcgagttcgtcattcccgagctggtcggcggttcggaaaacctgatgattggtaaagtcttgtggcaggcgttcttcgatcaaaacaactggccgctggcttccgccgtcgccgtcgtgatggtcgcgctgctggtcgtgccgattgccctgtttcagcattatgaaaaccgcgaattggaagaaggagccaaataa

SEQ ID NO: 63171 - DNA, 834 bp, Neisseria meningitidis
atgccgcaagccctcgtcctccaatttccctccgccgaagccctgccttccgacttcccctcccgcctgcccgaacctgattgcgctgatgaaaagcgtatgcgttttatcattgaagaagggttttctttaagcgaaaaagacgcggcgttacttggcagccgtcaaatcgaccacgccgtgttgtcggatatggattttggcgaactcggtttgattgtcagcgatatggattcgacgctgattaccatcgaatgcgtcgatgaaattgcggcaggcgtgggtttaaaagacaaggtagcggaaattaccgagcgttcgatgcgcggagagttggatttcgagcagtcgttgcgcagccgcgttgcgctgttggcgggattggacgaacagattttggcggacgtttatgaaaacgttttgaagctctcgcccggtgcggaatttttgttggacgaatgcaaaaggcacgatgtgaaattcctgctggtgtcgggcggcttcacgttttttaccgaaaggctgcaacaacgcctcggcttcgaataccagcacgccaatgttttggaaattgaaaacggcaggctgaccggacgtttgaaaggtagaatcatcgacgcgcaggcaaaggcggatttattgcgcgaataccgcagccgcctcggattgcagccgcatcaggtgttggcggtgggcgacggtgcgaacgatattccgatgctcaaagaaacgggcataggcgtggcttaccgtgccaaaccgaaagtgcgggcagccgccgatgtctgtatcaacttcggcggtttggagcgtgtacgcggcctgttcaggtag

SEQ ID NO: 63172 - DNA, 624 bp, Neisseria meningitidis
atgatgaaaccgcacaacctgttccaatttctcgccgtttgctccctgaccgtcgccgtcgcttccgcacaggcgggcgcggtagacgcgctcaagcaattcaacaacgatgccgacggtatcagcggcagcttcacccaaaccgtccaaagcaaaaagaaaacccaaaccgcgcacggcacgttcaaaatcctgcgcccgggcctcttcaaatgggaatacacttcgccctacaaacagactattgtcggcgacggtcaaaccgtttggctctacgatgtcgatttggcacaagtgaccaagtcgtcccaagaccaggccataggcggcagccccgccgccatcctgtcgaacaaaaccgccctcgaaagcagctacacgctgaaagaggacggttcgtccaacggcatcgattatgtgctggcaacgcccaaacgcaacaacgccggctaccaatacatccgcatcggcttcaaaggcggcaaccttgccgccatgcagcttaaagacagcttcggcaaccaaacctccatcagtttcggcggtttgaataccaatccccaactctcgcgcggcgcgttcaagtttaccccgcccaaaggcgtggacgtgttgagcaactga

SEQ ID NO: 63173 - DNA, 246 bp, Neisseria meningitidis
ttgtactgtctgcggcttcgtcgccttgtcctgatttttgttaatccactatatctgcatcagtttcatgaaacgcaagtcggaagcgtcaaacaactgattgcccattttgaccggctgattgacgaattggacaaacaaatcgacgaccacacccacacgcattttgacggcaaagcccaagtggcggagcaaatcaaaggcatcggttcgataacgacggctacgctcggggcgcggggctaa

SEQ ID NO: 63174 - DNA, 2829 bp, Neisseria meningitidis
atgatggacgaaaaactcaatttctcttacctgttcggttcgaacgcaccctacattgaggaattgtacgaggcttttttggaaaaccccgatgcggttgatgaaaaatggaagcagtatttcaccgatttgagcaaacagccggggacggttgctgtcgatgtcgcacacacaccgattcgcgaatcatttgttactttggcgaaaaagaaaattgcatctgccgttgtgggcggtgcggatgaggcaatgctgaaaaagcaagtcagcgttttacggctgatttccgcctatcgtatccaaggcgtgggtgcagcccaacttgatccgctcaaacgtatccccccgcgcgatattgaagccctcgatccgaaattccacggtctgtcagatgccgatatggcgcttcaattcaatatgggcgagggcgattttgccaatcgcggcaaactgcctttgtcccaaatcatcagcaacctcaaacaaacctactgcggccacatcgcattggaatatatctatattcccaataccgaagagcgccgctgggtacgcaattattttgaaagcgtattgtccacaccgcattacaatgccgatcaaaaacgccgtatcttgaaagagatgactgctgccgaaactttggaacgttatctgcataccaaatatgtcggtcagaaacgtttcggtgtcgaaggcggcgaaagcgcgattgccggtttgaactacctgattcaaaacgccggtaaagacggcgtggaagaagtcatcatcggtatggcgcaccgtggtcgtctgaatgttttggttaacattttgggtaaaaaacccggagatttgttcgctgagtttgaaggccgtgccgaaatcaaattgcctagcggcgacgtgaaataccacatgggcttcagctccgacatcgccactccacatggtccgatgcacgtttctttggcatttaacccgtcacacttggaaattgttaacccggtagtggaaggttctacacgcgccaaacaaaaacgtttgggcgaaaacggccgtgataaagtcttgccggtattgattcacggtgactccgcatttatcggtttgggtgttaaccaagcaacattcaacctgtctaaaacccgtggttataccaccggcggtacggttcacatcgtgatcaacaaccaaatcggctttaccacttccgatatccgcgatacccgttcaaccgtacactgtaccgatatcgcgaaaatggtttctgctccggttatccacgtgaacggcgatgatcctgagcgcgtttgctttgccatccaagccgctttggattaccgcaaaaaattccataaagacatcgtgatcgacgttgtctgctaccgtaaatggggccacaacgagggcgatgatccgaccttgacccaaccgatgatgtacaaaaaagtatcgcaacacccgggtgcgcgtgctttgtacaccgagcaactgattgccgaaggcgtggtaacccaagccgaggcagacggttacatccaagcctaccgtgatgctttggacaaaggcgagcacgtcgagcaaacaacgttgagcaacttccaacgcacgcaaatcgactggagcaaataccaaggcaaagattggcgcgaacacatcgaaaccggtttgcctgccgcagatattgaacgtctcactgagaagtttaccgccgtaccggaaggctttgccctgcatccgactgcaaaacgtgtgattgaagcgcgtaaagccatggcatccggcaaacaggccatagattggggtatggccgaaaccttggcatacgccagcctcgtaaccaaaggtcacggcgtgcgtatttccggtgaggactcgggacgcggtacgttctcgcaccgccacgccgtattgcacgatcaaaaacgcgaaaaatgggacgacggtacttatgttcccctgcgccatatgggcgaaggaatgggcgagttcctggttatcgactccatcttgaacgaagaggccgtgatggcgttcgagtacggctttgcctgctccgctcctgacaagctcaccatttgggaagctcaattcggtgacttcgccaacggcgcgcaagtgactattgaccaattcctgtcttcaggcgaaaccaaatggggtcgcttgtgcggtctgactaccatcctgccgcacggttacgacggtcaaggccctgagcactcttctgcacgcgtagaacgctggttgcaactgtgttctgagaacaatatgcaagtcatcatgccatctgaagcgtcgcaaatgttccacctcttgcaacgtcaagtcttaggttcataccgcaaaccgctggtgattttcatgtccaaacgcctgttgcgattcaaaggggcaatgagcccgctggaaaacttcaccgaaggttcgactttccgtccggttatcggcgataccgccgaacgcgcaagcaacgacagcgtgaaacgcgtggtattgtgtgccggtcaggtttactatgacttggaagccggtcgagccgaacgtaaactggaagatgatgttgcgattgtccgcgttgagcagctgtatccgttcccatacgatgaggttaaagccgaactggcgaaatatccgaacgcaaaatctgtggtttgggcgcaagaagagccgaaaaaccaaggcgcgttctaccaaatccgccaccgcatcgaagacgttatcagcgaagagcaaaaactgtcttatgctggtcgtccaagcagcgcatcgcctgcagtgggctactcaagcaaacacattgctcaattgaaacaattggttgaagacgctttggcgttgtaa

SEQ ID NO: 63175 - DNA, 267 bp, Neisseria meningitidis
ttgggtagaattaggcggtatttggggcgaaaacagccgaaaacctgtgtttgggtttcggctgtcgggagggacaggaattttgcaaaggtctctatctttctttcaacaagtagccacagcaatcagacaaaagcagtccaccgccacacccatgtcggcagtacggccggacaaaccaccatccgaagcggcggggataccaccctcaaaggtgcgcagcttatcggcataggcatacaggcagacccccaactacaaccctga

SEQ ID NO: 63176 - DNA, 1647 bp, Neisseria meningitidis
atgtctgaagaaaaattgaaaatgagtttcgagccaaccgtaatcgaacatttgggtgtaaagatgtattcgcacactgttcctgcgattgccgagttgatagcgaatgcctacgatgcatgtgctacggaagtggaagttaggttattcgataaaccggagcataaaatcgttatcaaagataatggtataggaatgagcttcgatgaaatcaatgatttttatttgagaatcggtcggaacagaagggaagaaaaacaagcttccccgtgcggaagaattccaacgggtaaaaaaggccttggtaaattggcattattcgggcttggcaacaaaattgaaatttctactatccagggaaacgaaagggttacttttactttggattatgcagagattcgaagaagcaagggtatttatcaaccggagtttcgaaaagaatctgttgaatccaatatcgaaagcgggacaaccataactttaaccgaactgacgaaaaagcaaggatatccgttagataattatgtagagcatctttcccgcttgtttgattttccggctcaggattttaaaatcaaagtaagcttgaacggctctgaacctaaaatcattgatggaaatctaaaatatgatcttgttaccccacaattcgaatgggaataccaggatttagcaaccaatatttcatcgttatcttcaaaattcgaacagtatgaatacagcggattaatacaaggtaagttcattacaacggaaaaacctttaaagaataatatgaaaggtattaccttgtttgccaacggcagaatggtaaatatgcccgagtttttcactgatagcgaatccagccatttctattcatatttgactggatggctgaatgtggactttatagataatgacgatgaagatttaattgctaccgacaggacatcattagactggaagcattcaaaaacctcaaaattacgtgttttccttggggagatcgtccgagccatcgggcaagattggagaaaaagaagaaaaaaagagaaagatgacgaagtgaaaggcgaaagcggagttgatatcgaagattggaaaaacaaattgccagaaaaggaaagggaaccagtagaagttattttgaatcgtttggaagattcggagcttacaaataaagagcaagcggaagtaatctctgccttacatagtattattccagaatatccttactatcattggcggcatttgcatcaggatttgcatactgcctgtaatgatttttacaatgaaaagaaggattatttaagtgctgcaatcgaggcagttaaagttttcgaagataaggttcagaagcaaacaggtcttcatagcatagacggaagagaattgattgaacaagctttcgggagtaaaaattctatacttctattaacgaataacaaaacgaaggcggaacaaaatttagaagatggtcttgaacagcttgcatgcggaacatggactggatttagaaatcctgtacaacatgagttaagagcaaatttatctcctagtatttttaatgataaggatgctttggatttaataagcttggtttcgtatttgttaagaaaagtggaacagacaaaaaaacgatcgaaggtggtatcttccaagtaa

SEQ ID NO: 63177 - DNA, 855 bp, Neisseria meningitidis; identical to SEQ ID NO: 42064

SEQ ID NO: 63178 - DNA, 2727 bp, Neisseria meningitidis
atggggcaaaacctgaccgcccccgacggcgcgccgacgggtgcgctgtatggcgtattgaatatgttgcgccgtttgcggtcggaatatccgcacgattattgcgcggtggtttttgatgcgaaaggcaaaaatttccgccatcaaatgtttgaagaatacaaggcgacgcgcccgccgatgcccgacgatttgcgcccgcaggcggaagcactgccggatttagtgcgcctgacaggctggccggtattggtgattgggcaggtggaggcggacgatgtgatcggcacgctggcgaaacagggggcggaacatggtttgcgagtcattgtttcgaccggcgataaggacatggcgcagttggtggatgagcgcgttacgctggtgaacacgatgagcggagaaacgctggatattgaaggcgtgaaggcaaaattcggcgtgcgccccgaccaaatccgcgattatctcgcgctgatgggcgacaaggtggacaacgtgccgggcgtggaaaaatgtggcccgaaaacggcagtgaagtggctggaagcctacggctcgttgcaaggcgtgatggaacacgcttcggaaatcaagggcaaagtgggcgagaatctgcgtgccgccctgccgcgcctgccgctgtcgtatgatttggtaacgattaaaaccgatgtggacttgcacgccgagctttcagacggcatcgaaagcctgcgccgtaccgcgccgaaatgggcgcaactggttgtcgatttcaaacgctggggcttccgcacctggctgaaagaagcggaatcaaacatgaataccggctcgaccgatgatgtgttcggcagcgacagcatcggtgagcaggcggctttgaatgcggaaatgccgtctgaaaaacaagctgaaaaagccaccgcccccgaaaggctggattatcaagccgttaccaccgaagcgcagtttgccgctttgttggacaaactgtcgcgggcgaacacaatcggcatcgatacggaaaccacgtcattagacgcgatgaacgcctcgctggtcggcatcagcatcgctttccaagcaggcgaagcggtttacatccccgtaggacacagcctgaccgcagcgcctgaacagcttgatttacaagacgtattaggccgtctgaaaccgcatttgggaaaccccgccctaaaaaaaatcgggcaaaacctcaaatacgaccaacacgttttcgccaactacggcatcgccctgaacggcattgccggcgacgccatgctcgcttcctacatcatcgagagccatctcggacacggcttggacgaattgtccgaacgctggctcggcttggaaaccattacctacgaatcgctgtgcggcaaaggcgcgaagcaaatcggttttgccgatgtcgccatcgggcaggcgaccgaatacgccgcccaagacgccgatttcgccctgcgcctcgaagcgcacctgcgcgcgcaaatggacgaaaaacagcttgaaatgtatgaaaaaatggagctgcccgtcgcgcaggtattgtttgaaatggaacgcaacggcgtgcaaatcgaccgcgccgaactcgcccgccaaagcgcggaactcggcgccgagctgatgaagctcgaacaacaagcctatgccgccgcagaccagccgttcaacctcaattcgcccaaacagctgcaagaaatcctgttcgacaaaatgggcatccccaccaaaggcctgaaaaaaaccgccaaaggcggcatttccaccaacgaagccgtgctcgaacagctcgcgcccgactaccccctgcctaaaatcatcctgcaaaaccgcagcctggcgaagctcaaatccacctacaccgacaaactacccgaaatgatttcccccaaggacggccgcgtgcataccacctacgcccaagccgtcgccattaccggccgcctcgccagcaacaaccccaacctgcaaaacatccccatccgcaccgccgaaggccgccgcgtgcgccgcgcctttaccgcaccgcaaggcagcgtcatcgtttccgccgactattcccaaatcgagctgcgcattatggcgcacctctccggcgacaaaaccctgattgccgcgttccaaaacggcgaagacgtacaccgccgcaccgccgccgaagtgttcggcactgcgcccgaaaacgtctcgtccgagcaacgccgctacgccaaaaccatcaacttcggcttaatttacggtatggggcaatacggtttggcaaaatcattgggcatcgacaacctttccgccaaaaactttatcgaccgctacttcgcccgctaccccggcgtcgccgaatacatgcagcgcaccaaagaacaagccgccgcccaaggctacgtcgaaaccctgttcggcagaaggctctatttgcccgacatccgcaacaaaaacgccaacgcccgcgcaggagccgagcgcgccgccatcaatgcccccatgcaaggcaccgcgtccgacctcatcaaacgcgccatgatagacgtgcgaaactgtctttcagacggcatcggcagcaaactggtcatgcaggtgcatgacgaactggtgctggaagtcgttgaaaccgaactggattttgtcaaagaaaaactgccgcagattatggcgaaagtggacggcggattattggatgtaccgctggtggctgaggttggcgtaggggagaattgggaagaggcacattga

SEQ ID NO: 63179 - DNA, 837 bp, Neisseria meningitidis
atggataaagaacgaattttaacccccgcagtcgtgttttccgtcgcactgctgcatttggcaatggtggcattgctctggcaggcgcacaagctgcccgtgatagagtcaggaaatgttatcgaatttgtcgatttgggtgattttggcggaggggacggtgcacccgaaggcgcaggtgcgcctgctgcgcctgagccgcaacctgagcctgagccgcccaaacctgtcgagccgcccaagccggttttgaagccggtggttacgaaaaaggcggatgcggatattcagcagcctaaggaagagccgaaacctgaagaaaagccgaaacccgaagaaaaaccgaaaccagagcctaagccggaagcgaagcctgtcccgaaaccggcggaaaaaccggtcgagaagccgtctgaaaaacctgccgaacatcccggcaatgcttctgccaaagcagacagcgagcagggtaatggggaagaaaccggtaccaaaggagacggaacggggcgcggagaaggcagcggtaaaggtagcggcggtgtcaaaggcgaacacggggaaggagccggcagcagcaaaggcaatcctttacgcgccaacggcagcattccgcgcccggcttatcccacgctttctatggagaatgacgagcagggtacggttgttttgagcgttttggtttctccgggcggtcatgtcgagtccgttaaaatcgtgaaaagcagtggtttttctcggttggacaatgcggcacgcaaggcggcgcaaaacgggcattttcaagccaatgcctggacggagtttaaagtccccgtcaagtttgaattgaattag

SEQ ID NO: 63180 - DNA, 1197 bp, Neisseria meningitidis
atgcaaaactatctgacccccaatttcgcctttgccccgatgattcccgaacgcgcttcaggcagccgcgtttgggatacggaagggcgtgaatatattgatttttcaggcggtatcgccgtcaatgcgctgggacactgccaccctgcccttgccgatgctttaaacgcgcagatgcacaagctgtggcacatttccaatatctatacgacgcgtccggcgcaggaattggcgcaaaaattggttgcaaacagttttgccgacaaggtttttttctgcaactcgggcgcggaagcgaatgaggcggcgttgaagctggcgaggaaatacgcccgcgaccgtttcggcggaggaaaaagcgaaatcgtcgcctgtatcaacagttttcacggacgcacgctgtttaccgtgtccgtcggcggtcagccgaaatacagcaaggattatgcacccctgccgcaaggcattacgcacgttccgttcaacgatattgccgcgctggaagctgccgtcggcgaacagacctgcgcggtcatcatcgagccgatacagggcgaaagcggcatcctgcccgccactgcggaatatttgcaaaccgcgcgccgtctgtgcgaccagcacaatgcgttgttgattttggacgaagttcaaaccgggatggggcatacgggcaggctgtttgcctatgaacattacggcgttgttcccgatattttgagttcggcaaaagccttgggctgcggctttccgatcggcgcgatgctggcgacagaaacgattgccgccgccttccaaccgggcacgcatggctcgactttcggcggcaacccgatggcgtgcgcggtcggcagccgcgccttcgacatcatcaacgcgccggaaaccttgcacaacgtccgcagccaggggcagaaacttcagacggcattgctggatttgggcaggaaaacaggcttgttctcacaggttcgcggaatgggactgctactcggctgcgtgttggacgaagcctatcgcggacgcgcatccgaaattaccgccgccgccttgaaacacggcgtgatgattttggttgcaggtgcggacgtattgcgtttcgcgccttcgctgctgttgaacgatgaggatacggcggaaggtttgcgacgtttggaacacgcgctgacggaatttgccgcgacatcagacaatccgtaa

SEQ ID NO: 63181 - DNA, 1344 bp, Neisseria meningitidis
atgaaccaaaaccatactattttacaaaacctccccatcggtcaaaaagtcggcatcgccttctccggcggtcttgatacctctgccgcgctgttgtggatgaaactcaaaggcgcgctgccttatgcctacactgccaacctcggtcagcccgacgaagacgattacaacgccattcctaaaaaagcgatggaatacggcgcggaaaacgcccgcttaatcgactgccgcgcgcagttggcacatgaaggcatcgccgccatccaatgcggcgcgttccacgtttccaccggcggcatcgcctatttcaacaccacgcctctgggccgcgccgtaaccggcacgatgcttgtttccgcaatgaaagaagacgatgtgaatatctggggcgacggcagcacctacaaaggcaacgacatcgagcgtttctaccgctacggcctgttgaccaatccagcgctgaaaatctacaaaccttggctcgatcagcaatttatcgacgaactcggcggccgccacgaaatgagcgaatttctgattgccaacggcttcaactacaaaatgtcggttgaaaaagcctactccaccgattccaatatgttgggtgccacccacgaagccaaagacttggaatttttgaactcgggcatcaaaatcgtcaaacccattatgggcgttgccttttgggacgaaaacgtcgaagtcagccccgaagaagtcagcgtgcgctttgaagaaggcgtgccggttgcactgaacggcaaagaatacgccgatcccgtcgaactcttcctcgaagccaaccgcatcggcggccgccacggcttaggcatgagcgaccaaatcgaaaaccgcatcatcgaagccaaatcgcgcggcatctacgaagccccgggaatggcgttgttccacatcgcctacgaacgcttggtgaccggcatccacaacgaagacaccatcgaacaataccgcatcaacggcctgcgcctcggccgtttgctctaccaaggccgctggttcgacagccaagccttgatgttgcgcgaaaccgcccaacgctgggtcgccaaagccgttaccggcgaagtcaccctcgaactgcggcgcggcaacgactactcgattctgaacaccgaatcgcccaacctgacctaccaacccgaacgcctgagtatggaaaaagtcgaaggtgcggcgtttaccccgctagaccgcatcggacagctcacgatgcgcaacctcgacatcaccgacacccgcgtcaaactgggtatctactcgcaaagcggtttgctctcgctgggcgaaggttcggtattgccgcagttgggcaataagcaataa

SEQ ID NO: 63182 - DNA, 300 bp, Neisseria meningitidis
atgaaaatatttgaaaatatagaagatgttaaagccatccgtaaaaagaccgggctgaaccagatagacttctggggcaaggtcggcgttacccagtccggaggctcgcgctacgaaaccggccgcaaaatgcccaaacccgtacgcgaactactccgcctcgtccatatcgaatgcatcgatttggcgaaagtcaacaaaaaagatatggaaatcgccgccctgttgaaaaaacaccatcccgacctgtatgccgagttgtccaaacagaccaagtccgaaagaaaaaaacaaagttaa

SEQ ID NO: 63183 - DNA, 1044 bp, Neisseria meningitidis
atgcaagtaaatattcagattccctatatactgcccagatgcgtgcgtgctgaagacaccccctacgcttgctatttgaaacagctccaagtcaccaaagacgtcaactggaaccaagtacagctcgcttacgacaaatgggactataaacaggaaggcctaaccggagccggagccgcaattatcgcactggccgttaccgtggtcacctcaggcgcaggaaccggagccgtattgggattaaacggtgcggccgccgccgcaaccgatgcagcattcgcctctttggccagccaggcttccgtatcgttcatcaacaacaaaggcgatgtcggcaaaaccctgaaagagctgggcagaagcagcacggtgaaaaatctggtggttgccgccgctaccgcaggcgtagccgacaaaatcggcgcttcggcactgaacaatgtcagcgataagcagtggatcaacaacctgaccgtcaacctagccaatgcgggcagtgccgcactgattaataccgctgtcaacggcggcagcctgaaagacaatctggaagcgaatatccttgcggctttggtgaatactgcgcatggagaggcagcaagtaaaatcaaacaattggatcagcactacatagtccacaagattgcccatgccatagcgggctgtgcggcagcggcggcgaataagggcaagtgtcaagacggtgcgataggagcggcggtcggtgaaatcctcggcgaagccctactggacggcagagaccctggcagcctgaatgtgaaggacagggcaaaaatcattgctaaggcgaagctggcagcagggacggttgcggcgttgagcaagggggatgtgaatgctgcggcgaatgcggctgctgtggcggtagagagtaatgcgcttagcaaggaaagaatggataaattgacaaaatgcctttccggtaaaacttgttctactacgatggaaaaagtaaatgccatcaaaaaggatgaacaatttagcaaagtaattgatacggaaattcaaaaaagtctgttctag

SEQ ID NO: 63184 - DNA, 957 bp, Neisseria meningitidis; identical to SEQ ID NO: 55620

SEQ ID NO: 63185 - DNA, 717 bp, Neisseria meningitidis; identical to SEQ ID NO: 54603

SEQ ID NO: 63186 - DNA, 852 bp, Neisseria meningitidis
atgaacacgttgaaatttaccaaaatgcacggtttgggcaacgattttatggtgattgatgcggtcagtcaggattttacccccgaggacgcgccgattgcggcatgggcggaccgtttccggggcgtgggcttcgaccagcttttggtggtcgggcgttcggaaaccgaaggcgtggatttccgttaccgtattttcaatgccgacggcagcgaggtcgggcaatgcggcaacggagcgcgttgttttgcccgttttgttgcagacaagggtttgaccgataagaaagaaatttgtgttgaaacggcaaatggcgttatttttccgaaattgtccgataacggtatggttacggtcaatatgggcaaaccgaagtttatgccgtctgaaataccgtttgtccccgaatcgggcgagggggatgatgcctgtatttacggggtgcatctcgaatccggcattcagcctgtcagctgcgtcaatatgggcaacccccatgcggtgattgtggtcgatgacgtggaatgcgcgccggtgcgcgaaaccggttcgcttatcgaaccgcacaggcagtttcccgaacgcgtcaacgtcggctttatgcagattgtcagccgaaccgcgattcgtttgcgcgtgttcgagcgcggcgtgggcgaaacccaagcgtgcggtacgggcgcgtgtgcggctgtggtggcgggtatccgtctggggttgttggatgaagggaaaacggtagaggtgattttgccgggcggaactttatatatcgaatgggcctgcggcggcgatgtgatgatgaccggccctgcggaaacggtgtttgaaggcgagttggcgtattcatga

SEQ ID NO: 63187 - DNA, 1011 bp, Neisseria meningitidis
atgaacgacaatacacacacccttcccccgcgccgcctttccgtcgccccgatgctcgactggacggacaggcactaccgttatatggcgcgccagattacccgcaatacttggctgtacagcgaaatggtcaacgccggcgcgattgtttacggcgacaaagaccgctttttgatgttcaacgaaggcgagcagcccgtcgccctgcaactgggcggcagcgacccgtccgatttggcgaaagccgccaaagccgccgaagaatacggttacaacgaggtcaacctcaactgcggctgccccagtccgcgcgtgcagaaaggttcgttcggcgcgtgcctgatgaacgaagtcgggctggttgccgactgccttaacgccatgcaggacgcggtcggcatcaccgttaccgtcaaacatcgcatcggtgtggacaggcagaccgaataccaaaccgttgccgatttcgtcggcacgctgcgcgacaaaaccgcctgcaaaacctttatcgtccacgcccgcaacgcttggctggacggtctttcccccaaagaaaaccgcgatgttccgcccttgaaatacgattacgtttaccgcctcaagcaagagtttcccgagctggaaatcatcattaacggcggcatcaccaccaacgaagcaatcgccggacacctgcaacacgttgacggcgtaatggtcggacgcgaggcgtaccacaacccgatggtgatgcgcgaatgggacagactgttttacggcgacaaccacgccccgatcgaatacgccgatttggtgcagcgtctctacacatacagccaagcccaaatccaagccggacgcggcacaatcttgcgccacatcgtccgccacagcctcgggctgatgcacggcttgaaaggcgcgcggacttggcggcgtatgctttccaacgcgacactcttgaaagacaacgacggcggcctgattctcgaagcgtgggaagaagtcgaacgggcaaatacgcgcgaatag

SEQ ID NO: 63188 - DNA, 933 bp, Neisseria meningitidis; identical to SEQ ID NO: 55401

SEQ ID NO: 63189 - DNA, 408 bp, Neisseria meningitidis
atgactgtatggtttgttgctgctgttgccgtcttaatcatcgaattattgacgggaacggtttatcttctggttgtcagtgcagctttggcgggttcgggcattatctacggactgaccggcagcacgcctgccgccgtcttgaccgctgctctgctttccgcgctgggtatttggttcgtacacgccaaaaccgccgtgggaaaagttgaaacggattcatatcaggatttggatgccggacaatatgtcgaaatcctccgacacacaggcggcaaccgttacgaagttttttatcgcggtacgcactggcaggcgcaaaatacggggcaagaagagcttgaaccaggaacgcgcgccctaatcgtccgcaaggaaggcaaccttcttatcatcgcaaaaccttaa

SEQ ID NO: 63190 - DNA, 1080 bp, Neisseria meningitidis
atgaaaacactgaccgtacacaccccgtcccacagctaccccatctttatcggcaacgggctgctgccgcaggcaggcagcctgctcaaaccgcatttgggcaaacgcgccgccatcatcaccaacgaaaccgtcgccccgctttatctccacacgcttcagacggcattggacgcggcaggcgtgtcccatttcagcatcatcctgcccgacggcgaggcgtacaaaaactggcagacgctcaacctcatctttgacggtctgatgcaacaccgcgccgaacgcaaaaccacattaatcgcgctgggcggcggcgttatcggcgacatggtcggctttgccgctgccacctaccagcgtggggctccgttcatccaaataccgaccacactgttgagtcaggtcgattcctccgtcggcggcaaaaccgccatcaaccacccgctcggcaaaaatatgatcggcgcgttctaccagccgcaggcggtgcttgccgacttggacacgctgcacaccctgcccgcccgcgaactgtccgccggtatggcggaagtcatcaaatacggcacgctcggcgacattagtttttttgaatggctggaacagcatatgcccgaactgatggcactcgaacgcgcgcccctcatccaagccgtgtaccgctgttgccaaatgaaggcagacatcgtcgcccaagacgaaaccgaacagggcatacgcgcatggctcaacctcggacacaccttcggacacgccgtcgaagcggaaatgggttacggcgtatggctgcacggcgaagccgtcgccgccggctgcgtgttggcggcgcgtttgtccgaacaactgggcaaaatctccgccgctgataccgcgcggctcgccgccctgtttgaagccgccggactgccgtccgcaccgcccgtgtttgcctttgaaaaatggctcgaacatatgagccacgataaaaaagtcagcggcggcatcatgcgctttatcggtctgaaccggctgggcgaagccaacatcaccgaaattaccgacacggacatcctccgccgcaccctgcaaccgtatctctga

SEQ ID NO: 63191 - DNA, 1470 bp, Neisseria meningitidis; identical to SEQ ID NO: 58386

SEQ ID NO: 63192 - DNA, 738 bp, Neisseria meningitidis; identical to SEQ ID NO: 43795

SEQ ID NO: 63193 - DNA, 264 bp, Neisseria meningitidis; identical to SEQ ID NO: 44436

SEQ ID NO: 63194 - DNA, 855 bp, Neisseria meningitidis
atggcagaaattactgcaaaaatggttgccgacctgcgcgccgctaccggcctgggcatgatggaatgcaaaaaagccttggttgaagccgaaggcaacttcgacaaagccgaagaaatcctgcgtatcaaatccggtgcgaaagccggtaaactggccggccgtactgctgccgaaggcgtattggcttacgcgatcaacggcaatgtcggcgcattggtcgaagtaaactgcgaaaccgacttcgttgctaaagacgcgggcttcgtagaatttgccaacttcgttgcgaaaactgctgccgagaaaaaaccggcttctgttgaagaactgagcgaactggttgaagcagaacgcaaagccatcatcgccaaattgggcgagaacatgtctgttcgccgcttccaagtgatcgacactgccaaccaactggttgcctacatccacggcgcattggcgaccgaaggcgtattggttgagtacaaaggctctgaagacgtagcacgcaaaatcggtatgcatattgttgccgctaaaccacaatgcgtaagcgaagccgaagtagatgccgaaaccgttgaaaaagaacgccacatctacaccgagcaagccatcgcttccggcaaacctgccgacatcgccgctaaaatggttgaaggccgtatccgtaaattcttggctgaaatcactctgaacggccaagcattcgtgatgaaccctgaccaaactgttgcccaattcgctaaagaaaacggcactgaagtggttagcttcgtacgctacaaagtaggcgacggtatcgagaaagccgttgtcgactacgcagccgaagtagccgcagccgccaaagtgtaa

SEQ ID NO: 63195 - DNA, 1278 bp, Neisseria meningitidis
atggcctacggcgacccgcaggcgatgatgaagcaggcggcggggctgtttgcgatgcacatgcagcgtaacagtacgctgaaccgtttggcgggtaagatgcctgccggtacggcgggtgcggaggcgactttgcgcaaacagacgacccagcatatgccgattgtgcgctgtcaggatttgacgcgcggtatgggcgatgaaatccgttttaatttggtcaaccctgtttctgccctgccgattatgggtgataacacggcggaaggcaagggcgtggggatgagcctgtcggaggcgggtttgcgtgtgaatcaggcgcgtttccctgttgacggcggcggcacgatgacgaatcagcgcagccctgccgattatcgtgcgctgatgcgtccggtggcgcaaagcctgatggaccgttatgccgaccagacgttgttggtgcatatggcgggcgcgcgcggtttccataacaatatcgaatggggcgtgcctttggcgggcgacccgaaattcaatgattatgtggtcaatccggtcaaagctccgtctaaaaaccgccattttgtggcttcgggcggtgcggtaacgggcgttgcggcgaaaggcggcgagttgaagattgcttctaccgatttgtttacgatggatacggtggacagtatgcgtaccgtgcttgaccagattccgctgccgccgccgattgtgaagtttgagggcgataaggcggcgagtgattcgcctttgcgtgtgtggctgctttctccggcacagtacaaccgttttgccgccgatccgaaattccgccagcttcaggcttcggcaattgcgcgtgcttcccaggcaaatcaaaatccgctgtttttgggcgaggcgggtttgtggaacggctttatcttggtaaaaatgccgcgtcctatccgtttctatgcgggcgatgagatgaagtattgcgccgataagttcagtgaggcggaatcgggcttgaaaatcccggcttcgtttgcggacaagtttgcggtcgaccgttcggttattttgggcggtcaggcggtgttggaggcgtttgcgaataccggcaaacacggcggtatgcctttcttttggtctgaaaaggagcttgaccacggcaaccgtgtggaaacgctcatcggtacgatacgcggtgtggcgaaaacgcgctttgccgtggatgtcggcgagggtgagaaggagattaccgactacggtgcaacggttgtggatacggtggttcctttgcagggcggtatccgctga

SEQ ID NO: 63196 - DNA, 351 bp, Neisseria meningitidis; identical to SEQ ID NO: 40802

SEQ ID NO: 63197 - DNA, 828 bp, Neisseria meningitidis
atgaaacccgatatttatgctttgctggaacgcgccctgctttcgggcgacccagatgaaaaaggacggctgacggatgaggcgtttgccgccgttcaaaatgcggacggggcggaaacaaacgcgccaccggcagatttcccccgcgcgggacgaccggacaagcctgttttggtcgcgccgtcgcagctgacaccgcgcaaaatgaacacaaccgaaggctatgcggcgatgctgcacgcgattgcgcatatcgaattcaacgccatcaatctggctttggacgcggcatatcgtttccgcacgctgccgtttcagtttgtccgcgactgggtgaaagtggcgaaggaagaggtgtgccacttccgcctgatgcgcgacagattgcgcgctttcggcttcgattacggcagtttcgaggcgcacaaccatttgtgggatatggcgtacaaaaccgcctacgacccgctgttgcgtatggcgttggtaccgcgcgtgttggaggcgcgcgggctggacgttacgccggggatacgcgcgaaggtggagcagcgcggcgattcggaaacctgcggcgtgttggacatcatttaccgcgacgaagtgggccatgtcgccatcggcaaccattggtatcaacacctctgccgcgaacgcggtttggaacctgtcgccctgttccgcagtctgattgcccgttacgatatgtttatcttccgcggccatgtgaacatcgaagcgcgcgaaaaagcgggcttcagccgctttgaattggatatgctggaagatttcgagcagggtttgaaacagaacaaaaataccgtctga

SEQ ID NO: 63198 - DNA, 387 bp, Neisseria meningitidis; identical to SEQ ID NO: 45699

SEQ ID NO: 63199 - DNA, 1008 bp, Neisseria meningitidis
atgagcaccttcttccagcaaaccgcccaagccatgattgccaaacacatcgaccgtttcccgctattgaagttggaccaggtgattgattggcagccgatcgaacagtacctgaatcgtcaaaaaacccgttaccttagagaccaccgcggtcgtcccgcctatcccctgttgtccatgttcaaagccgtcctgctcggacaatggcacagcctctccgatcccgaactcgaacacagcctcatcacccgcatcgatttcaacctgttttgccgttttgacgaactgagcatccccgattacagcaccttatgccgctaccgcaactggctggcgcaagataataccctgtccgaattgctcaaactgattaaccgacaactgaccgaaaaaggtttaaaaatagagaaagcatccgccgccgtcattgacgccaccattattcagaccgccggcagcaaacagcgtcaggctatagaagtcgatgaggaaggacaaatcagcggccaaaccacaccgagtaaggacagcgatgcccgttggataaagaaaaacggcctctacaaactcggttacaaacaacatacccgtaccgatgtggaaggctatatcgagaaactgcacatcacccccgccaatgcccatgagtgcaaacacctgccgcctttgttggaaggactgcccaaaggtacgaccgtctatgccgacaaaggctacgacagtgcggaaaaccggcaacatctggaagagcgtcagttgttagacggcattatgcgcaaagcctgccgcaaccgtccgctgtcggaaacgcaaaccaaacgcaaccggtatttgtcgaagacccgttatgtggtcgagcaaagcttcggtacgctgcaccgcaaattccgctatgctcgggcagcctatttcggactgattaaagtgagtgcgcaaagccatctgaaggcgatgtgtttgaacctgttgaaagcggccaacaggttaagtgcgcccgctgccgcctaa

SEQ ID NO: 63200 - DNA, 2277 bp, Neisseria meningitidis
atggcacaaactacactcaaacccattgttttatcaattcttttaatcaacacacccctcctcgcccaagcgcatgaaactgagcaatcggtgggcttggaaacggttaccgtcgtcggcaaaagccgtccgcgcgccacatccgggctgctgcacacttcgaccgcctccgacaaaatcatcagcggcgacaccttgcgacaaaaagccgtcaacttgggcgatgctttggacggcgtgccgggcattcacgcctcgcaatacggcggcggcgcgtccgctcccgttattcgcggtcaaacaggcaggcggattaaagtgttgaaccatcacggcgaaacaggcgatatggcggatttttcgcccgatcacgccattatggtagataccgccttgtcgcaacaggtcgaaatcctgcgcgggccggttacgctcttgtacagctcgggcaatgtggcggggctggtcgatgttgccgatggcaaaatccccgaaaaaatgcctgaaaacggcgtatcgggcgaactcggattgcgtttgagcagcggcaatctggaaaaactcacgtccggcggcatcaatatcggtttgggcaaaaactttgtattgcacacggaagggctgtaccgcaaatcgggggattacgccgtaccgcgttaccgcaatctgaaacgcctgcccgacagccacgccgattcgcaaacgggcagcatcgggctgtcttgggttggcgaaaaaggttttatcggcgtagcgtacagcgaccgtcgcgaccaatatggtctgcctgcccacagccacgaatacgatgattgccacgccgacatcatctggcaaaagagcttgattaacaaacgctatttacagctttatccgcacctgttgaccgaagaagacgtcgattacgacaatccgggcttgagctgcggctttcacgacgacgataatgcacacgcgcatacccatagcggcagaccgtggatagatttacacaacaaacgttacgaactccgcgccgaatggaagcagccgctccccggttttgaagccctgcgcgtacacctgaaccgcaacgactaccgccacgacgaaaaagcaggcgatgcggtcgaaaacttttttaacaaccaaacgcaaaacgcccgcatcgagttgcgccaccaacccataggccgtctgaaaggcagctggggcgtgcaatatttacaacaaaaatccagtgctttatctgccacatccgaagcggtcaaacaaccgatgctgcttgacaacaatgtgcaacattacagctttttcggtgtagaacaggcagaatgggacaacttcacgcttgaaggcggcgtacgcgtggaaaaacaaaaagcctccatccggtacgacaaagcattgattgatcgggaaaactactacaaccaccccctgcccgacctcggcgcgcaccgccaaaccgcccgctcgttcgcactttcgggcaactggtatttcacgccgcaacacaaactcagcctgaccgcctcccatcaggaacgcctgccgtcaacgcaagagctgtacgcacacggcaaacacgttgccaccaacacttttgaagtcggcaacaaacacctgaacaaagagcgttccaacaacatcgaactcgcgttgggctacgaaggcgaccgctggcaatacaatctggcactctaccgcaaccgcttcggcaactacatttacgcccaaaccttaaacgacggacgcggccccaaatccatcgaagacgacagcgaaatgaagctcgtgcgctacaaccaatccggtgcggacttctacggcgcggaaggcgaaatctacttcaaaccgacaccgcgctaccgcatcggcgtttccggcgactatgtacgaggccgtctgaaaaacctgccgtccctacccggcagggaagatgcctacggcaaccgtcctttcatcgcgcaggacgaccaaaacgcccctcgcgttccggctgcgcgcctcggcttccacctgaaagcctcgctgaccgaccgcatcgatgccaatttggactactaccgcgtgtttgcccaaaacaaactcgcccgctacgaaacgcgcacgcccggacaccatatgctcaacctcggcgcaaactaccgccgcaatacgcgctatggcgagtggaattggtacgtcaaagccgacaacctgctcaaccaatccgtttacgcccacagcagcttcctctctgatacgccacaaatgggccgcagctttaccggtggcgtaaacgtgaagttttaa

SEQ ID NO: 63201 - DNA, 1008 bp, Neisseria meningitidis
atgagcaccttcttccaacaaaccgcgcaagccatgattgccaaacacatcgaccgtttcccgctattgaagttggatcaggtaattgattggcagccgatcgagcagtacctgaaccgtcaaaaaaaccgttacctccgagaccaccgcggccgtcctgcctatcccctgctgtccatgttcaaagccgtcctgctcggacaatggcacagcctctccgatcccgaactcgaacacagcctcatcacccgcatcgatttcaacctgttttgccgctttgacgaactgagcatccccgattacagtactttatgccgttaccgcaattggctggcgcaagacgacaccctgtctgaattgctggaactgattaaccgacaactgaccgaaaaaggcctaaaaatagagaaagcatccgccgccgtcgttgatgccaccattatccagaccgccggcagcaaacagcgtcaggccatagaagttgacgaagaaggacaaatcagcggtcaaaccacaccgagtaaggacagcgatgcccgttggatcaagaaaaacggcctctacaaactcggttacaaacaacatacccgtaccgatgcagaaggctatatcgagaaactgcacattactcccgccaatgcccatgagtgcacacacctgtcgccgttgttggaagggatagctgaaggtacgaccgtctatgccgacaaaggctatgactgtgcggaaaaccggcaacatctgaaagaacatcagttaccggacggcattatgcgcaaagcctgccgcaaccgtccgctgacggaggcgcaaaccaaacgcaaccgatatttgtcgaagacccgttatgtggttgaacagagcttcggtacgctgcaccgtaagttctgctatgttcgggcagcctatttcggactgattaaagtgagtgctcaaagccacctgaaagcgatgtgtttgaacctgttgaaagcggccaacaggttaagtgcgcccgctgccgcctaa

SEQ ID NO: 63202 - DNA, 783 bp, Neisseria meningitidis
ttgcagaaagtcgtgcgccatatcgcgcaaaccgaaattatgccgcgttttttgaatacgccgtctcaccgcaaggaagacggttcgatgttgagcgaggcggacattgccgcgcagacggcttttgccgccgcgttgccgcttttaatcgacagtccgatgttgggcgaggaaatgtcgcggcaggaacagtcggctttgtgggaacaatattcgggggaaaaggggctgtggattgtcgatccgatagacgggacgaacaattttgtcaacgggctgccgcattttgccgtgtcggtggcgtttgtccgcaacgggcgcgccgaattgggtgtgatttacaatccggtcagcggcgaatgtttttatgccgaacgggggcagggtgcgtttcttaatggaacccgcctgcctttgcgtctcgtggataaaaaactcaatgaggcgattgcgggcgtggaaatcaaatatctgcgttcgggcaaactttccagccgcatgagtacgctcgcacctttcggtacggtgcggagtatgggcagcagcacgctggactggtgttatctggcgtgcgggcgttatgatgtttatgtccacggcgggcagaagctgtgggactatgctgcgggtgcgttgattttcgaggaggcgggcggcaggctgacgactttggaaggcgacgggttttggagtggtgaacacgtgttcaaacgctcggtcgttgccgcgctcgaaccgaagctgtttgaacgctgggtcgggtggatacgggaaaaccaatag

SEQ ID NO: 63203 - DNA, 4179 bp, Neisseria meningitidis
atgagctattcgtttaccgagaaaaaacgtatccgtaagagttttgcaaagcgggaaaatgttttggaagttcctttcctgctggcaacccaaattgattcttatgcgaagtttttgcagctggaaaatgcttttgacaaacgtaccgatgacggtctgcaggcggcatttaattctattttcccgattgtgagccataacggttatgcgcgattggagtttgtgcattacacattgggcgagcctttgttcgatattcccgaatgtcagttgcgcggaatcacttatgcagcccccttgcgcgcgcgtatccgtttggtgattttggataaggaagcatctaaaccgacggtaaaagaagttcgtgaaaacgaagtgtatatgggcgaaattccgttgatgaccccgagcggttcttttgtgattaacggcacagagcgtgtgattgtctcccagttgcaccgttcgcccggtgtattcttcgagcatgacaaaggtaagacgcactcttccggcaaattgttattctccgcccgcatcattccctaccgtggttcatggttggattttgaatttgatccgaaagatttgctgtatttccgtatcgaccgccgccgtaaaatgccggtaacgattttgttgaaggctttgggctacaacaatgagcaaatcttggatattttctacgacaaagaaacgttctatttgtcttcaaacggtgttcaaaccgatttggtcgcagaccgtctgaaaggcgaaactgccaaggtcgatatcttggataaagaaggcaatgtattggttgccaaaggtaagcgcattactgcgaaaaatatccgtgatattaccaatgcaggcctgacccgtttggatgtagaaccggaaagcctgctgggcaaagcattggctgccgatctgattgattcggaaaccggcgaggtattggcttctgccaatgatgaaattacagaagagttgttggccaaatttgatatcaacggcgtaaaagaaattacgaccctttatatcaatgagctggatcagggtgcttatatctccaataccttgcgtacggatgagactgccggccggcaggcggctcgtgttgcgatttaccgtatgatgcgtccgggcgaaccgcccaccgaagaggcggtcgagcaattgtttaaccgcttgttcttcagtgaagacagctacgatctgtcccgcgtaggccgtatgaaatttaatacgcgcacatacgaacaaaaactgtccgaagcccaacaaaactcttggtacggccgcctgctgaacgaaacgtttgccggtgctgccgacaaaggcggttatgtcctgagcgtcgaagatattgtcgcctcgattgcgactttggtcgagttgcgtaacggccatggcgaagtggacgatatcgatcacttgggcaaccgccgagtacgttcggtaggcgagctgactgaaaaccaattccgtagcggtttggcccgtgtggaacgtgccgtaaaagaacgtttgaatcaggcggaatcagaaaacttgatgccgcacgatttgattaatgcaaaacctgtttctgccgctattaaagaattcttcggctccagccaattgagtcagtttatggatcagaccaaccccttgtctgaagtaacccataaacgccgtgtatctgcattgggtccgggcggtttgacccgcgaacgtgcaggatttgaggtgcgggacgtgcatccgacccactacggtcgcgtatgtccgattgaaacgcctgaaggtccgaacatcggtttgatcaactcattgtccgtttatgcgcgcaccaatgattacggtttcttggaaacgccttaccgccgcgttatcgacggcaaagtaactgaagaaatcgactacttgtctgccatcgaagaaggccgctatgtgattgcacaggcgaatgccgatttggacaaagacggcaatctgattggcgacttggttacttgtcgtgaaaaaggcgaaaccattatggcaacgcctgaccgcgttcaatatatggacgtggcaaccggtcaagtggtatccgttgcagcatccctgattccgttcttggaacacgatgacgcgaaccgcgcattgatgggtgcgaatatgcaacgtcaggcagtgccttgcttgcgtcctgaaaaaccgatggtcggtaccggtatcgagcgttccgttgccgttgactctgctactgcaatcgttgcccgccgaggcggcgtggtcgagtatgtcgatgccaaccgtgttgtgattcgtgtccatgacgacgaagcgactgccggcgaagtgggtgtcgatatttacaacttggttaaatttacccgttccaaccagtctaccaatatcaatcagcgtcctgccgtcaaagccggcgatgttttgcaacgcggcgatttggtggccgatggcgcgtccaccgatttgggcgaattggctttgggtcaaaatatgaccatcgccttcatgccgtggaacggttacaactacgaagactcgattctgatttccgaaaaagtggctgcggacgaccgctatacttcgattcacattgaggaattgaatgtcgttgcccgcgataccaagctgggtgcggaagacattacccgcgatattccgaacttgtccgagcgtatgcaaaaccgtttggacgaatccggtatcgtttacatcggtgcggaagtagaagccggcgatgtgttggtaggcaaggtaacgcctaaaggcgaaacccagctgacgccggaagaaaaactgctgcgcgccatcttcggtgaaaaagcatctgacgtaaaagatacttcattgcgtatgcctaccggcatgagcggtaccgttatcgacgttcaagtcttcactcgtgaaggtattcaacgcgacaaacgtgctcaatccattatcgattccgagttgaaacgctaccgtttggatttgaacgaccaattgcgtattttcgacaacgacgcattcgaccgtatcgagcgtatgattgtcggtcagaaagccaacggcggcccgatgaagctggccaaaggcagtgaaatcacgaccgaatatctggcgggtctgccgagcaggcacgattggttcgatatccgtctgaccgatgaagatttggccaagcagttggaactgattaaagtgagcctgcaacaaaaacgcgaagaagcggacgagttatacgaaatcaagaagaaaaaactgacccaaggcgacgaattgcaacccggcgtacaaaaaatggtgaaagtttttatcgccatcaaacgccgtctgcaagccggcgacaaaatggcgggccgccacggtaacaaaggcgtggtatcgcgcattctgccagtggaagacatgccttacatggcggacggccgtccggtagacatcgtactgaacccattgggcgtaccttcccgtatgaacatcggtcagattttggaagttcacttgggttgggcagcaaaaggtatcggcgagcgtatcgaccgtatgctgaaagagcaacgcaaagcaggcgagttgcgcgagttcttgaacaaactctacaacggcagcggcaagaaagaagatttggatgccctgactgatgaagaaatcatcgaactggcctccaacctgcgcaaaggtgcatctttcgcctctcctgtattcgacggtgcgaaagagtctgaaatccgcgaaatgttgaacttggcttatccgagcgacgatcctgaggttgaaaaactgggcttcaacgacagtaaaacccaaatcacgctgtatgacggccgttcaggcgaagcatttgaccgcaaggttacagtaggtgtgatgcactatctgaaactgcaccacttggttgacgaaaaaatgcacgcgcgttctaccggtccgtacagtctggttacccagcagcctttgggcggtaaagcccagttcggcggccaacgtttcggtgagatggaggtttgggcactggaagcatacggcgcagcctacacgctgcaagagatgctgactgtgaagtctgacgacgtgaacggccgtaccaaaatgtacgaaaacatcgtcaaaggcgaacacaaaatcgatgccggtatgcccgagtccttcaacgtattggtcaaagagattcgctcactgggcttggatatcgatttggaacgttactaa

SEQ ID NO: 63204 - DNA, 489 bp, Neisseria meningitidis
atgaccccgttatttagaaaagccgtttggctgctgtttgccgtttcggtctgtgcatttgccggctctttggcggcacagtatgttttgggtatggagccttgcgttttgtgtatcagccagcggttgtgcgtcttggcaaccgcattgtgtgcggcaattgtcctgatgtgcagaccaagaagaaaggcaggcggtttgttcggtgctgtctttatcagcattcccgccgttacgggtatttctgttgcggcatatcagttgtggttgcagtcgctgccgccgggaaccgctccttcgtgcggcgcgccgtggacgttccgcttgaaaggctggcctttgtttgattggttcgagcctgtcgtgcgcgggttcggaaattgtgccgaaccggattatctgctgggaattgccttgcctgtttggagcgtggcgtattttctggcggttgtcctgacggtttggtgggcgtgggcaagggctaaataa

SEQ ID NO: 63205 - DNA, 1209 bp, Neisseria meningitidis
ttgttcgcaaagaaagaaaaacgctttatctttgaaggcaggcattccgcctccgacaaactggtcaacggcgaagtatccgcgtttaccgaagaagaggcgcgcaaaaaactggcaaaacgcggcatccgcccattgcagattacccgtgtgaaaacaagctccaagcgcaaaatcacacaagaagacatcaccgttttcacccgccagctttccacgatgattaaagcgggcctgccgctgatgcaggcatttgaaatcgtggcgcgcggacacggcaacccgtctatgacggaaatgctgatggaaatccgaggcgaagtggaacagggcagctcgttgagccgcgcattctcaaaccacccgaaatatttcgaccgcttctactgcaacctggttgcggcgggcgaaacgggcggcgtattggaaagcctgctggacaaattggcaatttacaaagaaaaaacccaggccatccgcaaaaaggtaaaaaccgcgctgacctatccggtatccgtcatcgccgtcgccatcggtttggtattcgtgatgatgattttcgtactgcccgcctttaaagaagtttacgccaatatgggcgcggagcttcccgcactgacccaaacagtgatggatatgtccgactttttcgtctcatacggctggatggtgctgatcgcactgggctttgccatatacggcttccttaaattgaaggcgcgttcgattaaaatccaacggcgtatggatgccatactgctgcgtatgccgattttcggagacattgtccgcaaagggacgattgcccgctggggcaggacgacagcgacgctgattgcggcaggcgtgcctttggtcgatgtattggactccactgccggcgcggcgggcaatttaatctatgaagaagccacccgggaaatccgtacgcgcgtcatccaaggtttgtctatgacttcggggatgcgtgcgacggaactgttccccaatatgatgttgcagatgtcttccatcggcgaggaatcgggttctttggacgatatgctcaacaaagccgccgaattttacgaagacgaggtggacaatgcggtcggcaggctgtccgctatgatggagccgatcattatcgtgattttaggcttggtcatcggcacgcttctggtcgccatgtatctgccgctgtttaatttgggcaacgtggtcgcctga

SEQ ID NO: 63206 - DNA, 846 bp, Neisseria meningitidis
atgaacaaattttcccaatccggaaaaggtctgtccggttttttcttcggtttgatactggcgacggtcattattgccggtattttgttttatctgaaccagagcggtcaaaatgcgttcaaaatcccggcttcgtcgaagcagcctgcagaaacggaaatcctgaaaccgaaaaaccagcctaaggaagacatccaacctgaaccggccgatcaaaacgccttgtccgaaccggatgctgcgacagaggcagagcagtcggatgcggaaaaagctgccgataaagccgacgaggttgaagaaaaggcgggcgagccggaacgggaagagtcggacggacaggcagtgcgtaagaaagtgctgacggaagagcgtgaacaaaccgtcagagaaaaagcgcagaagaaagatgccgaaacggttaaaaaacaagcggtaaaaccgtctaaagaaacagagaaaaaagctccaaaagaagagaaaaaggcggaaaaggaaaaagttgcacccaaaccgaccccggaacaaatcctcaacagcggcagcatcgaaaaagcgcgcagtgccgccgccaaagaagtgcagaaaatgaaaacgtccgacaaggcggaagcaacgcattatctgcaaatgggcgcgtatgccgaccgccggagcgcggaagggcagcgtgccaaactggcaatcttgggcatatcttccaaggtggtcggctatcaggcgggacataaaacgctttaccgggtgcaaagcggcaatatgtctgccgatgcggtgaaaaaaatgcaggacgagttgaaaaaacatgaagtcgccagcctgatccgttctatcgaaagtaaataa

SEQ ID NO: 63207 - DNA, 3987 bp, Neisseria meningitidis
atgtctgtcgttttgcccttgcgcggcgttaccgccctttccgatttccgtgtcgaaaaactcttgcaaaaagccgccgcactcggactgcccgaagtcaaattaagcagcgaattttggtatttcgccggcagcgagaaagcattggatgccgcgactgtcgaaaaactgcaagccttgttggcggcgcaaagcgttgaacaaacgccaaaagcgcgcgagggcttgcatttgtttttggtcacgccccgtttgggtacgatttcgccgtgggcttccaaggcgaccaatatcgcggaaaactgcggtttggcaggcatcgagcgcatcgagcgcggcatggcggtgtggctggaaggtgcgcttaccgatgaacagaaacagcaatgggcggctttgctgcacgaccgcatgaccgaatccgtattgcccgattttcagacggcctccaaattattccaccatctcgaatccgaaactttctccagcgtcgatgttttgggcggcggtaaagaggctttggtcaaagccaataccgaaatgggcttggcactttcagccgacgaaatcgattatctggttgaaaactaccaggctttgcagcgcaatccgtccgatgttgaattgatgatgttcgcgcaggcaaacagcgaacactgccgccacaaaatcttcaacgccgacttcatcctcaacggcgaaaaacaaccgaaatccctgttcggtatgatacgcgacacgcacaacgcgcatcccgaaggcacggtcgtcgcttataaagacaactcgtccgtaattgaaggcgcgaaaatcgagcgtttctatccgaatgcggcggaaaaccaaggttaccgtttccacgaagaagacacgcatatcatcatgaaagtggaaacgcacaaccacccgaccgccatcgcgccgtttgcgggcgcggcaacaggcgcgggcggcgaaatccgcgacgaaggcgcaacgggcaaaggttcgcgtccgaaagcaggcttgaccggctttaccgtctccaacctcaacatccccgacctcaaacagccgtgggaacaagactacggcaagccggaacacatttcctccccgttggacatcatgattgaaggccccatcggcggcgcggcgttcaacaacgaattcggccgccccaacctcttgggctacttccgcacttttgaagagaagtttgacggtcaggttcgcggctaccacaaaccgattatgattgccggcggcttgggcagcattcaggcgcagcagacgcataaagacgaaatccccgaaggcgcgttgctgatccaactgggcggcccgggcatgcttatcggcttgggcggcggcgcggcttcttcgatggataccggcacgaacgacgcgtctttagacttcaattccgtacaacgcggcaaccccgaaatcgaacgccgcgcgcaggaagtcatcgaccgctgctggcagctcggcggcaaaaacccgattatctccatccacgacgtgggcgcaggaggtttgtccaacgccttccccgaactggtcaacgatgccggacgcggcgcggtattcaagctgcgcgacgtgccgctggaagaacacggtttaacgcctttgcaaatctggtgcaacgaatcgcaagagcgttatgtgttgtcgattttggaaaaagatttggacaccttccgcgccatctgcgaacgcgaacgctgcccgtttgccgtggttggcacggcgaccgacgacggccatttgaaagtgcgcgacgatttgttcgccaacaaccccgtcgatttgccgctgaacgtcttgctcggcaaaccgcccaaaaccacgcgtaccgacaaaacggttgcgccgtatgcgaccgaagggaatccctttgggaaaaaaccgtttaacgccggcgatatcgacattaccgaagccgcctaccgcgttttgcgcctgcctgccgtagccgccaaaaacttcctgattaccatcggcgaccgcagcgtcggcggcatgacccaccgcgaccaaatggtcggcaaataccaaacccccgtagccgactgcgccgttaccatgatgggcttcaatacctatcgcggcgaagcgatgtctatgggcgaaaaaccgaccgttgccctgtttgacgcgcctgcttcaggcagaatgtgcgtcggcgaagccatcaccaacatcgcggcggtcaacatcggcgacatcggcaacatcaagctctccgccaactggatggcggcgtgcggcaacgagggcgaagacgaaaaactctaccgcaccgtcgaagcggtttccaaagcctgtcaggcattggatttgagcattcccgtgggcaaagacagcctgtcgatgaaaactgtgtggcaggacggcgaagagaaaaaatccgtcgtctcgccattgagcctgattatctctgcgttcgcgccggtcaaagacgtgcgcaaaaccgttacgcccgaattgaaaaacgtcgaagacagcgtattgttatttatcgatttgggcttcggcaaagcgcgtatgggcggctctgcattcggtcaggtatacaacaacatgagcggcgacgcgcccgatttggacgatacaagtcgtctgaaagcgttttacaacgtgattcaacagcttgtcgccgaagacaaactcttggcataccacgaccgcagcgacggcggtttgtttgccgttttggtagaaatggcgtttgcggggcggtgcggcttggatatagatttaaatttattgcttgcacaaacatttattaccaaccataccgctctgtctcaatcattgcggactgaagaggtaaaagcgttggctgaatggcaagaaaccattgcccgcacattatttaatgaagagttgggtgctgttatccaagttagaaaacaagatgttgccgatattatcaatttattctatcaacaacagctgcatcataatgtctttgaaatcggtacgttaactgatgagaacacgttaatcatccgcgacgggcaaacgcaccttatttctgacaacctaatcaaactgcaacaaacctggcaagaaaccagccatcaaatccaacgcctgcgcgacaaccccgcctgcgccgacagcgagttcgcattgattggcgacaacggacgcagcgcattgtttgccaacctgaaattcgacgtgaacgaagacatcgccgcgccgtttatcaacagcggcgcgaaacccaaaatcgccatcctgcgcgaacagggcgtaaacgggcaaatcgaaatggccgccgcctttacccgcgccggattcgatgcttacgacgtgcatatgtccgacctgatggcaggccgcatccacctcgccgacttcaaaatgctggcggcgtgcggcggcttcagctacggcgacgtactcggcgcgggcgaaggctgggcgaaatcgattctgttccaccctgctctgcgcgaccagtttgccgccttcttcgccgacccggacacgctgacattgggcgtgtgcaacggctgccaaatggtcagcaaccttgccgaaatcatccccggcacggcaggctggccgaagttcaaacgcaacctgagcgaacagtttgaagcgcgcctaagcatggttcacgtccccaaatccgcgtcgctgattctgaacgaaatgcaaggctccagcctgcccgtcgtcgtcagccacggcgaaggccgcgccgacttcgcacttcacggcggcaacatttctgccgatttgggcattgcgctgcaatatgtggacggtcaaaaccaagttacccaaacctatccgctcaaccccaacggctcgccgcaaggcatcgccggcattaccaacgccgacggccgcgtgaccatcatgatgccccaccccgaacgcgtgtaccgcgccgcacaaatgagctggaaaccggaaggctggacggaactgtccggctggtaccgcctctttgccggcgcacgtaaagccttgggctaa

SEQ ID NO: 63208 - DNA, 1539 bp, Neisseria meningitidis
atgaatatgcttggagctttggcaaaagtcggcagcctgacgatggtgtcgcgcgttttgggatttgtgcgcgatacggtcattgcgcgggcattcggcgcgggtatggcgacggatgcgttttttgtcgcgttcaaactgcccaacctgcttcgccgcgtgtttgcggagggggcgtttgcccaagcgtttgtgccgattttggcggaatacaaggaaacgcgttcaaaagaggcggcggaggcttttatccgccatgtggcggggatgctgtcgtttgtgctggtcatcgttaccgcgctgggcatacttgccgcgccttgggtgatttatgtttccgcacccggttttgccaaagatgccgacaaatttcagctctccatcgatttgctgcggattacgttcccctatatcttattgatttcactttcctcttttgtcggctcagtactcaattcctatcataaattcagcattccggcgtttacgcccacgttcctgaacgtgtcgtttatcgtattcgcgctgtttttcgtgccgtatttcgatcctcccattaccgcgctggcttgggcggtttttgtcggcggcattttgcaactcggctttcagctcccttggttggcgaaactaggctttttgaaactgcccaaactgaatttcaaagatgcggcggtcaaccgcgtgatgaaacagatggcgcctgcgattttgggcgtgagcgtggcgcagatttctttggtgatcaacacgattttcgcgtcttatctgcaatcgggcagcgtttcatggatgtattacgccgaccgcatgatggaactgcccggcggcgtgctgggggcggcactcggtacgattttgctgccgactttgtccaaacactcggcaaaccaagatacggaacagttttccgccctgctcgactggggtttgcgcctgtgcatgctgctgacgctgccggcggcggtcggaatggcggtgttgtcgttcccgctggtggcaaccttgtttatgtaccgcgaatttacgctgtttgacgcgcagatgacgcaacacgcgctgattgcctattctttcggtttaatcggtttgatcatgattaaagtgttggcgcccggcttctatgcgcggcaaaacatcaaaacgcccgtcaaaatcgccatcttcacgctcatctgcacgcagttgatgaaccttgcctttatcggcccgttgaaacacgccgggctttcgctcgccatcggtttgggcgcgtgcatcaatgccggattgttgttcttcctgttacgcagacacggcatttaccggcccggcaagggttgggcggcgttcttggcgaaaatgctgctctcgctcgccgtgatgggcggcggactgtgggcggcgcaggcttgcctgccgtttgaatgggtacgcgccggcggaatgcggaaagcggggcagctctgcatcctgattgccgtcggcggcggactgtatttcgcatcactggcggctttgggcttccgtccgcgccatttcaaacgcgtggaaaactga

SEQ ID NO: 63209 - DNA, 957 bp, Neisseria meningitidis
atgaaagaatttgacttcatcaaacggtatttgcaaacaggcacggataatgatgtcgtattgggcataggcgacgatgcggcgattgtccgcccgcgtgaaggcttcgatttgtgtttcagtgcggatatgcttttgaaggacaggcatttttttgcagatgtcaaacctgaagacttggcttggaaggttttggccgtcaatatttcagatatggcggcgatgggtgcgataccgcgttgggtgttgctgagcgcggctttgcccgaattggatgaggtatggctgaaacggttttgcggcagctttttcggtttggcaaaaaagtttggcgtaacgttaatcggcggcgatacgaccaagggcgatatggcgttcaatgtaaccattatcggcgaattgccgaagggtagggcgttgcggcgtgatgcggcggttgcgggcgacgatatttgggtgtcggggcgtgtcggtatggcggcggcggctttgaactgccgtctgaaacggtgtgtgttgccggatgatgtgtttgccgaatgcgaacaaaagctgctccgccccgagccaagggttgggctggggcttgcgctgttgccgtttgcccgggcggcgcaggatgtttcagacggcatcgcgcaagatttggggcatatcctgaccgcttccggcgtgggggcggaaatttgggccgattcgctgccgtctttatccgtattgaaagatattttgccccgagcgcaatggctgtcttatactttggcgggcggcgacgattacgagctggtgtttaccgcgccggaaagttgccgcagccgcgtgcttgatgcggcagaacggtgcggcgtgccggtaacgcgcatcggcaaaatcaacggaggatgccgtctgaaagttttagatgacggcggcagggaattggaactacattctttaggattcgatcattttggctga

SEQ ID NO: 63210 - DNA, 1311 bp, Neisseria meningitidis
gtggctaatcaacaaacgtcatcaggttcatccaaatttggagatcttaagaaacgtcttttgtttctatttggagcattgattgtttttcgaattggtgcccatatacccgtacctggagttgatgctgttgctttagctaaattatacgaaagcgctggaaacggcatcctgggaatattgaatatgttttccggtgggtcgttagagcgctttagtatatttgcaataggaattatgccatatatttcagcttctattattgtacagctcgcttctgaaattttgccatcattgaaggctttaaaaaaagaaggggaggctggtagaaaggtaattacgaaatatactaggtatggtactgttttgttagcaattcttcaaagtctaggtgttgcatctttcgtatttcagcaaggaattgttgtaacaagttcatttgagtttcatgtttccacggtagtttctttggtaacgggaactatgtttcttatgtggcttggggagcaaattactgaaaggggtatcgggaacggtatttctttaatcattacggcaggtattgcttcaggtattccttcgggtattgcaaagctggttacactgacgaaccaaggttctatgagcatgcttacggcgttgtttattgtatttggtgccttattattaatttatttggttgtatactttgaaagtgcacagcggaagattcctattcattatgcaaaacgccagtttaatggtagggcgggtagtcaaaatacgcatatgcctttcaagttgaatatggctggtgttattcccccaatttttgcttccagtattattctatttccatctactcttttaggttggtttggttcggctgatacaaatagtgttttgcacaaaatagctggattgttacaacacggtcaattgctgtatatggctttatttgcagcgacagttattttcttttgttatttttatacggctttggtttttagccctaaagaaatggcagagaatttaaaaaagagtggtgcttttgttcctgggattagacctggtgagcagacctctaggtatttagaaaaagttgtattacgtttgacattgtttggagctctttatattacaactatttgtttaattccagagttcttaactacggttttaaatgtacctttttatttgggtggcacgtctttgttgattctagttgttgtaacgatggattttagtacacaaataaattcgtataggcttactcaacagtatgataagttaatgactcgttcagaaatgaaatcattttctcggaaatag

SEQ ID NO: 63211 - DNA, 423 bp, Neisseria meningitidis; identical to SEQ ID NO: 42868

SEQ ID NO: 63212 - DNA, 888 bp, Neisseria meningitidis
atgcagaaatccaaattatcttggttcttgaaactgatgttggcactgtcgctggcgtttctgtatatcccgctggttgttttggtcatctattcgtttaacgaatccaagctggtaaccgtttggggcggcttttcgaccaagtggtacggcgcattgctggaaaacgacaccatcttggaagccgcttggctgtcgctgcggattgccgttgtgtcttcgcttgctgccgtcgttttgggcacactggcaggctatgcgatggcgcggattaaacgttttcgcggcagtaccttgttcgccggtatgatttccgcacctatggtgatgcccgacgtgattaccggtctgtctatgctgctgctgattattcaggtacagatatttttgcagggcagcgaatggttacaacatctctacttcgatcgtggctttttcaccatcttcctcggacatacgacgctgtgtatggcgtacattaccgttgttatccgttcgcgtctggttgagcttgaccagtcgctcgaagaagccgcaatggatttgggcgcgcgtccgctgaaaatcttttttgtcatcactttgcctttgattgcccctgccatcgcttcaggctttctgctcggcattaccctgtctttggatgatttggtgattacctcattcctctccggccccggttcatccacattgccgcaggtgattttctccaaaatcaagttgggtctcgatccgcagatgaatgtcttggcgaccatcctaatcggcatcatcggaacattggtcatcatcgtcaattattggatgatgaggcaggcaaccaagcgtgaccgagaagcggcagaagcctaccgccaagaaaaattggctgccgagaaagcaaattaa

SEQ ID NO: 63213 - DNA, 2226 bp, Neisseria meningitidis
atgaccagtaaagccaccattatctatacccataccgatgaagctcccgcgctggcgactcaatctctgctgccgattgtgcaggcgtttacccgccacgccggtatcgaagtcaaaaccagcgatatttccctgtccggccgcattttggcggcgtttcccgaatacctgaccgaagcgcaacgcgtacccgacgcgcttgccgaattgggcgaactggtaaaacagcccgacgccaacgtaatcaaactgccgaacatcagcgcgtccgtaccgcaactgactgccgcgattaaagaattgcagtctaaaggctttgccgttcccgactatcccgccgacccgcaaaccgatgaagaaaaagccgtgcgcgaacgttacgaccgcatcaaaggcagcgcggtaaaccctgtcctgcgcgaaggcaactccgaccgccgtgcgcctaaagcagtgaaaaactttgccaaaaaaaatccgcacagcatgggcgcatggacgaaagactccaaaacccacgttgccaccatgcaaagcggcgactttttccataacgaacaatctgttactgtacccgatgcgacttccgtatccatcgtgttcaccgacaaacaaggcaacaaaaaagagctgcgcgcgcctgttgccctgaaagccggcgaaatcaccgacgcgaccgtgatgagcaaaaaagccctgctcgccttccttgccgaacaagtgcaagacgcgaaagctaaaggcgtattgttctcgctgcatatgaaagccacgatgatgaaagtgtccgacccgattatcttcggacacgccgtcaaagtattcttcgcgcctgtatttgaaaaattcggcggcaaactggccgccgcaggcgtcaacgtcaacaacggtttcggcaacctgcttgccaatctggacaaactggatgcggacacccgcaccgccgtcgaagccgaaatcgccgccgtttacgccgccaaccccgatttggcgatggtcgattccgataaaggcattaccaacctgcacgttcccagcgatgtcatcgttgatgcttccatgcctgcgatgattcgtaactccggccgtatgtgggataaagacggcaaagcgcaagacaccaaagccgtgattcccgacagcagctacgccggcgtttaccaagcaaccatcgacttctgccgcgaacacggcgcatttgacccgacaaccatgggtactgtgcccaacgtcggactgatggcgcaagcggcggaagaatacggctcgcacaacaaaacctttgaaatcgaagccgacggccaagtccaagtcattgatgcggcaggaaaagtcctaatgcagcacgacgttgaagccggcgacatctggcgtatgtgccaaaccaaagacgctccggttaaagactgggtacaacttgccgtcaaccgcgcccgtctgagcaacacgcctgccgtgttctggctcgacgaaaaccgtccgcacgacaagagcctgctcgccaaggttaaagcctaccttgccgaactggataccaatggcctcgacatccgcatcctcgctcctgaagaagccgccaagttcagcttgggtcgtctgaaaaacggcgaagacaccatctccgtaaccggtaatgtcttgcgcgactacctgaccgacttgttcccaattttggaactcggcacaagcgcgaaaatgctgtctatcgttccattgatgaacggcggcggtatgtttgaaaccggcgcgggcggttctgcaccgaaacatgttcaacaattcctcgaagaaaaccatttgcgctgggactcgctgggcgaatttctcgcactcgccgtatcgtttgaacatctggcgcaaaaaaccggcaacaccaaagcccaagtcctcgccgacactttggatgcagccaccgaaaaactgctgttgaacgacaaatcgcccaaacgcaaagcgggcgaactcgacaaccgcggcagccatttctacctcaccctctactgggcgcaagaattggcggcgcaagacaaagatgccgaactgaaagccgcatttacgccattggcagccgctttgaccgccgacgaagcgaaaatcgttgccgagctttccgccgtacaaggcaaagcggccgacatcggcggctactacgccgccaatcctgaaaaagccgcacaagtgatgcgtccgagcgtaacctttaatcaggcactaaacgccttataa

SEQ ID NO: 63214 - DNA, 1341 bp, Neisseria meningitidis
ttgcacacccttctagcttttatcttcgccatcctgattttggtcagcctgcacgagttcggacactacatcgttgccagattgtgcggcgtcaaagtcgtacgcttttccgtcggcttcggcaaaccgtttttcacccgaaagcgcggcgacaccgaatggtgcctcgccccgattccgttgggcggttacgtcaaaatggtcgacacgcgcgaaggcgaagtatcagaagccgatttaccctacgcttttgacaaacaacaccccgccaagcgcatcgccatcgtcgccgccggcccgctgaccaacctcgcactggcggttttgctgtacggactgagcttttccttcggcgtaaccgaactgcgcccctacgtcggcacagtcgaacccgacaccattgccgcccgcgccggcttccaaagcggcgacaaaatacaatccgtcaacggcacacccgttgcagattggggcagcgcgcaaaccgaaatcgtcctcaacctcgaagccggcaaagtcgccgtcggcgttcagacggcatcgggcgcgcaaaccgtccgcaccatcgatgccgcaggcacgccggaagccggtaaaatcgcaaaaaaccaaggctacatcggactgatgccctttaaaatcacaaccgttgccggcggcgtggaaaaaggcagccccgccgaaaaagcaggcctgaaaccgggcgacaggctgactgccgccgacggcaaacccatcgcctcatggcaagaatgggcaaacctgacccgccaaagccccggcaaaaaaatcaccctgaactacgaacgcgccggacaaacccataccgccgacatccgccccgatactgtcgaacagtccgaccacaccctgatcgggcgcgtcggcctccgtccgcagccggacagggcgtgggacgcgcaaatccgccgcagctaccgtccgtctgttgtccgcgcattcggcatgggctgggaaaaaaccgtttcccactcgtggacaaccctcaaatttttcggcaaactaatcagcggcaacgcctccgtcagccatatttccgggccgctgaccattgccgacattgccggacagtccgccgaactcggcttgcaaagttatttggaatttttggcactggtcagcatcagcctcggcgtgctgaacttgctgcccgtccccgttttggacggcggccacctcgtgttttatactgccgaatggatacgcggtaaacctttgggcgaacgcgtccaaaacatcggtttgcgcttcgggcttgccctcatgatgctgatgatggcggtcgccttcttcaacgacgttacccggctgctcggttag

SEQ ID NO: 63215 - DNA, 891 bp, Neisseria meningitidis
gtgtctgaaattcatcaaatttattgggaggaatcgggcaatcctgacggtgtgccggttatttttttacatggcgggccgggcgcgggggcttcgcctgaatgtcggggtttttttaatcccgatgtgttccgcatcgtcatcatcgaccagcgcggttgcggacgttcgcgcccgtatgcttgtgcggaagacaatacgacttgggatttggtggcggatattgaaaaagtccgtgaaatgctgggtatcgggaaatggctggtgttcggcggttcgtggggcagcactttgtcgctggcttatgcccaaacccatccggaacgggtaaagggattggtgttgcgcgggatatttttgtgcaggccgtctgaaacggcgtggctgaacgaggcgggcggtgtgagccggatttatccggaacaatggcaaaaatttgtcgcgccgattgctgaaaatcggcggaaccggctgattgaggcgtatcacgggttgctgtttcatcaagatgaagaagtgtgcctgtctgccgcgaaggattgggcggattgggaaagctatctgatctgtttcgagccggaggaagtggatgaagatgcttatgcctcgctggcaatcgcgcgtttggaaaaccattattttgtcaacggcggctggttgcagggcgatagggcgattttgaacaatatcggcaaaatacagcatatcccgaccattatcgtgcaggggcggtatgatttgtgtacgccgatgcagagtgcgtgggcgctgtcgaaagcctttcccgaagcggaattgagggtggttcaggcagggcatcgtgcgttcgatccgcctttggtggatgcgttggttcaggcagttgaggatattttgccccatttgttgtaa

SEQ ID NO: 63216 - DNA, 1278 bp, Neisseria meningitidis
atgcgtagcagcgatattttaattgtagacgacgaaatcggcatccgcgacctgctgtcggaaatcctgcaggacgaaggttattcggtcgcattggcggaaaacgccgaagaggcgcgcaagctgcgccatcaggcgcgccccgcgatggtgctgctggatatttggatgcccgattgcgacggcatcacccttttgaaggagtgggcgaaaaacgggcagctcaatatgccggtggtgatgatgagcgggcatgccagcatcgataccgccgtagaagcgaccaaaatcggcgcgctcgactttttggaaaaaccgatttccctgcaaaagctgctgtctgccgtcgaaaacgcgttgaaacacggtgcggcgaaaatcgaaacgggaccggtgttcgacaagctgggcaacagtgcggcgattcaggaaatgaaccgtgaggtaggggctgcggtgaaacgtgcctctcccgtacttttgacgggcgaggcgggttcgccgtttgaaacggtggcacgctatttccataaaaacggtacgccgtgggtcagcccggcaagggtcgaatatctgatcgatatgccgatggaactgttgcagaaggcggagggcggcgttttgtatgtcggcgacatcgcccagtacagccgcaacatccaagccggtattgcctttattgtcggcaaggcggaacatcgccgcgtcagggtggtcgcatcgggcagcagggcggcaggttcagacggcatagcctgcgaggaaaagctggcggaactgctgtcggagtcggtcgtccgcattccgccgctgcgtatgcagcatgaagatattcccttcctgatacaggggattgcctgcaatgtggcggaaagtcaaaagattgcgcccgccgcattcagtgaagaggcacttgccgcattgacccgttacgactggccgggaaatttcgaccaactgcaaagcgtcgttgcaacgctgttgttggaggcggacggacaggaaatcggcgcggcggcggtttcttcccttttggggcagaatgtgcctgccgagggagcggaagatatggtgggcgggtttaatttcaacctgcccctgcgcgaattgagggaggaggtggagcggcgttatttcgagtaccacatcgcccaagaaggtcagaatatgagcaaagtggcgcagaaagtcggtttggaacgcacgcacctttaccgcaaactcaaacagctcggcatcggcgtttcgcgccgggcgggggaaaaaaccgaagaatag

SEQ ID NO: 63217 - DNA, 813 bp, Neisseria meningitidis
atggacaaaatcagagttgtcgccgtgcagatggtgtcgggcgtgtcgccggaaaccaacgtcgccgccatgaaacgcctggtcgcacgggcagcggagcagggtgcggattgggtgctactgcccgaatattgggtgctgatgggcgcaaacgataccgacaaactcgcgcttgccgagcctttgggcggcggacgctttcagacggcattgagcgaaacggcgaaagaatgcggcgtggtgctgtttggcggaaccgtgccgctgcaaagccccgaggcgggcaaggtcatgaatactttattggtgtacgggcgcgacggcaaacggacggggctgtaccacaaaatgcacctcttcggcttttccggtttgggcgaacgctatgccgaagccgataccatccgcgcgggcggggaagtgccgcacttgtcggcagaaggcgtgtcggtggcggcgggcatttgttacgatgtccgctttcccgaatttttccgccgccagctgccgtttgacgtattgatgctgcccgctgcgtttacgcacacgacgggcaaggcgcattgggagctgctgctgcgcgcgcgtgccgtcgaaaaccaatgttacgtcgtggcggcggcacagggcggtttgcacgaaaacggacggcgcacgttcggacacagcatgattgtcgatccgtggggcgacgtgttggacgtattgcccgaaggcgaaggcgttgttacggcagacatcgatgccaatcgcctgaacagcgtccgcaaccgcctgcccgccttgaaataccgggttttggatgccgtctga

SEQ ID NO: 63218 - DNA, 918 bp, Neisseria meningitidis
atggaaaaagcagaacatttgaacagcagccggttcgtcaatctggtcaaaagcggcggcggcagctatgtggagggcagctaccgtttcgatactttgtccaacggcatttccatccacggcggcacagtaacggcacggtgtgatttttgcagcagccgcctcgccgaaccttatgtgtcgttcgtgctcttgctggaaggcagtttggacttcggcatcaaccgctgccgcttccaaatcgatgcggacggcggcaagattgtcctaattgctgtcggggaagaagtcctgttcagccgctatctttaccgaggcggcaaaacggtcaaaatgaccattaaaggtatggaacaatggctgctgcgtccggaatacgcgcgtttcgcacccctgctttaccgcgaaccggtcaggatatgggatttgcccccgaacctgcgcggcttggcggcatcctgcctgaaagccgtcccaaaggggcatttgggcgaaacattgcgccgcgaggcggacgtgttgcggctgctgtcggacttgtgggacacggtttcagacggcatcgggccggcggcggggcaaacggcggaagcagacgctatgccgtctgaagacttcagccgcaccctaaatgccgcgtttgccgacggcgcacaccaagtcaaccggctgacagatgcgctgaacatcagcgaaaggacgctgcaacgccgtatgcgcgaccatttcggcattaccgcaagcgagtggctgcaccacaaacaaatgcagcacgcgctttatctgttgcaaaacgggggcaaaagcataggcgaaaccgcgtatttgtgcggctaccgccacgtttccagctttactcaggcattcaggcaatatttcggcagtacgcctgcggaaaccaaaaaagaaaaccggtaa

SEQ ID NO: 63219 - DNA, 1008 bp, Neisseria meningitidis
atgagcaccttcttccaacaaaccgcgcaagccatgattgccaaacacatcgaccgtttcccgctattgaagttggatcaggtaattgattggcagccgatcgagcagtacctgaaccgtcaaaaaaaccgttacctccgagaccaccgcggccgtcctgcctatcccctgctgtccatgttcaaagccgtcctgctcggacaatggcacagcctctccgatcccgaactcgaacacagcctcatcacccgcatcgatttcaacctgttttgccgctttgacgaactgagcatccccgattacagtactttatgccgttaccgcaattggctggcgcaagacgacaccctgtctgaattgctggaactgattaaccgacaactgaccgaaaaaggcctaaaaatagagaaagcatccgccgctgtcgttgatgccaccattattcagaccgccggcagcaaacagcgtcaggccatagaagtcgatgaagaaggacaagtcggcggccaaaccacaccgagtaaggataaagatgcccgttggacaaagaaaaacggcctctacaaactcggttacaaacaacatacccgtaccgatgcagaaggctatatcgagaaactgcacatcacccccgccaatgcccatgagtgcaaccacctgccgcctttgttggaaggactgcccaaagatacgaccgtctatgccgacaaaggctacgacagtgcagaaaaccggcaacatctggaagaacatcagttgcaggacggcattatgcgcaaaacctgccgcaaccgtccgctgacggaaacgcaaaccaaacgcaaccggtatttgtcgaagacccgttatgtggtcgaacagagcttcggtacgctgcaccgtaaattccgctatgttcgggcagcctatttcggactgattaaagtgagtgctcaaagccacctgaaagcgatgtgtttgaacctgttgaaagcggccaacaggttaagtgcgcccgctgccgcctaa

SEQ ID NO: 63220 - DNA, 408 bp, Neisseria meningitidis
atgacttataccactgccaaagccgccgaaaaaataggcatctccgcccacaccctacgtttttacgataaagaaggcttgttgcctaatatcggacgtgatgaatacggtaaccgctgttttaccgataacgatttgcaatggttgggcttattgcaatgcttgaaaaatacgggaatgagcttaaaagacatcaaacgctttgcggaatgtcccgtcattggcgacgataccattgaagaacgcctttccttgtttgaaaatcaaatagaaaatgtgaagtgtcaaattgccgaattaaaacgctatttagatttgcttgaatacaaattggcgttttaccaaaaagcgaaagcattaggttcggtaaaagccgtaaatttgccgcaaattcctgaaacggcttag

SEQ ID NO: 63221 - DNA, 798 bp, Neisseria meningitidis; identical to SEQ ID NO: 44377

SEQ ID NO: 63222 - DNA, 1059 bp, Neisseria meningitidis
atgattacaccgcaacaggccatcgaacgattaatcagcaataacgagttgttttacgatgaaatgaccgacttgatgcgtcagattatgagaggacaggttctgccggagcagatagcggccattttgacaggattgcgtatcaaggttgaaaccgtttccgaaattaccgcagctgcagccgtcatgcgcgagtttgcgacaaaagtgccgctggagaatgcagaggggctggtcgatatcgtcggtacgggcggggatggcgcgaaaaccttcaatatttcgacgacttcgatgtttgttgccgcagcggcaggcgcgaaggttgccaaacacggaggccggtcggtctcttcctccagcggtgcggctgacgtggtggagcagatgggcgcaaacctcaacctgactcccgaacaggttgcccaaagtatcagccagaccggtatagggtttatgttcgcccccaatcaccacagtgccatgcgccatgtcgccccggtacgccgttcgctcggtttccgaagcattttcaacatattgggtccgttgaccaatcctgcgggcgcgccgaaccagcttttgggcgtgttccacaccgatttgtgcggcattttgtcgcgggtcttgcaacaactcggttcaaaacacgttttagtcgtttgcggggagggcggtttggatgaaattacactgacgggcaaaacgcgcgttgccgaactcaaagacggaaaaatcagcgaatacgacatccgcccagaagatttcggtatcgaaacccgccgcaatttggatgaaatcaaagttgccaatactcaggaatctttgttgaaaatgaatgaggtgctggatgggaaagaaggggctgcgcgcgatatcgtattgcttaataccgccgccgccctatatgccggaaatgtcgctgcttcgctttcagacggcatatctgccgcacgggaagccatcgattcaggcagggccaaatcgaaaaaagaggagtttgtcggttttcaaccacaacaaagatgccattttcttggaaagatggagcttgggtga

SEQ ID NO: 63223 - DNA, 1569 bp, Neisseria meningitidis; identical to SEQ ID NO: 36917

SEQ ID NO: 63224 - DNA, 342 bp, Neisseria meningitidis; identical to SEQ ID NO: 39758

SEQ ID NO: 63225 - DNA, 648 bp, Neisseria meningitidis
atgaaaggcgtttacttcgtcagcggcattgatacggacatcggcaaaaccgtcgccaccggcgtattggcaaaacaattgttgcagcagggcaaaagcgtgattacgcaaaagcccgtgcaaaccggttgccaaaacattgccgacgacatcgccgtccatcgtaaaattatgggcataccgatgcaggaagccgacaaacggcggctgaccatgcctgaaatcttcagttatccagcttcgcctcatctcgctgcccgactggacggcagggctttggacttggacaaaatccgcaccgccacacaagaattggcggcgcagtacgaagtcgttttggtcgaaggcgcgggcggattgatggttccgctgacggaaaagctgttaaccattgattatatccgtcagcaaggctatcccgtcattctcgtaacgagcggacggctgggcagcatcaaccacaccttactcagtttcgccgcgctcaaacaatacggcattcgcttgtacagcctcgtgttcaaccacatccacgacagccgcgacgcacacatcgcccaagacagcctgaactacttgaaatgccgtctgaaagccgatttttccgaagcggaatggatggagttggcaaaaacagacgcggtataa

SEQ ID NO: 63226 - DNA, 486 bp, Neisseria meningitidis
atgatacaaatcggcatcatcatgggcagcaacagcgattggcccgttatgcggcaggcagcgcagtttcttgaagagttcggcgtagaatatgaggcgcgcgttgtttccgcacaccgcaccccggatttgatgttccaatacgccgaaaccgcacgggcgcgcggcatcaaagccatcatcgcgggcgcgggcggtgcggcgcatttacccggtatggttgccgccaagaccaccgtccccgttttgggcgtacccgtccccagcaaatacctgcgcggcgaagattcgcttttatcgattgtacaaatgcccaaaggcgtacccgtcgccacattcgccatcggcgaggcaggcgcggcaaatgccgcattgttcgccgtttccatgctggccaacgaaaaccccgaactggcgcaaaaactggcagacttccgagccaaacaagaacagactgttttgaatatggaattggaacagatttaa

SEQ ID NO: 63227 - DNA, 4365 bp, Neisseria meningitidis
atgaaaacaaccgacaaacggacaaccgaaacacaccgcaaagccccgaaaaccggccgcatccgcttctcgcctgcttacttagccatatgcctgtcgttcggcattcttccccaagcttgggcgggacacacttatttcggcatcaactaccaatactatcgcgactttgccgaaaataaaggcaagtttgcagtcggggcgaaagatattgaggtttacaacaaaaaaggggagttggtcggcaaatcaatgacaaaagccccgatgattgatttttctgtggtgtcgcgtaacggcgtggcggcattggtgggcgatcaatatattgtgagcgtggcacataacggcggctataacaacgttgattttggtgcggaaggaagcaatcccgatcaacatcgttttacttataaaattgtgaaacggaataattataaagcagggactaacggccatccttatggcggcgattatcatatgccgcgtttacataaatttgtaaccgatgcagaacctgttgaaatgaccagttatatggatgggcggaaatatatcgatcaaaataattaccctgaccgtgttcgtattggggcaggcaggcaatattggcgatctgatgaagatgagcccaataaccgcgaaagttcatatcatattgcaagtgcgtattcttggctcgttggtggcaatacctttgcacaaaatggatcaggtggtggcacagtcaacttaggtagtgaaaaaattaaacatagcccatatggttttttaccaacaggaggctcatttggcgacagtggctcaccaatgtttatctatgatgcccaaaagcaaaagtggttaattaatggggtattgcaaacgggcaacccctatataggaaaaagcaatggcttccagctggttcgtaaagattggttctatgatgaaatctttgctggagatacccattcagtattctacgaaccacgtcaaaatgggaaatactcttttcacgacaataataatggcacaggaaaaatcgacgccaaacatgaacacaattctctgcctaatagattaaaaacacgaaccgttcaattgtttaatgtttctttatccgagacagcacaagaacctgtttatcatgctgcaggtggtgtcaacagttatcgacccagactgaataatggagaaaatatttcctttattgacgaaggaaaaggcgaattgatacttaccagtaacatcaaccaaggtgctggaggattatatttccaaggagattttacggtctcgcctgaaaacaacgaaacgtggcaaggcgcgggcgttcatatcagtgaagacagtaccgttacttggaaagtcaatggcgtggcaaacgaccgcctgtccaaaatcggcaaaggcacgctgcacgttcaagccaaaggggaaaaccaaggctcgatcagcgtgggcgacggtaaagttattttagatcaacaagcagatgaaaataataaaaaacaagcctttagtgaaatcggcttggtcagcggcaggggtacggtgcaactgaatgccgataatcagttcaaccccgacaaactctatttcggctttcgcggcggacgtttggatttgaacgggcattcactttcgttccaccgtattcaaaataccgatgaaggggcgatgattgtcaaccacaatcaagacaaagaatccaccgttaccattacaggcaataaagatattgctacaaccggcaataacaacagcttggatagcaaaaaagaaattgcctacaacggttggtttggcgagaaagatacgaccaaaacgaacgggcggctcaaccttgtttaccagcccgctgcagaagaccgcaccctgctgctttccggcggaacaaatttaaacggcaacatcacgcaaacaaacggcaaactgtttttcagcggcagaccaacaccgcacgcctacaatcatttaaacgaccattggtcgcaaaaagagggcattcctcgcggggaaatcgtgtgggacaacgactggatcaaccgcacatttaaagcggaaaacttccaaattaaaggcggacaggcggtggtttcccgcaatgttgccaaagtgaaaggcgattggcatttgagcaatcacgcccaagcagtttttggtgtcgcaccgcatcaaagccacacaatctgtacacgttcggactggacgggtctgacaaattgtgtcgaaaaaaccattaccgacgataaagtgattgcttcattgaccaataccgacatcagcggcaatgtcagccttgccgatcacgctcatttaaatctcacagggcttgccacactcaacggcaatcttagtgcaaatggcgatacacgttatacagtcagccacaacgccacccaaaacggcgaccttagcctcgtgggcaatgcccaagcaacatttaatcaagccacattaaacggcaacacatcggcttcgggcaatgcttcatttaatctaagcgaccacgccgtacaaaacggcagtctgacgctttccggcaacgctaaggcaaacgtaagccattccgcactcaacggtaatgtctccctagccgataaggcagtattccattttgaaagcagccgctttaccggacaaatcagcggcagcaaggatacggcattacacttaaaagacagcgaatggacgctgccgtcaggcacggaattaggcaatttaaaccttgacaacgccaccattacactcaattccgcctatcgccacgatgcggcaggggcgcaaaccggcagtgcgacagatgcgccgcgccgccgttcgcgccgttccctattatccgttacacctccggcttcggtagaatcccgtttcaacacgctgacggtaaacggcaaattgaacggtcagggaacattccgctttatgtcggaactcttcggctaccgcagcgacaaattgaagctggcggaaagttccgaaggcacttacaccttggcggtcaacaataccggcaacgaacctgcaagcctcgaacaattgacggtagtggaaggaaaagacaacaaaccgctgtccgaaaaccttaatttcaccctgcaaaacgaacacgtcgatgccggcgcgtggcgttaccaactcatccgcaaagacggcgagttccgcctgcataatccggtcaaagaacaagagctttccgacaaactcggcaaggcagaagccaaaaaacaggcggaaaaagacaacgcgcaaagccttgacgcgctgattgcggccgggcgcgatgccgtcgaaaagacagaaagcgttgccgaaccggcccggcaggcaggcggggaaaatgtcggcattatgcaggcggaggaagagaaaaaacgggtgcaggcggataaagacagcgccttggcgaaacagcgcgaagcggaaacccggccggctaccaccgccttcccccgcgcccgccgcgcccgccgggatttgccgcaactgcaaccccaaccgcagccccaaccgcagcgcgacctgatcagccgttatgccaatagcggtttgagtgaattttccgccacgctcaacagcgttttcgccgtacaggacgaattagaccgcgtatttgccgaagaccgccgcaacgccgtttggacaagcggcatccgggacaccaaacactaccgttcgcaagatttccgcgcctaccgccaacaaaccgacctgcgccaaatcggtatgcagaaaaacctcggcagcgggcgcgtcggcatcctgttttcgcacaaccggaccgaaaacaccttcgacgacggcatcggcaactcggcacggcttgcccacggcgccgttttcgggcaatacggcatcgacaggttctacatcggcatcagcgcgggcgcgggttttagcagcggcagtctttcagacggcatcggaagcaaaatccgccgccgcgtgctgcattacggcattcaggcacgataccgcgccggtttcggcggattcggcatcgaaccgcacatcggcgcaacgcgctatttcgtccaaaaagcggattaccgctacgaaaacgtcaatatcgccacccccggccttgcgttcaaccgctaccgcgcgggcattaaggcagattattcattcaaaccggcgcaacacatttccatcacgccttatttgagcctgtcctataccgatgccgcttcgggcaaagtccgaacgcgcgtcaataccgccgtattggctcaggatttcggcaaaacccgcagtgcggaatggggcgtaaacgccgaaatcaaaggtttcacgctgtccctccacgctgccgccgccaaaggcccgcaactggaagcgcaacacagcgcgggcatcaaattaggctaccgctggtaa

SEQ ID NO: 63228 - DNA, 435 bp, Neisseria meningitidis
atggaaaaattcaacaatattgcacaactgaaagacagcggtctgaaggttaccggcccgcgtttgaagattttggatttgttcgagacgcatgcggaagagcatttgagtgcggaagatgtgtaccgcattttgttggaagagggtgtggaaatcggtgtggcgacgatttaccgtgtgctgacccagtttgagcaggcgggtattctgcaacgccatcattttgaaacgggcaaggcggtttatgagttggacaaaggcgaccaccatgaccacatcgtctgcgtgaagtgcggcgaggtaacggaattccacaatcccgaaatcgaagccctgcaagacaaaatcgctgaggaaaacggctaccgcatcgtcgatcacgcgctttatatgtacggcgtgtgcagcgactgtcaggccaagggcaaacgttaa

SEQ ID NO: 63229 - DNA, 1215 bp, Neisseria meningitidis
atgaccgtcaaaacccccgtttacctcgactacgccgccaccacccccgttgacaaacgcgttgccgaaaaaatgattccctatctgaccgaaactttcggcaaccccgcctccaacagccacgcattcggctgggaagcagaagaggccgtcgaaaaagcccgcgccgacatcgctgccctgattaatgccgactccaaagaaatcgtcttcaccagcggcgcgaccgagtccgacaacctcgccatcaaaggcgcggcaaacttctacaaaaccaaaggcaaacacctcatcaccgtcaaaaccgaacacaaagccgttttagatacaatgcgcgaactcgaacgccaaggttttgaagtaacctacctcggcgttcaagaaaacggtttgattgatttggaagaactcaaagccgccatccgcgacgacaccatcctgatttccgtaatgtgggcaaacaacgaaatcggcgtggtgcaagacattcccgccatcggcgaaatctgccgcgaacgtaaaatcgtcttccacgtcgatgccgcccaagcctgcggcaaagtgcctgtcgatgtcgaagccgccaaaatcgacctgctctcgatgtccgcgcacaaagtgtacggccccaaaggcatcggcgcgctgtacgtccgccgcaaaccgcgcgtccgcctcgaagcccaaatgcacggtggcggccacgaacgcggcttccgcagcggcacattaccgacccaccaaatcgtcggtatgggcgaagccttccgcatcgccaaagaagaactcgaacaagatatggcgcactaccgcaaactgcgcgacatcttcctcaaaggcatcgaaggcatcgaagaagtctacatcaacggcgacctcggacaccgcgccccgaacaacctgaacgtcagcttcaacttcgtcgaaggcgaaagcctgattatggcggtgaaagaactcgccgtatccagcggctccgcctgcacctccgcctcgctcgaacccagctacgtcctgcgcgcgctcggccgcaacgacgaactggcgcactcatccctgcgtatcaccttcggtcgcatgaccagcgaagaagaagtgcaattcgccgccgaactgattaaatccaaaatcggcaaactgcgcgaactgtcgccgctgtgggaaatgtttaaagatgggattgatttgaactcgattgaatgggcggcgcattaa

SEQ ID NO: 63230 - DNA, 726 bp, Neisseria meningitidis
atggattttctctcttgttggcggcgcatcgcagacgcgcccactatcaggcgttgcgtattatgccacggttcgtccggcgtttcagacggcatctgcgccggctgccgcgacgatttggcggcataccgcaccgacgcggcaaacagctgccccctgtgtttcatgcacgttcaaggcggcgcggtgtgcggcggctgtcagaaaaaaccgcccgcattcgaccggatgtgggcttcgctgcattacgaaccgcccgtcagcaatatgatacacgcgctgaagcacttggctgatttgagcatggtgcagccgctggcagacctgatgatgcagaatccgcccgaccggcttgcagacgaatgtttcgatttcgtcctgcccgtaccgctaagcagggagcggctgctgcaacgcgggttcaaccaaagtgaaagcatcgtcgggctgctggctcaacgctacggttggcgcacgctgcccctgcataccgtattccgccgccaccggccgccgcaaagcacgctcaaaggcggcgaacgcctgaaaaacatcaaaaacgcctttgaaatccgcgaaccgctgccgaaaggctgtaatattttgttaatcgacgatgtctttaccaccggcgcgacgctggacgaattggcgaagatgctgaaaaaatcgggcgcaaaccgaatctgctgctggacgctggcacgcacgccaatgaaaaaataa

SEQ ID NO: 63231 - DNA, 339 bp, Neisseria meningitidis
atgaaaaaaatcgaggcgattgtcaaaccgttcaaactcgacgacgtgcgcgaggcgttgacggaaatcggcattacgggcatgaccgtcagcgaggtcaaagggttcggcaggcagaaggggcatacggaaatctatcgcggcgcggaatacgccgtcgatttcctgcccaaaatcaaaatcgagctggtgttggcggatgacgccgtggaacgcgcgattgacgtgattgtcgaggtggcgcgttcgggaaaaatcggcgacggcaagatttttgtgctgccggtcgaggaggcaatccgtatccgcacgggcgaacgtgcggacgcagcggtttga

SEQ ID NO: 63232 - DNA, 441 bp, Neisseria meningitidis
atgaacatccgccgcgcctcaccgtccgactgcgccgcactcgccgcgctcgatgccgtctgcaacccgtccgcgtggacgcaacgccaatttgagtccgcattggtttcgccgtccgaacaggttttcctcgcggaaaaagacggcgggattgccgcctttatcgtttggcagaacctgcccgacgaatccgaactgcacctgattgccaccgcgcccgaatgccgccgccgtggcgttgcgtccgccctgctcgaatattggttcgccaacctgcccgaaggcacgcaacgcctgctgctcgaagtccgcgcaggcaacaccgccgcacaggcactgtacgcggcgcacggcttcagcattgcgggcaggcggaaaaactattaccgtacagccgacggtaaaaccgaagatgccgtcttgatggagaaaatatgttaa

SEQ ID NO: 63233 - DNA, 1935 bp, Neisseria meningitidis; identical to SEQ ID NO: 60422

SEQ ID NO: 63234 - DNA, 1218 bp, Neisseria meningitidis
atggcgttaatcgtacacaaatacggcggcacatccgtaggctcgcccgaacgcattaaaaacgtggccaaacgtgtcgccaaagcccgcgccgaaggacacgacatcgtcgtcgtcgtatccgccatgagcggtgaaaccaaccgcctggtcgcgttggcgcacgaaatgcaggagcatcccgatccgcgcgaattggacgtggttttgtccaccggcgaacaagtaaccatcggccttttggcgatggcattgaaagacatcggcgtggatgccaaaagctacacaggctggcaggtcgccctcaaaaccgataccgcccacaccaaagcccgcatcgaaagcattgatgacgaaaaaatgcgtgccgaccttaccgccggcaaagtcgtcatcgttgccggcttccaaggcatcagcagtgaaggcgatatttccacgctcggacgcggcggttccgacacttccgccgttgcgcttgccgcagccctcaaagcggacgaatgccaaatctataccgacgtggacggcgtgtacaccaccgatccgcgcgtcgtacccgaagcgcgccgcatggatacggttacatttgaagaaatgatcgaattggcaagcctcggctcgaaagtcttgcaaatccgttcagtagaattcgccggaaagtacaaagtgcgcctgcgcgtactgagcagcctgcaagacggcggcaatggcaccttaattacctttgaagaggacgacaacatggaaagagctgccgtaaccggtatcgcattcgataaaaaccaagcccgcatcaacgtgcgcggcgtacccgacaaacccggtgtcgcctatcagattttgggcgcggtcgccgatgccaacatcgaagtcgatatgattatccaaaatgtcggcagcgaaggcacaaccgatttttcctttaccgtaccgcgcggcgattacaagcagactttggaaatcctgtcggaacgccaagacagtatcggcgcggcttctattgatggcgacgacaccgtatgcaaagtctccgcagtcggtttgggtatgcgttcgcacgtcggtgtagccgccaaaatcttccgcacgctcgccgaagagggtatcaacatccaaatgatttccacctccgaaatcaaagtttccgtattgattgatgaaaaatacatggaactggcaaccagggtattgcataaagcctttaatttgggctga

SEQ ID NO: 63235 - DNA, 1701 bp, Neisseria meningitidis
gtgcagagtctcaaagccgaaggtgtcgagtacgttttcggttatcccggcggtgcggttatcgaaatctacgatgcccttttccaactcaataaattcaaacacattcttacccgccatgagcaggcggcagtacacgcggcagatgcgtatgcgcgcgtcagcggtaaggtgggcgtggcattggttacatccggcccgggcgttaccaatgcactgaccggtattgctactgcctatacggattcgattccgatggtggtcatcagcgggcaggtaggcaattccctgattggtacggatgcgttccaagaagttgatacggtgggtattacccgtccgtgcgtcaaacacaatttcctggttacggacatcaatgagttggcggaaaccattaaaaaggcgttccaaattgccgcaagcggccgaccggggcccgtggtggttgatgtcccgaaagatgttacgcaggcgatggcgaaattcagctatcctcaggaagacatttttatccgttcgtatcaaccggttgttcaaggacatatcggtcagattaaaaaggccgtgcagatgttggcatctgccaaacgtccggtcgtctattttggcggcggcgtggtgttgggtaatgcttctgaagagctgacccgatttgtccgaatgacgggtgctccgtgcacgggtacgctgatgggcttgggcgcttatccttccggcgaccgccaattcctcggtatgctcggtatgcacggtacttacgaggcaaaccttgccatgcagaatgcggatgtcgttcttgccgtaggtgcgcgttttgacgaccgtgtggtttccgtaccgtccaaatttttcgagaaggcgaagaaggttatccatatcgatgtcgatccttccagcatcgccaaacgcgtgaaggtggacattccgattgtcggcgacgtgaaaaacgttttgtccgagatggttgcgctgtggcaaaaacaagagtccgtgccgtctgaagatgctttgggcaaatggtggaaaaccatagaggaatggcgttcccgagattgcttgtggtttgacaacggcagcgaaattatcaagccccaatatgtgattcagaagcttgccgagattaccggcaattcggcaatcatcacatcggatgtagggcagcatcaaatgtttgcggctcaatattatcccttcgaacgtccgcgccaatggctcaattccggcggtttgggtacgatgggcgtgggtctgccttatgcgattggtgcaaaacttgccgccccggatcaagacgtattctgtattaccggcgacggctcgatccagatgaacatccaagagctgtccacctgtttccaatatcggattccggttaacgtcattacgctgaacaacggttatcttggtatggtacgccagtggcaggaaatatattacggcggtcgagagtcggaaacctatttcgattctttgcccgatttcgtcaaacttgccgaggcatacggccatatcggtatccgcgtggacaagaagtctgatgtggagggtgccttgttggaagcattgaaccaaaaagacaggctggtgtttatcgacttcctgactgaccagaaacagaatgtgatgcctatggtcggcaacggcaaaggtttggacgaaatggtacttccgccgcatatgcgtgcggacggaaaggcgtaa

SEQ ID NO: 63236 - DNA, 588 bp, Neisseria meningitidis
atgccgctacccgacctgaccgatgccgaattaatagagtcgcgtaaactgcttctgcattttgcgcggcttcaattgcccgaccaccctgatttggctgaagatttagtgcaggaaacattgctgtccgcatacagcgcaggcgacaattttcaaggcagggcacttgtcaacagctggctttttgccatattgaaaaacaaaattattgacgcattacgtcaaatcggaaggcagaggaaagtctttaccacactggatgacgagctgctggatgaagcatttgaaagccatttttcccaaaacgggcattggacgccggaagggcagccgcaacattggaacactccggaaaaatcattaaacaacaacgaattccaaaaaattctgcaaagctgcctatacaacttgcctgaaaacaccgcacgggtatttaccctgaaggaaatactcggtttttcatccgacgaaatacaacaaatgtgcggtatcagcacgtccaactaccacaccattatgcaccgcgcccgagaatcattgcgccaatgcctgcaaatcaaatggttcaaccaagaaaacccgaagtaa

SEQ ID NO: 63237 - DNA, 1188 bp, Neisseria meningitidis
atgaataccttactcaaccaactcaaaccctatccctttgcccgactgcgtgaagcgatgcagggcatttccgcccccgaaggtctggaagccgtcccactgcatatcggcgaaccgaaacatccaacaccgaaagtcattacagatgcgctgaccgcctcattgcacgagttggaaaaatatccgctgacggccggtctgcctgaactgcgtcaggcgtgtgcaaactggttaaaacgccgttacgatggcttgacagtggatgcggataatgaaattctgccggttttaggcagtagggaggcgttgttttcttttgttcaaaccgtgttgaaccctgtttcagacggcatcaaacccgcaattgtcagcccgaatcccttttatcagatttacgaaggtgcgacacttttgggcggcggtgaaatccattttgccaattgccccgcgccgtctttcaaccccgattggcgtagtatttccgaagaggtttggaaacgcaccaaactggtgttcgtctgctcgcccaacaaccccagcggcagcgtgctggatttggacggatggaaagaaatttttgatttacaggataaatatggtttcattattgcctcggatgaatgctattccgaaatctatttcgacggcaacaaacctttaggctgcctgcaggccgctgcacagttgggtcgaagcaggcaaaaactgcttatgttcaccagtttgtccaagcggtccaatgttccaggtttgcgttccggttttgtcgccggcgatgccgaactgcttaaaaactttctgctttacagaacctatcacggcagcgcaatgagcattcccgtgcagcgtgccagtattgccgcttgggatgacgaacagcacgttatcgacaaccgccgcctgtatcaggaaaaatttgagcgcgttattcccattttgcaacaggtatttgatgttaaattaccggatgcctcgttttacatctggttgaaagttcccgatggcgacgatttggcatttgcacgcaatttatggcaaaaagccgctatccaagtattgcccggacgctttttggcacgggataccgaacagggcaatcccggggaaggttatgtgcgtatcgctttggttgccgatgtcgcaacttgtgtcaaagctgcggaaaccattgtttccctatatcggtaa

SEQ ID NO: 63238 - DNA, 645 bp, Neisseria meningitidis
gtgcttgcctccgccatcgacttcatcctccatatcgaccaacacctgcttgcgctgtcggcgcaatacggtgtgtggatttatgcgattctgtttttgattgttttttgcgaaaccggcctgattgttacgcccttactgcccggcgattcgctgctgtttgccgccggcgggattgccgcgctgggcggtatggatattcatttgatggttgcattattaagccttgccgccatactcggcgacgcgctcaattttaccgtcggcaaatatttcggcggcaggctgttcgccaaccccgattctaaaatcttccgacgcgaatatctcgataaaacccaccgtttttacgaaaaacacggcggcaaaaccatcatcattgcccgttttgtacccatcgtccgcaccttcgccccctttgtcgctggtatggggaaaatgcactatgccaaatttatccgctacaacatcatcggtggcttgttgtgggttatcctgttttcttacgcgggctatttctttgccaacttccccgtcgtaaaaaacaatctgggcttggtgatgggcggcatcattattgtttccgtcctgccgggtgcggttgaaattgcccgcgccaaacttgcggtaaaatccaaacggtaa

SEQ ID NO: 63239 - DNA, 744 bp, Neisseria meningitidis
atgttaagcgcgcgctacctccacctgcacgaagccttgggtttgggcccgatgtggttgaagcggggagccgttgtcctgccgtcagcaacattaccggaaagcccgacacaaatccgcccgcaaaagcaaaccgtcctcagcattccgcagcgtccgtccgaacagcataccggtcaggcacggctcgaaacgatgaaagcgttggaaaccgccgccgtacctacgcgcaaacccgcgcctgaaaccgaaacgcctctgtccggcgtttcagacggcatcgcccccgttcccgccgcttcgggcataaccaaacttgccgtcgtcagcctttgcccaccgattgaggatgcggtttacgggcaactgttctacggcaaagcgggtgttctgcttgacaacatactcaaagccgtaggactggatgccgcctatgtccacaaaacctgttgggtgaaaaccgccgccgtcggcaacccgatgccgtctgaagcggcaatcgaaaccgcgacggtttccgtcatgcaggaactcgacggctgccgcgcccccgccgtcctattcctcggacaggcttttgtccagcctgaacggcaaacgatgattgaaactttgtgcggcagccgtcccttcttcatcatcgaccatcccgcccggctgttgcgccaacccgaacttaaagcccgcgcctggcaggtgttgaaacagttgaaacgcgccttgcggcaaggcggcggcagttga

SEQ ID NO: 63240 - DNA, 606 bp, Neisseria meningitidis
atgattttgctgcatttggattttttgtctgccttactgtatgcggcggtttttctgtttctgatattccgcgcaggaatgttgcaatggttttgggcgagtattatgctgtggctgggcatatcggttttgggggcaaagctgatgcccggcatatggggaatgacccgcgccgcgcccttgttcatcccccatttttacctgactttgggcagcatattttttttcatcgggcattggaatcggaaaacagatggaaacggatggcaggcagaccccgaacatccgctgctcgggctttttgccgtcagtaatgtatcgatgacgtttgcttttgtcggaatatgtgcgttggtgcattattgcttttcgggaacggttcaagtgtttgtgtttgcggcactgctcaaactttatgcgctgaagccggtttattggttcgtgttgcagtttgtgctgatggcggttgcctatgtccaccgctgcggtatagaccggcagccgccgtcaacgttcggcggctcgcagctgcgactcggcgggttgacggcagcgttgatgcaggtctcggtactggtgctgctgctttcagaaattggaagataa

SEQ ID NO: 63241 - DNA, 228 bp, Neisseria meningitidis; identical to SEQ ID NO: 53211

SEQ ID NO: 63242 - DNA, 420 bp, Neisseria meningitidis
atggacaataagaccaaactgcgcttgggcggcctgattttactgaccaccgccgttttaagcctcattatcgtattgattgtcgattcctggccgcttgccatcctgcttgcagccgtcatcgtcgctgccgctgcgggcggttttgtttggacatcccgccgacagcaacgccagtttatcgaacgcctgaaaaaattcgacatcgatcccgaaaaaggcagaatcaacgaggcaaacctgcgccgtatgtaccacagcggcggacaacaccagaaagatgcgattaccctgatctgcctgtcgcaaaaatgttcggtggacgaggcgcacgctatgttcaaaaaacgcccgacacgtcaggaaatcaatcaaatggcggcaaaacagtcgcgcggtcagaaacgtccgcaccgttaa

SEQ ID NO: 63243 - DNA, 1356 bp, Neisseria meningitidis
atgtctgatttttttcattctgacgtgttgtccgtttccgagttgaacgcatttgccaaaagtattttggaaaaccaccttgccggtttgtggattgccggcgaagtgtccaacctgacccgtgccgccagcgggcattattatttctcgctcaaagacagccgcgcgcaggtgcgttgcgcgatgttcaaaggtgcggcggcgcgtttggcgaagcctttgaaagaaggcgatcatatcgaggtatcaggaaaaatcagtatttacgaggcgcggggcgaatttcaaattaccgtaaacgaagtacggctcaaaggtttggggcagctttacgaagcctatgagcggttgaaggcgcagttgcaggcggaaggcgcgtttgcggcggaacgcaaaaaacctctgcctgcccgaccgcaatgtatcggcatcgtaaccagtttggcggcggcggcattgcgcgatgttgtaaccaccttgaaacgccgcgcgcccgaaattcccgtcatcgtttatccgaccgtcgttcaaggcacaggcagcgagttgcaaatcgcacaagtgattaaaaccgcatcgcaacgcgccgaatgcgatgtgttgattgtctgtcgcggcggcggcagcattgaagatttgtgggcgtttaacgaagaaccggtcgtacgcgcaatcgaagcctgcacgattccggtcgtcagcggcgtaggccacgaaaccgatttcacgcttgccgattttgttgccgacgtacgcgcaccgacaccgaccggtgcggcggagctggtcagccccaaccgccaagaatcgctacatcgtctcgctcaggcgcaaggccgtctgaaaaccgttttggaacaacgctatttcgatgccagccaaaaactcgactggctggcgcggcaaatccgtcatccgcgccaaaaactcgacgaacagcgcacctacatccacaaactggcgcaaacgctgtcttactcgatgacgcaaaacctccgcgcccacgccgcccgtttcgaacgccaaacccaagccctgcaacattaccgtcctgatatttccgtttgcaaaaaaaacatcgaccgctttcagacggcattgcccgccgccttcagccaattgctcgcccgccgccgccaaagcctgagcgcccaagcagcattgctcgaagccgtttcgccgcagcacattctggagcgcggcttttccgtcgtcaaaaacacacgcggacaagtcatccgcaacgccgatgttttgaagcaggggcagaagctgcacattatcttcgccgacggcgaaaccgacgtgcgcgtaagcaaagaacaagggcagcaggatttgttcgattgcatttaa

SEQ ID NO: 63244 - DNA, 816 bp, Neisseria meningitidis; identical to SEQ ID NO: 40607

SEQ ID NO: 63245 - DNA, 252 bp, Neisseria meningitidis
atgggcagcatcgaacagcgtttggaatatctggaagaggcgaacgacgtgctgcgtatgcagaaccacgtcctgtccaccgcattcaaagccttaatccgcgcccttcccgccgaaaccgccgaagtcgcggtcgagtcgattcagcttgcttttgaggacgccttggcagaattgagctatgaggacagcccgcatacggatttgttccacgacgttacttatgcgtttttccgtgaaaaagaacgttaa

SEQ ID NO: 63246 - DNA, 1125 bp, Neisseria meningitidis
atgaccgcaaccactgcgtcttcagccaaaccttatctcaaaatccaaggtttggtgaaaaagtttggtgacaattacgctgtcgataacatcgacttggacatttatcaacacgaaatcttcgcccttttgggcagttccggcagcggaaaatctacactgctgcgtatgctggcgggtatggaaagtcccaatcagggaaaaattatccttgatggtcaggatattaccaaacttgcaccctatgatcgccccatcaatatgatgttccaaagttacgcgctttttccgcatatgaccgtagaacaaaacattgccttcggtctgaaacaggacaaaatgcctaaaggtgaaatcgccgcgcgcgtcgaagaaatgctccgcctggttcagatgaccaaatttgctaaacgcaaaccgcaccaattgtccggcggtcagcagcagcgcattgctttggcacgcagtctggcaaaacgtccgaaaattctactgctggatgagcccctcggtgcattggacaaaaaactgcgccaacaaacccagcttgagttggtcaatacgctggaacaagtcggcgtaacctgtattatggttacgcacgaccaagaagaggcgatgacgatggcgacccgcatcgccattatgtctgacggtcagttgcagcaagtcggcacacccagcgacgtgtacgactatcccaacagccgcttcactgccgagtttatcggcgaaaccaacatctttgacggtgtggtgattgaagatcatgccgactatgccgttatcgaatgcgaaggtttggaaaaccacgtccgcatcgatcacggtttgggtggtccgagcgagcaggacctttgggttagtattcgaccagaggatattgatttatataaagaaaaacccgaatatttgggcgactacaactgggcgaaaggcacggtaaaagaaatcgcctatttgggcagcttcgccatttaccatatcaaactcgccaacgggcgcgtcgtcaagagccaagtccccgccccttactggtatgtgtgcaacattacaccgccaacttgggacgaaaccgtctatatcagctggccggaaaaccaaccgactccgttgttccgttga

SEQ ID NO: 63247 - DNA, 1005 bp, Neisseria meningitidis
atgtcgggcgcggctgccgcgctgcttgccggcatcatcctttatttcaaaagcgacaagaagcggcaggaaaacggtgaatggagttccggcctcgaatacgcctatatcctgacagcggtcggcgtgtttgccgctttgtccctgtttatgagctttaccgccgttttcctgattttcgttgtattgtgcggtacggcttggggggtatacaaataccgcctgaagactcatcccgaaatctcggaaagcagccacttcggcgattatttcggcagtttcttccctaccgttttggtattgtttctcatccggtcgtttattgccgaaccgttccaaattccatccagctccatgcgcccgggcctgattaagggcgatttcattttggtcggcaaattttcctacggcctgcgcgtacccgttttaaacaatgtattcatccccacgggcaaaatcgaacggggcgatgtggtcgtttttaattatcctttgcaaccggagatgacctacatcaagcgtattgtcggcattccgggcgatgtggtcgaatatcggaataaagttttgacggtaaacggaaaacctgcttccgatattcctgacggcacataccgttatcccgacgacaccgacccatccgaaatccacaatacggatatgttccacagcggtttggacggcaaatccttcaatattctgaaaaaagaaggacagcctgccgtttccctgcccgtattgggcaaatatacctccgatattatgtctgaaaacggatattccatagagcaaagcggtttggaacactgccaatatgccgacgacggcagcggtttcgtgtgcaaagttcccgaaggacgctatttcgctatgggcgacaaccgcgacaacagtgccgattcgcgctactggggatttgtggatgacaagctggttgtcggcaaggcaatgttcattttgatgaacttcggcgatttcggcagggccggtacggcaatccgttag

SEQ ID NO: 63248 - DNA, 504 bp, Neisseria meningitidis
atgtcagaccctaatttgattgacccagaagttttcgccgccgaagggcagaacctgcaaggcagttttctgctggaagaattggatgaacgcgtcagttcgcacgattatcccgccgacaggcagaccaaaatatcgtttacactgaccggcggtcgcgaccggctgcaacgcctgttcctcgacctgaacgtcaaagccgatatgcccctgatttgccagagatgtatcaaacccatgccgttcatgcttgatgaaagcagccgtatcgtcctgttttccaacgaagagtccttggacgaatccatgcttgccgacgaagaactcgaaggcatactgattgaaaaagaactcgacatgcgcacattggtagaagaccaaatcctgatgtccctgcccttttcgccgcgacacgaagactgcggcgacaatgggacactggaagaagtcaatcgggacaaacccaacccctttgctgttttggcaggtttgaaaagcagttaa

SEQ ID NO: 63249 - DNA, 1377 bp, Neisseria meningitidis
atgcacgacaaaacctggtccggacgtttcaacgaacccgtttccgaactcgtcaaacaatacaccgcctccatcggtttcgaccgacggcttgccgaatgggacattcaaggctcgctggcacacgcgcaaatgttgaaagaaaccggcgtgttggacgaaggcgatttggcggacatccgtcggggcatggcggaaatcctcgaagaaatccgcagcggcaaaatcgaatggtcgtccgatttggaagatgtccacatgaacatcgaacgccgcctgaccgacaaaatcggcgacgcgggcaaacgcctgcacaccggccgcagccgcaacgaccaagtcgccaccgacatccgcctgtggctgcgcgatcagattaccgtcatccgaagcctgattcaaagccttcagacggcattgctggatttggcggaacaaaacgccgaaaccgtcatgccaggctttacccacctgcaagtcgcccagcccgtcagcttcggacaccatatgctcgcctacgtcgaaatgctcggacgcgataacgaacggatggcggactgccgccgccgcgtcaaccgtatgccgctcggcgcagccgcccttgccggtacgacttatccgattcggcgcgaaatcaccgccgaactgttgggctttgaacaaatctgccaaaactcgctcgatgccgtatccgaccgcgattttgccatcgagttcaccgccgccgcctcgctggttatggttcacctgagccgcctgtctgaagaattgattttgtggatgagtccgcgtttcggctttatcgacatcgccgaccgtttctgcacaggttcgtccatcatgccgcagaagaaaaaccccgacgtgcccgaactcgtgcgcggcaaatccggccgcgtcatcggacaccttatcggtctgattaccctgatgaaatcccaacccttggcgtacaacaaagacaatcaggaagacaaagaacccttgttcgacaccgccgacacgcttatcgacacgttgcggatttacgccgatatgatgcgcggcgtaaccgtcaaacccgacaatatgcgcgccgccgtgatgcagggcttcgctaccgccaccgacttggcggattatctggtcaaaaaaggcatgcctttccgcgatgcccacgaagtcgtcgcccaagccgtgcgccacgccgaccaagcgggcgtcgatttgagcgaactgccgctcgaagtcttacaaggtttcagcgatttgattgccgacgacgtttacggcgtgctgacacccgaaggcagcttaaacgcccgcaaccacttgggcggtaccgcgccggaacaagtccgcttccaagtgaaacgctggcgggaaatgttggcttaa

SEQ ID NO: 63250 - DNA, 642 bp, Neisseria meningitidis
atgaaagcctttaccaaaattaccgccatcgtcgccccgctcgaccgcagcaacgtcgataccgacgccatcatccccaaacaatttctgaaatccatcaaacgcagcggtttcggccccaatgcctttgacgaatggcgttacctcgaccacggcgaaccgggcatggacaacagcaaacgcccgttgaaccctgatttctcgctgaaccagccgcgttaccaaggcgcgcaaatcctgttgacgcgtaaaaacttcggttgcggctcttcacgcgaacacgccccttgggcattggacgactacggcttccgcgccgtcatcgcccccagcttcgccgacatcttcttcaacaactgctacaaaaacggccttttacctatcgtgttgaccgaagaacaggttgaccggcttttcaaagaagttgaagccaacgaaggctatcagctctccatcgaccttgccgaacaaaccctgaccacccctggcggcgaaacattcacattcgacattaccgaacaccgcaaacactgcctcttaaacggcttggacgaaatcggactgaccctgcaacatgccgatgaaattcacgcctttgaagaaaaacgccgccaaagtcagccttggctgtttaacggttga

SEQ ID NO: 63251 - DNA, 3204 bp, Neisseria meningitidis
atggctaaattttttatcgaccgccccatttttgcgtgggttatttcgattttcattattgcggcgggtattttcggcattaaaagcctgcctgtttcgcaatatccgtctgttgccgctccgaatattaccctgagggctacttatccgggtgcatccgcacaagtgatggaagacagcgtactttccgttatcgagcggaatatgaacggcgtggaaggtttggattatatgtccacttctgccgattcgagcggcagcggcagcgtgagcctgacctttacgcctgaaaccaatgaagatttggctcaggtggaggtgcaaaacaagctttccgaagtattgagtatgttgccggcaaccgtccagcaatacggcgtaaccgtatccaaggcgcgttccaatttcctgatgattgtgatgctttcgtcggatgtgcagtcaaccgaagagatgaacgactacgcgcagcgtaatatcgttcccgagttgcagcgtatcgaaggcgtggggcaggtacgcctgttcggcgcgcaacgcgcgatgcggatttgggttgatcctaagaaactgcaaaactacaatttgtcgtttgccgatatcggcagtgcgctgtccgcccagaacgtccagatttcagcgggttctatcggttcgcttcccgccgttcgcggacagacggttacggctaccgtaacggcgcaagggcagttgggtacggcagaagaattcggcaacgtcatcctccgcgccaataccgacggttctaatgtttacctgaaggatgtggcaagggtcggactgggtatggaagactattcttcctcaacccgtctgaacggtgtaaataccaccggtatggcggtgatgctgtccaacagcggcaatgcgatggcgacggcaaaggcggttaaagaacgcatggcgacgttggaaaaatactttcctcagggtatgagctggaaaaccccttacgatacttccaaattcgtcgaaatttcgattgaaaaagtgattcatactttaatcgaagcgatggtgctggtgtttgtcgtaatgtatctcttcctgcaaaacatccgttatacgctgattccgaccatcgtcgtaccgatttcgctgttgggcggtttcgccttcatctcttatatgggcatgtcgattaacgtactgaccatgtttgcgatggttttggtcatcggcatcgtggtcgatgacgcgattgtggtggttgaaaacgtcgagcgcattatggcgggtgaaggcttgccgcccaaagaagcgaccaaaaaagcgatgggtcagatttcgggcgcggtcatcggtattaccgccgttctgatttccgtgttcgtaccgttggcgatgttcagcggggcgacgggcaatatttacaaacagtttgccctgacgatggcgtcatcaatcgcattttccgccttccttgcgctgacccttacccctgctttgtgtgccacaatgttgaagacaatcccgaaagggcatcacgaagagaaaaaaggtttcttcggctggtttaacaagaaattcaacagttggacgcacggttacgaaggccgggttgccaaagtgctgcgtaagactttccgcatgatggttgtctatatcggcttggcggttgtgggcgtgttcctgtttatgcgcctgccgacttcgttcctgccgaccgaagaccaaggcttcgtcatggtcagcgtacaactgcctgcaggagcgacccaagagcgcaccaatgcgactttggcgcaagttacccaactggcgaaaagcattcctgaaatagaaaacatcattaccgtttccggcttcagcttttcgggcagcggtcagaatatggcgatgggttttgccatattgaaagattggaacgagcgtaccgcgcccggcagcgatgccgttgcgattgccggcaagctgacgggtatgatgatggggacgcttaaagacggttttggcatcgccgtcgtcccgcctccgattttggagttgggcaatggttcgggcctgagcatcaacctgcaagaccgcaacaataccggccataccgcattgctggcgaagcgcaacgagttgattcagaaaatgcgtgccagcggtttgtttgaccccagcaccgtccgtgccggcggtttggaagactcgccgcagttgaaaatcgacatcaaccgtgccgccgcggcggcgcaaggcatttcgtttgccgacatccgcaccgcattggcaagtgcgctgagttcgtcttatgtcagcgacttcccgaaccaaggccgtctgcaacgcgtgatggtgcaggccgacgaggatgcccgtatgcagcctgccgatattttgaacctgaccgtgccgaacaaatccggcgtcgccgtaccgctttccaccattgctactgtttcttgggaaaacggtacggaacagagcgtacgcttcaacggttatccttcgatgaagctgtccgcttcgcctgcaaccggcgtttccaccgggcaggctatggcggcggttcaaaaaatggttgacgaattgggcggcggttacagcttcgaatggggcggacagtcgcgcgaagaggcaaaaggcggctcgcaaaccctgattttgtacggtttggcggttgcagccgtatttttggtacttgccgcgctttatgaaagctggtcgattccgctggcggtcatccttgtgattccgttgggtttgatcggtgcggctgcgggcgtaaccgggcgcaacctgtttgaaggactgttgggcagcgttccctcgttcgccaacgacatctactttcaagtcggtttcgttaccgtgatgggtttgagtgcgaaaaacgcgattttgattatcgaatttgccaaagaccttcaagcgcaagggaaaagcgcggtcgaagctgctttggaagccgcccgcctgcgtttccgtccgattatcatgacctcgttcgcctttattttgggcgtggttcccctgtatattgccggcggtgcaagttctgccagccagcgcgccatcggcacgaccgtattctgggggatgctcatcggcacgctcttgtccgtgttccttgttccgcttttctatgtggtggtgcgcaaattcttcaaagaaaccgcgcacgaacacgaaatggcagtaaaacacgccgccgaagcgggcatcaccggttcggacgacagccaacattaa

SEQ ID NO: 63252 - DNA, 621 bp, Neisseria meningitidis; identical to SEQ ID NO: 40580

SEQ ID NO: 63253 - DNA, 783 bp, Neisseria meningitidis
atggaatcactgactgccataaataaatcgcgcattcggcaggctttccaaaaagcattaaacgattatgaccggcacgccttaatccaacaaaaaatgacgattaatctaatggcgcatttgcaagattatttgccggatatgccattggaaaacgtgttggaattgggctgcggctcaggaatgttgagtgccttgctgcaaaaacagatttcagcgaattattggttatttaatgatttgtgcgatgtgcagccccaactggctgaaaaactgccgcaatcctttgatttttattgcggcgatgcggaaaactttccttttcaacgacaatttgacttaatcgcaagcgcatctgccgtgcaatggtttcatcaacccgacgcttttatcgcccattgcaaaacaggcttgaaagcaaacggattattggcggttgcaacctttggcaaagacaatttaaaagaagtccgccaaattacaaatataggcttaaattacccgactttatcccaatggcagacttggttagccaaagattttgagcttttatggtgtgaggattttaaggtaatactagactttgatacgccgttagatgtactcaaacaccttaaatatacaggcgtaacagccacgaaccaaaaaaattggacaagaaaaaatctcaatggatttattggcgattacttgtcggcgttcagtatgccgtcgggcaaagtgcacctgacttatcatccgttattttttatcgcgcgctactctgcggcgggcaggcaataa

SEQ ID NO: 63254 - DNA, 720 bp, Neisseria meningitidis
atgaaagacgatgttttgaaacagcaggcacacgcggcgatacagaagaaactgggctatgcgttccgcgatatttcgcttttgcggcaggctttgacgcacaggagctgccatacgaaacataatgaacggtttgagtttgtcggcgattcgattttgaattatacggtggcgcggatgctgtttgacgcgtttccgaagttgaccgagggcgagttgtcgcggttgagggctagtctggtcaatgagggcgtgctggcggaaatggcggcggaaatgaatgtcggcgacggtctgtacttgggggcgggcgagttgaagagcggcggcttcagacggccttcgatactggcggacgcgatggaggcgatgtttgcggcggtcagcttcgatgccgatttcaacacggcggaaaaggtggtgcgccatttgtttgccgatcgcgtccggtgtgctgatttccaaaatcaggcaaaagacggcaaaactgctttgcaggaggcgttgcaggcgcgtcgtttcgctttgccgaaataccgtatcgaagagcaaatcggccatgccaacgacagtatgtttgtggtttcctgcgatttgggtgaactgggtttcgtgtgccgtgccaaagggacgagccgcaaggcggcggagcaggaagcggcgaaagaggctttgaaatggctggaagagaagctgccgctgaagaagaaaaagaaatga

SEQ ID NO: 63255 - DNA, 1470 bp, Neisseria meningitidis
ttggcactggcacttgccgtcattacccgccgcgtactgctgtctttaggcatcggtattctggtcggcgttgcctttttggtcggcggcaaccccgtcgacggtctgacacacctgaaagacatggtcgtcggcttggcttggtcagacggcgattggtcgctgggcaaaccaaaaatcttggttttcctgatacttttgggtatttttacttccctgctgacctactccggcagcaatcaggcgtttgccgactgggcaaaacggcacattaaaaaccggcgcggcgcgaaaatgctgaccgcctgcctcgtgttcgtaacctttatcgacgactatttccacagtctcgccgtcggtgcgattgcccgccccgttaccgacaagtttaaagtttcccgcaccaaactcgcctacatcctcgactccactgccgcgcctatgtgcgtgctgatgcccgtttcaagctggggcgcgtcgattatcgccacgcttgccggactgctcgttacctacaaaatcaccgaatacacgccgatggggacgtttgtcgccatgagcctgatgaactattacgcactgtttgccctgattatggtgttcgtcgtcgcatggttttccttcgacatcggctcgatggcgcgtttcgaacaagccgcgttgaacgaagcccacgatgaaactgccgtttcagacggcagctggggcagggtttacgcattgattattcccgttttggccttaatcgcctcaacggtttccgccatgatctacaccggtgcacaggcaagcgaaaccttcagcattttgggggcatttgaaaataccgacgtgaacacttcgctggtattcggcggcacttgcggcgtccttgccgtcgttctctgcacgctcggcacgattaaaaccgccgactatcccaaagccgtttggcagggtgcgaaatccatgttcggcgcaatcgccattttaatcctcgcttggctcatcagtatggttgtcggcgaaatgcacaccggcgattacctctccacactggttgcgggcaacatccatcccggcttcctgcccgtcatcctcttcctgctcgccagcgtgatggcgtttgccacaggcacaagctgggggacgttcggcattatgctgccgattgccgccgccatggcggtcaaagtcgatcccgcgctgattatcccgtgtatgtccgcagtaatggcgggggcggtatgcggcgaccactgttcgcccatctccgacacgaccatcctgtcgtccacaggcgcgcgctgcaaccacatcgaccacgttacctcgcaactgccttacgccttaaccgttgccgccgccgccgcatcgggctacctcgcattgggtctgacaaaatccgcgctgttgggctttggcacgacaggcattgtattggcggtgctgatttttctgttgaaagataaaaaactcgccaacgcctga

SEQ ID NO: 63256 - DNA, 198 bp, Neisseria meningitidis
atgaaatggacagacacacaacgtatcgctgaagacctttacgaccttcacggcgaagatatcgaccccaaaagcctgcgctttacccaattgcgggatttgattatggcgcttcccgaattcgacgacgaccccgcccgttgcggcgaacgcatcctcgaagccgtgcagcaggcatggatagacgaggcggaataa

SEQ ID NO: 63257 - DNA, 489 bp, Neisseria meningitidis
atgaccgccttgctcgtcatcctcgccctcgccctgatagccgccggtacggcgggcatcgtttaccccgccctgcccggattggcattgatgtttgccggaacctggctgctcgcctactccggcggctaccaaatctacggcgcgggcgttttgtggacggtcggactcatcagccttgccggcatactggcggactatgtggcaggcatatgggggacaaaatataccggagcgggcaagctcgccgttcgcggcgcattggccggcagcatcatcggcatatttttctcccttcccggactaatactcggcccctttatcggcgcggcggcaggcgaactgatcgatcggcgcaatatgcttcaggcaggtaaagcgggcttgggtacactgttgggacttgtcgtcggcacggcgttcaaaatcggctgcgccgtatccatcttgtttatcctgttggtgaaatacatcgcatacctgttttaa

SEQ ID NO: 63258 - DNA, 2031 bp, Neisseria meningitidis
ttgactatattttccgtattacttccaaaaaaaggcatgaaacgacattttatgcctaaaattttacaacaaacaaccttacatcgcttttttcgcgcaaacacgcaccatccgatcagcccgtccgttttgcagcaggctggcgatttgataagatggttatgtttttcagacggcatttcagatttccgtccatgccgtctgaagccgcaaaacccgattggaggaactgttatgaataccgtatcgaattacctgtccgcattgcgcgaagccatgagggcgcaaggcttggacgcactcgtcatcccttccgccgacccccacctgtccgaatacctgcccgcacactggcaggcgcgccgcgaattgtcgggctttaccggctcggtcggcacatttgtcgttaccgccgacgaagcgggcgtgtgggtggacagccgctattgggaacaagccgccaaacagctttccggcagcggcattgagctgcaaaaaagcgggcaagtgccgccgtataacgaatggctcgcggcaaacctgcccgaaaacgccgccgtcggcatcccttccgatatggtctcgctcaccggcaaacgcactttggcgcaatccctgaccgccaaaaacatccgcatcgaacacccaaacgatctgcttgaccaagtgtggacaagccgtcccgccctccccgccgaaaccgtgttcatccacgaccccgcctacgtctccgaaaccgccgccgaaaaactcgcccgcgtgcgcgccgtcatggcggaaaaaggcgcggattaccacttggtttcctcgcttgacgacatcgcctggctgaccaacctgcgcggcagcgacgtgcctttcaatcccattttcgtctccttcctgctgattggcaaagacaacgccgtcctgtttaccgaacaatgccgtctgaacgccgaagccgccgccgcgctgcaaaccgccggcatcgcggtcgagccttacgcccaagttgccggcaaactcgcgcaaatcggcggcgcgttgcttatcgaaccgaacaaaaccgccgtcagcacccttgtgcgcctgcccaaaagcgtgcgcctgattgaaggcatcaacccgtccacgctgttcaaatcctgcaaatccgaagccgacatcgcccgcatccgcgaagcgatggaacacgacggcgcggcgttgtgcggtttcttcgccgagtttgaagacatcatcggcaacggcggcagcctgaccgaaatcgacgtggacaccatgctttatcgccaccgcagcgtgcgcccaggcttcatttcattgagtttcgacaccatcgcaggcttcaacgccaacggcgcactgccgcattacagcgcaacgcccgaaagccacagcaccatcagcggcaacgggcttttgctcatcgactccggcgcgcaatacaaaggcggcacgaccgacatcacccgcgtcgtccctgtcggcacacccaccgccgaacaaaaacgcgacaacaccctcgttctcaaagcccatatcgcgcttgccgaagccgtgttcccagaaaacatcccctcgccgctgattgatgcgatttgccgcaaacccctgtggcaggcgcaatgcgactacggccacggcaccggacacggcgtaggctatttcctcaacgtccacgaaggcccgcagcgcatcgccttcgccgcccccgccacgcccgaaaccgccatgaaaaaaggcatggttacctccatcgaacccggactctaccgcccgggaaaatggggcatccgcattgaaaaccttgccgccaaccaagccgtcgccgcccctcaagaaaccgaattcggcagcttcctctgttttgaaaccctgaccctctgccccatcgacacccgcctgatggacaccgccctcatgaccgacggcgaaatcgactgggtcaaccgctaccacgccgaagtccgccgccgcctcgagccgctgaccgaaggcgcggcaaaagcgtggctgatcaaacgcaccgaaccgctggcgcgttaa

SEQ ID NO: 63259 - DNA, 600 bp, Neisseria meningitidis; identical to SEQ ID NO: 39034

SEQ ID NO: 63260 - DNA, 2163 bp, Neisseria meningitidis
atgcaacaaaaaatccgtttccaaatcgaaggcatgacctgccaggcctgcgcttcgcgcattgaaaaagtgttgaacaaaaaagattttgtcgaatcggcgggggtaaacttcgccagcgaagaggcgcaggtagtgtttgacgacagcaaaacctcagtagccgacattgccaaaatcattgagaaaaccggttacggcgcgaaggaaaaaacggaagatacattgccgcaacccgaagcagaacaccatatcggctggcggctgtggctgctgttcaccatcaacgtcccgttccttatcggcatggcggggatgatgatcggcagacacgattggatgattccgccgttgtggcagttcgcattggcaagcgtggtgcagctttggctggcaatcccgttttacaaaagcgcgtgggcgagcattaagggcggactggcgaatatggacgtgctggttaccatcggcacggtctcgatttacctgtattccgtctatatgctgtttttcagcccgcacgcggcgtacggtatggcgcatgtgtattttgaagtgggcgtgatggtgatcggttttgtgtcactgggtaaatttttggaacaccgtaccaaaaaatccagcctcaacagcttgggcttgctgctcaaacttacaccaacccaagtcaacgtgcaacgcaacggcgaatggaaacagcttcccatcgaccaagtgcaaatcggcgaccttatccgcgccaaccacggcgaacgcattgccgcagacggcatcattgaaagcggcagcggttgggcggacgagagccatcttaccggcgaatccaatcctgaagaaaaaaaggcgggcggcaaagtgttggcgggcgcgttaatgaccgaaggcagtgtggtgtaccgcgccacgcagctcggcagccaaacccagctcggcgacatgatgaacgcgctctctgaagcacaaggcagtaaagcaccgattgcgcgcgtagccgataaagcggctgcggtattcgtgcctgccgtcgtgggcattgcgttgttgacttttattgttacttggctgattaagggcgattggacggttgcgctgatgcacgccgtcgccgttttggtgattgcctgcccgtgcgcactgggtctggcaacccctgccgcgattatggtcggtatgggcaaagcggttaaacacggtatttggtttaaagacgcggcagcaatggaggaagccgcccacgtcgatgccgtcgtgttggacaaaaccggtacgctgaccgaaggcaggccgcaggttgccgccgtttattgcgttcccgacagcggctttgacgaagacgctttgtaccgcatcgccgccgccgtcgaacaaaacgccgcccatccgctcgcccgtgccatcgtctccgccgcccaagcgcgcggtttggacattcccgccgcacaaaacgcacaaaccgttgtcggcgcaggcattaccgccgaagtggaaggcgtgggtttggtgaaagcaggcaaagccgaatttgccgaactggccttgccgaagtttttagacggcgtttgggatattgcaagcattgttgcggtctcagtcgataacaaacccatcggcgcattcgcacttgccgacgcgttgaaagccgataccgccgaagccataggccgtctgaaaaaacacaatatcgatgtttacatcatgagcggcgacaaccaaggcacggtcgaatacgtcgcccaacaactgggtatcgctcacgccttcggcaatatgagtccgcgcgacaaagccgccgaagtgcagaaactcaaagccgccggcaaaaccgtagcgatggtcggcgatggcattaacgacgcgcccgcgctcgccgccgcaaacgtcagcttcgccatgaaaggcggtgcggacgttgccgaacacaccgcgtccgccacgctgatgcagcattcggttaatcagctcgccgatgccctgctggtgtcgcaagccactttgaaaaacatcaagcaaaacctgtttttcgccttcttctacaatatcttgggcattccgctcgccgcgcttggctttttaaatcccgtcatcgcaggcgcggccatggcggcaagctcggtttccgtgttgagcaatgccttgcgcctgaaacgggtaaaaatcgattga

SEQ ID NO: 63261 - DNA, 849 bp, Neisseria meningitidis; identical to SEQ ID NO: 37501

SEQ ID NO: 63262 - DNA, 1101 bp, Neisseria meningitidis
atgattactctgaaaaccaccccatttcatcaagcccatcaagatgcaggcgcgaagctggtagattttgccggctgggagctgcccatccattatggttcgcaaatcgccgaacacgaagccgtgcgcaccgacgcaggtatgtttgacgtatcccatatgcttgttaccgacgtagcaggcgcaaatgccaaagcctttttccgcaaattgattgccaacgatgtcgccaagctcgcttttgtcggcaaagccctttattccgctttgctcaacgacaacggcggcgtgattgacgacttgatcgtttaccgcaccaatgaagccgaaacccaataccgcatcgtgtccaacggcgcgactcgcgaaaaagatacggcacaattccacaaagtcggacaagagttcggtgtttccttcaatccgcgctacgacctcggcatgctcgccgtacaaggccctaaagccattgaaaaactcctgaccgtcaaacccgaatgggcagatgtcgtccataacctcaaaccgttccaaggcgcggatttgggcaacgactggtttgtcgcccgcaccggctacaccggcgaagacggcgtcgaagtcatcctgcccggcaccgaagccgtcgcattcttcaaagccctgcaagcagcaggcgtacaaccttgcggtctcggcgcgcgcgacaccctgcgcatggaagccggcatgaacctctacggcaacgatatggacgacgataccagcccgctcgaagcaggcatgggttggaccgttgatttgaaagacgaaagccgcgattttgtcggcaaagctgccttgttggcattgaaagaaaaaggcgttgccgtcaaacaggtcggtttgctgctcggcaaaggcggcatcctgcgcgcgcatatggaagtgttgaccgacaaaggcaaaggcgaaaccaccagcggcgtattctctccaagtctgaaacaatccatcgccatcgcccgcgtaccgaaagattttgacggcgataccgccaaagtgctgattcgcggcaaggaagcggacgtgcgcgtactgaagctgccgttcgtccgcaacggtcaaaaacagtttgattaa

SEQ ID NO: 63263 - DNA, 936 bp, Neisseria meningitidis
atggggcacaatatgatgaccacccaaaaatggtatgaacatattactaatgtaatcataggcaatactgctaatttcaatagcggttgccccgaatctatagattatgtagatgaaaaaaaaggcgtgccgcttgcagcgatgaaatacattttaatgtacactgaagctgcggcttcccatgcctatctatttgaacatgatcttaagaaattcaagcaatatgcttatgttgcaggaaagttgggtattttgcagagtgtagatgatgaagaccccgaacccttcttctttccctgcgacatgctcaacattcaagatccgatgtttctgatgctgatgagcgacagcccgcagctgcgcgagtttttggtgcgcaatatcgacaacatcgccaacgatacagaagccttcgtaaaccgatacgacctcaaccgtcatatgatttacaatactctgctgatggtggagggtaagcagcttgatcggttgaaacaacgtagcgagaaagtcttggcgcatcccacccctagcaaatggctgcaaaagcggttgtacgattaccgcttcttcctcgctttcgccgaacaggatgccgaggcgatgaaagccgccttagagccgcttttcgataaaaaaaccgcgcgtatggctgccaaagaaacattgtcctatttcgatttctacctgcagccgcaaatcgttacctacgccaaaatcgcatccatgcacggtttcgatttgggcatagatcaagaaatcgcaccgagggatttgattgtttacgatccgctgccggcagacgaatatcaagacatcttcgattttatgaaacagtacgacttgtcttacccgtatgaatatctgcaggattggatagattactatacgttcaaaaccgataagctggtatttggtaacgcgaagcgagagtga

SEQ ID NO: 63264 - DNA, 669 bp, Neisseria meningitidis
atgaaccacgacatcactttcctcaccctgttcctactcggtttcttcggcggaacgcactgcatcggtatgtgcggcggattaagcagcgcgtttgcgctccaactccccccgcatatcaaccgcttttggctgatcctgctgcttaacacaggacgggtaagcagctatacggcaatcggcctgatgctcggattaatcggacaggtcggcgtttcactcgaccaaacccgcgtcctgcagaatattttatacacggccgccaacctcctgctgctctttttaggcttatacttgagcggtatttcttccttggcggcaaaaatcgagaaaatcggcaaaccgatatggcggaacctgaacccgatactcaaccggctgttacccataaaatccatacccgcctgccttgcggtcggaatattatggggctggctgccgtgcggactggtttacagcgcgtcgctttacgcgctgggaagcggtagtgctgcaacgggcgggttatatatgcttgcctttgcactgggtacgctgcccaatcttttggcaatcggcattttttccctgcaactgaaaaaaatcatgcaaaaccgatatatccgcctgtgtacgggattatccgtatcattatgggcattatggaaacttgccgtcctgtggctgtaa

SEQ ID NO: 63265 - DNA, 519 bp, Neisseria meningitidis
atgcccaagctccatatgttttacctcggcggcaatgccggcaggtcgaatatcgaagtgcacgacatccaatttgccgtgtgcgacgactaccgtgaagccgtccccacactcaaagccgcatggttcggcgatgctgacaaaatccacatcgacggctggcaggttgtcgaatgggcggacggttacgacatcgccgtatccgaaacgcccaaaacggaaatgccgtctgaacacgccccgcgcctgtattttgccaatgtcggcggttatcgcgcggggcagcttgccgaggcgcacgcgttcgggctgttcgccgccgccacgcctgccgaagccaaacaaaaagccctgcaaaccctgttgaccgacagctatgttcagcaacataaagacaacttaaaagacgtggacaacctgcttgcgctcgaccgcatcggcaatttccatatccgcctgaccccgaatccgcacggcaaacccgccgaaatcggctttcaaggctatttgcccatttga

SEQ ID NO: 63266 - DNA, 798 bp, Neisseria meningitidis
atgaaccgtctttacccccacccgattatcgcccgtgagggctggccgattattggcggcggtttggctttgagtctgctggtgtcgatatgttgcggctggtggtctttgccgttttgggtgtttaccgtatttgcattgcagtttttccgcgaccctgtgcgtgaaattccgcaaaatcctgaagcggtgttgagccctgttgacggccgcattgtggtggtcgaacgcgcacgcgatccgtatcgtgatgtcgatgctttgaaaatcagtatttttatgaacgtgttcaacgtgcattcgcaaaaatcgcctgccgattgtacggtaacgaaagtggtctataacaaaggcaaattcgtgaatgcggatttggacaaagccagcacggaaaacgaacgtaatgcggtgttggcgactacggcttccggtcgtgaaattacttttgttcaagtggccggtttggtggcgcgccgtattttgtgctacacccaagcaggtgcgaaactgtcccgcggcgaacgttatggctttatccgcttcggttcgcgcgtggatatgtatctgcctgtcgatgcgcaggcgcaagtggcgattggcgataaagtaaccggcgtaaaaactgtattggcgcgtctgccgctgactgcgccgcaaatcgaatccgagcctgaatctgagccagctttacaaactgcttcggttgaaacagcggcaaacccatctgccgaacaacggcaaattgaagcagcggcggctaagattcaggcggctgtgcaagatgtgttgaaagattaa

SEQ ID NO: 63267 - DNA, 873 bp, Neisseria meningitidis
gtgaaaggactcgactattgccgccaaaaagcagaagaaagccgctccagttttttgtcgggcttccgtttcctgactcaggaaaaacgggatgcggtaacggttttatatgctttttgccgcgaattggacgatgtggttgacgaatgttccaaccccgatgttgcacaggcgacattgaactggtggcgcggcgatttggacaaggtattcggcggcgcgatgccggaacaccccgtcaatcaggccttgcggcaggttaaggaaaccttcaagctgccgaaatatgaactggaagccttaatcgacgggatgcagatggatttggttcgggcgcgttacggcagttttgaagaattgaaactgtactgccgccgtgttgcaggtgtagtcggctgcctgattgcgcggattttggggttttcagacggcaaaacgctggaatacgccgacaagatgggacttgcgctgcaactgaccaacatcatccgcgatgtcggcgaagacgcgcgcaggggacggatttacctgccgatggaggaaatgcagcggtttgatgtccccgcaagcgtgattttgcaatgcagcccgacgggcaattttgccgaattgatggcgttccaaatcaaacgcgcccgtgaaacctaccgcgaagccgtatcgctgctgccggctgccgataaaaaagcccaaaaagtcggactggttatggcggcggtttattacgagctattgaacgaaatcgaccgggacggcgcgcaaaacgtcctcaaatacaaaatcgccctcccttcgccgcgcaaaaaacgcattgccctgaaaacctggttattcggattcaaaccgcgccccggcacgccggaacgggcataa

SEQ ID NO: 63268 - DNA, 258 bp, Neisseria meningitidis; identical to SEQ ID NO: 51697

SEQ ID NO: 63269 - DNA, 639 bp, Neisseria meningitidis; identical to SEQ ID NO: 61715

SEQ ID NO: 63270 - DNA, 228 bp, Neisseria meningitidis; identical to SEQ ID NO: 44482

SEQ ID NO: 63271 - DNA, 471 bp, Neisseria meningitidis
gtgcagccggtagcgcaggcggtgcgcctgttatccacgtcatcgctgttgtcggtggcaacggcattaatcgaggcgcatggcgaagagatgaccgcgcccgatttgattgaggttaaccgcgccatgcgccgccgtatgcaggccgagattgccgccttacgggcggtgcagacggctgctgccgagtctggtgggctgacggccaacgccgtgtataccgaggcttaccaaacggcagaatccctgcgcgcggcggcaggccgtctgaatgcgttggttgcggcggtcatcaaccaaaagccgccgctgattgtgcgccaagccccaatcgacggtacgatacaccaaatcgcccacgagttttacggcgatatagcccgcgcagcagagctggtgcggctcaatccccatatccaccaccccgcgtttatcaagcgcggcactttggtcaacagctatgcaaaataa

SEQ ID NO: 63272 - DNA, 1179 bp, Neisseria meningitidis
atgacaggcagaacaggccgcaacggcagtacccaagcgcaacccgaacgcgtcatgctggtgggcgtaatgttggacaaagatggtacgggcagtagtgccgcccgtctgaacggttttcagacggcattggcggaagctgtcgagctggtcaaagcggcgggcggcgattccgtgcgcgtggagactgccaaacgcgaccgtccgcacaccgcgctgtttgtcggcacgggcaaggcggcggagctgtcggaagcagttgccgcagacggcatcgatttggtcgtattcaaccacgaactcatgcccacgcaggaacgcaaccttgaaaaagaactgaaatgccgcgtattggacagggtagggctgattctggcgattttcgctcgccgcgcccgcacgcaggaaggcaggctgcaagtcgagttggcgcaattgagccatttggcgggacgcttgatacgcggttacggccatctgcagagccagcgcggcggtatcggcatgaaaggccccggcgaaaccaaactggaaaccgaccgccgattgatcgcccatcggatcaatgccttgaaaaaacagcttgccaacctcaaaaaacagcgcgccctgcgccgcaagtcccgcgaatcgggcacaatcaaaacgtttgcgctggtcggctataccaatgtcggcaaatccagcctgttcaaccggctgaccaagtcgggcatatatgcgaaagaccagcttttcgccacactcgacaccacggcgcggcggctgtacatcagtcccgaatgcagcattatcctgaccgataccgtcggattcgtcagtgatttgccgcacaaactgatttcggcattttccgccacgctggaagaaaccgcgcaagccgatgtgctgctgcacgtcgtcgatgccgccgccccgaacagcggacagcagattgaagacgtggaaaacgtactgcgggaaatccatgccggcgatattccgtgcatcaaggtgtacaacaaaatcgacctgctgccgtctgaagaacaaaacacgggcatatggcgcgacgctgcgggaaaaattgccgccgtccgcatttccgttgctgaaaataccggtatagacgcactgcgcgaagccattgccgagtattgtgccgccgcaccaaacacagacgaaaccgaaatgccatga

SEQ ID NO: 63273 - DNA, 1065 bp, Neisseria meningitidis
atggcactcgtatccatgcgccaactgcttgatcatgctgctgaaaacagctacggcctgccggcgttcaacgtcaacaacctcgaacagatgcgcgccatcatggaggctgcagaccaagtcgacgcccccgtcatcgtacaggcgagtgccggtgcgcgcaaatatgcgggtgcgccgtttttacgccacctgattttggcggctgtcgaagaatttccgcacatccccgtcgtcatgcaccaagaccacggcgcatcgcccgacgtgtgccaacgctccatccaactgggcttctcgtccgtgatgatggacggctcgctgctcgaagacggcaaaaccccttcttcttacgaatacaacgtcaacgccacccgtaccgtggttaatttctcccacgcctgcggcgtatccgttgaaggcgaaatcggcgtattgggcaacctcgaaaccggcgaagcaggcgaagaagacggcgtgggcgcggcaggcaaactttcccacgaccaaatgctcaccagcgtcgaagatgccgtgcgtttcgttaaagataccggcgttgacgcattggcgattgccgtcggcaccagccacggcgcgtacaaatttacccgtccgcccacaggcgacgtattgcgtatcgaccgcatcaaagaaatccaccaagccctgcccaatacacacatcgtgatgcacggctccagctccgttccgcaagaatggctgaaagtcattaacgaatatggcggcaatatcggcgaaacctacggcgtgccggttgaagaaatcgtcgaaggcatcaaacacggcgttcgtaaagtcaacatcgataccgacctgcgccttgcttccaccggcgcggtacgccgctaccttgccgaaaacccgtccgacttcgatccgcgcaaatacctgagcaaaaccattgaggccatgaagcaaatctgcctcgaccgctacctcgcgttcggttgcgaaggtcaggcaggcaaaatcaaaccggtttccttggaaaaaatggcaaaccgttatgccaagggcgaattgaaccaaatcgtcaaataa

SEQ ID NO: 63274 - DNA, 186 bp, Neisseria meningitidis; identical to SEQ ID NO: 37303

SEQ ID NO: 63275 - DNA, 1833 bp, Neisseria meningitidis
atgagtgaacacgatatgcagaacacaaatccgccattaccgcctctgccgcccgaaatcacgcagctcctgtcggggctggacgcggcacaatgggcgtggctgtccggctacgcttgggcaaaagcaggaaacggggcatctgcaggaaacggggcatctgcaggactgcccgcgcttcagacggcattgccggcggcagaacctttttccgtaaccgtcctttccgcctcgcaaaccggcaatgcgaaatccgttgccgacaaagcggcggacagcctggaagccgccggcatccaagtcagtcgcaccgaactgaaagactataaggcgaaaaacatcgccgacgaacgccgcctgctgctggttacgtccacccagggcgaaggcgaaccgccggaagaagccgtcgtgctgcacaaactgctgaacggcaaaaaagccccgaaattggacaaactccaatttgccgtactgggcttgggcgacagctcctatccgaatttctgtcaggcaggtaaagatttcgaccggcgttttgaagaattgggggcgaaacgcctgctcgaacgcgttgatgcggatttggactttaccgcctccgcagacggatggacaggtcgcattgtcgcgcgcttaaaagaagaagccgcaaaaaaccgggcaacgcccgcgccgcagacaacgccccccgccggccttcagacggcaccggatggcaggtactgcaaggcagacccctttcccgccgccctgctggccaatcagaaaatcacctcccgccaatccgataaagacgtgcgccacatcgaaatcgatttgagcggttcggatttgcactacctcccgggcgacgcgctcggcgtttggtttgacaacgatccggcactggtcagggaaatcctagacctgctcggcatcgatccggcaacggaaatacaggcgggcggaaaaaccctgccggttgcctccgcactgttatcccattttgaactcacgcaaaacacccccgcctttgtcaaaggctatgccccgttcgccgatgatgacgaactcgaccgtattgctgccgacaacgccgttttgcaaggctttgtgcaaagcacgccgattgccgatgtgctgcaccgcttcccggcaaaactgacggcggaacaattcgccggcctgcttcgcccgcttgcgccgcgcctgtattcgatttcctcgtcgcaggcggaagtgggggacgaagtgcacctgaccgtcggcgcggtgcgtttcgaacacgaagggcgcgccagggcgggcggcgcatcgggtttccttgccgaccggctggaagaggacggcacggtgcgcgtgtttgtggaacgcaacgacggcttcaggctgcccgaagacagccgcaagccgattgtgatgatcggctcgggcaccggcgtcgcaccgttccgcgccttcgtccaacaacgtgccgcagaaaatgcggaaggcaaaaactggctgattttcggcaatccgcattttgcccgtgattttctctatcaaaccgaatggcagcagtttgccaaagacggtttcctgcacaggtacgatttcgcctggtcccgcgatcaggaagaaaaaatctatgtgcaggacaaaatccgcgaacaggcggaaggactttggcaatggctgcaggaaggcgcgcatatctatgtgtgcggcgatgcggcaaaaatggcaaaagacgtggaagccgccttgctggatgtgattatcggggcaggacatttggacgaagagggcgcagaagaatatttggatatgctgcgcgaagaaaaacgctatcagcgtgatgtttattga

SEQ ID NO: 63276 - DNA, 507 bp, Neisseria meningitidis; identical to SEQ ID NO: 45448

SEQ ID NO: 63277 - DNA, 1581 bp, Neisseria meningitidis
atgtccgtcatcaaacgtgccctgatcagcctgtccgacaaggcaggcgcggtcgaatttgcccaaactctgcacaagctcggtgtcgaaatcctctccaccggcggcacggcgaaactgcttgccgatgcgggcgttcccgtgattgaagtcgccgactataccggcttccccgaaatgctcgacggccgcgtgaaaacgctgcatccgaaaatccacggcggtattttgggtcggcgcgatttggacgaacacgttgccaagatggaagaacacggtatcggcaacatcgaccttgtgtgtgtcaacctctaccccttcgccgccaccatcgccaaaccaaactgcacactggaagacgcgattgaaaacatcgacatcggcggcccgactatggtgcgttccgccgcgaaaaactggaaacacgtcgccatcgttaccgacaccgccgacttccccgccattgccgccgaactcgaagccaacaacggcgcattgagcgacaaaacccgtttcaacctctcacgcaaagcattcagccacaccgcccaatacgacggcatgatttccaactacctgacctccctttcagacgacgttttgagcggccagccccaaatcggcgaattcccaagccagttcaaccaaagctggatcaaagtgcaagacatgcgctacggcgaaaacccgcaccaacgcgccgcgttctaccgcgatattgaccccgccgcaggcagcctttccgcctacaaacaactgcaaggcaaagaattgtcttacaacaacatcgccgatgccgatgccgcatgggaagccgtcaaatcctttgacgcaccagcctgtgtgattgtgaaacacgccaatccgtgcggcgtcgccgttgcagccgatacattgaccgcctacaaactcgcctacgtcaccgacaccaccagcgcattcggcggcatcatcgctttcaatcgcgaagtcgacggcgaaaccgtgaaacagattaccgacaaccaatttatggaagttttgatggcgccgaagtttaccgccgaagccctcgaaatcgccgccgccaagaaaaacgtgcgcgtattggaaataccgctcgaagcaggcgcgaaccgcttcgaattcaaacgcgtcggcggcggattgttggtacaaacccccgacatccaccgcatcagccgctccgatttgaaagtcgtctccaaacgccaaccgaccgagcaggagtggaacgatttgctgtttgtctggaacgtcgcaaaatacgtcaaatccaacgccatcgtcttcggcaaaggcggtcaaacctacggcattggcgcaggccaaatgagccgcgtggacagcacccgcatcgccgcccgcaaagcgcaagatgccggtttcgacctcaacggcgcgtgtgccgcatccgatgccttcttcccattccgcgacggtgtggacgtgattgccgaacagggcatcaaagccatcatccatccggcaggctcgatgcgcgatcaggaagttttcgacgcggcggacgaacacggcatcgcgatggtggtaaccgacgtgcgccacttccgccattaa

SEQ ID NO: 63278 - DNA, 1098 bp, Neisseria meningitidis
atgaaccatacatttaccttgcccgatacgcgcccgtatccccaaaatccgattaaaaaccacctgctgctcaatgcctaccagttggcgcacaattcttcccaggcttcgcgcaaactctcgtccggccaacttcaaaccgaaatcagggggatgcttgagcaaaaccactatatcaacctttccctcgcgctgacgatgtcgcccgatgccggaacttatgccgcgctgctttccagtgtgaacgcggtactcgattgcgagaaagaaggcgaagtgcagtggttcgccctgccggtcgtgctggtgtccggctgcaagaaagaacgggcaatcgagatgaagctgccgacggaggcattgtttgcctgtttgcaaaactatccgcacctgcgcgcgttgacccaggatacgcaatggctgccttatcttgtgcattcgtccgatttaagtgcggtcgcgccggatgagtggtggcgtgccaaacaaaataccgaagcggcagcgcaacacttacgccgtttcgccccgcgccctttgctgttgcccgaagggcagtccgtccacgtcgtttacgcgctgggtttcggtagcggcaaagttcagacggcattgggtcagaaccttcttcaggcaggtctgcccttgatgcaggtatggcaggaaaatcttgcatcggaaggcgttacgttgtttgccaacccgctttccccggattctccggtacgcgcgctttcagacggcagccacacgcgccagcgtatggcgatggatgtgtttgcggcaaacgcgatacgcgccgtccgtatgcagagtccgcgcgtcggcgtggtcgctgcggcaaaggtgggcgggcaggttttatttgggtttaatgcgaccgacggcgcgtttgaagtcgtgccgcaggtgttttcgtggcagctttcctttaccgacaatattggcgttgttcagcaaaattttttggatttaatggcagaatgccgcgtggaacacgtttacctgttgcataatgccttgggcgaacaggaaaacatcccgagctatgcggaagcgttgaaacgggaagggcacaatccgtttttcagcgcatag

SEQ ID NO: 63279 - DNA, 360 bp, Neisseria meningitidis; identical to SEQ ID NO: 43172

SEQ ID NO: 63280 - DNA, 2664 bp, Neisseria meningitidis
atgtccacccaattacacgatgttgaccctatcgaaacccaagagtggctggacgctttaagctccgtcctcgaatatgaaggcggcgaacgcgcgcaatacctcttggaaaacctggtcaaatactgccgcgacaagggcgtacgtatgccacacggcacgaccaccccgtatttgaataccgtttcggttgaaaacgaaaaaggcattccgggcgaccaaaacatcgaacaccgcatccgcgcattcgtgcgctggaacgccgccgccatcgtattgcgcgccggcaagaaagatttggaactgggtgggcacatcgcatctttccaatctgccgccaccatgtacgaagtcggtttcaaccacttttggaaagccaaaggcgaaggcgaagaaggcgatttggtcttcttccaaggtcacgtcgccccgggcatctatgcacgcgcattcgtcgagggccgtctgaccgaagaccagctgaacaacttccgccaagaagtggacggacacggtctgccttcctatccgcacccccacctcttgcccgacttttggcagttcccgaccgtatccatgggcttggggcccatcatggcgatttatcaggcgcgtttcctgaaatacttggaatcgcgtggtttggcaaaaaccaaaggccgtaaagtatggtgtttctgcggcgacggcgaaatggacgaacccgaatctcaaggtgcaatcgcactggctgcacgcgaaggcttggacaacctgattttcgtcatcaactgcaatctgcaacgcttggacggtccggtacgcggcaacggcaaaatcatccaagaattggaaggcaactttgccggcgccggctggaatgtcgtcaaagtcatttggggccgccgctgggaccgcctcttggcgaaagacaaagacggtatcctgcgccaacgtatggaagaatgtttggacggcgactaccaaacttacaaatccaaagacggcgcgtatgtgcgcgaacacttcttcaatacgcccgaactgaaagcattggttgccgatatgaccgatgagcaactctgggcattgaaccgcggcggccacgacccgcaaaaagtgtacaacgcctacgaccgcgcagcgaaccatgccgacggcaaacctaccgtcatcttggcgaaaaccattaaaggttacggtatgggcgcatccggcgaaggtcagaacgttgcccaccaagccaaaaaaatggacaaagcgtccctgaaacaattccgcgaccgctttgacattccggttaccgacgaacaaatcgaaagcggcgatctgccttacctgacttttgcccccgatacggaagaatacaaatacctgcacgcacgccgcgatgctttgggcggctacctgccgcaacgcaaaccgacgcaggaagtattggaagtgcccgagctgtcagcattcgacgcacaactcaaatccagcggtgaacgcgagttctcgaccacgatggcattcgtccgcatcctgtccactttgctgaaagacaaaaaaatcggcaaacgcgtcgtacctatcgttcccgacgaaagccgtactttcggcatggaaggtatgttccgccaatacggtatttggaatccgaaaggtcagcaatatacccctcaagacaaagaccaactgatgttctataaagaatccgttgacggtcaaatcttgcaagaaggtattaacgaaccgggcgcgatggccgactggattgcggctgcaaccagctacgccaacagcaacttcgccatgattccgttctacatttactattctatgttcggtttccaacgtatcggcgacttggcttgggcggcgggcgatatgcacgcgcgcggcttcctgctgggcggtactgccggccgtacgacgctgaacggcgaaggcctgcaacacgaagacggccacagccacatccaggccgacctgattccgaactgcgtatcttatgacccgactttccaatacgaagtcgccgtcatcgtacaagacggtctgcgccgtatgtatgccaataatgaagacgtgttctactacatcaccctgatgaacgagaactacgcccatccggatatgcccgaaggtgcggaacaagacatcttgaaaggtatgtacctgctgaaagccggcggcaaaggcgacaagaaagtccaactgatgggttccggtaccatcctgcaagaagtcattgccggtgccgagctgctgaaagccgacttcggcgtggaagcagacatctggtcttgcccgtccttcaacctgctgcaccgcgacgccatcgaaaccgaacgcttcaaccgcctgcatccgctggaagctgaaaaagtgcctttcgttacctctcaactgcaaggtcatgacggtccggttatcgccgctaccgactatatccgcagctatgctgaccgcatccgtgcctacatccctaacgactaccacgtcttgggcactgacggtttcggccgttccgacagtcgcgccaacctgcgccgcttctttgaagtggatcgctacaacgttgccgtagcagcattggccgcattggcggaacaaggcaaagtcagcaaagaaactgttcaacaagccattgaaaaatacggcatcaaagccgattcagcccctagctggaaacgctga

SEQ ID NO: 63281 - DNA, 198 bp, Neisseria meningitidis; identical to SEQ ID NO: 37159

SEQ ID NO: 63282 - DNA, 549 bp, Neisseria meningitidis; identical to SEQ ID NO: 39055

SEQ ID NO: 63283 - DNA, 459 bp, Neisseria meningitidis
atgaaaacccaaatcagccttgctgccgccgccatcacactgctcctttccgcctgcggaaacggcggcgcgcccgcacagcccaaaggtgaaatttccgaaaaccgcaccgccgcgttcaaatctatgatgcccgacttctcgcgtatgggcaaaatggtcaaaggcgaagaaccttacgatgtcgaaaaattcaaacaggcggcggcggcgtttaccgaaagcagcaaaaaaccgtttacgctttttgagtccgatcccaatggcaacggccgcgccctgcccgccgtttggtcggatggtgcgaaatttgaagccgaaaaaacaaaattcgccgccgccgtcgaaaaactcaacgctgccgcccaaaccggcaaactggacgaaatcaaagccgcctacagcgaaaccggctcaagctgcaaatcctgccacgacagcttccgcgcgccggaataa

SEQ ID NO: 63284 - DNA, 540 bp, Neisseria meningitidis
atgaacatcatcgacaccgccctccccgacgtaaaacttttaaaaccgcaagtcttcacagacgggcgcggcttttttatggaaaccttccgcgacgggtggtttaaaacccaagtctgcgaacgcaccttcgtgcaggaaaaccactccaaatccggcaaaggcgtattgcgcggcctgcactaccaaaccgaaaacacacaaggcaaactcgtacgcgtagttgtcggcgaagtgttcgacgtggccgtcgatatgcgtaaagactcccccactttcggcaaatgggtaggcgagattctgtccgcagaaaacaaacgccaactgtgggtacccgaaggtttcgcgcacgggttttacgttttgagcgacacgaccgaacttacctacaaatgcacggactattacaagcctgaagccgaacactcactaatttggaatgatccgaccgtcggcatcgactggccgctacaaggcgagccgaacctgtcgcctaaagacttggccggcaaagtattggctgaagcggtcacgttttaa

SEQ ID NO: 63285 - DNA, 675 bp, Neisseria meningitidis; identical to SEQ ID NO: 44353

SEQ ID NO: 63286 - DNA, 2058 bp, Neisseria meningitidis
atgacacgcaaaatcctcgttacctccgccctgccctatgccaacggcagcatccacctcggccacatggtcgaacacatccaaaccgacgtttgggtgcgctttcaaaaactgcgcggcaacgaatgccactactgctgcgccgacgacacccacggcacgcccgtgatgcttgccgcgcaaaaacaaggcatcgcgcctgaagacatgattgccaaagtacgcgaagagcacctcgccgactttaccggtttcggcatcggctacgacaattattacagcacccattcccctgaaaacaaacagttttcccaagacatttaccgcgcgctgaaagccaacggcaagattgagagccgcgtcatcgagcagcttttcgaccccgaaaaacaaatgttcctgcccgaccgcttcgtcaaaggcgaatgccccaaatgccacacccgagaccaatacggcgacaactgcgaagtctgcggcacgacctattccccgaccgaactgatcaacccgtattccgccgtttccggtgccaaacccgaattgcgcgaatccgaacacttcttcttcaaactgggcgaatgcgccgacttcctcaaagcatggacttccggcaacaacccgcacgacggcaagccccatctgcaaccggaagccctcaacaaaatgaaagaatggctgggcgaaggcgaagaaaccaccctatccgactgggacatctcccgagatgcgccgtatttcggttttgaaatccccgacgcgcccggcaaatacttctacgtttggctggacgcgcccgtcggctacatggcgtcgtttaaaaacctgtgcgaccgtatcggcgtcgatttcgacgaatacttcaaagccgacagccaaaccgagatgtaccatttcatcggcaaagacatcctctatttccacgccctgttctggcccgccatgctgcatttctccggccaccgcgccccgaccggcgtgtacgcacacggctttttgaccgtagatggacaaaaaatgtccaaatcgcgcggcacgtttatcaccgccaaatcctatttggagcaaggtttaaaccctgagtggatgcgctactacatcgccgccaaactcaacagcaaaatcgaagacatcgatttgaacctgcaagactttatctcacgcgtaaacagcgacctcgtcggcaaatacgtcaacatcgccgcccgcgcctcaggttttatcgccaaacgctttgaaggccgtctgaaagacgttgccgacagcgcattgctggcaaaacttgccgccgaaagcgacaccatcgccgagcaatacgaaaaccgcgaatacgcccgcgccctgcgcgatatcatggcattggcagatgccgtgaacgaatacgttgatgccaacaaaccttgggaactggcgaaacaggaaggtcaagacgaacgcctgcacgaagtgtgcagcgagctcatcaacgccttcaccatgttgaccgcctacctcgcccccgtcttgccgaaagtggccgaaaatgccgccaaattcctgaatttggaagccatcacttgggcaaatacacgcgaaaccttgggcaaacacgccatcaacaaatacgaacatctcatgcaacgagtggagcaaaaacaagtggacgatttaatcgaagccaacaaacaaagcatcgccgccgcagccgcacctgccgccgaagagggcaaatacgaaaaagtcgccgaacaggcgagtttcgacgactttatgaaaatcgacatgcgcgttgccaaagtattgaactgcgaagctgtcgaaggcagcaccaaacttttgaaattcgacctcgatttcggttttgaaaaacgcatcatcttctccggcatcgccgcgtcttacccaaatcctgccgaattgaacggccgcatggtcatcgccgtcgccaacttcgccccgcgcaaaatggcaaaattcggcgtatccgaaggcatgattctctccgccgccacggcagacgggaaactgaagctcttggatgtggatgcaggcgcgcaaccgggcgacaaagtcggttaa

SEQ ID NO: 63287 - DNA, 1302 bp, Neisseria meningitidis
atggctatttaccaatcaggcgtgatttttgaccaagtggataccgccaatcccgattgctggacattgggcgaatacgtcaaacgtggcggttataccgccctgcgtaaaatcctgtccgaaaatatctcgcaaaccgatgtaattgacgaagtcaaaacctccggcttgcgcggtcgtggtggtgcgggcttcccgactggtttgaaatggagctttatgccccgttccttcccgggcgaaaaatatgtggtttgtaacaccgacgaaggcgaaccgggtacatttaaagaccgtgacatcatcatgttcaatcctcatgccctgattgaaggcatgattatcgccggttacgcgatgggtgcgaaagccggctacaactatatccacggcgaaatttttgaaggctaccaacgttttgaagccgctttggagcaggcgcgtgccgcaggctttttgggtaaaaatattttgggttcggattttgaattcaaactcttcgcccaccacggttacggcgcatatatttgcggcgaagaaaccgcattgctcgaatcgttggaaggcaaaaaaggccagcctcgctttaaaccaccattccctgcttcgttcggcctgtacggcaaaccgactaccatcaacaataccgaaacgttctcctccgttccattcattatccgtgacggcggacaggcgtttgccgataaaggtattccgaatgcaggcggtaccaaattattctgtatttccggccatgtcgagcgtccgggcaactatgaagtgccattgggcacgccgtttgccgaagtcctgaaaatggcaggcggtatgcgcggcggcaaaaaactcaaggccgttattcctggcggttcgtccgcgcccgtattgcctgccgacatcatgatgcagacaaatatggactacgactcgatttccaaagccggctccatgctcggttccggcgcgattatcgtgatggacgaagatgtgtgcatggtcaaagcccttgaacggttaagctacttctactacgacgaatcctgcggccaatgcaccccctgccgcgaaggcactggctggctctaccgcatcgtccaccgcatcgtagaaggcaaaggccgcatggaagacttggatttgctggattccgtcggcaaccaaatggcaggccgcaccatctgcgcccttgccgatgccgccgttttccctgttcgcagctttaccaagcatttccgtgatgagtttgtgcattacatcgaacacggcgggccgatgaaagagcataagtggggagggtggtaa

SEQ ID NO: 63288 - DNA, 372 bp, Neisseria meningitidis; identical to SEQ ID NO: 40198

SEQ ID NO: 63289 - DNA, 699 bp, Neisseria meningitidis
atgagttttgaaatttaccgttacaacccggatgttgatgccaagccttatatgcagcgttacgagttggaattggaaccgaccgacgtgaaacttttggatgctttggtacgcctgaaagcacaagacgataccttgtctttccgccgctcctgccgcgaaggcatttgcggatcggacggtatgaacatcaacggcaaaaacggcttggcgtgtttgaccgatctgcgtggcttgaaacagccagttaaaatccgtcctctgccaggtctgcctgttatccgcgacctgattgtggatatgacccagttcttcaaacaataccattccgtcaaaccttatgttgtcaacgataatccgattgatgcggacaaagagcgtctgcaaactcaggaagagcgtaaagagttggacggtttgtacgagtgtattttgtgcgcctgctgttcgactgcctgcccgtcattttggtggaaccctgataaattcgttggtccgtccggtttgctgaatgcttaccgtttcattgcggacagccgtgataccatcactaatgagcgtttggataatctgaacgacccataccgtttgttccgttgccacaccattatgaactgtgtggacgtatgtcctaaacacttgaatccgacccgagccatcggtaagattaaagagattatgttgaaacgggccgtttaa

SEQ ID NO: 63290 - DNA, 339 bp, Neisseria meningitidis
atggaacgcaaatatttccatgaaaattatttatataaaaagccatttatttttaaaaaatctttagatgtaagttgtatttcgtggaaagaaatcaatgaattgtatcaacgtgcagaccctactgattggcaatttaagttccgaaaaggggaaataattccaaaagaagcctatgttgaatcattcaatgatgtgggtaggatacgtcatcgatttaataaaacagccgtgtatcagtatttgcaagatggcgcgacaatggtttataaccgtattgataatgagccatttgttgatagtattgctaaacaaattgctcagtttgctcaagcataa

SEQ ID NO: 63291 - DNA, 1116 bp, Neisseria meningitidis
atgcttaaatttaccttacacaaaaaagacggatacgcccgacgcggcacgctggagttgaaccacggcaaaattgaaacgccggtatttatgcctgtcggtacttacggctcggttaaggcgatgaacccgcaaaacctgcacgacatcaaggcgcaaattattttgggcaacacttatcatttgtggctgcgtccgggcttggaggtcgtcgaacagtttggagggcttcacggctttatcggctgggacaaaccgattctgaccgactcgggcggttttcaggttttttctttgtcggatatgcgcaagctgacggaagaaggctgtacgttcaaaagcccgatcaacggcgacaagctgtttttatcgcctgaaatttccatgaaaatccaaacggttttgaactcggacatcgcgatgcagctggacgaatgcacgccgggcgaagcaacgcgcgaacaggcgaaaaaatcgctgcaaatgagcctgcgctgggcggaacggagcaaaaaagcctttgaagatttgaaaaacccgaacgcgctgttcggcatcgtgcaaggcgcgatgtatgaggatttgcgcgaagaatcgctgcgcggtttggaacagtttgattttcccggccttgccgtcggcggtttgtccgtcggcgaacccaagcccgaaatgtaccgtatgctgcgcgccgtcggtccgattctgccggaacacaagccgcattacctgatgggcgtaggcacgccggaagacctcgtgtacggcgtggcacacggcatcgatatgttcgactgcgtgatgcccacccgcaatgcacgcaacggctggctgtttacccgtttcggcgatttgaaaatcaaaaacgccaaacacaagctcgacaagcgtccgatagacgaaagctgcacctgctacgcctgccaaaacttcagccgcgcctacctgcaccatctgcaccgcaccggcgaaatcttgggcgcacagttgaacaccatccacaacctgcatttctaccaagtcattatggcggaaatgcgcgaagccgtcgaacaaggcaaatttgccgactggcaggcgcgattccacgaaaaccgcgcacgcggcacagactga

SEQ ID NO: 63292 - DNA, 264 bp, Neisseria meningitidis
ttgcgcccgggcggctcgtggctcgcgctcaaagccctccccctctgtctgccgctttcaggtatcttgaaaaagaaaatctatacctaccaatacagctccatgctggttctgatttactttgccgaagccgtcatgcgcctgttcgacgcctatcccgcagaacagatttgcgccgcgctttccgcagtattcagcatcatcttcttcatatcctgcctgtcgttcgtcaaacaatacaaggaaacaaacaatgcccgctga

SEQ ID NO: 63293 - DNA, 453 bp, Neisseria meningitidis
atggcaaaaccgctcaaataccccgtttccgcactggtcgtcctttatagcggggacggcggcatcctgctcatcgaacgcacgcatccgaaaggattttggcagtcggtaaccggcagcctcgaaccgggcgaaaccgtcgcacaaacggcaaggcgcgaagtttgggaagaaaccggcatcctgctggcggacgggcagcttcaagactggcacgacagcacggtttacgaaatctaccaccactggcggcaccgctatccaaaaggcgtgtttgaaaaccgcgaacacctcttctctgccgaaatcccgcgcgatacgcccgtcgtcctgcaacccgaggaacacgtctcctacggctggttcgatatggaagaagcggcggaaaaagtgttttcctcgtccaacaggtgcgcgattctggaactgggcaggtttttgggcaaacggtaa

SEQ ID NO: 63294 - DNA, 372 bp, Neisseria meningitidis; identical to SEQ ID NO: 39277

SEQ ID NO: 63295 - DNA, 375 bp, Neisseria meningitidis
atgattatccttcacggcattccaaattgcgacacagtcaaaaaagccaaaaacaggcttgccggatacggcttggagtttgaatttcgggatttcaaaaaacagatgccgtctgaagcggaaatctgctcgtggctggaacaagtgcctttggaaaccctgctcaacaaacgcgggacgagctggcgcaaacttgatgccgaaacacagcaaaaagtgctgtcctcgacggcggaggccgtcaaactgatgtccgaaatgccgagcctgatcaagcgtcccgtattggagtgcggcggcaaggtttacgccggcttcagcgaagaaacctacgacggcatcttcaaccggcaagccccgtgcagacagggataa

SEQ ID NO: 63296 - DNA, 312 bp, Neisseria meningitidis; identical to SEQ ID NO: 38726

SEQ ID NO: 63297 - DNA, 1008 bp, Neisseria meningitidis
atgagcaccttcttccggcaaaccgcacaagccatgattgccaaacacatcgaccgtttcccgctattgaagttggaccaggtaattgattggcagccgatcgaacaatacctgaaccgtcaaagaacccgttacctccgagaccaccgcggccgtcccgcctacccgctgttgtccatgttcaaagccgtcctgctcggacaatggcacaacctctccgatcccgaactcgaacacagcctcatcacccgcatcgatttcaacctgttttgccgtttcgacgaactgatcatccccgattacagtaccttatgccgctaccgcaactggctggcgcaagacgacaccctgtccgaattactcaaactgattaactgccaactgaccgaaaaaggcctaaaaatagagaaagcatccgccgccgtcgttgatgccaccattatccagaccgccggcagcaaacagcgtcaggccatagaagttgacgaagaaggacaaatcagcggtcaaaccacaccgagtaaggacagcgatgcccgttggataaagaaaaacggcctctacaaactcggttacaaacaacatacccgtaccgatgcagaaggctatatcgagaaactgcacattactcccgccaatgcccatgagtgcaaacacctgtcgccgttgttggaagggttacccgaaggtacgaccgtctatgccgacaaaggctacgacagtgcggaaaaccggcaacatctggaagaacatcagttgttggacggcattatgcgcaaagcctgccgcaaccgcccgctgtcggaagtgcaaaccaaacgcaaccgatatttgtcgaagacccgttatgtggttgaacagagcttcggtacgctgcaccgtaaattccgctacgctcgggcagcctatttcggactgattaaagtgagtgcgcaaagccacctgaaagcgatgtgtttgaacctgttgaaagcggccaacaggttaagtgcgcctgttgccgcctaa

SEQ ID NO: 63298 - DNA, 1053 bp, Neisseria meningitidis
atgaaaccgacttaccaagacatcaaagccgctgcgcgttaccgctggcaggagatacacgccgccatcggcatagaccctaagtttttacgcaacaaacaccagccttgccccgcgtgtggaggcgaagaccgcttcagatacgacgacaaggacggcaaaggcacattcatttgcacccattgggagagcggagcgggcgacggtttcggcttggttatgcactttctaggctgcgattttcagacggcattaaagcaggtttcgggcattttaggcatggacgagacaaaccccttaccgataccgacaacgcgcccacagcctcaaccacgccccgaaaaagactatatcggcaaacttgccgcattgtgggacggggcagagccgttaacgcccgattgccccgttgtgcagtattggacatcacgcggcttaaacgcggcataccttcctgaaaacatccgccatcacgcaggcatggaatattggacgcagggggaggacggcaaaccgctgttcatcgggcgtttccacgcggcaatagcggcttccacacgcggcagcactgtttgcggtttgcacattacctatctggaagcacaacggggcggcggctttgccaaagcgcggattaagcacccccaaacgggcgaagatttgcccgccaagaaaatgcgaagccgcaaacagggcgcaatgacgggcggcgcggtttacctgttccccgtccctgaaaacgggcggctgatggtagcggagggcatagagaccgccttagccgcgcgtgaactgttcaacgcccatgattggggcttatgcgccgccctaagcgcaaacggcatgaagcggctggagctttcagacggcattaaagagcttgccgttatcgcagaccacgacgcaccgcgccccgtaggggaaacggcggcattaagcctggcaaaacgcgcccaaagtggcgggatagccgtccgatactggataagcggcacggcaggctatgacgcgctggacgaattgaacgaccgcaaacgcagcggcaaggcgtaa

SEQ ID NO: 63299 - DNA, 1092 bp, Neisseria meningitidis
atgaacgcccaaaccctgattgccaacgttgccgaactcgtcaaaaccaagctcaaacccatagtggacgacatcgaccgcaaaggatactaccccgaagcatttatgcgcgaactcggcgcaatcggcggattcggcgcagtcgggacagaagccgaaggcggcaacggcttaggcttggcaacgcaaatcgccgttttgcgcgaaatcggcaaagaatgcggcgcaacctccttcagcgcgtggtgtcaggcggcttgcgcgtggtatctgcaccaaacgcccaaccaagccgtcaaagacaaatacctcgccgacatcctgcaaggcagagtattggcaggtaccggaatgtccaataccgtcaaacaccttgccggcatcgaaaaacacaaccttcaagccgagcgcgcagacggcggctacacagtcaacggcgcgctgccgtgggtgtccaacatcggcgaagaccacatctgggcaaataccgcccaaatcggcggcggctacgtcatgtttatcaccggcggacaatgggaaggcgtaagcctgcaaaactgccccgaattttgcgccctcgaaggtacgcgcaccttcagcctgaacttcaaagacgtatttatccccgacgaagacatcatcgccgcgcccgaacagtttgccgactacatccaaagcatcaaagcaggtttcatcctcctgcaaatcggcatcggcgcgggcgtgattgacggcagcctcggcatcatccgcctcgccaacatcgtcaacgccgaagtcaaccgctatctcgacgacggctacgacagcctcaaagcaaggttggacggcgcatgggcagaaaccgaacggctcgccggtttggcatggaacaacacgccggacacattagcgaccctcaagctgcgcgaagccgccgccgtactggcacttgccgccgcccaatccgccgccctgcattccggcgcaaaaggctacctgatgcgcagtcccgcccaaaggcgcgtccgcgaagcaatgtttgtcgccatcgtaacccccgcgatcaaacacctccgaaaagaaatagcggcaatcgaagccgcaaaataa

SEQ ID NO: 63300 - DNA, 1338 bp, Neisseria meningitidis
atgacttttcaaaacaaaaaaatcctcgtcgccggactcggcggtacgggtatttccatgattgcctacctgcgcaaaaacggcgcggaggttgctgcgtatgatgcggagctgaagccggaacgcgtgtcgcaaatcggtaagatgtttgacgggttggtgttttacacgggccgtctgaaagatgcgctggacaacggtttcgatattctggcactcagccccggcatcagcgagcggcagccggatattgaggcgttcaagcaaaacggcggacgcgtgttgggcgacatcgaattgctggcggacattgtgaaccgccggggcgacaaggtaattgcgattaccggcagcaacggcaaaaccacggtaacgagcctagtcggctatctctgcatcaagtgcgggctggataccgttatcgcgggcaatatcggcacgccggttttagaggcggaattgcagcgtgaaggcaaaaaggcggacgtgtgggtgttggagctttccagcttccaactggaaaacaccgaaagcctgcgcccgactgcggcgacggtgctgaacatttccgaagaccatctcgaccgctacgacgacctgctcgactacgcgcataccaaggacaagattttccgtggcgatggcgttcaggttttgaatgcggacgatacgttctgttgtgccatgaagcgcgccgggcgcgaggtaaaatggttttcgttggaacacgaagccgatttttggttggaacgcgagacaggccgcctgaaacaaggcaatgaagatttgattgccacgcaagacattccgttgcaaggcctgcacaatgccgccaacgtgatggctgccgtcgccttgtgcgaagccgtcggtttgccgcgaaatgaattgctcgaacacgtcaaaacctttcaaggcctgccgcaccgcgtggaaaaaatcggcgagaaaaacggcgtggtgttcatcgacgacagcaaaggcacgaacgttggtgcaaccgccgctgcgattgccggtttgcaaaatccgctattcgtcattttgggcggcatgggcaaagggcaggacttcacgcccctgcgcgacgcgcttgccggcaaggcaaaaggcgtgttcctgattggcgtcgatgcgccgcaaatccgccacgatttggacggctgcggtttgaatatgaccgactgcgccactttggaagaagcggttcagaaggcatatgcccaagccgaagcgggcgatatcgtgctgctcagccccgcctgcgcgagcttcgatatgtttaaaggctatgcgcaccgttcggaagtgtttatcggggcgtttaaggctttgtga

SEQ ID NO: 63301 - DNA, 729 bp, Neisseria meningitidis
atggcaggccatagcaagtgggcgaatatccagcataaaaaagcccgtcaggatgccaaacgcggcaaaatcttcacccgtttaatcaaagaaatcaccgttgcggcgcgtatgggcggcggcgatcccggcgcaaatccgcgcctgcgcctggctttggaaaaagcagccgaaaacaatatgcccaaagacaatgtgcaacgcgccatcgacaaaggcacgggcaacttggaaggcgtggaatacatcgagttgcgctacgaaggctacggcatcggcggcgcggctttgatggtggactgcctgaccgacaacaaaacccgcaccgttgcggacgtacgccacgcgtttaccaaaaacggcggcaacttgggtaccgacggctgcgtggcgttcaacttcgtgcatcagggctatttggtattcgaacccggcgttgacgaagacgcgctgatggaagcggctttggaagccggtgcggaagacgtggttgccaacgacgacggttccatcgaagtcattaccgcgccaaacgattgggcgggcgtaaaatccgctttggaggcggcaggttacaaatccgttgacggcgacgtaaccatgcgcgcccaaaacgaaaccgaactctccggcgacgatgccgtcaaaatgcaaaaactgattgacgcgctggaagacttggacgacgtgcaagacgtttacacttccgccgtattgaatttggactga

SEQ ID NO: 63302 - DNA, 5952 bp, Neisseria meningitidis
atgaataaaggtttacatcgcattatctttagtaaaaagcacagcaccatggttgcagtagccgaaactgccaacagccagggcaaaggtaaacaggcaggcagttcggtttctgtttcactgaaaacttcaggcgacctttgcggcaaactcaaaaccacccttaaaaccttggtctgctctttggtttccctgagtatggtattgcctgcccatgcccaaattaccaccgacaaatcagcacctaaaaaccagcaggtcgttatccttaaaaccaacactggtgcccccttggtgaatatccaaactccgaatggacgcggattgagccacaaccgctatacgcagtttgatgttgacaacaaaggggcagtgttaaacaacgaccgtaacaataatccgtttctggtcaaaggcagtgcgcaattgattttgaacgaggtacgcggtacggctagcaaactcaacggcatcgttaccgtaggcggtcaaaaggccgatgtgattatcgccaaccccaacggcattaccgtgaacggcggcggctttaaaaacgtcggccgcggtatcttaaccaccggtacgcctcaaatcggcaaagacggtgccttgacgggatttgacgtgcgccaaggcacattgaccgtcggtacgtcaggttggaacgacaaaggcggagccgattacaccgaagtgcttgcccgtgcagttgctttgcaggggaaattacagggtaaaaacctggcggtttctatcggtcctcagaaagtagattacgccagcggcgaaatcagtgcaggtacggcagcgggtacgaaaccgactattgcccttgatactgccgcactgggcggtatgtacgcagacagcatcacactgattgccaatgaaaaaggcgtaggcgtcaaaaatgccggcacactcgaagcggccaagcaattgattgtgacttcgtcaggccgcattgaaaacagcggccgcatcgccaccactgccgacggcaccgaagcttcaccgacttatctctccatcgaaaccaccgaaaaaggagcggcaggcacatttatctccaatggtggtcggatagagagcaaaggcttattggttattgagacgggagaagatatcagcttgcgtaacggagccgtggtgcagaataacggcagtcgcccagctaccacggtattaaatgctggtcataatttggtgattgagagcaaaactaatgtgaacaatgccaaaggcccggctactctgtcggccggcggtcgtactacgatcaatgatgctactattcaagcgggcagttccgtgtacagctccaccaaaggcgatactgaattgggtgaaaatacccgtattattgctgaaaacgtaaccgtattatctaacggtagtattagcagtgctgctgtaattgaggctcaagacactgcacacattgaatcgggcaaaccgctttctttagaaacctcgaccgttgcctccaacatccgtttgaacaacggtaacattaaaggcggaaagcaggtggtactgatggctgatggcgacattcaggcaaaagcctccaatctgaatgcatccggcaatctgtatattcatgcaggtaaggatctggatttgaatgccgataaagacttatcaacacaaagtatcagcctgagggcagacaacaccgccctcatcagtagcaacggtaacaccttgactgcagaaaagaatctggatattcaggcaggtagcttgagtgtgcgtcaaagtaatctgcaatccagtggcggtaatgtgcagatgagcgcgactaaaggcaacattagcttgaatcagagttggataaatgccagtcagaatattgatacggcagcacttcaaggcaatattatttcagacggtctgactgctgttgccgaagttggacgcgtatctcttcttgccaacggcaatgttgatttcaacggtctaaataccttgattgcggaaggagacattaatgctggttcagtcggtaaaggccgtctgaaaatggacaataccgatatttatgcttctgcaggcgatgtgaaactggttgccggaggtcaattagatttaggcaacggcaccgttaacggcggtcatatcagcttagacagcaataaaggcagcatggtggtgcagaatgtacacctgaatgcccgcgcatcactgaaagtggatgcggatcaaactttaaccattaataacagcaagctcaattccggtcacaatacccagattaatacaaatcatggtcatatgacgcttaatcagcttgatgctcattcacatcgtcatatgagtatcagtgcacagggtaaaggcaaaggaaaagacagcggtcaaattttacaaaacgaccagcaaaacagtaaaagtactttggcggcagatggtgtattgtcattgaacagcagcgcattacaggttttggacaatactaccctgcgcggtggcgcgataaacatcaaagctggcggaggcatcatcaaacgggggcatatcgattgggaaacccaagatacggcaactatgcgttcagcggaactgaaaccactgtccggtatgatgtcgatagaatcgggcggtaataaccctttaaccgttgaacccggtaaccgtatcgtttctgcaggtgatttggccgtgaaacacaacggcacattccaaatcagtgccagagcaggaaataacggcaatccgagtgcgcaaacagccagcgtttcagctaaaggcaatatcgggattgtggcgggagaggtggatattgatgcagcaaatattgccgcagggaaagatttggctttagtggcaactaaagggaatatttcactaaacagtattaggaatacgtttagtaactatcaattgaaaacagataaacacaatatcacacagcaacttactgatgtagagcaggagcttagtaagttaacgagcgatcctaaatatcgtaaagcacaggatcttccacaaatgttgaggcgtaaatataagaggcgtgacaaagtattcggtgatagtgaggccagattacgtggtttacgagcagagataaatgctgctgatgaggcttgggcagaactccaatccccagtaaaagcgttacttgaacgtaaacaattgttacaacaagcccttttaacagtttcccaaccgggtagtggtcacgaaaaccaaggtagcacccttagcggtcaaaatatcaaactgctcgctgcaggtggtatccgtatccagggctccaaagttgctgccacccaacaggcaaatatccaagctgcaggatttttacctgcaccagccgcagaggaactgcaagaaggtcgacttcaatcagccattgacatcagcggtgtatttgatacttttgaatatggtcagcaaggcagcgataaatacggctatgccattttcagcaggccatctgaaatttcaggaaaaacaggtgttaccctctctgcaccaaatgccaatgagaacagccgcatcagtctgagtgcggcaaacatcgaagctgaaaacggcaaaatcaaaattcaatcttacggtgaccaatattactatgcgagacagagcgaactctatacctttgaacgccgcagctacaaaaccggcaaatggtacaaccgcaaacacattaccgaagtcaaagaacacaaaaacgccaagcccgacgcagtaaccctcagcgcatcccaaggcatcgacatcaaatctggtggcagcatcgacgcctacgccaccgcattcgatgcccccaaaggcagcattaacatcgaagccgggcggaaattgacactctatgccgtagaagagctcaactacgacaaactagacagccaaaaaaggcgcagatttctcggcatcagctacagcaaagcacacgacaccaccacccaagtcatgaaaaccgcgctgccctcaagggtagttgcagaatcagccaacctccaatcgggctgggataccaaactgcaaggcacacagtttgaaaccacactgggtggcgcaaccatacgcgcaggcgtaggtgagcaggcacgggcagatgccaagattatcctcgaaggcatcaaaaccacgatccacaacgaaaccgtgagcagcagcaaatctgctctatggcaaaaacaggcaggacggggcagtaacatcgaaaccttgcaattgccgagtttcaccggtcccgttgcgcccgtactgaccgctcccggcggctatatcgccgacatccccaaaggcaacctcaaaaccgaaatcgaaaccctcaccaagcagcccgagtatgcttatttgaaacaacttcaagttgcgaaaaacatcaactggaatcaggtgcagcttgcttacgacagatgggactacaaacaggagggcttaaccgaagcaggtgcggcgattatcgcactggccgttaccgtggtcacctcaggcgcaggaaccggagccgtattgggattaaacggtgcggccgccgccgcaaccgatgcagcatttgcctctttggccagccaggcttccgtatcgttcatcaacaacaaaggcgatgtcggcaaaaccctgaaagagctgggcagaagcagcacggtgaaaaatctggtggttgccgccgctaccgcaggcgtagccgacaaaatcggcgcttcggcactgaacaatgtcagcgataagcagtggatcaacaacctgaccgtcaacctggccaatgcgggcagtgccgcactgattaataccgctgtcaacggcggcagcctgaaagacaatctggaagcgaatatccttgctgctttggtgaatactgcgcatggagaggcagccagtaaaatcaaacaattggatcagcactacattgcccataagattgcccatgccgtagcgggctgtgcggcagcggcggcgaataagggcaagtgtcaagatggcgcgataggcgctgcagtcggtgagattgttggtgaggctttggttaagaatactgatttcagtcgtatgagtgcgaccgaaatcgaaaaagctaaagcgaagattactgcctattcgaaactagcggctggcactgcgactgccgttgcaggcggggatgtgaatgctgcggcaaatgcagcacagatagcggtggagaataatactttgtatcctaaatgcattggtgcaaagtgtgatgaatttcaaaaggaacaacaaaaatggatacgtgaaaatcctgaagaatatcgagaagttttgcttcttcagacaggatttattccaattatcggtgatatacagagttttgtacaagcacagaccgctgccgatcacctgtttgctttgctgggtgtggttccgggtatcggtgaatcgatacaggcctataaagtagcgaaagcggcaaaaaatttacaaggcatgaaaaaagccttggacaaggcagcaaccgttgccactgcacagggctatgtcagtaaaaccaaaatcaaaatcggtcaaactgaattaagggttactgcagcaactgacaaacaattgctgaaagctattggcgaaggaagggacacgacaggtaaaatgaccgagcagttatttgactctttagctaaacaaaatggcttcagagtgctttcgggcggcaaatacggcggaaataacggttttgatcatgtatggcaggctgccgatggtagtgtcgttttgattgtagaaagtaagcagattaggaacggtacggtacagctgaatccgaatggtgcgggtggatatacgcagatgagtgaggattggattaaacaagttgcaaatagcttacctgatggtagtcctgctaaagctgctgtcttcaaagcagagcgggaaggcaaattaaaaacagcaatagcaggcgttgatcgtcaaacaggtaaggccgttattctttctgtcaaagttccttctaaaaccaatataaggagataa

SEQ ID NO: 63303 - DNA, 1161 bp, Neisseria meningitidis
atgaatatggaaaattatttttctaacttaaatttagacatcagaacacataaactcggcacatttaccgatcaaaaagtaaccccggatgtattatgtgccgtagcagaatgtatcatcgaatatattgaaaatattggagaaatatttagcattaacgatattcgttattcagattatgccgaatatatcgccaccgccgtatttaaaaaaccatccattgaaaatgccggtagcgaatacaataaatttttttcacaaccgattaaaatgctgagctattgtggcgtattaagcgaagaaaagttttctagatactatcggtacggagtacagaataataaaatcctgcaatatattgccaatcgtgaaagaaatgccctaaatttcatccaagcatttagtgaaaaattattaaaagacagtggtatttatccaaaatttgccgatttttttgcccagcctaataaaaatacgtttgaaagtatgaaaacggcgtttaccgatcttgttatccaaaacacacccaaaaataccgaagtagaagttcgccgtatttttaccaaaatcattaatccattggcttataaacataatacttttggcacaagaaaagggagtatttccaatacccccattacattagacgagctttattacaatcgcctaaactggcgagataaaggcaaagaaaaatcgctcactcgcaaagaagctcaagctctatttgccgatagtgcaaatgccgcaaatttgaattatttagttaataaagccaaaaaatttgtcaaaatgctacacaaaaccagcgaagttcaacgttttgatcccacagaagccaatcaggcacatcatatttttatggcaagcgaatttcctgatttagcatcgctgcctgaaaatctgatttgcctgacaccaaaccagcatttcaatttggcacacccaagcaataaaaccaccgttattgacaaacattaccagcgtatttgcctgatggcgaaactggatagtattgagcaagataaccgtgctaatacaggcaattacgattaccatgaatttattcatgtactcaatacaggatttaatacagatcagtttgatgtttctatgagttacgaaacattgaagcatcgtattttaatgttttatttttaa

SEQ ID NO: 63304 - DNA, 1410 bp, Neisseria meningitidis
atgaaatacatcagcacgcgcggcgaaaccgcacacaaaccgttcagcgaagttttattgatggggcttgcacccgacggcggcctgatgctgccggaacattatccgcaaatcgggcgggaagccttggacaaatggcgcggtttggcttatcccgaattggcgtttgaaatcatgcgcttgttcgttacggatattccggaggacgatttgcgcgatattctgaaccgtacttacacggaagcggcgttcggtactaaggaaatcacccccgtccgcacgctttcagacggcatcaaaatccaagccttgtccaacggcccgacgctggcgttcaaagatatggcgatgcagtttttgggcaatgcgtttgaatatgttttaaacaaagaaggtaaaaaactcaatatcttgggcgcgaccagcggcgatacgggttcggctgcggaatatgccttgcgcggcaaaaaaggcgtgaacgtatttatgttgtcacccgacggtaagatgagcgcgttccaacgcgcgcaaatgtacagcctgcaagacggaaatatccacaatatcgccgtgaaggggatgtttgacgattgtcaggacattgtgaaggcagtgcaaaacgatgccgcgttcaaggaaaaataccatatcggtacagtcaactcgattaactggggacgcatcgtcgcgcaagtggtttattactttgcgggctatttcaaggcgacgcaaagcaatgacgagcaggtcagcttctgcgtgccgagcggcaacttcggcaacgtttgcgcgggacacatcgccaaacaaatgggcctgcctgtccgccgcctgattgtcgcgaccaatgaaaacgatgtattggacgagtttttcaaaaccggcgcgtaccgcccgcgcaacagcgcgcatacttatgttacctccagcccgtcgatggacatttccaaagcgtccaacttcgagcgtttcgtgttcgacctgatggatcgcgatcctcaggaaatcaatacgctgtgggcggaagtagcggcgggcaagggctttgacctgcgatttgccttggacaaagtcggcggcaaatacggctttacttccggcaagtccacccacgccgaccgcctcgccactatcaagcaggtttacgggcaagaccaagaactcatcgacccgcacactgccgacggcgtaaaagtcgcccgcgaagtgcgcgaagaaggtgaaacggtggtttgtttggaaaccgcgttggcggcgaaattcgatgcgaccatacgcgaagccgtcggcgatgtcgccattccgcgccctgccgcgctggaaggtttggaaaacctgccgcaacgcgtgcaaaccgtgccgaacagtgcggatgcggtaaaaggcatcatcgaacaaacccttgcctga

SEQ ID NO: 63305 - DNA, 387 bp, Neisseria meningitidis
atggcatacagcgataaagtaatcgaccactacgaaaatccccgcaacgtcggcactttcgacaaaaacgacgaatctgtcggcaccggcatggtcggcgcaccggcctgcggcgacgtgatgcgcctgcaaatcaaagtgaacgatgaaggcatcatcgaagatgcgaaattcaaaacttacggctgcggttccgccatcgcttcgtccagcctgattaccgagtgggtcaaaggcaaaagtctggatgacgcgctggcaatcaaaaacagcgaaatcgccgaggagttggaattgccgccggtaaaaatccactgctccatcttggctgaagatgcggtaaaagcggccgttgccgactaccgcaaacgtcaggaaaacagataa

SEQ ID NO: 63306 - DNA, 324 bp, Neisseria meningitidis
gtggcaacctccgcctccgacatcaaaggcaaatatgttcaaagcgttgaagtcgcaaaaggcgtcattaccgccacaatgctttcaaccggcgtaaacaaagaaatccaaggcaaaaaactctccctgtgggccaagcgtcaaaacggttcggtaaaatggttctgcggacagccggttacgcgcgacgccaccaacgccgacgacgttaccgccgacggcaacgacaaaatcgacaccaagcacctgccgtcaacctgccgcgatgattcatctgtcgtttgcatagaaacaccacctacggctttctataaaaatacctaa

SEQ ID NO: 63307 - DNA, 642 bp, Neisseria meningitidis
atgaccgatttccgccaagatttcctcaaattctccctcgcccaaaatgttttgaaattcggcgaatttaccaccaaagccggacggcggtcgccctatttcttcaatgccggcctctttaacgacggcttgtccacgctgcaactggcaaaattttacgcacaatccatcattgaaagcggcatccgattcgatatgctgttcggccccgcctacaaaggcattattttggcggcggcaaccgcgatgatgctggcggaaaaaggcgtgaacgtcccgtttgcctacaaccgcaaagaagccaaagaccacggcgaaggcggcgtgttggtcggtgcgccgcttaaaggccgcgtgctgattatcgacgacgtgatttccgccggcacatccgtacgcgaatcgatcaagctgattgaagcggagggcgcaacccccgccggtgtcgccatcgcgctcgatcgcatggaaaaaggcacgggtgagttgagcgcggttcaggaagtggaaaaacaatacggtctgcccgtcgcccccatcgccagcctgaacgatttgtttattctgttgcaaaacaaccccgaattcggacagttcctcgaacccgtccgagcctaccgtcggcagtacggcgtagaataa

SEQ ID NO: 63308 - DNA, 582 bp, Neisseria meningitidis
atggaagaaaaaaacgactacaccgacgcggcatccgacaaccgcaacgggcaggaaattgaagtcggaattgccggcgcaggcgaccggatacttgccgcgctgctgaaccaattgtttacctttttggttttgttggtgccgtttgccggactgattgcttttgccatcaagaatgaaggcaggattggcggcagtgaggaaatattcgggctgcttttgggcatgacttccttttgggtaggactggcgggcattttggtttataccgtcgttcaaatctactatatgagtcgggacgggcagtcattgggtaagaaaatcatgagaatccgcgtgttgaaaaccgacggccgcaatcccggttttgtcggcacggttttggtacgcgaaatcgcatggtcggttttggttgccattattgccgccgttatcggtcttgcagtaggtgacaacggagaaaacgccatcaacctgctggcattccttgccaactttgtcctgctctttatggtcaaacgcgaccgccgcacgctttacgacatactggcggatacggttgtcgtcaagctgcccaaataa

SEQ ID NO: 63309 - DNA, 195 bp, Neisseria meningitidis; identical to SEQ ID NO: 38181

SEQ ID NO: 63310 - DNA, 1542 bp, Neisseria meningitidis
atgaaaatcggcatcccacgcgagtcattatccggcgaaacccgcgtcgcctgtacgcccgccaccgtcgccctgctgggcaaactgggctttgaaaccgttgtcgaaagcggtgcaggtttggcggcaagtttggacgatgccgcttaccaaacagcaggcgcaaccgttgccgacaaagcggcggtttgggcctgccctttgatttataaggttaacgcgccgtccgaaggcgagctgccgcttttgaacgaaggtcaaaccatcgtcagcttcctgtggccgcgccaaaacgaggctttggtcgaagccttgcgcgccaagaaagtcaatgcgctggcgatggacatggtgccccgtatttcccgcgcgcaggctttggacgctttgtcttcgatggcaaacatcagcggctaccgcgccgtgattgaagccgccaacgccttcggccgtttcttcaccggtcaaatcaccgccgccggcaaagtgccgcccgcgcaggttttggtgattggcgcaggtgtggcgggtctggcggcaatcggtacggcaaactcgctcggcgcagtggtgcgcgcattcgatacccgcttggaagtggcggaacaaatcgaatcgatgggcggcaagttcctgaaactcgacttcccgcaagaatcgggcggcagcggcgacggctacgccaaagtgatgagcgacgaatttatcgccgccgagatgaagctatttgccgaacaggcgaaagaagtggacatcatcatcaccaccgccgccattccgggcaaacccgcgcccaagctgattaccaaagaaatggtcgaaagcatgaaatccggctccgtcatcgtcgatttggcggcggcgacgggcggcaactgcgaactcacccgcccgggcgaattgtccgtaaccgacaacggcgtgaaaatcatcggttacaccgacatggcaaaccgccttgccggacagtcttcccaactttacgccaccaacttggttaacctgaccaagctgttaagcccgaacaaagacggcgaaatcacgctggacttcgaagacgtgattatccgcaacatgaccgttacccacgacggcgaaatcaccttcccgcctccgccgattcaagtttccgcccagccgcagcaaacgccgtctgaaaaagccgcgtctgccgccaagcccgagccgaaacctgtttccctgtggaaaaaactcgcgcccgccgtcatcgccgccgtattggtgctgtgggtcggcgcggtcgcacccgcagcattcctgaaccactttatcgtgttcgtcctcgcctgcgtcatcggctactatgtcgtttggaacgtcagccactcgctgcacacaccgctgatgtcggtaaccaatgccatctccggcatcatcgtcgtcggcgcgctgctgcaaatcggtcagggcaacggctttgtttcgctgctgtcgtttgttgccatcctgattgccagcatcaacatcttcggcggctttgcggtaacacggcgtatgctgaatatgtttaagaaagggtaa

SEQ ID NO: 63311 - DNA, 1311 bp, Neisseria meningitidis
atgagcgtaactgttgaaactttagaaaatctggaacgcaaagtagtgttgtccctgccttggtccgaaatcaacgcagaaaccgataaaaaactgaaacaaacccaacgccgtgcaaaaatcgacggtttccgtccgggtaaagcacctttaaaaatgattgcccaaatgtacggtgcgagcgcacaaaacgacgtgatcaacgagctggtgcaacgccgcttctacgatgttgccgttgcccaagagttgaaagtggcaggcttcccccgttttgaaggcgttgaagaacaagatgataaagaatccctgaaaatcgctgcgattttcgaagtattccctgaagtcgttatcggcgatttgtctgcacaagaagttgaaaaagtaaccgcttccgtcggtgatgccgaagtggaccaaaccgtagaaatcctgcgcaaacaacgcacccgcttcaaccatgtcgaacgcgaagcccgaaacggcgaccgcgtcatcattgactttgaaggcaaaatcgacggcgaaccttttgcaggcggcgcatccaaaaactacgccttcgtattgggcgcaagtcaaatgctgcctgaatttgaagccggcgtagtcggcatgaaggctggcgaaagtaaagacgttaccgtcaatttccctgaagactaccacggtaaagacgttgccggtaaaactgccgtgttcaccattacgctgaacaacgtttccgaagcgactctgcctgaagttgatgccgacttcgccaaagccttgggtattgcggatggcgacgttgccaaaatgcgtgaagaagtgaagaaaaacgtaagccacgaagtggaacgccgcgtaaacgaacaaaccaaagaatccgtaatgaacgcgctgctcaaagccgtagagctgaaagcacctgttgctttggtcaatgaagaagccgcacgcttggcaaacgagatgaaacaaaacttcgtcaaccaaggcatggccgatgccgcgaacttggatttgcctttggatatgttcaaagaacaagccgaacgccgcgtgtctttgggtctgattttggccaaactggttgatgaaaacaaactggaaccgactgaggagcaaatcaaagccgttgtcgccaacttcgcagaaagctacgaagatcctcaagaagtaatcgactggtactacgcagagccttcccgcctgcaagccccgacttctttggcgatagaaagcaacgtcgttgatttcgttttgggtaaagccaaagtaaacgaaaaagctttgtcttttgacgaagtgatgggcgcacaagcctga

SEQ ID NO: 63312 - DNA, 1362 bp, Neisseria meningitidis
atgctgaaaaaagttttaatcgccaaccggggcgaaatcgcattacgcgtactccgtgcctgccgcgaaatgggcattgccaccgtcgccgtgcattccgaggccgacaaagacagcctgcacgtcaaactcgccgacgaatccgtgtgcatcggccctgccgcttccgcgcaaagctaccttaacgtccccgccattatcgccgccgccgaagtaagctgcgcggacgctgtccatccgggctacggtttccttgccgaaaacgccgatttcgccgaacaggtcgagcagtccggctttacctttatcggcccgaaacccgacaccatccgcctgatgggcgacaaagtctccgccaaacacgcgatgatagcggcaggcgtaccctgcgtccccggttctgacggcgcattgcccgacgacggcgaagaaatcctcaaaatcgccgataaagtcggttatcccgtcattatcaaagcctctggcggcggcggcggtcgcggtatgcgcgtggtcgagaaaaaagaagacctcctccaatctgtcgaaatgaccaaggcagaagcaggcgcggcattcggcaacccgatggtttacatggaacgctatctgcaacgtccgcgccacgtcgaaatccaagtgattgccgacgaacacggcaacgccatctaccttgccgagcgcgactgttcgctgcaacgccgccaccaaaaagtcatcgaggaagcaccggctccgttcatcactgaaaaagaacgcgccaaaatcggcaacgcctgtgccgacgcctgcaaacgcatcggctatcgcggcgcaggtacgtttgaattcctgtacgaagatggcgaatttttctttatcgagatgaatacgcgcgttcaggttgagcatccggttaccgagctgattaccggcgtggacatcgtgcaggagcaactccgcatcgccgccggcctgcctttgcaatacaaacaaaaggatattcaagtcgaaggccacgcgtttgagtgccgcatcaatgccgaagacccgtacaacttcatccccagcccgggcccgattgaaagctgccacctgcccggcggcttcggtatccgcgtggacagccacatttaccaaggctaccgcatcccaccgtactacgacagcctgatcggcaaaatctgcgtacacggcaaaacgcgtgaacaggcaatggcgaaaatgcgcgtcgcactcgccgagctggcggtaaccggcatcaaaaccaatacgccgcttcaccgcgacctgttcgccgatgcgggtttccaaaaaggcggcgtcagcatccactatttggaacactggctggaagatcgcaaagccaaacaggacaaataa

SEQ ID NO: 63313 - DNA, 1629 bp, Neisseria meningitidis
atgatttctaccaacggcatcaccatgcagttcggcgcgaagccgctgtttgaaaacgtatccgttaaattcggcgaaggcaaccgctacggtttgatcggcgcgaacggctcaggcaaatccaccttcatgaaaatcctcggcggcgatttggaacagacggccggcgaagtggcgattgaaaacggcgtgcgtttgggtaaattgcgccaagaccagtttgcctacgaagacatgcgcgtgctggacgtggtgatgatggggcataccgaaatgtgggcggcgatgaccgaacgtgatgcgatttacgccaatcccgaagccaccgaagacgactacatgaaagccgccgaactggaagccaagttcgccgaatacgacggctacaccgccgaagcgcgcgctgccgaactgttgagcggcgtgggcatttccgaagatttgcacaatgcgaccatggcagaagtcgccccgggcttcaaactgcgcgtattgctggcgcaagccctgttctccaaaccagacgtattgcttttggacgaaccgaccaataacttggacattaataccatccgctggctggaaggcgtgttgaaccaatacgactccaccatgatcatcatctcgcacgaccgccactttttgaacgaagtctgcacccacatggcggatttggactacaacaccatcaccatctatcctggcaactacgacgactacatgctcgcttccgcccaatcgcgtgagcgcgccctgaaggacaacgccaaagccaaagagaaactgcaagagctgcaagagttcgtcgcacgcttctctgccaacaaatccaaagcccgtcaggcaaccagccgtctgaaacaggcagataaaatcaaatcggagatggtcgaagtcaaaccttccacccgccaaaacccgtatatccgttttgaagccgatgaaaaagccaagttgcaccgtcaggctgtggaagttgaaaaactggccaaacgttttgaaacccagttgtttaaaaacctgaacttcatcctcgaagcgggacaacgcctcgccatcatcggcccgaacggcgcaggcaaatccaccctactgaaactcctcgccggcgcctacaaccccgaatattcagacggcctgttgccggacgaaggcagcattaaatgggcggaaaaagccagtgtcggctactatccgcaagaccatgaaaacgacttcgacgtcgatatggacctgagcgaatggatgcgccaatgggggcaggaaggcgacgacgaacaagtcatccgcggcactttggggcgtttgctcttcggcagtaacgatgtcgtgaaaaaagtgaagattctctccggcggcgaaaaaggccgtatgctttacggcaaactgttgctgttgaaacccaatgttttggttatggacgaaccgaccaaccatatggatatggaaagcatcgagtcgctgaatatggcgttggaaaaatataagggcacgctgattttcgtctcgcatgaccgtcagtttgtatcttcattggctacccaaatcatcgaattggatggcaaaggcggatatgaacactacttgggcgattacgaaagttacttggagaaaaaaggcgtagcataa

SEQ ID NO: 63314 - DNA, 987 bp, Neisseria meningitidis
atgcaataccgaatcagaagagaaaacgaagcacccgaagcaaaaaatgcgggggaaaccttatgggagcgcgatatgatgcgcgaagtgctgctgtccgcctatcgggacaggcgcagggagcggatgtggaaaaacatctggcgcgccgtcagcaccctgattctggttgccctgattgcaggcattttccgaaaagacgaagccgcattgcagttggcgggcaatacgccgcataccgcagtcgtcaacctgtacggcgaaatcggcaacggtgtagaagaccaggtcaaaaaactcaaagacggtatggaggccgcctacaaaaacccgcaggcaaaagccatcatcatccgcgccaacagtccgggcggctctcccgtcgtatccaatactgcctttgaggaaatacgccgtctgaaagcgcaacatcccggcattcccgtttatctcgtggcggaagatatgtgcgcgtccggctgctactacatcgcggcggcggcggacaaaatctatgccgacccgtccagcatcatcggcagcatcggcgttatcggcagcagtttcgacgcgaccggcctgatggaaaaaatcggcgtgaaacgcagggttaaaattgcaggcagcaacaaaggcatgggcgatccgttttcgcccgaaacgcccgaacagtcgaaaatctgggaagaaatgctgaccggcatacacggcgagttcatcaaagccgtcaaaaccggacgcggcgaccgcctcaaattccgacaatatcccgacgtgttcagcggtcgcgtgtacacaggcgcggatgcgctgaaagtcgggctggtggacggactcggcaatatttacagcgtggcgcgagacgtggtcaaagcccccgatgtggtggattacactccgaaggacgatttcggcagaatcttgggcagacgcttcggcgcagaactcaaagcaagcgtgcgcgaagccctgcaggccgtccggtag

SEQ ID NO: 63315 - DNA, 210 bp, Neisseria meningitidis; identical to SEQ ID NO: 41321

SEQ ID NO: 63316 - DNA, 924 bp, Neisseria meningitidis
atggatattgaaaccttccttgcaggggaacgcgccgccggcggataccgttgcggcttcgtagcgattgtcggccgtccgaatgtcggcaaatcaacgctgatgaaccatctcatcggtcagaaaatcagtattaccagcaaaaaggcgcagacgacgcgcaaccgcgtaacggggatttataccgacgataccgcgcagttcgtgtttgtcgatacgccgggttttcaaaccgaccaccgcaacgcgctcaacgaccgtttgaaccaaaacgttaccgaggcactcggcggtgtggatgtggtggttttcgtcgtggaagcgatgcgttttaccgatgccgaccgcgtcgtgttgaaacaactgcccaagcacacgcctgtggttttggtggtcaacaaaatcgataaggacaaggcgaaagaccgttacgcgctggaggcgtttgttgcccaagtgcgcgccgaatttgaatttgcggcggcggaggcggtcagcgcgaaacacggattgcggattgccaacctgttggagctgattaagccgtatctgcccgaaagcgtgccgatgtatcccgaagatatggttacggacaaatcggcgcgttttttggcgatggaaatcgtgcgtgaaaaattgttccgctatttgggcgaggaattgccttatgcgatgaacgtcgaagtggagcagtttgaagaggaagacggtttaaaccgcatctatatcgccgttttggtcgataaggaaagccaaaaggcaattttaatcggtaaaggcggagaacgtttgaagaaaatttccaccgaagcgcggttggatatggaaaaactgtttgataccaaagtatttttgaaggtctgggtcaaagtcaaatccggttgggcggacgacatccgcttcctgcgcgagctgggtttgtag

SEQ ID NO: 63317 - DNA, 435 bp, Neisseria meningitidis
atgactgagccgaaacacgaaatgccgacggaagagcaggttgccgcgcgcaaaaaagcaaaagccaaaatccgcaccatccgcatttgggcgtgggtcattttggcgttgctcgcttcaaccgccctgctctcccaatgcgcgatgtccaaaccgcaggcaaaacagaaaattgtcgagtcttgcgtgaagaatattccgtttgccgaaaaatggcaaaacgatttgcgagcccgcggtttagattcaaacaatacccgcctcgccgtcgactactgcaaatgtatgtgggagcagcctttggacagattgagcgagaaacagattagatccttcggcaaactcggcgcacaagaacagcttgacctgctcggcggcgcaaatgcctttgaagcacgtgacaagcagtgtgttgccgatttgaaatcagaataa

SEQ ID NO: 63318 - DNA, 1446 bp, Neisseria meningitidis
atgaactggtctgatttgaatttaatgcccgccatgcccgaaatcgtgctgcttgcgctgctggtgttattgttgctggcggacttgtgggtcagtgatgacaaacgccgttggacgcattacggcgcgttggcaacggtggcggttacggctgtggtgcagcttgccgtttgggaacagggcagcacgtcttcgttcaacggcatgtatattgcagacggtatgtcgcgtttggcaaaaatggttttatatgccttgacgtttgccctgtttgtttatgccaagccctacaaccaagtgcgcggtattttcaaaggcgagttttacactctgtcgctgtttgccctcttgggcatgagcgtgatggtgagcgcggggcattttttaactgcctatatcggtttggaactcttgtcgctcgccctttacgccctgattgccctgcgccgcgattccggctttgccgccgaagccgccttgaaatattttgttctgggcgcgctggcatccggcctgctgctctacggtatttctatggtttacggcgcaaccggttcgctggaatttgccggcgtgctcgcctcttccttcaatgaagaagcaaacgaatggctgttgaaactgggtctggtgtttatcgtcgtcgccgttgcgttcaaactcggcgcggtgccgttccatatgtgggtgcccgacgtgtatcacggcgcgcccacttctgttaccgccctagtcggcactgccccgaaaatcgccgccgtcgttttcgctttccgcatcctcgttaccgggttgggaaccgtgcatcatgactggtctctgatgtttgccctgcttgccgccgcctcgctgctggtcggcaaccttgccgccatcatgcagaccaatatcaaacgtatgctcgcctattccaccgtatcgcatatggggtttatcctgctggcgtttatggcgggcgcggtcggctttgcggcggggctgtattacgccattacctacgcgctgatggcggcggcagggttcggcgtgttgatggtgttgtcggacggggacaacgagtgcgaaaacatcagcgatttggcagggttgaaccaacaccgcgtatggcttgcctttttgatgctgctggttatgttctccatggcaggcattccgccgctgatgggtttttacgccaaattcggcgtgattatggcactcttgaaacaaggctatgtttggttgtccgtatttgccgtcatcatgtccctgattggcgcgttctactacctgcgcgtggtcaaagtcatgtattttgacgaatccggccgcgcccatcccaccgtcggcggcaacaatgccgcaaaattccttttgagcgtcaacgcgctgctgttggtgctgtggggcattatgccgcaaaccgttatcgactggtgcgccaaggcgttggaaaacacgctgtaa

SEQ ID NO: 63319 - DNA, 318 bp, Neisseria meningitidis; identical to SEQ ID NO: 39456

SEQ ID NO: 63320 - DNA, 633 bp, Neisseria meningitidis; identical to SEQ ID NO: 39614

SEQ ID NO: 63321 - DNA, 987 bp, Neisseria meningitidis
atgtcttctacgccgaataaacaagccggatatccccgactggtcgccgatatcggcgggacgaatgcacgctttgcgctggaaaccgcgccgcgcgtcattgaaaaagccgccgtgcttccgtgtaaagactacgatacggttaccgatgcggtgcgtgcctatctgaatcaaagcggtgcaacagccgtacggcacgcggcatttgccatcgccaacccgattttgggcgactgggtgcagatgaccaaccaccattgggcgttttccatcgaaaccacccgtcagactttggggctggacaccctcatccttttgaacgactttaccgcgcaggcattggcggtaacgcagacttcaagcaaagacctgatgcaggtaggcgggcaaaagcctgtcgaatttgcccccaaagccgttatcggccccggtaccggcctgggcgtgagcggattggtgcacagccacgcaggctgggtggctttggcgggcgagggcgggcataccagtttcccgccgtttgacgatatggaagtgctgatttggcagtacgccaaaaacaaatacggccatgtttccgccgaacgctttttgagcggagcgggcttgagcttggtttacgaggctttggctgcaaaacagaaagccaaacccgccaaactgatgccgtctgaaatcacggaaaaggctttgagcggcacgtcgcctttgtgccgtcagactttggacatcttctgcgccatgctcggcacggttgcttccaacctcgccctgacgctgggcgcgcgcggcggcgtgtacctgtgcggcggcattattccccgcgtgttggaatacttcaaaacttccccgttccgcagccgtttcgagaacaagggcaggtttgaagcatatcttgccgcgattcccgtgtatgtcgtcttgagcgagtttcccggaatttccggtgcggctgcggctcttgacaaccatttgagaaacgtttaa

SEQ ID NO: 63322 - DNA, 660 bp, Neisseria meningitidis; identical to SEQ ID NO: 44330

SEQ ID NO: 63323 - DNA, 606 bp, Neisseria meningitidis; identical to SEQ ID NO: 36469

SEQ ID NO: 63324 - DNA, 933 bp, Neisseria meningitidis
atgaaaattgcaaacagcatcaccgaactaatcggcaacacgcctttggtcaaactgaaccgtctgaccgaaggtttgaaggcggaggttgccgtgaaactggaatttttcaatccaggcagcagcgtcaaagaccgcattgccgaagcaatgatcgagggtgccgaaaaagcgggcaaaatcaacaaaaacaccgtcattgtcgaagcaaccagcggcaatacgggtgtcggtttggcaatggtatgtgccgcacgcggctacaagctggcgattaccatgccggaaagcatgagtaaggagcgcaaaatgctgttgcgcgcgtttggtgcggagctgattctgacccctgccgccgaaggtatggcgggcgcgattgccaaagcgaaatccttggtggacgcgcatcccgacacttattttatgccgcgccagttcgacaatgaggcaaaccccgaagtccaccgcaaaacaaccgccgaggaaatttggcgggatacggacggcaaagtcgatgtcttcgttgccggcgtcggcacgggcggtacgattaccggcgtgggcgaagtgttgaaaaaatacaaacccgaagttaaagtggttgccgtcgagcctgaagcttcccccgtattgagcggcggcgaaaaaggcccgcacccgattcaaggcatcggcgcaggctttattccgaccgttttgaataccaaaatttacgacagcattaccaaagtgccgaacgaagcggcttttgaaaccgcccgcgcaatagcggaaaaagaaggcattttggtgggtatttcttccggtgcggcggtttggagtgcgttgcagcttgccaaacagcctgaaaacgaaggcaagctgatagtcgtgctgctgccttcttatggcgaacgctatctctctacgccactttttgcagatttggcataa

SEQ ID NO: 63325 - DNA, 993 bp, Neisseria meningitidis
atgaaaaaagaaagccgccccgcgtttgacgcggcagccgtatttgacgcggcagccgtaccggtatccgacagcgggtttgccgccaatgcaaatgtccgccgttttgtggacgatgaagtcgggaaaggggatttttcccgggcggaatggcaggatttttttgacaaagcggcttacaaggcggacatcgtcaagattatgcaccgcccctccacatcgcgtccgtggtatgtgttccgcacgggaaattcgggcaaggcgaaatttcgcggcgcgcgccggttttatgcggaaaaccgtgcgcttatcgatgatgtggcgcaaaaatacggcgtgcctgccgaacttatcgtggcggttatcgggattgaaacgaattacggcaaaaatacgggcagtttccgtgtggcggacgcattggcgaccttaggctttgattacccccgccgcgccgggtttttccaaaaagaattggtcgagcttttaaagctggcaaaagaagaaggcggcgatgttttcgcctttaaaggcagctatgcgggcgcaatggggatgccgcaatttatgccttcgagctaccggaaatgggcggtggattatgacggggacggacatcgggacatatggggcaacatcggcgatgtcgcggcatcggttgccaattatatgaagcagcacggttggcgcacgggcgggaaaatactggtgtctgcaacattggcgccgggtgcggatgttcaggcaatcattggcgaaaaaaccgccctgacgcggacggtggcggatttaaaggcgtacggcatcatccccggcgaagagcttgcagatgatgaaaaggcggttttgttcaaactggaaaccgcaccgggcgtgtttgaatattatttgggcttgaacaatttttatacggtatggcagtacaaccacagccggatgtatgtaacggcggtcagggacattgccaattcgcttggcggctcgggattgtaa

SEQ ID NO: 63326 - DNA, 402 bp, Neisseria meningitidis
atgaacacaacccgactgccgaccgccctcgtcttgggctgcctctgcgccgccgcttctgccgccgacaacaatatcatgacaaaagggcaaaaagtgtacgaatccaactgcgtcgcctgccacggcaaaaagggcgaaggccgcggaaccatgtttccgccgctctaccgctccgacttcatcatgaaaaaaccgcaggtgctgctgcacagcatggtcaaaggcatcaacggtacaatcaaagtcaacggcaaaacctacaacggattcatgcccgcaaccgccatcagcgatgcggacattgccgccgtcgccacttatatcatgaacgcctttgacaacggcggaggaagcgttaccgaaaaagacgtaaaacaggcaaaaggcaaaaaaaactaa

SEQ ID NO: 63327 - DNA, 309 bp, Neisseria meningitidis
atggttgaacgttacaaaaccatgattaccgaggcaaacggtaagattcaccgtctggaagattggggtcgccgccaactggcttacccaattaacaaaatccataaagcacattacgttttgatgaacatcgaaactactcccgaagttgttgaggagttggaaaccgcgttccgtttcaatgatgcggtattgcgtcatctgaccatcaaaaccaaacacgccgttaccgaagcatcccctatgttgggtggtgaaaaggctaagaacctgctgagcggtgcgtctgaagaagcggctgcccaataa

SEQ ID NO: 63328 - DNA, 1311 bp, Neisseria meningitidis
atgccgtctgaaagcaaactcgtgtcgcgcatcgtaaccgacagccgcgacagccgcgcgggcgatgtgtttttcgcattggcgggcgggcggtttgacgcgcatgattttgttgaagacgtattggctgctggtgcggcggcggttgtggtttcgcgcgaagattgcgttgcaatggatggcgcgttgaaagtcgatgacacgcttaccgcgttgcaaatgttggcgaaggcgtggcgcgataatgtgaatccgtttgtgttcggcattaccggttcgggcggcaagacgacggtgaaggaaatgctggctgcggtattgcgccgccgtttcggcgatgatgccgtgttggcgacggcaggcaacttcaacaaccatatcggattgccgctgactttgttgaagttaaacgaaaaacaccgctatgccgtgattgaaatgggcatgaaccatttcggcgaactggcggttttaacgcaaatcgccaaacccgatgccgcattggtcaacaacgtcctgcgtgcccatgtcggctgcggtttcgacggagtgggcgatattgccaaagcgaaaagcgagatttatcaaggcttatgttcagacggcatggcgctgattcctcaagaagatgccaatatggctgtcttcaaaacggcaacgcttaatttgaatacgcgcactttcggcgtcgatagcggcgatgtccacgcggaaaatatcgtgctgaaaccgttgtcgtgcgaatttgatttggtgtgcggcgatgagcgcgccgccgtggtgctgcctgttcccggccgccacaatgtccacaacgccgccgctgccgccgcgctggctttggctgcgggtttgagtttgaacgatgtggcggaaggtttgcaaggcttcagcaacatcaaaggccgtctgaacgtcaaatccggcatcaaaggcgcaaccctgattgacgatacctacaacgcgaaccccgacagtatgaaagccgcgattgacgtgttggcgcgtatgcctgcgccgcgtattttcgtgatgggcgatatgggcgaactgggtgaggacgaagccgccgccatgcacgccgaagtcggcgcgtatgctcgcgaccaaggcatcgaagcggcttattttgtcggcgacaacagcgtcgaagcggcggaaaaatttggcgcggacggtttgtggttcgccgccaaagacccgttgattcaagtgttgcgccacgatttgcccgaacgcgccaccgtgttggtgaaaggttcgcgctttatgcagatggaagaagtggtcgaggcattggaggataagtga

SEQ ID NO: 63329 - DNA, 384 bp, Neisseria meningitidis
atgaccgatacggatacccaagccgaccgcttcgagcagatgatgtggcaggcggtggacaaactttttgaacagcataacggcaaactcgaaagcatggacggacgggaacaggagctggttttgatttggcgggcggaagccgacatcggtaacggcggcatactgcaatttgtctgcaactggtgttttcccgccgccgaaaagactagttccgttctgaaaaaaatcggcgcgatacacagcgcaatgctgatccatcgggcggcagacgcattggacaaagaaatccgccgcctccaatcggaaggtaaaaacctgaaagaaatgtgggatataacatctcgacaacaaaaccgcctcactgccgaacagtctggatga

SEQ ID NO: 63330 - DNA, 327 bp, Neisseria meningitidis
atgagtgaggccaaatttatgaggattatcgtcttcttcgacctaccggttatcacggcggcaaagcgcaaagccgccaatcaattccgccagtttttattaaaagacggataccaaatgctgcaactttccgtatacagccgtatcgtcaaaggccgcgattcgttgcaaaaacaccacaatagactatgtgcaaaccttccgcaagaaggctcaatccgctgtttggagacaacagaaaagcaatatgccgccatgaaactgctgttgggcgagctgaaaacccaagaaaaaaaggtcaattcagaccaattattgttattttaa

SEQ ID NO: 63331 - DNA, 819 bp, Neisseria meningitidis; identical to SEQ ID NO: 37653

SEQ ID NO: 63332 - DNA, 939 bp, Neisseria meningitidis
atgcttgaactgaacggactctgcaaacgcttcggcgataaaaccgtcgccgacaacatctgcctgactgtcgggcgcggcaaaatactcgccgttttggggcggtcgggctgcggcaaatccaccctgctgaatatgattgcggggattgtccgtccggacggcggagaaatatggctgaacagggaaaacattacccgtatgccgcccgaaaaacgccgtatttcgctgatgtttcaagattacgcgctgtttccccatatgagtgcgctggaaaatgcggcattcggtttgaaaatgcaaaaaatgccgaaagccgaagccgaaagccttgctatggcggcacttgccgaagtcgggctggaaaatgaagcgcaccgtaagcctgaaaaactttccggaggcgagaagcaacggttggcgttggcgcgcgctttggttgtccgcccttccctgctgttgctggacgaatcgttttccagtttggacacgcatttgcgcgaccggctgcgccgcatgactgccgaacgtatccgaaacggcggcatccctgccgttttggtaacgcattcgcccgaagaggcctgcacggcggcggacgaaatcgccgtgatgcatggagggaggattctacaatacggcacgcccgaaacattggtcaaaacaccatcctgcgtgcaggtcgcccgactgatggggctgcccaacaccgacgatgaccgccatattccgcaacatgcggtgcgtttcgaccaagacggcatggagtgccgcgtattatcccgtacctgtttgcccgaatcgttcagcctgtccgtcctccatccggaacacggcatcctgtggctgaacctcgatatgcggcacgccggggcggtatcgggcaaggatacggtacgcatccatatcgaagaacgggaaatcgtccgcttccgctga

SEQ ID NO: 63333 - DNA, 1575 bp, Neisseria meningitidis
atgaaaaaatcccttttcgttctctttctctattcatctctacttaccgccagcgaaatcgcctatcgctttgtattcggaattgaaaccttaccggctgcaaaaatggcagaaacgtttgcgctgacatttatgattgctgcgctgtatctgtttgcgcgttataaggcttcgcggctgctgattgcggtgtttttcgcgttcagcattattgccaacaatgtacattatgcggtttatcaaagttggatgacgggcatcaattattggctgatgctgaaagagattaccgaagttggcggcgcgggggcgtcgatgttggataagttgtggctgcctgcgttgtggggcatgttggaagtcatgttgttttgcagccttgccaagttccgccgtaagacgcatttttctgccgatatactgtttgccttcctaatgctgatgattttcgtgcgttcgttcgacacgaaacaagagcacggtatttcgcccaaaccgacatacagccgtatcaaagccaattatttcagcttcggttattttgtcggacgcgtattgccgtatcagttatttgatttaagcaaaatccctgtgttcaaacagtctgcgccaagcaaaatcgggcagggcagtgttcaaaatatcgtcctgattatgggcgagagcgaaagcgcggcgcatttgaaattgtttggctacgggcgcgaaacttcgccgtttttaacccagctgtcgcaagccgattttaagccgattgtgaaacaaagttattccgcaggctttatgacggcagtatccctgcccagtttctttaacgtcataccgcatgccaacggcttggaacaaatcagcggcggcgataccaatatgttccgcctcgccaaagagcagggctatgagacgtatttttacagtgctcaggctgaaaaccaaatggcaattttgaacttaatcggtaagaaatggatagaccatctgattcaaccgacgcagcttggctacggcaacggcgacaatatgcccgatgagaagctgctgccgctgttcgacaaaatcaatttgcagcagggcaggcattttatcgtgttgcaccaacgcggttcgcacgccccatacggcgcattgttgcagcctcaagataaagtattcggcgaagccgatattgtggataagtacgacaacaccatccacaaaaccgaccaaatgattcaaaccgtattcgagcagctgcaaaagcagcctgacggcaactggctgtttgcctatacctccgatcatggccagtatgttcgccaagatatctacaatcaaggcacggtgcagcccgacagctatctcgtgccgctggtgttgtacagcccggataaggccgtgcaacaggctgccaaccaggcttttgcaccttgcgagattgccttccatcagcagctttcaacgttcctgattcacacgttgggctacgatatgccggtttcaggttgtcgcgaaggctcggtaacgggcaacctgattacgggcgatgcaggcagcttgagcattcgcgatggcaaggcggaatatgtttatccgcaataa

SEQ ID NO: 63334 - DNA, 837 bp, Neisseria meningitidis; identical to SEQ ID NO: 44358

SEQ ID NO: 63335 - DNA, 2178 bp, Neisseria meningitidis
atgacacgcttcaaatattccctgctgtttgccgccctgttgcccgtgtacgcgcaggccgatgtttctgtttcagacgaccccaaaccgcaggaaagcactgaattgccgaccatcaccgttaccgccgaccgcaccgcgagttccaacgacggctacactgtttccggcacgcacaccccgctcgggctgcccatgaccctgcgcgaaatcccgcagagcgtcagcgtcatcacatcgcaacaaatgcgcgaccaaaacatcaaaacgctcgaccgcgccctgttgcaggcgaccggcaccagccgccagatttacggctccgaccgcgcgggctacaactacctgttcgcgcgcggcagccgcatcgccaactaccaaatcaacggcatccccgttgccgacgcgctggccgatacgggcaatgccaacaccgccgcctatgagcgcgtagaagtcgtgcgcggcgtggcggggctgctggacggcacgggcgagccttccgccaccgtcaatctggtgcgcaaacgaccgacccgcaagccattgtttgaagtccgcgccgaagcgggcaaccgcaaacatttcgggctgggcgcggacgtatcgggcagcctgaacaccgaaggcacgctgcgcggccgcctggtttccaccttcggacgcggcgactcgtggcggcagcgcgaacgcagccgcgatgccgaactctacggcattttggaatacgacatcgcaccgcaaacccgcgtccacgcaggcatggactaccagcaggcgaaagaaaccgccgacgcgccgctcagctacgccgtgtacgacagccaaggttatgccaccgccttcggcccgaaagacaaccccgccacaaattgggcgaacagccgccaccgtgcgctcaacctgttcgccggcatcgaacaccgcttcaaccaagactggaaactcaaagccgaatacgactacacccgcagccgcttccgccagccctacggcgtagcaggcgtgctttccatcgaccacaacaccgccgccaccgacctgattcccggttattggcacgccgacccgcgcacccacagcgccagcgtgtcattgatcggcaaataccgcctgttcggccgcgaacacgatttaatcgcgggtatcaacggttacaaatacgccagcaacaaatacggcgaacgcagcatcatccccaacgccattcccaacgcctacgaattttcccgcacgggcgcctatccgcagccatcatcgtttgcccaaaccatcccgcaatacggcaccaggcggcaaatcggcggctatctcgccacccgtttccgcgccgccgacaacctttcgttgatactcggcggcagatacagccgttaccgcaccggcagctacgacagccgcacacaaggcatgacctatgtgtccgccaaccgtttcaccccctacacaggcatcgtgttcgacctgaccggcaacctgtcgctttacggctcgtacagcagcctgttcgtcccgcaatcgcaaaaagacgaacacggcagctacctgaaacccgtaaccggcaacaatctggaagccggcatcaaaggcgaatggcttgaaggccgtctgaacgcatccgccgccgtgtaccgcgcccgtaaaaataacctcgccaccgcagcaggacgcgacccgagcggcaacacctactaccgcgccgccaaccaagccaaaacccacggctgggaaatcgaagtcggcggccgcatcatgcccgaatggcagatacaggcaggctacagccaaagcaaaacccgcgaccaagacggcagccgcctgaaccccgacagcgtacccgaacgcagcttcaaactcttcaccgcctaccactttgcccccgaagcccccagcggctggaccatcggcgcaggcgtgcgctggcagagcgaaacccacaccgaccctgccacgctccgcatccccaaccccgccaccaaagcccgcgccgccgacaacagccgccaaaaagcctacgccgtcgccgacatcatggcgcgttaccgcttcaatccgcgcgccgaactgtcgctgaacgtggacaacctgttcaacaaacactaccgcacccagcccgaccgccacagctacggcgcactgcggacagtgaacgcggcgtttacctatcggtttaaataa

SEQ ID NO: 63336 - DNA, 774 bp, Neisseria meningitidis; identical to SEQ ID NO: 41989

SEQ ID NO: 63337 - DNA, 291 bp, Neisseria meningitidis; identical to SEQ ID NO: 54579

SEQ ID NO: 63338 - DNA, 324 bp, Neisseria meningitidis
atggatatcgtgcaacttgggtcggcggaattgaaggcgtggatggacgaagggcggatgttttgtttgttggacgtgcgtacggatgaggaaacggcggtttgttcgctgccaaatgcgctgcatatcccgatgaatctgattccgctgcggcaaaacgagctgccggatgatgtgccgcttgtggtgtattgccatcacggtatccgcagcctgcatacggcgatgtatctggcggacgcggggtttgaaaacctgtacaaccttcagggcggcatcgatgcatgggcggccgagattgacggcaacatgatgcgttattga

SEQ ID NO: 63339 - DNA, 546 bp, Neisseria meningitidis
atgattatagttgaacatttagaacattatttgggtgaaatcgaaagcggtataaaatgcttggatcgacgttatcatctcagcgtttccgtcttcccatcacaaccatataaaggggtaactactttttctactttaggcttgaatcgatatgacttgaactataagagtaggtttgaattaatttttacctgttctgaagaatggaataaagaaaatattgcagcttttctatcaggagtagccgaatatttgattgacaatagacaacctattttaagaggtgaaattattcaattacctagggtaattatcgaaggtagcaaaatggacgcactgtatgtttccgccccattttatttcgacgatgattttcaggtctgttatggcgaacactacaatatcgttttccctttgcttgtcccgttgtataaacaggaagcagaattggtggaaaagaaaggttggaatgcttttgagcagttcttgctggataatgaagttggcaacctttcggatatgaatcggaaaccgtttacttggtaa

SEQ ID NO: 63340 - DNA, 183 bp, Neisseria meningitidis; identical to SEQ ID NO: 40813

SEQ ID NO: 63341 - DNA, 1623 bp, Neisseria meningitidis
atgaaaacaaaagaattcctcaaatcccttgccgaactggccgccagtttgcgccaagtcatcgaagcggaagtggacggctttgatgcgtcgcccaaggctattgctgcacgccgtgccaaggtgtttgacccggtaggcggttacgagtatttcgtcaacacctactttccgcattatatccgctcccctgaaaaatccgaactgcatgcgtttttattcagccgtctgccggagattatccgctcccccaaaggggaaaatgaggcggtgggtgcgccgcgtggcgagggtaagtcgacgcaggttactcagttgtttacgctgtggtgtattgtgacaggccaaaaacattatgccgttattgtgatggacagcatagatcaggcatacccgatgctcgaagccatcaaggcggaattggaatttaatccgcgcttgaaaaccgactttccggaagtatgcgggcagggccgcgtatggcaggccggtacgattgtgacggccaatgacgttaaagtccaagtggccggtagcggtaaaaagctgcgcggtttgcgtcacggcccttaccgtcctgacctgaccatattggacgatattgagaatgacgagcaagtccgcaaccccgaacagcgcaacaagctcaatgcgtggctgactaagactgtattgcctttgggcggtgtcggccagaaatacgatgtgatatatatcggcacgattttgcattacgacagcgtacttaaccgcactttgaataacccgttttggcacggtattaagtttaaggcgatgaaacgctggcccgaccgcatggatttgtgggacagatgggaggaacttttccgaaacgacggcgagactgtggccgaggcgttttatctcgccaataaagacgagatggagcgcggtgcgcaaacaagctgggcggctcgcggcgtactcgcgctgatgaaaatccgtgcgcgtgacggtcatgcgacatttgacagcgaatatcaaaacgacccggtcagcggcgaagatgcgccgtttgccaagtcgatgaagttttggaacgacctgccgtccgatttggtgtatttcggtgcgctcgacccgtcgctgggtaaagcgggggcgagccgtgacccgtcggcgattatcattggcggttatcaacgtgaaaccggcaaactgtatgtcgtggaagctcagattaaaaaacgtctccctgatttgattattgaggacgttattcgattgcaccgtcaatatcgttgcaaactgtggtttgttgagacggttcagtttcaggaatttttgaaagatgagctggtcaagcgcagcgcggcgcgtggaatacctgtcccggcgcgggcggtcaagccggtatcggacaagctcttgcggattgagactttacagcctcacatggcgaacggtttgattctgttgaatgagagccaacagacgctgatacagcagttccgccattttccaaaggctgatcatgatgatggtcctgatgcagtgcatatgctctggtcgggggcggtggccaattgtgtgccgatagaatggcaaagccctaccgataacgattttgatgacgagataaaaagtaaatggagccgataa

SEQ ID NO: 63342 - DNA, 606 bp, Neisseria meningitidis
atgaagaaaatcggactgttcggcggcactttcgacccgatacacaacgggcatctccacatcgcccgcgcctttgccgacgaaatcggcttggacgcggttgttttcctgccgacaggcggcccgtatcacaaagacgcagcctccgcttccgccgccgaccgccttgccatggtcgaactggcgacggcagaagacgcgcgttttgccgtcagcgattgcgacatcgtccgagaaggtgcaacctatacttttgataccgtccaaatcttccgccagcagttcccatccgcgcaactctggtggctgatgggcagcgacagcctgatgaagctgcacacatggaaaaaatggcagatgctcgtgcgcgaaaccaatatcgccgtcgccatgcggcagggcgacagcctgcaccaaaccccgcgcgaactgcacgcgtggctgggcaagtcccttcaggacggcagcgtccgcatcttgtccgccccgatgcataatgtgtcgtcaacggaaatccgccgcaaccttgccagccaaggcgtttcagacggcatcccgcctgccgccgcacgctacatccgcgaacacggtttgtatgaaaaataa

SEQ ID NO: 63343 - DNA, 1512 bp, Neisseria meningitidis
atgagcgaacaaaaccatccgcaaaccgagccgcagttggacgaaaaccaaatcatcgccctgcgccgcgaaaaactgcacaacatccgccaacagcgcaacgcctatcccaacgacttcaaacgcgacagcttcgccgccgatttgcacgcccaatacggcgaaatcggcaaagaagaactcgatccgcaaggcattcccgtcaaagtggccggccgcatgatgctgaagcgtcaaatgggcaaggcgagttttgccaccattcaagacgtgtccgggcaaatccagctttatctgaacaacaaaggcgtgagccaagaaattttggacgacttcaaccattgggacttgggcgacatcgtcggtgcggaaggcactttgttcaaaaccaaccacggcgaactgaccgtacgcgtgtccgacatccgcctgctgtctaaatccctgcgcccgctgcccgacaaacacaaaggcttgagcgatcaggaaaccaaataccgccaacgctacgtcgatttgattgccaacgaagaatcgcgcaataccttcatcaaacgcagccaaatcatccaatctgtgcgcaattttatggtgaacgagcgttatctcgaagtcgaaaccccgatgatgcacccgattcccggcggcgcgacggcgaaaccgttcgtgacccaccacaatgctttggacatcccgctctacctgcgcatcgcgcccgagctgtatctgaaacgcttggtggtcggcggtttggagcgcgtgtttgaaatcaatcgcagcttccgcaacgaaggcatgtcggtgcgccacaatcccgaatttacgatgattgaattttacgaagccttctccgactacgaacgtatgatgcagatggcggaagacatcatccgaaacgcatcgcgcacggtaaacggcacggcgaaaatcagctacaacggcaaagaagtcgatttggaaagcccgtttgagcgtctgaccatcctcgaagccatcaaaaaatacaatccgcactacaccgacgagcagttgaacgatgcggaatggctgaaaaaagaaatcgtcaaacacggcgaaagcctgccgccgtccccgggcatcggcagcctgcaactcgcgctgtttgaaggttgcgccgagggcaagctgtggaatccgaccttcatcgtcgattacccggtcgaagtttccccattggcgcgcgcttcggataccaaacaaggtctgaccgaacgtttcgaattgttcgttgtcggccgcgaactggcaaacggctattccgagttgaacgaccccgaagaccaagccgaacgcttcaaagcgcaagtggcgcaaaaagacgcgggcgacgacgaagccatgcattacgatgccgactacatccgcgcgatggagttcggtctgccgccgacaggcggctgcggcatcggtatcgaccgcttggtaatgctgctgaccgattcgcaaaccatccgcgatgtgattctgtttccgcagatgcgccccgagtaa

SEQ ID NO: 63344 - DNA, 726 bp, Neisseria meningitidis
atgcgtattccgctgcttgcccctgacaattatgcctttcccgatcctgcctatgctttggcccggtgcgacgggctggtcggcgtgagcagggatttggacgcggggcggctgcttgaggcgtatcggaacggcgtgtttccgtggttttctcgggacggttggtttttttggtatgcggtcggcccgcgtgcggtgattgttcccgaacgtctgcacgttccgcgctcgctggcgaaaacgctgcgcaacggcagctatcgggttgcggtcaacggctgttttgcggaagtggtcgcgcattgtgcggcagcggcgcgcccgaatcaggacggaacttggattgcgcccgagtttcagacggcatatttgaagctacacgaaatggggtacgcgcattctttcgagtgccattatcccgatgaaaacggtaaaacgaggttggcgggcggcttttacggcgtgcaaatcggcagggtgttttacggcgaatcgatgttcgcattacaaccggatgcgtcgaaaatcgcgtttgcctgcgccgtgccgtttttggcggatttgggtgtggaactgatagactgccagcaggacacggaacatatgcgccgtttcggttcggagctgctgccgtttgcggattttgccgaacgtctgcggatgttgaacgccgtgccgttgaaagaggaaatcgggcggcgcgaagtggcgtgcagggggctttga

SEQ ID NO: 63345 - DNA, 666 bp, Neisseria meningitidis
atggatgcatggtttgaagatacggcgatggggcggtatgttgcaaaattggaacaggatttcttcgggcggtatctggattcataccgtttttcgggaatgtgtgcggttcaggtgggcggcaggtggctgagcctgtctgaagatgttgtctgtgtgccgcgagatatgtcgatgtcggcggagaatatggctttggcggatgtttctgcggatatgctgctttttccgcatacgcttgaaggcggtgttccttcgcaaatcctgtcggaagcgcaccggatattgaaaccgtccggacgtttgatgctgacgggtttcaatccgtattcgctctggggattcagttgttggtttgacggcgaacgcctgccggaaaaacggttttgtctgccgctgcccgagttgaaaagacggcttgcggatgtcggtttcgatattgaatttgggaaatttatggtgtatctgccgccggtttcgtcgctcgggcaaatacgcttttggcggtttatggaaaaggcgggcgaccgttggtggccgcagtgtgccgcagtgtacggtttggttttggtcaaaagggcggcgggcgtaacgcccctgcccgcgtgggacgggtatttgggcggcaaagcccttgcggcgggtgcggcaagggttgcggattag

SEQ ID NO: 63346 - DNA, 264 bp, Neisseria meningitidis; identical to SEQ ID NO: 39198

SEQ ID NO: 63347 - DNA, 1413 bp, Neisseria meningitidis
gtgaaaatcctcattttaggcaacggacaggtaggttctaccgtcgcacaaaaccttgccgccatacccaacaacgacgtaaccgttatcgacatcgacgaaaaagcattgcaggaaacaggcagccgcctcgatgtccaaaccgttttcggcaacggcgcatcccccttcacattagaacgcgccggcgcggaagatgccgacttgctgctcgcgctctcccgcagcgacgaaaccaacatcgtcgcctgcaaagttgccgccgacctgttcaacatccccggccgcatcgcgcgcgtccgttccagcgaatacctcgaatacctcagccccaagctcgaaaacaacgaaaacggcagcctttccatattcggcataaccgaaaccatcagccccgaacagctcgttaccgaacagcttgccggcctgatagactgcccgggcgcattgcaggttttacgttttgcagacgaccgcgtgcggatggtcatcatacaggcgcggcgcggcggactgcttgtcggacgcagcattgccgacatcgcccaagatttgcccgacggggccgactgccaaatctgcgccgtttaccgcaacaaccgcctcatcgtccccacgccgcaaaccgtcatcatcgaaggcgacgaaatcctgtttgccgccgccgccgaaaacatcggggcggtcatacccgaattgcgccccaaagaaaccagcacccgccgcattatgattgccggcggcggcaacatcggctaccgtctcgccaagcagctcgaacacgcatacaacgtcaaaatcatcgaatgccggccgcgccgtgccgaatggatagccgaaaacctcgacaacaccctcgtcctgcaaggttcggcaaccgacgaaaccctgctcgacaacgaatacatcgacgaaatcgacgtattctgcgccctgaccaacgacgacgaaagcaacattatgtccgcccttttggcgaaaaacctcggcgcgaagcgcgtcatcggcatcgtcaaccgctcaagctacgtcgatttgctcgaaggcaacaaaatcgacatcgtcgtctccccccacctcatcaccatcggctcgatactcgcccacatccggcgcggcgacatcgttgccgtccaccccatccggcgcggcacggcggaagccatcgaagtcgtcgcacacggcgacaaaaaaacttccgccatcatcggcaggcgcatcagcggcatcaaatggcccgaaggctgccacattgccgccgtcgtccgcgccggaaccggcgaaaccattatgggacaccataccgaaaccgtcatccaagacggcgaccacatcatctttttcgtctcgcgccggcgcatcctgaacgaactggaaaaactcatccaagtcaaaatgggctttttcggataa

SEQ ID NO: 63348 - DNA, 321 bp, Neisseria meningitidis; identical to SEQ ID NO: 50758

SEQ ID NO: 63349 - DNA, 318 bp, Neisseria meningitidis; identical to SEQ ID NO: 39139

SEQ ID NO: 63350 - DNA, 924 bp, Neisseria meningitidis
atgccgtccgaacacccgttttcagacggcatttccacacccaaccccaaagaaaccatgaacgacaccgcccaaattaccgccagctacggccgccgctacatcgtgcgcacgcccgacggcacaacctacgaagccagcacccgcaaaaaacgcgtcgatttcgcctgcggcgaccgtgtccgcatcagccccgtcaacgccgaacaagttgtgattgaagattttttaccgcgccaaagcctgctctaccgccaagacgcgtggaaaaccaaactcatcgccgccaacgttacccaactcctcatcgtaaccgccgccgtcccgagtccgagcgtgcggctgctgcaacgcgccctgcttgccgccgaagccgccggtattgaagccgtcatcgtcctgaacaaagccgacctgcccgaaaccgccctttggcgcgaaaaactcaaattctacgaaacgctgggttatcccgtcatcgaaacccgcgcactggaaaacgccggcagcctgcgccccgccctgcaagggcacagcaacatcctgctcgggcagagcggtatgggcaaatccaccctgaccaacgcccttttgggcagccaaaccgcccgcaccggcgacatttccgccgcactcgactcgggaaaacacaccaccacccacgcccggctttatgatttgaacggcgaaacccaactcatcgactccccgggtttgcaagaatttggtttacaccacctccaagccgccgatttgccgcgctatttccccgatttccgccaccttgtcgggcaatgccgcttccacaactgcacccaccgcgccgaacccggctgcgccttcaaagccgccgcgcaaaccggggcggcaagccccgaacgcctcgcctttttgcagggcatcaccgacgaactgcccgggtaa

SEQ ID NO: 63351 - DNA, 750 bp, Neisseria meningitidis; identical to SEQ ID NO: 38184

SEQ ID NO: 63352 - DNA, 1254 bp, Neisseria meningitidis
atgcagacttacctcgtcggcggtgccgtccgcgattatcttttgggcttgcccgtcaaagaccgcgattgggtggtcgtcggcgcagacgcacaaaccatgctggcgcaaggcttccagccggtcggcaaagattttcccgtgtttctccatcccgaaacgcacgaagaatacgccctcgcccgcaccgagcgcaaaaccgccaaaggttacgtcggtttcagtttccacgccgacaaagacgttacgctggagcaggatttgatgcgccgcgatctgaccatcaacgcgatggcgcaagatgcggacggcaagattatcgaccctttcggcggacaacgggatttggcggcaggcattttgcgccacgtttccccggccttcgccgaagaccccgtccgcatcctgcgtactgcccgctttaccgcgcgttacaggtttgaaatcgccgaagaaaccataaagctgatgcggcagatggtggaaaacggcgaagcggacgcattggttgccgaacgcgtctggcaggagtttgcgaaaggtttgatggaaaaaaatccgcgcaaaatgattgaagtgttgcgcgaatgcggcgcgctcaaagtcttgctgcccgaagtcaatgccctcttcggcgtgccgcaacgcgccgactaccatcccgaaatcgacagcggcatccataccctgatgacgctgcaacgcgccgccgatatgggtttgagcctgcccgaacgctatgccgccctgctgcacgacttgggcaaagccaaaacaccgtccgacatcctgccgcgccaccacggacacgacctcgccggtgtcgaacccgtgcgcgaagtcaatcagcggctgcgtgcgccgaaacattgcgccgagcttgccgaacttgtctgccgttggcacattattttccaccaagtcggacagcttaaaagccgaaccattctgaacgttttgaaaaaaaccgacgctttcagacgccccgaacgcttctccgctgccttaaatgtctgcattgccgatacgcaaggtcgtctgaaccgcgaacacacgccctacccgcaacgcgcgcactggctcgccttactcgaagtcgccaatcaagtggattcgggcaaaatcgccgccgaatgccgcgcgcaggggaaagtgcaccttatcgccgaacaaatcgaccgggcgcggctggcacaaatcgccccattgcaaaaagcgtttcgagcggcgcaagacaaaacagaaaaacattaa

SEQ ID NO: 63353 - DNA, 678 bp, Neisseria meningitidis
atgcctgctgctttgattaaggattttctgctgactcagggtttgaagctgccgcttgacgaggttcgggcggcgtatctgacggcgcagacggtaatgggtatggggacggcttcgatagaccgttcggttttgtggcgcagtgatgagggttggaaacttgccgattacctgtcgtgcgacaatgtccgcgaagatgcactgaaacggcttttcatggctttggattcggtgttttcgcgctcgacaggcgtgcggagtgcggcggtctatgccttgatgccgtctgaaaaccaggctttccaactgatatgcctgtcccaacagggagaaggtttggaaaacatatggaatctagatgaaaatgttgccgatgtttcacttgcctgccgttgcgcgcaaagcggctggatgaatgttgcctcggatgtacgccgttggttggatttgggagagctttcgggagaacgcaatcatgcttcggcggcgcaaatttccattccaatctgcacggaaagtggcggtgtgttgggcgtggttcatgtggaatttgaatgcgcagagtgtgcgggtacggcagcacaggtggaatgggtggctcttgccttggctttgtccgaacctttgaaactgctgttgggtatgtctgccggaaaagatgggagtgaagatgtctga

SEQ ID NO: 63354 - DNA, 1266 bp, Neisseria meningitidis
atgagcaaaaaccaacccgcacaaccgaccaggcgcactctttttaaaaccgcgatcgcagccggagcagtcggcgcaatcggaggttatctcggcggcaaaaaacagggcgaaaccgccgaacgcaccgccgaaagccaacactcgccccaagcctatccctgctacggcgaacatcaggcaggcatcgttacgccgcagcaggcgttttcgattatgtgcgccttcgacgtaaccgcgcaaagtgccaagcagctggaaaacctgttccgcacgctgaccgcccgcatcgagtttctcacccaaggcggcgaataccaagacggcgacgacaaacttccacccgccggcagcggcattttgggcaaagccttcaaccccgacgggttgaccgttaccgtgggggtgggcagcagcctgtttgacggccggttcggactcaaagacaaaaaaccggttcatttgcaggaaatgcgcgacttctccaacgataagctgcaaaaaagctggtgcgacggcgatttgagcctgcaaatctgcgccttcacccccgaaacctgccaagccgccctgcgcgacatcatcaaacacaccgtccaaaccgccgttatccgttggagtatcgacgggtggcagcctaaatccgaacccggcgcgatggcggcgcgcaacctgttgggcttcagggacggcacgggcaaccccaaagtttccgaccccaaaactgccgacgaggttttgtggacgggtgtggccgccaacagcctcgacgaaccggagtgggcgaaaaacggcagctatcaggcagtccgccttatccgccactttgtcgagttttgggacaggacgccgcttcaagagcaaaccgacattttcgggcggcgcaaatacagcggtgcgccgatggacggcaaaaaagaagccgaccaaccggattttgccaaagaccccgaggggaataccacgcccaaagacagccatatacgcctggcgaatccgcgcgatcccgaattcctcaaaaaacaccgcctcttccgccgcgcctacagctattcgcgcggactcgcctcaagcggacagcttgatgtcgggctggtgttcgtctgctatcaggcaaaccttgccgacggattcatcttcgtgcaaaacctccttaacggcgaaccgctggaagaatacatcagccccttcggcggcggttatttcttcgttctgcccggcgtggaaaaaggcggattcttgggacaagggctgctgggcgtataa

SEQ ID NO: 63355 - DNA, 324 bp, Neisseria meningitidis; identical to SEQ ID NO: 38492

SEQ ID NO: 63356 - DNA, 390 bp, Neisseria meningitidis
atgtggaaaatcataaaagaggatagtgatgatttagaatttgcaattaaatgcttattctctcaatctattgatttaaatgaattcaaattatggattgaacaagtaatacgcgatatgcccattgaggacatccctttttatatttttgatttggcggatttggatgaagaaattgataatatttacaatatcataggttttgtttcgagttacagcttatcaaaattgagaagaaatgccttaacaggcattgcattcttaagggggatagatgtctatgaccctcccgtttcaaaagaaaaagcattaaaagccttagagaaatatcctgaaatttatcagaagtttcagcatttctttccatttgtagaactgcccccgctttaa

SEQ ID NO: 63357 - DNA, 234 bp, Neisseria meningitidis; identical to SEQ ID NO: 51696

SEQ ID NO: 63358 - DNA, 399 bp, Neisseria meningitidis; identical to SEQ ID NO: 41900

SEQ ID NO: 63359 - DNA, 1545 bp, Neisseria meningitidis
atgtgcggcgtattaggtttggtcagtcatgaacccgtgaaccagcttctgtacgacggtttgcagatgttgcagcacagggggcaggatgcggcgggcattgcaacggcggaaggcggcaccttccatatgcacaaaggcaaagggatggtgcgcgaagtgttccgcacgcgcaatatgcgcgatttggtcggcaacgccggcatcgcccacgtccgttatcctacggcgggcaacgccggcagcagcgcggaggcgcagcctttctacgtcagctcgcctttcggcatcgttttggcgcataacggcaatctcaccaacacggccgaactgtatgaaaacgtgtgcaacaaacacctgcgccacgtcaacaccagctccgattccgaagtcttgctcaacgtattcgcgcacgaattacgccgcgaagtctccaaaaacgccgatccgcaccggctcaatgccgacaatattttcaacgccgttgccgaagtccaccgcctagtgcgcggcgcatacggcgtggttgccatgattgcgggctacggtatgcttgccttccgcgacccttacggcatccgcccgctggtattgggttcgcaaaccgacaacgaaggcaggaaatcctatgccgtcgcctccgaatccgtcgccttcaacgcgcttgcctacgatttggaacgcgacatccggccgggcgaagcggtatttgtcggctttgacggcacaatgattgcccgccaatgcagcgaccgtgccaaactcagcccctgcctttttgaatatgtttattttgcccgccccgactccgtaatcgacggcgtatcggtttaccaatcgcgcttggatatgggcgtgtccttggcggaaaaaatcaaacgcgagctgcccgtggacgacatcgatgtcgtgatgcccattcccgacaccagccgccccagcgcgatggagcttgccgtccacctcgacaaaccctaccgcgagggcttgattaaaaaccgctatatcggccgcacctttattatgcccggccaggcgacgcgcaaaaaatccgtgcgccaaaaactcagcccgatggaaaccgagtttgcaggcaaaagcgtgttgctggtggacgactccatcgtgcgcgggacgaccagccgcgaaatcgtcgaaatggtacgcgcggcgggcgcgcgcaaagtctatatcgcctccgccgcccccgaagtgcgctatcccaacgtatacggcatcgatatgcccacgcgcgaagagttgattgccaacgggcgcagcgcggcggaaatcgccgccgaaatcggcgcggacggcatcgtgtttcaagacttggacgatttggaagccgtcgtcaaagcactcaatccgaaaatcgaatcctttgattcgtcctgtttcaacggcatttatcagaccggcgacatcgatgatgcctacctcgaccgcctgtctgccgagaaatccggctgcggcggcctgaaaatccacccgagtaggatggaacacagcatcagcatcagcgatgcgggcgacgaagaataa

SEQ ID NO: 63360 - DNA, 588 bp, Neisseria meningitidis
atggaacataagctgccgcaactgccttatgaactggacgcattgtccccgcatctgagcaaagagactttggaattccactacggcaaacaccatcaaacctacatcaccaacctgaacaatcaaatcaaaggcaccgaatttgaaaacctgcctttggaagagattgtgaaaaaatcttcgggcggcgtgttcaacaacgcggcacaaacttggaaccacaccttctactggctgggtttcacgtccaaaggtcaaggcaaacctgccggcgaactggccgccgccatcgacgcgaaatggggcagcttcgagaaattccaagaagcgttcaatgcctgcgcggccggtactttcggctccggttgggcgtggctggtaaaaacccctgccggcggattggatttggtttctacttccaacgccgctacgccgctgaccactgaaaacacgccgctgctgacctgcgacgtgtgggaacacgcctattacatcgactaccgcaacagccgtcccaactacctgaaaggtttttgggaaatcgtcaactggaacgaagtcgccaaacgcttcgccgccttgtcctga

SEQ ID NO: 63361 - DNA, 234 bp, Neisseria meningitidis
atgtggcacattgtcgccatcggctatctttttgttgccgtgatgttttccgccgcgcagccgagtattgcgcgcgccttgatttatttggttttttgggcggtgctgcccaccgtgttcacggttttcaccatcaccgtccgccgccgcaaccacctgatgaggcagcaggaacaggctgaattcgaacagcagcgcgcacaacggcaaaaagacagcggcacaaaaccctga

SEQ ID NO: 63362 - DNA, 960 bp, Neisseria meningitidis
atgtccaaaaaaaccaaacaagaactcgaaaacaacaaactcagcaaacgcctgcgccacgccgtcggcgacgcgattaacgatttcaatatgatcgagccggacgacaaaatcatggtctgcctctccggcggcaaagacagctatgccctgttagacatcctgcgccagctccaagccagcgcgccgattgatttccaactggttgccgtcaatctcgaccaaaagcagccgggcttccccgaagaagtattgccgacctatctcgaaagcatcggcgttccctacaaaatcgttgaagaagacacctactccaccgtcaaacgcgtattagacgaaggcaaaacgacttgttcgctgtgcagccgcctgcgccgcggcatcctctaccgcactgcaaaagaattgggctgcaccaaaatcgccttgggacaccaccgcgacgacatcctcgccaccttgtttttaaatatgttttacggcggcaaactcaaagccatgccgcccaagctggtgagcgacaacggcgaacacatcgtcatccgcccgctggcgtatgtgaaagaaaaagacttaatcaaatacgccgaattaaaacaattccccatcatcccgtgcaacctctgcggctcgcaacccaacctgcaacgccaagtcatcggcgatatgctgcgcgattgggacaaacgcttccccggccgcatcgaatcgatgttctccgccctgcaaaacgtcgtcccttcccaccttgccgataccgaactcttcgactttgtcggattggaacgcggtcaaagcctgaaacacggcggcgatttggcgtttgacagcgaaaaaatgcccgaacgtttttcagacggcagcgaagaagacgaaagcgaaatcaaaatcgagccgcaaaaagccgaacgcaaagtcatcaacattctggctaacaagccgaaaacctgcggcgcgtaa

SEQ ID NO: 63363 - DNA, 765 bp, Neisseria meningitidis
atgagctacacgcaactgacccaaggcgaacgataccacatccaatacctgtcccgccactgcaccgtcaccgaaatcgccaaacagctgaaccgccacaaaagcaccatcagccgcgaaatcagacggcaccgcacccaagggcagcaatacagcgccgaaaaagcccagcggcaaagccagactatcaaacagcgtaagcgacaaccctataagctcgattcgcagctgattcagcacatcgacacccttatccgccgcaaactcagtcccgaacaagtatgcgcctacctgtgcaaacaccaccagatcacgctccaccacagcaccatttaccgctaccttcgccaagacaaaagcaacggcagcacgttgtggcaacatctcagaatatgcagcaaaccctaccgcaaacgctacggcagcacatggaccagaggcaaagtacccaaccgtgtcggcatagaaaaccgacccgctatcgtcgaccagaaatcccgtatcggcgattgggaagccgacaccattgtcggcaaaggacagaaaagcgcattattgaccttggtcgaacgcgttacccgctacaccatcatctgcaaattggatagcctcaaagccgaagacactgcccgggcagctgttagggcattaaaggcacataaagacagggtgcacaccattaccatggataacggcaaagagttctaccaacacaccaaaataaccaaagcattgaaagcggagacttatttttgtcgcccttag

SEQ ID NO: 63364 - DNA, 957 bp, Neisseria meningitidis; identical to SEQ ID NO: 39251

SEQ ID NO: 63365 - DNA, 1434 bp, Neisseria meningitidis
atgtctcaatatgatgtagtagtgattggtgcaggcccgggcggatacgttgccgccatccgtgccgcacaactgggtttcaaaactgcctgtgtcgatgcaggcgttaacaaagcaggcaatgcccctgcattgggcggtacttgcttgaacgtaggttgtatcccttctaaagccctgttgcaatccagcgaacatttccacgctgcgcaacacgattttgccgaacacggtatcactgtcggtgacgtaaaattcgacgcggccaaaatgattgagcgcaaagatgccatcgtgaccaagctgaccggcggcgtcaaattcctgttccaaaaaaataaagtaaccagcctgttcggtacggcttcctttgctggtaaaaatggcgatgcttaccaaatcgaagtcgataacaaaggagagaaaaccgttatcgaagccaaacacgtcatcgtagccaccggttccgtaccgcgtccgctgccacaagtcgctatcgacaatgtgaacgtattggacaacgaaggcgcattgaacctgaccgaagtacctgccaaactcggcgtgattggttccggtgtgattggtttggaaatgggttccgtatggaaccgcgtgggtgcagaagttaccattcttgaagctgcgccgaccttcctggctgccgctgaccaacaaatcgccaaagaagccttcaaatacttcaccaaagagcaaggcttgaacatcgaattgggcgtgaaaatcggcgacatcaaatctgaaggcaaaggcgtttccgttgcttacgaaactgctgccggcgaagccaaaactgaagtattcgacaaactgatcgttgccatcggtcgtattccaaacaccaaaggcctgaacgccgaagccgtaggcttggaaaaagacgagcgcggctttatcaaagtggacggcggatgccgtaccaacctgcctaacgtatgggcaatcggcgacgtggttcgcggcccgatgttggcacacaaagccagcgatgaaggcgttgccgttgccgagcgcattgccggtcaaaaaccgcatatcgacttcaacaacgtaccgtttgtgatttacaccgatcctgaaatcgcttgggtgggtaaaaccgaagagcagctcaaagccgaaggcgtggagtacaaaaaaggtacttcaggttttggtgcgaatggtcgcgcattggcaatgggcaaagccaaaggtacggttaaagtgttggcagacgccaaaaccgaccgcatcttgggcgtacacatgattggtccggttgtcagcgaattggttatcgaaggcgtgactgcgctcgaattcttcgccagcagcgaagacatcgcccgcattatccatgcccacccaaccttgtccgaagtggttcacgaagctgcattggcggccgacaaacgcgctttgcacggttga

SEQ ID NO: 63366 - DNA, 642 bp, Neisseria meningitidis
atgctgaaacccgaaaccatacacatatccggtcctgccggcattttagaaaccatccatatcccgtccgaacaagtaccggcacgcggtgttgccgtcatcaatcatcccaaccccctccagggcggaacaaacaccaacaaagttatccaaactgccgccaaagccttaagcaaactcggcttccactgctacctgcccaaccttcgcggcgtaggcggcagcgaaggcacacacgattacggacgcggcgaaacgcaagactgcctcgccgtcatcgactatgcccgtgcccaacatcccgaagcccccgaatttgccttatccggcttctccttcggcggttatgtcgccacatttgccgcacaagcgcgcatacccgatttattgctgctcatcggcgcggcagtctgccactataccggccgccccgagccgtccgccgttcccaatgttgccaaaacgctgatgatacacggcgcggaagacgaagtcgtcgaaatcgggaaagcactgaaatgggcggaaccgcaagatttgcccgtcattaccatcgccggttccacgcatttctttcacggcaaactcatcgtcctgcgcgacaccatcctccgcttcgcgcccgtatgcctgaacggataa

SEQ ID NO: 63367 - DNA, 396 bp, Neisseria meningitidis; identical to SEQ ID NO: 40899

SEQ ID NO: 63368 - DNA, 279 bp, Neisseria meningitidis
atgaagtgggtaactgtcgttttatccttcgcacttgtctgttgccaatacagcctctggttcggcaaaggcagtatcgggcgcaacaacaacctgaaaaatcagattgccgttcaggaagaaaaaaaccagacactcgccctacgcaaccattcccttgcagccgaagtctatgatttggaaaacggtcaagaagccatttcggaaatcgcccgggtagaactgggttatatccaagacggtgaaaccttttaccgactcatcaggcataaccggtaa

SEQ ID NO: 63369 - DNA, 258 bp, Neisseria meningitidis; identical to SEQ ID NO: 42809

SEQ ID NO: 63370 - DNA, 441 bp, Neisseria meningitidis; identical to SEQ ID NO: 43142

SEQ ID NO: 63371 - DNA, 1527 bp, Neisseria meningitidis
atggattatccaccgcttaagggtgcggcattggcgtgggttacgctgtctttggggcttgccgtatttatggaagttttagatacgactatcgccaatgtcgccgttcccgtcatcgccggcaacctcggtgcggcaaccacgcaggggacgtgggtcattacttcttttgctgtggcaaacgccgtttccgtgccgttaacgggctttttggcaaaacgtatcggcgaggtcaaattgtttaccgccgccgctgtcggtttcgtcatcacatcgtggctgtgcggcatcgcgcccaaccttcagtcgctggttgttttccgcatcttgcagggctttatcgccgggccgctgattcccctgtcgcaaagcctgttaatggcatcctatccgcccgcaaaacggacgctggcactggcattgtgggcaatgaccgtcgttgtcgcccctgttctcgggccgatactcggcggttggatttccggaaactggcattggggttggattttcttcattaatatccctatcggtatcatatcggcatggattacatggaaacatttgaaatatcgggaaacggaaaccgttaaaatgccgaccgactatgtcgggcttacattgatggtagtcggtatcggcgcgttacagatgatgctggacaggggtaaggaactcgactggttcgcctctggagaaatcattaccttgggcgtagtcgcactggtgtgtttgtcgtattttattgtttgggaattgggagaaaaatatccgattgtcgatttatcgctgtttaaagatcggaattttaccgtcggcgtaattgccacatcattgggttttatggtgtatatggggacgctgaccctgctgccgttagtgttgcagaccaacctgggctatacctccacgtgggcggggcttgccgccgcacccgtcggcatcctgcccgtcttcctgtctccgttaatcggcaggttcggcaataaaatcgatatgcgcctgctcgtaaccgccagcttcctgacctttgcctttactttctattggcgcaccgatttttatgccgacatggatatcggcaacgtcatctggccgcagttttggcagggggcaggcgttgccatgttcttcctgccgctgaccaccatcacactgtcgcacatgaagggcggacagattgccgccgcaggcagcctgtcgaatttcttgcgcgtgctgatgggcggtgtcggcgtatccgtcgtcagcaccctgtgggaacggcgcgaagcgttgcaccatacacgctttgccgaacacatcacgccctattccgcaacattgcacgaaacggccgctcatttgtcccagcacggcgtttccgacattcaaaccctaggcatcatcaacaataccattacccagcagggttttattatcggctcgaacgaaatctttatggcgggcagcttgttattcattatcatgatacccgtcatatggctggcaaaaccgccgttccacaacggcggcggcggtggacattga

SEQ ID NO: 63372 - DNA, 300 bp, Neisseria meningitidis
atgcattatttcagtattcatgaccaatggggacggcatataggctttttcatcctgcttgccgacgacgagtcagaggcgcggccgcaaagcgggcgttttgccgtcaaacttgaaggcggaatggaaaatcatgtcctgtcgccgttcggtcagacggaaatcccccaatattggcgcgtggtcaaagaccgtatcgagctgttttttgacgaagcacctgtcggaactttgcgtaacgaatatctgaccgtgtcggggcagacttttgttttgaacgatttgacagggaatatgtga

SEQ ID NO: 63373 - DNA, 855 bp, Neisseria meningitidis
gtgggtcaaagcggcgagttgttttgtttcggacagatgcctgtatggaaagtggaaaacctgccggaagttttgttgtcgggctattcgtctgaggaaggggagtgggtctgcctgaatgtgttgcagggcgatgtcgaagttcgtgcaccggacgggtcggcagaagtttggtcggcggaaagcggcgattgtgtgtttgcgccgcagcaggtgttttctgtcaaaccgaaaacggacgatgccgaaatccgtttgtcgctgtattgcgcggcggcagactattttcacaaaaaatacgggatgagtgccacgcattctgcggtcgcggcggcacaggataccgtaccggcgggcagggcgttggatatgggctgcgggcaggggcgcaacgcgctgttcctcggcttgaagggatttgaagttactgcagtcgatcacaatccggctgctttggcaaacgtggcggagctggcagaggcagagggtttgaacgtccgcacgctggaatatgatttgaatgccgccgctttacagggcgagtttgattatattgtggcaacagtggtgctgatgttcctgatgccgcagcgcgtgcccgacgtgattgccgatatgcaggcgcatacggcggcgggcgggtacaatttgattgtgtcggcaatggatacggcggatttcccttgtccgatgccgttcccttttaaatttaaagagggagagctgaaggattattatcgggattgggagctggtcgaatataaagaagaattgggcgcgatgcacgccaaagacgaaaacggcaatccgatacggtttaaatttgtaaccatgctggcgaaaaggcctgaataa

SEQ ID NO: 63374 - DNA, 267 bp, Neisseria meningitidis
atggactttgaatttggtttcagaaccctgtggccgattgcgacggcggcattttggttttgggtcaacggcatttcaagccgtctgaaagaggcggacaagcgtatcgacgaccttaaagaggagctgcacgcggtcaagctctcgtaccacaccaagcaggatgcccaagacgaccgcaaaaatatcgcagcgtctttggagcgcatcgaaaacaagttggaaaaagtaaacgaaaaactggacaggaaagcggacaaatcatga

SEQ ID NO: 63375 - DNA, 453 bp, Neisseria meningitidis
atgaatattgaagtagaaatgaaagtgttggacgagaggatggcggattttatccctgcctatgcaacggagggttctgcaggtttagatttgcgcgcctgtttggatgaggaagtcgttttgaagccgggtgaaacgtttcttgtgccgacgggtttggtaatttatttggcgaatcccgcatatgccgccgttttgctgccccgttccggcttggggcataaacacggcatcgttttgggcaatttggtcggtttgattgactccgattatcaaggggaattgaaggtgtcgttatggaacagaagcagcgagccgtttactgtcaaaccgttcgagcgtatcgcgcagatggttattgttccggtcgtgcaggcgcgtttcaaacgtgtcgaagaatttgtcggaagcagccgtggagaaggcggtttcggcagtacgggtttgcattga

SEQ ID NO: 63376 - DNA, 750 bp, Neisseria meningitidis
atgaaagcactggtcgcagtaaagcgcgtagtggactacaacgtcaaagttcgtgtaaaagccgatggttcggatgtggatatcggcaatgtcaaaatgtcgatgaatccgtttgacgaaatcgctgtggaagaagctgtccgtttgaaagaagccggaaaagtaagcgaaatcgtagcggtttctttgggtgagaaaaaatgcgaagaaaccttgcgtacagctttggcgatgggtgccgaccgtgccattcatgttgaaaccgatactaaactggagtctctggccgttgctaagttgctgaaagccgttgcggacaaagaaaatccgcaaattttctttttgggcaaacaagcgattgatgatgatgccaatcaagtggcgcaaatgctggcagctttgctgaatgcggcgcaaggtacgtttgcttcaaaagtacacattgaaggtggtgaagtacagattgtgcgcgaaattgatggcggcgaagaaaccatagcattaaaactgcctgctgttatcagtgctgatttgcgtttgaacgagccgcgctttgtcaaactccccaatattatggcggcaaagaaaaaacctttggaaaaactgactcctgacgatttggttgccgacatttcacctcgtttgaaaacggtgaaatttgccgaacctaaggcgcgtcaggcaggcgtaaaagtagcaagcgttgccgaattggttgaaaaattgaaaaacgaagccaaagtgatttga

SEQ ID NO: 63377 - DNA, 474 bp, Neisseria meningitidis
atgaaaggcgaccgtttggttatccgcgagctgaacaaaaacttaggcttgctgctggtaaccatcaaccaatatttccttcacgcccgtattttgaaaaactggggctttgaagaactgggcgaacatttcttcaaacagtccatcgttgaaatgaaagctgccgacgatttgatcgagcgcattctgttcctcgaaggtctgccgaacctgcaagaactgggcaagcttctgattggcgagtccaccgaagaaatcatcgcctgcgatttgaccaaagaacaggaaaaacacgaagccctgcttgccgccatcgccacagcagaagcgcaacaggattacgtcagccgcgatttgttggaaaaacaaaaagacaccaacgaagaacatatagactggctggagacccagcaagagcttatcggcaaaatcggtctgcccaactacctgcaaacagcggcgcaagaggactaa

SEQ ID NO: 63378 - DNA, 1287 bp, Neisseria meningitidis
atgatttacatcgtactgttcctcgccgccgtcctcgccgttgtcgcctacaatatgtatcaggaaaaccaataccgcaaaaaagtgcgcgaccagttcggacactccgacaaagatgccctgctcaacagcaaaaccagccatgtccgcgacggcaaaccgtccggcgggtcagtcatgatgccgaaaccccaaccggcggtcaaaaaaacggcaaaaccccaagaccccgccatgcgcaacctgcaagaacaggatgccgtctacatcgccaagcagaaacaggcaaaagcatcaccgttcaaaaccgaaatcgaaaccgccttggaagaaagcggcattatcggcaactccgcccacaccgtttccgaaccccaaaccggacattccgcaccgaaacctgccgacgcgccggcaaaacctgcacccgttccgcaaacacctgcaaaaccgctgattacgctcaaagaactgtcaaaagtcgaattaccctggtttgacgtgcgcttcgacttcatctcctatatcgcgctgaccgaagccaaagaactgcacgcactgccgcgcctttccaaccgctgccgctaccagattgtcggctgcaccatggacgaccatttccagattgccgaacccatcccgggcatccgctatcaggcatttatcgtgggtattcaggcagtcagccgcaacggacttgcctcgcaggaagaactctccgcattcaaccgccaggtggacgcattcgcacaaagcatgggcggtcagacgctgcacaccgaccttgccgcctttatcgaagtggcttccgcactggacgcattctgcgcgcgcgtcgaccagaccatcgccatccatttggtttccccgaccagcatcagcggcgtagaactgcgttccgccgtaacgggcgtgggtttcgttttggaagacgacggcgcgttccactataccgacacgtcgggctcaaccatgttctccatctgctcgctcaacaacgagccgtttaccaacgcccttttggacaaccagtcctacaaaggcttcagtatgctgctcgacatcccgcactctccggcaggcgaaaaaaccttcgacgatttgtttatggatttggcggtacgcctgtccggccagttgaacctgaatctggtcaacgacaaaatggaagaagtttcgacccaatggctcaaagacgtgcgcacttatgtattggcgcgtcagtccgagatgctcaaagtcggtatcgaaccgggcggcaaaaccgcattgcgcctgttctcctaa

SEQ ID NO: 63379 - DNA, 1977 bp, Neisseria meningitidis
atggaatatatggatctcaaaagcctgcttaattttgggttgccaaatatgccaagaacagtaatagggctgagaaaaaaagcgcaaagggatggttggcaaacgagaaggcgtcaaggtaagggtggtggtgttgaatatgccctccctgccgaaatccgagcagccatcatgaaacggcagtcggacgagctggcggagaagatgccgaaaaccctgccccaagtcagaccggggacggcgatgtcggctcaagcactggctgaagcggccaagctgttgaacgagaaacaacggtcggtggcggatgcgcgatgtgcggtggtggcggcggtgttggggattaaataccaatacgattgctctgccaaggctgcggtggctcagtttttgggcttgctggcagaaggtaaattggacgcggtcacgcttgggaacttggaaaaggccaatgaccgcagccggtcggcgaaggttggcgaacgtactttagacggctggatttctgcttatttgaaagcggaaaacgcgacggagcggttggttgctttggctccgaagacgacgaaggcggtcaagccgattgaaagttacggatggttgccgatgtttatgcagtttcacaatattccgtccgcgccaaagctggcgcacagctaccgccggtttgtgcagtgggcggaagcggaaaatatgccggtcaatgatgtgcctaatttgagtatggtgcggcgcgtttgggacaagctcccgttgattatgcaggagcgcggcaggaaaacgggggcggcttataaatcgctgctgccttatgtgaaacgtgattggggggctttgaagcctaacgatgtttggattggcgacggccacagctttaaagcgaaggtggcacatccggtacacggcaggccgtttaagccggaagtgacggtgattattgatggttgtacgcggtttgtggtgggtttttcggtgtcgttggctgaaagttgtgtggcggtatcggacgctctgcgtatcggggtcaagcactttggtttgccgattatctactactcggataacggtggcggccaaactggtaagacgatagatcatgaaatcacgggtattacgtcccgattgggtatccggcatgaaacgggtatcgcaggcaacccgcaaggccgaggcatcattgagcgatggtggaaagacaatctgattgagatggcgcgccagtatgagatgtttgcgggcgcaggaatggacagcagcacgaagaacctgatgtaccgcaagatggaaagtgcgtttaatgctttggaaaaaggcaaggatttgacggaggagcaacagaaatatttgaaaaaactgccgagctggtcgcgctttatcgcggatgtggccaagtgtatcgacgaatacaacaaccgcccgcacggcgagctgccccgacatccggacggcgggcattattcgccgaaggcttatcgggaaatgaggctggaacaggacgggattgcgccggatatgttgtcggcggaagagctggcgacgatgtttatgccgcaggaagtgcgaaaggtacagcgcggttggctggatttgttcaacaactcttatttctcaaccgagctggcggagtatcacaaggacgaggtacgggtcagctacgatttggacgatgcttcggcggtcaatgtgtttgatatggacggcaagtttatcactaaggctcaggccgacggcaatacccgcgaggctttcccgacggctcgtatcgaccaactggcggaaaaacgccgaaaaggcaaaatcaagcgggcggaaaatgcaatcaagctcgcaaatgcggaagtcaatccggctttggaacaggctgcggtttgggacgagctgggacatttgggcggaaacgtcatcgaggcggagtatgcggtattaccgaaaacgggcacggacgattttgtgctatttgagacggatagaagttaa

SEQ ID NO: 63380 - DNA, 654 bp, Neisseria meningitidis
atgccgtctgaaccgccttcagacggcattgcccgacaccccaaaagcacaatcaaaatggcaaaaaaaccgaacaaacccttcaggctgacccccaaactcctgatacgcgtcgtattgctcatctgtatcaccgccatcggcgcattggcaataggcatcgtcagcacattcaacccgaacggcggcaaaaccctccaaaccgaaccgcaacacaccgacagcccccgcgaaaccgaattctggctgccaaacggcgtagtcggacaagatgccgcccaacccgaacaccaccacgccgcctcatccgaacccgcacagccggacggcacagacgaaagcggcagcggactgccgtcccctgccgcacccaagaaaaaccgggtcaaaccgcaacctgccgacacagctcaaaccgacaggcagccggacgacgccggaacacaagctgaaaacacactcaaagaaacccccgtactgcccacaaacgtcccccgtcccgaaccccgaaaagaaacacccgaaaaacaggcgcagcccaaagaaacacccaaagaaaaagaaacgcccaaagaaaaccataccaaaccggacaccccgaaaaacacgccggccaaaccccataaaaaagagattctcgacaacctcttctga

SEQ ID NO: 63381 - DNA, 600 bp, Neisseria meningitidis; identical to SEQ ID NO: 48838

SEQ ID NO: 63382 - DNA, 954 bp, Neisseria meningitidis
atgcatcaatattatgacgcagtaattttatcggttggaaatgggttgttaaaaaggttctttaagcagaatgcgcaattaaatattgcttcaaggccattgattattaccttgtttccaggtgtagtattcggtgatcaggcaagtattctatctcgtatgggggctgatattgttttatataataataagcatgattttagaattgcagaggaatataagaaacaatataaattaagttgtcaaaatatactttatggttatccaatttttcgccacgcatcaaaaggtcgtcatggagagaaaatttactttattgaccaagttaaaatcccatttaaaaaagaagaaagaatttatacattaaaaaaattgattgccttggctgaaaaataccctgagaaagaatttactattttgctaagggttgcagataaagatattactgtgcatcaggataaacattcgtatatagagctggcaaagcagtttcagttgccgagtaatttgacaatagagcgaaaaagtaccgcgcaagccttccaagaaatggggtattgtttatcttattcatctactatgctttttgaagctgaatgtaagggtatccctgttggtattgttgcagacttaggcttttctaaatcctatgcaaatcagcattttttaggtagtggggttttagtttattttgatcaaatagatttcacttccccaaaaatagcagatccggattggcttgattgctatgctactaaaaaggtgattacaactgatgagtttaataagctattaaagcaggttgtgccattgcaacatgattaccaagaatatttatctgcagtgaatagtatagaatcaactaaaactatttttttaagaaaatttaaaaagttaattagggatcctaaaaagtttttttatgattctaaatggttgagaaaggtgatttaa

SEQ ID NO: 63383 - DNA, 1101 bp, Neisseria meningitidis
atggaaacacagctttacatcggcatcatgtcgggaaccagtatggatggggcggatgccgtgctggtacggatggacggcggcaaatggctgggcgcggaagggcacgcctttaccccctatcccgacaggctgcgccgccaattgctggatttgcaggacacaggcacagacgaactgcaccgcagcaggattttgtcgcaagaactcagccgcctatatgcgcaaaccgccgccgaactgctgtgcagtcaaaacctcgcgccgtccgacattaccgccctcggctgccacgggcaaaccgtccgacatgcaccggaacacggttacagcatacagcttgccgatttgccgctgctggcggaactgactcagatttttaccgtcggcgacttccgcagccgcgaccttgcggccggcggacaaggtgcgccgctcgtccccgcctttcacaaagccctgttccgcgatgacaaagaaacacgcgcggtactgaacatcggcgggattgccaacatcagcgtactcccctccgacgcacccgccttcggcttcgacacagggccgggcaatatgctgatggacgcgtggacgcaggcacactggcagcttccttacgacaaaaacggtgcaaaggcggcacaaggcaacatattgccgcaactgctcgacaggctgctcgcccacccgtatttcgcacgaccccaccccaaaagcacggggcgcgaactgtttgccctaaattggctcgaaacctaccttggcggcggcgaaaaccgatacgacgtattgcggacgctttcccgttttaccgcgcaaaccgttttcgacgccgtctcacacgcagcggcaaatgcccgtcaaatgtacatttgcggcggcggtatccgcaatcctgttttaatggcggatttggcggaatgtttcggcacacgcgtttccctgcacagcaccgccgacctgaacctcgatccgcaatgggtggaagccgccgcatttgcgtggttggcggcgtgttggattaatcgcattcccggtagtccgcacaaagcaaccggcgcatccaaaccgtgtattctgggcgcgggatattattattga

SEQ ID NO: 63384 - DNA, 1296 bp, Neisseria meningitidis
atggcacaaaaaatccaatccgtcaaaggcatgaacgaccttctgcctgtcgagcaaaaagatttcaaactgacggctgcgttttggcaggcgtttgaagatacggtcggccgctggacacgcgcttacggttatcagcaaatccgtacgccgattgtcgagcaaaccggtttgtttgtccgctccatcggcgaagaaaccgatgtggtcggcaaggaaatgtacaccttctccgattcaaacgattctttgagtttgagcctgcgtcctgaaggtacggcttcttgtctgcgtgcggtggtcgaacacaaccttctgtacaatagcccgcaaaagctgtggtatatggggccgatgttccgccgcgagcgtccgcaaaaaggccgttatcgtcagttccatcaggtcggtatcgaagctttgggttttgaaggtccggatattgatgcggaaatcatcgcgatgtctgccgacttatgggaaaaattgggtatccgcgaatacctgactttggaaatcaacagcttaggcaaccgtgaggagcgagcggcacaccgtgcggcgttggttgaatatttgacacgctatgaagataaattggacgaagacagcaaacgccgtctgaaaaccaatcctttgcgtgttttagatacgaaaaaccctgatttgcaggaaatctgcaatgccgcgccgcgtttggtggattacttgggcgaggcttcgcaaaaccactatgcacgcttcaaggcgatgttggatggtttgggtattcaatatattgaaaatccgcgcttggttcgcggtttggattattacaatcagacggtttttgagtggacgaccgacaaactcggcgcgcaggcaactgtgtgcggcggcggccgttacgatggtttgattgaggaacttggcggcaaacctgcgccgtccatcggctttgcgatgggcatcgaacggctgctgcttttggtgagcgaatacggctcgctggaagtgaacgctgcgcctgatgtctatgcaatgcaccaaggcgaaagggcggacttgcaggtgatgaaatacgcgcaagccttgcgcgcgcaaggtttcaatgtaatgcagcattccggctatcaaagcctgaaagcgcaaatgaaaaaagccgacaacagcggcgcgcgctttgccctgattgtcgcgcaagacgaactggcgaacggtacggttacgctcaaagacatgaacggcgcacacggtcagcaaactgtcgccgccgaggatttaacccatactttacaacaatggaagaacgcataa

SEQ ID NO: 63385 - DNA, 135 bp, Neisseria meningitidis
atgaaacgcacttatcaaccttccgttaccaaacgcaaacgcacccacggcttcctggtgcgctccaaaacacgcggcggccgcgcagtattggcggcgcggcgcgccaaaggccgcaaacgcctggcggtataa

SEQ ID NO: 63386 - DNA, 1662 bp, Neisseria meningitidis
atgacagaatccatcacccgcgacagtatgcaatacgatgtcgtgattgtcggcgcaggcccgtcgggtttgtctgccgccatcaaactcaagcagcttgccgaacaaaacgggcgcgaaatcagcgtttgcgtggtggagaaaggttctgaagcaggtgcgcattcgctggcgggcgcggttatcgatccgattgcgctgaatgagctgattcccgactggaaagaaaaaggcgcaccgctgacgcgcacggtaacgcaggacaaggtgttgttcctgacggagaaaaaagcgttcaatctgcccattacccccaatttcgacaatcacggcaactacatcgtcagcttgggcgaagtcgtgcgctggttggcggagcaggcggaaaatatgggcgtggaaatctatccgggctttgccgctgccgaagtgctgtatcacaaagacggttcggtcaaaggcattgcaaccggcaatatgggcgtgggcaaaaacggcgagccgaccgattcattccagcccggcatggagctttgggcacggcaaaccctgtttgccgagggctgccgaggttcgctttccaaacaaatcatcgaacgcttcaaactcgaccaaaacagccagccgcaaacttacggcttgggcatgaaagaagtttgggaagtgccgtccgaacagcatcagcccggtttggtggtgcacagcgcaggctggccgctggacagcaaaacctacggcggcgcgtttgtttaccatttcgacgacaacaaagtcgccgtcggtttcgtggtcggtttggactatcaaaacccgtatctgtcgccgtttgaagagttccaacgtttcaaaacccatcccgaaatccgcaaaacctttgaaggcggccgccgcattgcttacggtgcgcgttcgctgattgaaggcggttttcaaagtttgccgaagctctcgttcaaaggcggcgttttggtcggcgatgcggcgggtttcctcaatatgccgcgcatcaaaggcattcataccgcgatgaaatccgccatgctcgccgccgaagccgtgttccccttgttggaaaaccttgaagaagtggagggtttcgacagcggcaaagaggcggcggattatcagcaacgttttgaacaaagctggctgtatcaagagctttacgccgcgcgcaatgtccgtccgtcattcaaatggggcgtttacctcggctcaatctacaccggcatcgatcagatgattttcagaggcaaagccccgtggaccttgaaacatcacggcaaagacaacgagcagcttaaaaaagccgccgcgtgcaagccgattgattatccgaaacccgacggcgtgttgaccttcgaccgcttgagcagcgtcttccttgccaatctcgcgcacgaagaaaaccagcccgaccatttggtgctgaacaatccgcaaacgatgatagacgtgaactacaaagaatacgcctcgcccgaaacgcgctattgtccggccggcgtgtacgaaattgttgaagaaaacggcaatccgcgcctgcaaatcaacgcggcaaactgcgtgcactgcaaaacctgcgacatcaaagacccgacgcaaaacatcacttggatttgccccgaaggcgcgagcgggccgaattacggcgggatgtga

SEQ ID NO: 63387 - DNA, 240 bp, Neisseria meningitidis; identical to SEQ ID NO: 39921

SEQ ID NO: 63388 - DNA, 180 bp, Neisseria meningitidis
atgttctgtatcgttgtttaccgcttccgcacttttgtccgccttaaagcaggtaaacaccgcaatgaatcgacgcaaagaaaatgtcgtctgaacatgtgttcgggcggcgttttgttggggggtatcggagtggaacgtctgaaaaagggtttcaggcggtctttgggcgtgtggtga

SEQ ID NO: 63389 - DNA, 648 bp, Neisseria meningitidis; identical to SEQ ID NO: 44369

SEQ ID NO: 63390 - DNA, 696 bp, Neisseria meningitidis; identical to SEQ ID NO: 38171

SEQ ID NO: 63391 - DNA, 282 bp, Neisseria meningitidis
atgaaaaaatccctgtttgccgctgctttgttgtctttggtcctggcagcctgcggcggtgaaaaagccgctgaagctcccgctaccgaagcacctgccgccgaagctcccgctgctgaagcacctgccgccgaagctcccgctgctgaagctgccgctaccgaagcacctgccgctgaagctgccgctaccgaagcacctgccgctgaagctcctgctgctgaagctgccgctaccgaagcacctgccgctgaagctcctgctgccgaagctgcaaaataa

SEQ ID NO: 63392 - DNA, 165 bp, Neisseria meningitidis; identical to SEQ ID NO: 61827

SEQ ID NO: 63393 - DNA, 648 bp, Neisseria meningitidis
atgaaagcattacttttaggcgcaccgggcgcgggcaaaggcactcaggcgcaattcatcaccgcagcgttcggcattccgcaaatctctaccggcgacatgctccgtgccgcgattaaggcaggcacgcccttgggtttggaagcgaaaaaaatcattgacgaaggcggcttggtgcgcgacgacatcattatcggcatggtcaaagaacgcatcgcgcaagacgactgcaaaaacggtttcctgtttgacggtttcccgcgcacattggcacaagccgaagcgatggttgaagcaggcgtggatttggatgcagtcgttgaaatcgatgtgcctgacagcgtgattgtcgaccgcatgagcggccgccgcgtgcatttggcttccggccgtacttaccacgttacctacaacccgcccaaagttgaaggcaaagacgacgtaaccggcgaagatttgattcagcgcgacgacgacaaagaagaaaccgtgaaaaaacgccttgccgtttaccacgagcaaaccgaagttttggtcgatttttacagcaaactggaaggcgaacacgcgcctaaatacatcaaagttgacggcactcagccggtagaagccgtgaaagccgaagtattgggcgcattgggcaaataa

SEQ ID NO: 63394 - DNA, 573 bp, Neisseria meningitidis; identical to SEQ ID NO: 41560

SEQ ID NO: 63395 - DNA, 360 bp, Neisseria meningitidis
atgaatatcaaacacctgattaccgccgcactcattgcctcagccgcctttgccgcgcaggcagccccgcaaaaacccctatccgccgcccaaaccgcgcaacatccggccgtttggatcgatgtccgttccgaacaggaatttagcgaagggcatttgcacaacgcggtcaacatccccgtcgaccaaatcgtccgccgcatacacgaagccgcgcccgacaaagacacgccggtcaacctctactgccgcagcggacggcgtgccgaagccgcccttcaagaactgaaaaaagcaggttatacaaatgttgccaatcacggcggttatgaagacctgctcacaaaagggatgaaatga

SEQ ID NO: 63396 - DNA, 594 bp, Neisseria meningitidis
atgcgcaaacagaacactttgacgggaatcccgacttctgacggacagagggggtttgcactgtttatcgtgctgatggtgatgatcgtcgtggcttttttggttgtaactgccgcgcagtcttacaataccgagcagcggatcagtgccaacgaatcagacaggaaattggctttgtctttggccgaggcggctttgcgggaaggcgaacttcaggttttggatttggaatatgatacggacagtaaggttacatttagcgaaaactgtggaaaaggtctgtgtaccgcagtgaatgtgcggacaaataatgataatgaagaggcttttgacaatatcgtggtgcaaggcaagcccaccgttgaggcggtgaagcgttcttgcactgcaaattctaccaacctgtgcattgacaataaagggacggaatataagaaaggcacgcaaagcgtcagcaaaatgccacgttatattatcgaatatttgggcgtgaagaacggagaaaatgtttatcgggttactgccaaggcttggggtaagaatgccaataccgtggtcgtccttcaatcttatgtaagcaataatgatgagtaa

SEQ ID NO: 63397 - DNA, 1392 bp, Neisseria meningitidis
atgcttttggttatgcgtgcgaagcagggtaagaaaacaccgaagcgcaaatcccaaggtgtcggcaatacgcaggggcagacacccggaagcaatgattcggactgggtcgatcagattggacaatcggtttcagacggcacgcaacccgactggtcttggaacgaaagtgccgagaccgcatccgccgccgtatccgcgcaagaagtcgatccgcttacggagtatcaggtttataagcaattcggttatcagggcaaggctgccgaatctttggctgcctatctggacggcattccggatggtgaagcgaaacctgaaaaccttatccgcgagctgctcgatatcaatctcgaagtgggggatgtcgatgttttggcagacaatctgcaaaaatacggcaaactgattccttccgaacttttggcaaaatatatcgaacaggcattacagcgcgattcaaaccatttgcgtatccgcgtcttggcggaagaaggtttgggatggggtactcaggagattgaaaaacgtgcggaaggcggttctgcgacggcagcttccgcatcgcccccgccggatgccggcggtaaggcttatgaagccgaagaaatcaagcgcatcccgattgtgcggggcaaaaaagacgtgtccggaatcagtcaagaggaaatcggtgcgattgccggtttggtccgtgccgatcaaggtgcgaaaatccttaaagacaaagtcagctatgaaacggcatcgaaacaatacgaccgtgccatccaaacttccgaaaaacctgcaaacctgattatcgatgcgttgaaactcgattaccaacacgcggacatagaccgttttgccggacatttgtggaaactttaccaaacgttgggcaactacggcaggcaggttaaagagcggatgctggggtgggggtacagcttgggttaccatgaagttttcgatgatttggaaaaagggccgaacgaccggcaaatcaaagacatcggtatggggcacgggtatctgccgaaaaatatacagaaattcaaatcgcaacatcgggatttggtgcttcaagattcttcgttgattaacaccggttcgtctccggcagacgatgcggttaaagaagtagagtcgttgctgatgtatggtcagattgaagcggcaatggatgtgttggagcaggcggtattgaaatatcccgacgagtcccagctttatattacgttgatcgatatttatgaacgtactgaagattgggataggttggggcagtttttaagggtattgagggaacgtgcggacaggcttcctgaagaggtcgttatgctgatgagccggctgctgcagcgtatgaatcaaaatattaaaaaaataaaacggtacggaaaataa

SEQ ID NO: 63398 - DNA, 1371 bp, Neisseria meningitidis
atgatcaaccccatcgcctcgctttcccctttagacggccgttatgcccaatccgttgaagcattgcgcccgattttttccgaatacggcctgatgaaggcgcgcgtcaaagtcgaattaaactggctcaaagccctcgccgccgagccgaagattgccgaagtgccgcccttcagtgccgaaacgcttgccgaaatcgacacggtgattgaaaacttttcattggaagacgcggccgccgtcaaagccatcgaagccaccaccaatcacgatgtcaaagccatcgaatattggctgaaaaaacgttttgccgaagtgcccgaagtcgccgccgtgagtgagttcatccacttcgcctgcaccagcgaagacatcaacaacctgtcccacgctttaatgctgcaagaagcgcgtgaggctgttttgctgcccaaactggcagaaatcatcggcaaactcaccgctatggcgcacgaccttgccgccgtcccgatgatgagccgcacccacggccagcccgccacgccgaccactttgggcaaagaaaccgccaatgtcgtgtaccgcctgcaacgccagtttaaaaacctgcaagcgcaagaattcctcggcaaaatcaacggcgcggtcggcaactacaacgcccatatggttgcttatcccgatgtggattgggaaacccactgccgcaactttgtcgaaatcagcctcggtctgaccttcaacccctacaccatccaaatcgaaccgcacgactatatggcggaattcttccaaaccctcagccgcatcaacacgattctcatcgactttaaccgcgacgtttggggttatatttcattgggttacttcaaacaaaaagtcaaagcgggcgaagtcggttcttccaccatgccgcacaaagtcaaccccatcgactttgaaaactccgaaggcaacctcggcatgtctaacgccgtattgggctttttgtccgaaaaactgccgatttcccgctggcagcgcgacctgaccgacagcaccgtcttacgcaatatgggcgtaggcgtgggctatgccgtgttgggtttcgccgcccacctgcgcggtctgaacaagctggaacccaaccctgccgcgcttgccgccgatttggatgccacttgggaactgctcgccgagccgattcaaaccgtgatgcgccgttacggtgtcgccgatccttacgaaaaactgaaagacctgacgcgcggcaaaggcggcattacgcccgaagtgctgaaagtctttatcggatcgctggaaatccctaccgaagccaaagcaaaattgcttgagctgacccccgcactgtatgtgggcaaggctgaagcgttggcgaaacggatttga

SEQ ID NO: 63399 - DNA, 741 bp, Neisseria meningitidis
atgaatcctttaatctccgacttccaaactccgcaacaacgcacccccgtcatcgtcgcccttgatttttccaacgaaaaagacacgctcggattcgtccgcaaccttgacccgacattgtgtcaaatcaaaatcggcaaagagctgtttaccgcgacgggacgcaatttggcagaaagcttaatcaatcaaggtttcaaacttttcctcgatttgaaataccacgatattccccacaccgtcgcgcaagcctgcaaagtcgctgccgacatgggcgtttggatggtcgatatgcacgcgtcgggcggccgccgtatgatggaagccgcagcagaagccgttgccggatacggtacaaagccgctcttaatcggcgtaaccgtgttgaccagcatggaacaaagcgatttggcggaaatcggtttgaacatcgctcccgaagaacaagtcatccgtttggcgaaactggcgcaaagttcgggcttggacggcgtggtctgctccgcccaagaagccgcaccgctgcgccgcgaattgggacaggattttgtcttggtcacgcccggtatccgcttggacgttgccggcaacaacgacgaccaacgccgcatcatgacgcccgccgaagccttggcggcaggttcgacctatctggtgatgggccgtcccgttacccaagctgccgatccgctagccgtattgcgcgaagtgaaccgcgtggcaaaccttgaagcaaactga

SEQ ID NO: 63400 - DNA, 888 bp, Neisseria meningitidis
atgccctaccaacaaatcaccgtcaacgtcaacgatgccgtcgccgaacgcctcgccgacgcgctgatggaacacggcgcactctccgccgccatcgaagatgcctacgccggcacgcaaaacgaacaggcgattttcggcgaacccggtatgcccgccgaacaaatctggcagcagagcaaagtcatcgccctgttcggcgaacacgacgaagccgccgccatcatccaaatcgccgcacaagaatgcgggttaaaagacttggcatacaccggcgaaaccatcgaagaccaagactgggtgcgtctcacgcaatcgcaattcgaccccatccgaatttccgaccgcctgtggattaccccctcttggcacgaagcccccgaaggcactgccgtcaacctacgcctcgatcccggcctcgccttcggcactggcagccacccaaccacgcgcctctgcctcaaatggctggatacgcaactcaaaaacggcgaaagcgtcctcgactacggctgcggttcgggcatcctgaccatcgctgccctcaaactcggcgcaggttctgccgtcggcgtcgatattgacgaacaagccgtccgcgccggcaaggacaacgccgaacaaaacaacgtcgatgcacaattcttcctgcccgacggcctgcctcaagggcaattcgacgtagttgtcgccaacatcctcgccaaccctttacgtatgctcggcgaaatgctcgccgcccgcaccaaacaaggcggccgcatcgtgttatccggtttgttggacgaacaagccgaagaactcggcggcatttacagccaatggttcgatctcgatcctgcggaaacagaagaaggatgggcgcgactgagcgggacaaaacgctga

SEQ ID NO: 63401 - DNA, 750 bp, Neisseria meningitidis; identical to SEQ ID NO: 45151

SEQ ID NO: 63402 - DNA, 216 bp, Neisseria meningitidis
atggaccaatcagtattgcgtgttaatcaggtagccgagcgtttaggcgtgagccgttcgaccgtgtggaattggggcaatactaaaagccgccattaccgcgccgattttccgcgcccgttcaaagtatccgcaaacgtcgttggctggttttccagtgagattgacgactatatcggcaaacttgcagccaaacgcgaagagcaggcgggttaa

SEQ ID NO: 63403 - DNA, 678 bp, Neisseria meningitidis
atgagcatcaagcaatggccggagggggaaaggcccagggaaaagctgttggaacgcggggcggcggcgttgagtgatgccgaacttttggcaatcctgctgcgcgtcggcacgcgcggaatgagtgcggttgatttggcgcgttatttgctgcaggagttcggcagtttggggaggctgatgagcgcggaggtcggcaaactgtcggcatacaaagggatggggacggcaagtttcacacagtttgccgtggtcagggaaatcgggcggcggatattggcggaagaattgcaggagagcatcgtcctgtccgatccggatacggtggccgattatttacgctttcatttggggcaggaaaaagtcgaagtcagcgtcgcgctgctgctgaaccgccaaaaccaactgattgcggtcagagagctgtcgcgcggtacggttgcggaaaacacgatttacatccgcgaaatcgtcaaactggcattggacgaatatgccgacagcctgattattgcgcacaaccatccgggcggctcgcccgaaccttcgcaggaagacatcatgttcacaaggcggctggcacaggcaatgtcgctggtcgatgtgtcgctgctcgaccattttatcgttacctcgcaaagcgtctgttcgttcagacagctcgggttgatgccctga

SEQ ID NO: 63404 - DNA, 807 bp, Neisseria meningitidis; identical to SEQ ID NO: 45050

SEQ ID NO: 63405 - DNA, 477 bp, Neisseria meningitidis
atgcaaaaaatccccctgaccgtacgcggtgcggaattgctgaaacaggaattgcagcagctcaaaagcgtggcgcgtcccgaagtgatcgaagcgattgccgaagcccgttcgcacggcgatttgtccgaaaacgccgaatacgaagccgccaaagaacgccaaggctttatcgagggccgcatttccgagctggaacacaaactttccgttgcccacatcatcaatccgaccgaaatccacgccgaaggcaaaatcgtgttcggtacgacggttacgttggaagatttagaaacggaagaacacgttacctaccaaattgtcggcgaagacgaagccgacatcaaacagggcaaaatctatgtcggctcaccgattgcccgcgccttaatcggcaaggaagagggcgatacggcggaagtccaagccccgggcggcgtgcgcgaatacgacattatcgaagtccgatatatttga

SEQ ID NO: 63406 - DNA, 1170 bp, Neisseria meningitidis
atgagcaaaaaactccatccgcaaacgctcgccatacgcggcggcaaagaacaaaccgaataccgcgaacacaatcaggcattgtttctgaccagcagcttcatgtgggacaacgcccaacacgctgccgatttgttttcaaaaaaaatcaaagggttcacttatacccgtaccgccaacccgaccacagccgcctttgaaaaacgcatcgccgctttggaaggtgcggaacgcgcggtcgccacttcgacgggtatgtctgcgattcaggcggcgtttttcacctttttgcaggcgggcgaccacgtggtttccagccgcagcctgttcggcacgaccgtcggctttatcaataacatcgttaccaaattcggcatcgaagtgagccacgtgtcgccgactgatataaacgaatggaaagccgccgtcaaagccaacaccaaactgctgtttttggaaacgccgtccaatcccttgggagaagtggccgacttggaagccttggcggaattggcgcacggcatcggcgcgattttggtggtggacaacagcctgctgtcgcccatcggctctcagcctttgaagcacggcgcagatatttccgtttcttccgcaaccaaagccatagacggacacggacgcgtgatgggcggcgtgttggcgggttcggaagaactgatggcgcaggccgccgtttactgcaactcttgcgggctggcgatgtcgccgtttaacgcgtggcagttgttgagcggcgtggaaaccctgtcgctgcgtatggaaaaacagttcgacaacgccctgaaaatcgcacaatggctgcaagcgcagccgcaggttcaagccgtttactacaccggattgcccgatcatccgcaggcggagcttatccgcaaacagcaaaacggcggcggcatcgtcatcggctttgaagtagccgaccaagaagccgcgtggaaagttgtggacggcgtggaactcttttcccgaaccgccaacctcggcgacgtgcgctcgaccatcacccatccgtggacaaccacgcacggcaggatgcagcccgaagaaaaactcgccgccaacatccgccccggattggtgcgcctgtcggtcggtttggaatatgttggcgatttgattgacgatttgaaacaggcactcgcacgctga

SEQ ID NO: 63407 - DNA, 339 bp, Neisseria meningitidis; identical to SEQ ID NO: 50533

SEQ ID NO: 63408 - DNA, 1542 bp, Neisseria meningitidis; identical to SEQ ID NO: 50825

SEQ ID NO: 63409 - DNA, 600 bp, Neisseria meningitidis; identical to SEQ ID NO: 44985

SEQ ID NO: 63410 - DNA, 618 bp, Neisseria meningitidis; identical to SEQ ID NO: 38819

SEQ ID NO: 63411 - DNA, 117 bp, Neisseria meningitidis; identical to SEQ ID NO: 51210

SEQ ID NO: 63412 - DNA, 771 bp, Neisseria meningitidis
gtgtccgaaacacaaaacgaacaacccgtccaaccgcttgtcgagcatctcatcgagctgcgccgccgcctgatgtggacggttgtcggcatcttagtctgctttttcggcatgatgccgtttgcccaacaactctatacttttatcgccgacccgctgatggcaaacctgcccaaagacaccagcatgattgccaccgatgtcatcgcaccatttttcgtgccggtcaaagttaccctgatggcggcatttttaatttcgctgccgcatacgctctaccaaatctgggcatttgtcgcgcccgcactctaccaaaacgaaaaacgcctgattacgccgctcgtcctctccagcgtcagcctgtttttcatcggcatggcatttgcctactttttggttttccccgtcattttcaaattccttgccagcgttacccctgtcggtgtcaatatggcgacagacatcgacaaatacctctccttcatcttggggatgtttgtcgcattcggtacaacgtttgaagtccccattgtcgttatcctgttaaccaaaattggtgtggtaacaaccgaacagctcaaacgcgcccgcccctatgtgattgtcggcgcgtttgtcattgccgccatcatcacgccgcccgatgtgatttcacaaaccctgcttgccattccgctgattctcttatacgaagcaggtatttggttcggacgctttttcacgccacgttcagaacaggatggcgacatacagccgcctgcaacaacctga

SEQ ID NO: 63413 - DNA, 534 bp, Neisseria meningitidis
ttgactgaaggtcaaaaatcagccgtcaccgagtattacctgaatcacggcgaatggcccgccaacaacagttctgccggcgtggcatccgtctccaccgacatcaaaggcaaatatgttcaaagcgttacagtcgcaaacggcgtcattaccgcccaaatggcttcaagcggcgtaaacaaagaaatccaaggcaaaaaactctccctgtgggccaagcgtcaaaacggttcggtaaaatggttctgcggacagccggttacgcgcaccgacaacgccaaagacgacgccaaagacgacgccgttaccgccgccgccaccggcaccgacaaaatcgacaccaagcacctgccgtcaacctgccgcgacgcttcatctgccagccgtacaaaaacacccggtttcgctttcaaatacttccaaaaaatcagccgttaccgagtattgcccgaatcacggcaaatgactaaaaaacttcgtcattcccgcgcaggcgggaatctaggtttgtcggcgcagaaacttatcgggtaa

SEQ ID NO: 63414 - DNA, 744 bp, Neisseria meningitidis
gtggttttggtcggaggcgaccctgccagcgcggtttatgtccgcaacaagaaaactgcctgccaaaaatgcggcatcaaatcactgtcttacgagctgcccgaatcaacatcgcaggaagaactgctggcactggtcgaccgcctgaatgccgattccgaagtggacggtattctggttcagctaccgctgccgaagcacctcgacagccaggcggttttggaacgtatttcgccggataaggacgtggacggcttccatccttacaatgtcggcaggctggcggtcaaaatgccgctgatgcgcccgtgtacgcccaagggcgtgatgacgcttttggaagcttacggcattgatccgaaggggaaaaaagcgatcgtggtcggcgcgtcgaatatcgtcggccgcccgcaggcgttggaattgctgctggcacgcgcaacggtaacggtctgccacagcgcaaccgaaaatctggcagacgaggttgccggagccgatattttggtggtcggcgtgggcattccgaactttgtcaaaggcgaatggatcaaacccggcgcggtcgttatcgatgtgggcatcaaccgtttggacgacggcagcctgtgcggcgacgtggaatttgaaacggcaaaagaacgggcggcgatgattacgcccgttcccggcggcgtgggtccgatgacgattgccacattgatggaaaacaccctgcacgcggcttcactgcacgatgcttga

SEQ ID NO: 63415 - DNA, 1134 bp, Neisseria meningitidis
atgagcacccccgccctcctcgtcctcgctgacggcagcgtattccacggcacatcaatcggttacgaaggttcgacttccggcgaagtcgtgttcaatacttcgatgactggctatcaggaaatcctgaccgacccgtcctactgcaaacaaatcgttaccctcacctacccacacatcggcaataccggtaccaacgccgaagatgaagaaagccgcagcgtttacgccgccggtttgattatccgcgacctgccgctcttgcacagcaacttccgcgcctccgaaagcctgcacgactatttggtacgcaaccaaaccgtcgccatcgccgacatcgatacccgccgcctgaccacgctgttgcgcgaaaaaggcgcgcaaggcggcgcgattctgaccggtgcggatgccacaatcgaaaaagcgcaagaactcatcgccgcgttcggcagtatggtcggcaaagacttggcaaaagaagtttcctgcacggaaacttacgaatggacggaaggcgaatgggaattgggcaagggtttcgttacccctgacgaacagccttaccacgtcgtcgcctacgatttcggcgtgaaaaccaacatcctgcgtatgctcgcctcgcgcggctgccgcctgaccgtcgtccccgcccaaacgagcgcacaagacgtgttggcactcaatcccgacggcgtgttcctgtccaacggccccggcgaccccgagccttgcacctacgccatcgaagccgtgcaaaaactgatggaaagcggcaaaccgattttcggcatctgcttgggacaccagctcatcagcctcgctatcggcgcgaaaaccctgaaaatgcgcttcagccaccacggtgcgaaccaccctgtgcaagatttggacagcggcaaagtcgtcatcaccagccaaaaccacggttttgccgttgatgccgacaccctgcccgctaacgcacgcattacccacaaatccttgtttgacaacactttgcaaggcatcgagctgaccgacaaacctgtgttctgcttccaaggccaccccgaagccagccccggcccgcaagatgtcggctatttgtttgacaaattcattggcaatatgaaagcggcaaaacgggcataa

SEQ ID NO: 63416 - DNA, 1335 bp, Neisseria meningitidis
atgactgacctgaacaccctgtttgccaacctcaaacaacgcaatcccaatcaggagccgttccatcaggcggttgaagaagtcttcatgagtctcgatccgtttttggcaaaaaatccgaaatacacccagcaaagcctgctggaacgcatcgtcgaacccgaacgcgtcgtgatgttccgcgtaacctggcaggacgataaagggcaagtccaagtcaaccggggctaccgcgtgcaaatgagttccgccatcggtccttacaaaggcggcctgcgcttccatccgaccgtcgatttgggcgtattgaaattcctcgcttttgaacaagtgttcaaaaacgccttgaccaccctgcctatgggcggcggcaaaggcggttccgacttcgaccccaaaggcaaatccgatgccgaagtaatgcgcttctgccaagcctttatgaccgaactctaccgccacatcggcgcggacaccgatgttccggccggcgacatcggcgtaggcgggcgcgaaatcggctacctgttcggacaatacaaaaaaatccgcaacgagttttcttccgtcctgaccggcaaaggtttggaatggggcggcagcctcatccgtcccgaagcgaccggctacggctgcgtctatttcgcccaagcgatgctgcaaacccgcaacgatagttttgaaggcaaacgcgtcctgatttccggttccggcaacgtggcgcaatacgccgccgaaaaagccatccaactgggcgcgaaagtgctgaccgtttccgactccaacggcttcgtcctcttccccgacagcggtatgaccgaagcgcaactcgccgcgcttatcgaactgaaagaagtccgccgcgaacgggttgccacctacgccaaagagcaaggtctgcaatactttgaaaaccaaaaaccgtggggcgtcgccgccgaaatcgccctgccctgcgcgacccagaacgaattggacgaagaagccgccaaaaccctgttggcaaacggctgctacgtcgttgccgaaggtgcgaatatgccgtcgactttgggcgcggtcgagcaatttatcaaagccggcatcctctacgccccgggaaaagcctccaatgccggcggcgtagcaacttcaggtttggaaatgagccaaaacgccatccgcctgtcttggactcgtgaagaagtcgaccaacgcctgttcggcatcatgcaaagcatccacgaatcctgtctgaaatacggcaaagtcggcgacacagtaaactacgtcaatggtgcgaacattgccggtttcgtcaaagttgccgatgcgatgctggcgcaaggcttctaa

SEQ ID NO: 63417 - DNA, 480 bp, Neisseria meningitidis
atggctaacttagtaaaaacctttctgcttggcgaattggtaaaaggtatgggcgtaacgctcaaaaactttttcgcccgcaaagacacgatttattttcccgaagagaaaacgccgcaatccgtgcgtttccgcggcctgcacgcgcaacgccgttatccgaacggcgaagagcgctgtattgcgtgtaaattgtgtgaggcagtttgtccggcaatggcgattaacatcgaatcggaagaacgtgaagacggtacccgccgcaccaagcgttacgacatcgatctgaccaagtgcatcttctgcggtttctgcgaagaggcctgcccgaccgatgcgattgtggaaacgcatatttttgaataccacggcgagaaaaaaggcgacttgcacatgaccaagccgatcctcttggcaatcggcgacaaatacgaagctgaaatcgccaaacgcaaagccgctgatgcgccgtatcgttaa

SEQ ID NO: 63418 - DNA, 477 bp, Neisseria meningitidis
atggaacacctatttgggaaatggctgcccgacctgcccgccgacgtttcagacggcatcagcctgccgatggtgcggctgctgcacacccggtcgctgaccgccgcattgcgcgccttgccgcatacattttcggtggaactgctgaaactgggcgaattggagacggaatgcggagggaggctggtgcgcgaagttttgttgaagctggacggtatccctgttgtcgcggcaaggagcgagtgccggataggttcggcgttttggcaaaacattttggactgcggcacgcgccctttgggcgagcgtctgtttcaagccgatttggaaggggcgcgttcggcgtttgagtttgccgtttccggcgaaggatgcggacggtactttgccgcgcggcgttctcggttttcccgtcacggcgaggaaatgctgctgaccgagtattttctgcccgaactgaaacgctttatcggataa

SEQ ID NO: 63419 - DNA, 627 bp, Neisseria meningitidis
atgaaaaacatcgtcatcctgatttccggacgcggcagcaatatgcaggcaatcgtcaatgccgccattctcaacgtccgtattgccgccgtgttgagcaacagcgaaacggctgccggtttgcaatgggcggccggtcagggtattccgaccgacagcctgaatcataaaaactttgaatcacgacttgccttcgataccgccatgatggaaaaaatcgacgcatatcaacccgacttggtggttttggcaggttttatgcggattctgacccctgagttttgcgcccattacgaaggcaggctgatgaacattcacccgtccgtcctgccctcgtttaccggacttcatacgcacgaacgcgctttggaggcgggctgccgcgttgccggctgcaccatccatttcgttactgccgaactggattgcggcccgattgtatcgcaagggattgtgccgatactcgacggcgatacggcagacgatgttgccgcccgggttttggctgtcgaacacaaactctatccgaaagccgttgccgattttgccgccggccgcctgattatcgagggaaaccgcgtcagaaattcggaaaacgccgatgccgcccgtttcctgacggcgtaa

SEQ ID NO: 63420 - DNA, 465 bp, Neisseria meningitidis
atgaaagaactagataaaatcgatttccgcattcttaagatcctccaacagaatgcccgcatcccgatgatggagcttgccgagaaggtaggcttgtccaccacgcccgttacagagagggtgcgccgtttggagcgggaacattatatttccggctatcacgcccatctcaatccccatctgttgggcaaaccactattggtttttgtcgagctgaagctgcaatccaaatcgggcaatattttcgaagatttcaaaaaagaagtgctgaaaattccgcaaattatggaatgccacttggtgtcgggcgaatacgactatctgattaaagtacgtttgcccgatatgtctgcctatcgggatatgctaggcaatatcctattgcaactgcctgccgcttcggagagtaggagttatgttgtgatggaggaggtcaaagaaaatccagttttggatttggattga

SEQ ID NO: 63421 - DNA, 1311 bp, Neisseria meningitidis; identical to SEQ ID NO: 57361

SEQ ID NO: 63422 - DNA, 1596 bp, Neisseria meningitidis; identical to SEQ ID NO: 39529

SEQ ID NO: 63423 - DNA, 1272 bp, Neisseria meningitidis
gtgggcgacggtgtccacactctgctgctcgacaggccgattgtgcgcgacggcaggaaattcgacgcgccgcttttgtggatggtggtgctgatgacggcgttcagcctgctgatgatttattcggcttctgtgtatttggcatcaaaagaaggcggcgatcagtttttctatttgaccagacaggcggggttcgtcgttgccggcttgatagcgagcggttttttatggtttctttgcaggatgaggacatggcggcggcttgtgccgtggatttttgccctatccggcctgttgctggtagtcgtattgattgccgggcgcgaaatcaatggcgcgacccgttggatacctttgggtccgttgaatttccagccgaccgagctgttcaagctggcggtcatcctttatttggcaagcctgttcacgcgccgtgaagaagtgttgcgcagcatggaaagtttgggttggcagtcgatttggcgggggacggccaatctgatcatgtccgccaccaatccgcaggcacgtcgtgaaacattagaaatgtacggccgtttccgggcgatcatcctgccgattatgctggtggcgttcggtttggtgctgataatggtacagccggatttcggttcgtttgtcgtcattaccgtcattgccgttggaatgctgtttttggcaggattgccgtggaaatattttttcgtcctggtaggcagcgtcttgggcgggatggtgctgatgattaccgccgctccctaccgtgtgcagcgggtagtggcatttttggacccgtggaaagacccgcagggtgccggctaccagcttacccactctctgatggcaatcgggcgcggagagtggttcggtatgggtttgggtgcgagtttgagcaaacgcggctttctgccggaagcgcataccgattttatttttgccatcatcgccgaagaattcggtttcttcggtatgtgcgtgctgatattctgttacggctggctggtggtgcgggcgttttccatcggcaagcagtcgcgcgatttgggtttgactttcaacgcctatatcgcttcgggtatcggcatttggatcggtatccaaagtttcttcaatatcggtgtgaacatcggtgctttgccgaccaaaggtctgacgctgccgttgatgtcctatggcggttcgtcagtctttttcatgctgatcagcatgatgctgctgttgcgtatagattatgaaaaccgccggaaaatgcgcggttatcgggtggagtaa

SEQ ID NO: 63424 - DNA, 2190 bp, Neisseria meningitidis
atgatctaccaccgcatcgccgtaaacgtgccgctttcagacggccttttgacttattcccattccgatccgcttcctccgggaacgcgggtgcttgtgcctttccgcaataaaaccgtggtcgggatggtgtgggaaacggatattgcgccggatatggatacggcgcggattttgagcgttcggacggccttttcggacgagccgctgctgcccgaaagctggcgtgatttgctctcgtttacgtcgcgttattaccactatccgaccgggcaggcagtatttgccgcattgccgcaaggtttgaaggaaacgcgcgcggtggaaatgccgcagccgcccttgttttacgcgttgaacgaagcgggcagggcgcaaacgccgccgccggcgcggttcaacaaaaaagcggctttgtgggacgcgctgctgtcgggcgaaatgacgatggcagcgttgaagcaggtaaacgcgcaggcggcgaagttaatcgaagattgggcggagcagggttggattgaaacgacggaagcggcgaagcccgttttaaggtcgtgtaatgggcaggcttcgcactctgaatttgtattaaatgctgaccagcagaaggcttccgatgccattcagacggcattgggacgcttccagccgtttctgctgtacggcatcaccggcagcggcaagaccgaagtgtatttcgatgcgatggcgaaagtgttggctcaggggcggcaggtgttgtttctgttgcccgaaatcaacctcacgccgcagcttttgaagcgggtgggaaatcgttttgccgacgtgccgaccgccgtgttgcacagtcagatggcggcaggcaggcgcacgcaggattatttgcgcgcgatgtcggggcaggcgaaattggtcatcggcacgcggctggcggtgtttacgccgatggatgatgtcgggctgattgtagtcgatgaggaacacgacggctcgttcaaacaagacaacgaattgcgctaccacgcccgcgatttggcggtgtggcgggcgaagcagggcggctgccccatcatattgggcagtgccacgcccagcttggaaagctggcacaaggcgcaaagcggcgcgtaccgcctgctgcaactgaccgaacgcgcccataccgccgcgcaactgccgcaagtggacattctcaacgtaggccgtctgaaactcgacaacggtttctcgccgcaagccttgcagcttttgaaacagaattttgaagcgggcggtatgtcgctggtgtacctcaaccggcgcggcttcgcacccgcgctgttttgcggcgactgcggccataccttcggctgcccaaactgctccgccaaaatggtactgcaccaacgcgcccgccaactgcgctgtcaccactgcgaccaccgcgaacccatcccgtacaaatgccccgactgcggcaaccaagacctgaccgccgtcggccacggcacgcagcgcgtcgaagaaaccctgcgcaccttcctgcccaaggcagccgtcgtccgtgttgacagggacagcaccgcgcacaaaaatgactgggcggatttgtaccgccgcatcgccgacaacaaaatcgacattttggtcggcacgcagatgcttgccaaaggccatgatttcgcgcggctcaacctcgttatcgtattgaacgccgacggcagcctgtacagcgcggactttcgcgcgccggaaaggctgtttgccgagctgatgcaagtgtcaggcagggcggggcgcgccgacaaacccggcaaggtgttgatacagacccaactgcccgaacatcctgtcttcgccgccgtcaaagcgcaagactatgccgtgtttgccgaaaacgaattgaacgagcggcaaatgttcgccatgccgcccttcggtttccagaccgccgtccgcgccgatgcgccgcgcgttgccgatgcgatggaatttctcaatgccgccaaagaaaccctcgccccgctgttgcccgaaagcgtttcccagttcggcgcggccccgatgctgatggtgcgcctcgccgaacgcgaacgcgcgcaaatcttcctcgaatcggtatcccgacaggatttgcaccgcgccgtgagtttgtgggtgcaggtgttgcagcaaaaccgcgacagcaaaatcagatggtcggtggatgtcgatccgcaggaggcttga

SEQ ID NO: 63425 - DNA, 717 bp, Neisseria meningitidis
atgacagacaccgccgaaaaccaaacacaaaacaactggcaagccgaacatccccgcagcatccgcagcttcgtcctccgccaaagccatatgaccgccgcacagcaacgcgccatcgataccttatgggacagcttcggcatcgattaccaagcaacaccggccgatcttgatgccaatttcggaagcaaccgacccaaaatcctcgaaataggcttcggtatggggacggcaaccgcagaaatcgccctccgcctgcccgaaaccgacttcctcgccatcgacgtacacggtcccggcgtaggcaacctgctcaaactcatagacgaaaatcatttggaaaacatccgcgtgatgcggcacgatgccgtagaagttgtcgaaaatatgctgcaagacggctcgctcgacggcatccacatattcttccccgacccgtggcacaaaaaacgccaccacaaacgccgtctgatacaagcccccttcatcgccaaactgctgcccaaactcaaaaccggcggctatatccacctggcgacagactgggaagaatatgcgcagcagatgcttgaagtcctcagcagcttcgacagcctgcaaaatacggcggcagactacgcccccaccccggactaccgccccgaaaccaaattcgaagcgcgcggcaaacgcctcggacacggcgtttgggacttggtattcaaacggatcggataa

SEQ ID NO: 63426 - DNA, 405 bp, Neisseria meningitidis; identical to SEQ ID NO: 40476

SEQ ID NO: 63427 - DNA, 1776 bp, Neisseria meningitidis; identical to SEQ ID NO: 58709

SEQ ID NO: 63428 - DNA, 462 bp, Neisseria meningitidis
atgaccgaagtcatcgcctacctcatcgaacatttccaagatttcgatacctgcccgccgcccgaagacttgggtatgctgcttgaagaagcgggtttcgatacgatggaaatcggcaacaccctgatgatgatggaagtattgctcaacagctccgaattttccgccgaacccgccgacagcggcgcattgcgcgtgtacagcaaagaagaaaccgataacctgccgcaggaagtgatggggctgatgcagtatctgattgaagaaaaagccgtcagctgcgaacagcgggaaatcatcatccacgcgctgatgcacattccgggcgacgaaattaccgtagataccgccaaagtgctgaccctgctgcttttatgggcaaacaagagcgagctgcccgtgttggtcggcgacgagctgatgagcgcgcttttactcgacaacaaacccacgatgaactga

SEQ ID NO: 63429 - DNA, 552 bp, Neisseria meningitidis
ttgagcggcatcaacatcaacctcaaaaacggcgattccctgctgatacgcggcccgagcggttgcggcaaaacctcgctgttgcgcgcgccggcggggctttggccgttcggcagcagcggcaaagtcagccgtccgccgcatcaagacatcctcttcctgccgcaacgcccgtacacggcacagggcagcctgcgcgacgcggtttgttaccccgatatcgacaaacagcatcccgagttagccgaagccatgaacacctgccgcttgggttatctgattgacaaattggacaaaacagacgactggcagcacaaactctcccctggcgaactgcaacgcgtcgccttcgtccgcgccctgctctcgcagcccaaagttatcctgctcgacgaagccaccgccgccttggacgaaccggccgaagccgcgctctaccgcgccttaaagcaaaaactgcccgacagcatcatcatcagcatcggacaccgaagcacgctcaacgcgttccacaatatgcgcctcgatgtcggcaacgttgcctgcggttga

SEQ ID NO: 63430 - DNA, 216 bp, Neisseria meningitidis
atgaaggcaattcatccgtatgcatgtccgcgctgctgccggctgcctgccaacacgtttcggacaggcatggcaaattccgcttccaaattctgcattgccaaaggcggcagacgggaagtaaaaaaagacgaaagcggcggcggatatgccctgtgccatttgccggacagcaggattgtcgaggagtgggaatatttccgttcacaacattga

SEQ ID NO: 63431 - DNA, 591 bp, Neisseria meningitidis
atgcttttgtttatcgacaattacgacagttttacttacaacatcgtccagtatttcactgaattggggcaggaagttgccgtgcgccgcaacgatgatattacgttggaggaaatcgaggcattgaatccgcaatatctcgttatcggccccggcccgtgttcgcccaaagaagcggggatttccgtggcggcgatgcgccatttcgccggccggctgccgattatgggcgtgtgcctcgggcatcagacgataggcgaggcgttcggcggcaggatagtccgcgccaaaacgctgatgcacggtaaggtgtcgcccgtgtcccattcgggcaagggtatgtttaagggtttgcccaatccggttacctgtactcgttatcacagcctcgttatcgatcggaatacgatgcccgaatgtttggaagtaacggcttggactgaggacggcgagattatgggtgtgcgccataaggaatatgccgtcgagggcgtgcagttccaccccgaagccctcttgaccgagcacggacatgatatgttaaacaattttttaatcgaatttcaaaacttcaaaccgcaaaaaatctga

SEQ ID NO: 63432 - DNA, 1056 bp, Neisseria meningitidis
atgacacaccattaccccacagacgatattaagattaaagaagttaaagagttgttgccgccgattgcccatctttacgagctgccgatttccaaagaggcttcgggcttggttcaccgcacccgtcaggaaatttccgatttggttcacggcagggacaagcggctgttggttattatcgggccgtgttcgattcacgatccgaaagcggcgttggaatatgcggagcgtttgttgaaactccgcaagcagtatgaaaacgagcttttgattgtgatgcgcgtttatttcgagaagccgaggacgacggtgggttggaaaggtttgattaacgacccgcatttggacggtacgtttgacatcaatttcggtttgcgtcaggcacgcagcctgttgttgtcgctgaacaatatgggtatgcctgcctctaccgagtttttggatatgattacgccgcaatattatgcggacttgatttcttggggggcaatcggcgcgcggacgaccgaaagccaagttcaccgcgaattggcaagcgggctgtcctgccccgtcggctttaaaaacggtacggatggcaatttgaagattgccatcgacgcaatcggtgcggcgagccattcgcatcatttcttgtctgtaaccaaggccggacattccgccattgtccataccggcggcaatcccgactgtcatgtcattttgcgcggcggaaaagagccgaattatgatgcgggacacgtcagcgaggcggcggaacaactgcgtgcggcaggggtaaccgataagctgatgatcgattgcagccacgccaacagccgcaaggattacacccggcagatggaagtggcacaagatattgctgcccaattggaacaggacgggagcaatattatgggcgtgatggtggaaagccatttggtcgaaggcagacaggataagccggaagtgtacggcaaaagcattaccgatgcgtgtatcggttggggcgcgactgaagaactgttggcattgttggcaggtgcaaacaaaaaacgtatggcgcgcgccggttga

SEQ ID NO: 63433 - DNA, 1422 bp, Neisseria meningitidis
atgaaaatcattcagatacagaacaatcacaatgtaaacgatgaccgccccgagtttgaccgcgcgctgattgccagcctgcccgccagcggcccgcgctacacttcctaccctaccgccgaccgtttccatgacggtttccgcgaaggcgaatatatcaaagctttacatttgcgcggtatgggcgcgttaaacaaaccgctttccctttacattcacattccgttctgcaacaccatctgctactactgcggctgcaacaaaatcatcaccaaagacaaaagccgcgccgatgcctacatcgaatatcttgaaaaagaaatggaactgctcgctccacatctgaacggacggcaccagcttgcccaactgcacttcggcggcggcacgccgacctttttgagcgacgaacagatcgaacgtgtcttccgcatgatacgcaaacatttcgagttaatccccaccggcgaatactccatcgaaatcgacccgcgcaaagtcagccgcgacaccgtcctcatgctcggcagactcggcttcaaccgcatgagcatcggcattcaggatttcgaccccaaagtgcaggcggcggtcaaccgcatccaaagttacgaagaaaccaaagaagtcatcgatgcggcgcgcgaagcggggttcaaatccgtcagcgtcgatttgatttacggcctgccgcaccagacttcggaaagcatcaaaaccaccatcgataccgttttgtcgctcgatcccgaccgcctcgccctttatcactacgcccacctgccgcacgtgttcaaaccgcaacgccgcatcgataccgccgccgttcccgacagcgaagagaagctcgatatgctgcaatactgcgtccaaaccctaaccgaacgcggctacgtcttcatcggcatggatcatttcgccaaacctgacgacgaactctccatcgccctcaaagaaggcttcctccagcgcaacttccaaggctattcgacctacgcggattgcgatttggtcgccatcggcgtgtcgtccatcggcaaaatcggcagcacctattcccaaaacgaacgcgacatcgatgcctactatgccgccatcgacgaaggcagactgcccatcatgcgcggttatcagctcaatcaggacgacatcctgcgccgcaacatcattcaggatttgatgtgccgtttcgcgctcgactaccggatttacgaaagtatgttcggcatcccgttcgaccgctacttcaaagacgaactggcggatttggaaaaactcgccggtttgggattggtgcgcctgaacagccacgggctgaccgttaccccgaaaggacgcttcctcatccgcaacatcgccatggtgttcgattaccacctgcgccataaagaaaccaaggcgaaatattcgcaaacggtgtga

SEQ ID NO: 63434 - DNA, 690 bp, Neisseria meningitidis
atgctgtttgaaggcttgccgtgtttggcggtttggtgcaaaaaccggctgtctgccgttttgcctgttggaggattgaacgtgtctgaaaatctgcttgaaatcgaaacccatcccttcgatcccgtgttgccgccgaaggctgcggtcatgatgatggggacgtttccgcccaaggaagacaaacgcgcgatgcagtttcattatccgaatttccaaaacgatatgtggcgcgtttacgggctggtgttttttaatgatgcggcgcatttccaaaggttgtctgaaaaagcgtttgacgcggagaaaatcaaaacgtttttgcacgaacgggggattgcgtcctgtccgaccgtgttgaaggcggcaagggaacacggcaatgcgtccgacaagtttttaaaggtagttgaaaccgtcgatttggcggcggtgttggcaaaaatacccgagtgccgccatatttgtacgacaggcggcaaggcgacggaaatcctgctcgatattcagggcggcggtatcaaaatgccgaaaacgggcgaaaccgtgccgtttccgtttgccggacgggatttgacgctgacgcgcctgccttcgacttcgcgcgcctatcctttgagtttggcgaaaaaagcggcggcgtatcgggcgtttttcgaaatggcgggcttgtgtgaaaaacagttataa

SEQ ID NO: 63435 - DNA, 237 bp, Neisseria meningitidis; identical to SEQ ID NO: 37424

SEQ ID NO: 63436 - DNA, 441 bp, Neisseria meningitidis
atgtatgagacggcagattttggcgcggtcaagcatctgctccctgatagtgtacaggcgttgattacggtcatcgggtttaatgaaacgctggagctggtgcgcctgatgggcggtacgacttatcctttgcggcagggttatacgaaaaacagtcaatcccgtgttgcatacttggaagagattatcggcagtgaggcggccggtcggctggtggaggcaatggctccgtgcaatctgtttataccccgttgcgagacggccttgtatgagttgcgaaaccgtaaaatccgcagtcagtttgaccggcagacggcaggcggtacccctgcttatgaggccgttaacgatttggccttggcacaccgcctaagcgaccgccatgtgtggcgaattttaaagcaggcggataaggaagcggagcaggagaatttgttttag

SEQ ID NO: 63437 - DNA, 465 bp, Neisseria meningitidis
atgtttaccatcgttttataccagccggaaatcccgccgaacacgggcaacatcatccgcctgtgcgccaataccggcgcggatttgcaccttgtcaaaccgctcggcttcccattggattccgccaaaatgaaacgcgccgggctcgactaccacgaattcgccagcctgacggtgtacgaaaacttcgacgactgcctcaaggcactcgcaggcaggcgcattttcgccctgaccaccaaaggcacggcgcgccccgatgaaaccgcgtttcaaaaaggcgacgttttactgttcgggccggaaacgcgcggactgcctgccgacatcctcgacagcctgcccgccgcgcaaaaaatccgcctgccgatgcagcccggcagccggagtatgaacctttccaataccgttgccgtgattctctttgaagcgtggcggcaacacggttacgcaggcggcgtttga

SEQ ID NO: 63438 - DNA, 510 bp, Neisseria meningitidis; identical to SEQ ID NO: 55571

SEQ ID NO: 63439 - DNA, 405 bp, Neisseria meningitidis
atgaccgcccaaccctgccccatctgcacggcacaagatgaagatattttgctgcaaacccccaacctccgcgtcatcgccatccataacgacagcggttcgcctgcattctgccgcgtcatttggcgtaagcacatcgccgaaatgaccgacctttcggcagcggaacgcggcgaattgatggaaatggtgtacaaagtcgaagccgctatgcgccaagtgttccggccggcaaaaatcaacctcgccagcttgggcaatgtcgtgccgcacctgcattggcatattatcgcccgctttgaaaacgatgcgtctttccccgcgccgatttgggcaaaccccgtccggaaacacggtatgaccctgccgcaagattggacggaacagcttaaaaagctgctttaa

SEQ ID NO: 63440 - DNA, 1893 bp, Neisseria meningitidis
atgagaattgaaacagaaaatgcattagaactcttttttccaaaacctgcattatcattagtttatttcgaggctattgctaattcattagatgcaaatgctacaaaaattaatattgagattaatatccaagataaaacggcttttcatactttgaaaattaagattactgataatggagatggatttatagatgagaattttaatagatttaaaacattattaactccaaaagatgaagcacataaaggtattggacgtttagtttttttgaaatatttcaagaaagtaaaaattcaaagcgaatggttggaaggtagtaaatcatttacttttgataaagatgatattaaaaacattacagaaggaaataaacaaaataaaacaaagaaaacagagttgttattctgtgaatttactgggaagaaaatacataaatatgattatatacgaccaattgaacttaagtttgctattattgagcattttttaccaaagctaaacacacttactcaacaatcaattccgtttgaaataacgatagatttaaaaatagatacggatggtggtaatttatatagcgacaaggtatctatcactaaggaagatttgccaaatttaataatagatacagctaatcctatatccatacaaagcaatttaggacaagaatataaaatcaaaacttcttatttaattcaagaggttgataaaattagtcaattgaaagtggcttttaatattgataaccgtacagtcttggctgataacttcttaaaaagaaatgttttacctaatacaggctattattgtatattcttatttgaatcagagttgtttaataactgtgcagatatgtctcgtcaaagattcaatttacctgatgaaataagtgaaaaccaattaaacagattattacgtaataaaatcggagaaattttatctgatagaattccagttatttcagagaagaataaagagactaagcaaaattttgagagggattaccctcatttgcttgggtattttgataagaacattgttggtttaattgataaagatgaagcattagatagcgctcaatctcatctttttcaggagcaaaaaagaattttagaagcagagaatctttccgatgaacaataccaaaaatctcttgaattttcatcgagagtattaactgaatatgtactttatcgtgaaaagattatttctaaaatggaggatctagttaatagcaagagcaaagaagcagagatacataatttaattattccaagataccatcaatttgagcaagagagtcttgtttctaatatttatcaaaataatgcatggttattggatgataaatttatgtcatttagaaccattttaagcgaacaggaaatgagaaaaattatccaagaaattcagttggatgatgagaagaagacatctgatgagagaggaagacctgatattgctttaattttttctgctgatcctactaataatgaaaaagttgatgtagtagtaattgagattaaagattcaaatgatgatttaaaaaatagtatgtatgctattaatcaattactagatcgctctaataaattagtaaactattgtaagaacattcaacgtatgtggtattatgcggtcgttgatattgaccacactatgaatcggcaactaatgcagtcggggtattctccattattctcaaaaggaaagattttttataaggaaaacaaaacctttatctataaagatgaaacagaatcagaaacaataggagaggtacctacaccaacttttgtcatttcattcgatgcgattgttaatgacgcaaaatcgaggaatcatacatttttagaagttttacgggagaatatgaaaagatttgcctaa

SEQ ID NO: 63441 - DNA, 624 bp, Neisseria meningitidis
atgaaaaaaccgaccgataccctacccgttaatctgcaacgccgccgcctgttgtgtgccgccggtgcgttgttgctcagtcctctggcgcacgccggcgcgcaacgtgaggaaacgcttgccgacgatgtggcttccgtgatgaggagttctgtcggcagcgtcaatccgccgaggctggtgtttgacaatccgaaagagggcgaacgttggttgtctgccatgtcggcacgtttggcaaggttcgtccccgaggaggaggagcggcgcaggctgctggtcaatattcagtatgaaagcagccgggccggtttggatacgcagattgtgttggggctgattgaggtggaaagcgcgttccgccagtatgcaatcagcggtgtcggcgcgcgcggcctgatgcaggttatgccgttttggaaaaactacatcggcaaaccggcgcacaacctgttcgacatccgcaccaacctgcgttacggctgtaccatcctgcgccattaccggaatcttgaaaaaggcaacatcgtccgcgcgcttgcccgctttaatggcagcctcggcagcaataaatatccgaacgccgttttgggcgcgtggcgcaaccgctggcagtggcgttga

SEQ ID NO: 63442 - DNA, 1356 bp, Neisseria meningitidis
atgagtatccaatccggcgaaattttagaaaccgtcaaaatggttgccgaccagaatttcgatgtccgcaccattaccatcggcattgatttgcacgactgcatcagcaccgacatcgacgtgttaaaccaaaacatttacaacaaaatcaccacggtcggcaaagacttggtggcgacggcaaaatatctgtctgccaaatacggcgtgccgattgtgaatcagcgcatttctgtcacgccgattgcccaaatcgcggcggctacccatgccgattcctatgtcagcgtggcgcaaactttggataaggctgccaaagccatcggcgtgtcctttatcggcggcttttccgcgttggtgcaaaaaggcatgtcgccttcagatgaggtgttaatccgttccattcccgaagcgatgaagaccaccgacatcgtgtgcagctccatcaatatcggcagcacgcgtgccggtatcaatatggatgcggtcaagctggcaggcgaaaccatcaaacgcacggctgaaatcacgcctgaaggtttcggttgcgcgaaaatcgtcgtgttctgtaatgcggtggaagacaatccgtttatggcgggtgcgtttcacggatcgggcgaagcggatgctgtgattaatgtcggcgtatccggtccgggcgtggtcaaagccgcgttggaaaattcggatgcgacgacattgaccgaagttgccgaagttgtgaagaaaaccgccttcaaaattacccgcgtgggcgaactcatcggctgcgaagcctcaaaaatgctgaatatcccgtttggtattctcgacttgtcgctggcaccgacccctgccgtcggcgactcggtggcgcgcattcttgaagaaatgggtttgagcgtctgcggtacgcacggcacaacagcagctttggcattgctgaacgatgccgtgaaaaagggcggcatgatggcttcgagcgcggttggcggtttgagtggcgcgtttatccccgtttccgaagacgaaggtatgattgccgccgccgaagcaggcgtgctgacgttggataaactcgaagcgatgaccgccgtttgttcggtcggcttggatatgattgccgttcccggcgacacacccgcgcacaccatttctggcatcattgccgacgaagccgccatcggtatgattaacagcaaaaccactgccgtgcgcattattccggtaacgggtaaaaccgtcggcgacagcgtcgagttcggcggcctgttgggctacgcgcctgtaatgccggtcaaagaaggttcgtgcgaagtgttcgtcaaccggggcggcaggattcccgcaccggttcaatcgatgaaaaactga

SEQ ID NO: 63443 - DNA, 1662 bp, Neisseria meningitidis
atgctgacctacactccgcccgatgcccgcccgcccgccaaaacccacgaaaagccgtggctgctgctgttgatggcgtttgcctggttgtggcccggcgtgttttcccacgatttgtggaatcctgccgaacctgccgtctataccgccgtcgaagcactggcaggcagccccacccctttggttgcccatctgttcggtcaaaccgatttcggcataccgcccgtgtatctttgggttgccgccgcgttcaaacatttgctgtcgccgtgggcagccgacccgtatgatgccgcacgctttgccggcgtgtttttcgccgttgtcggactgacttcctgcggctttgccggtttcaactttttgggcagacaccacgggcgcagcgtcgtcctgattctcatcggctgtatcgggctgattccagttgcccatttcctcaaccccactgccgccgcctttgccgccgccggactggtgctgcacggttattctttggctcgccggcgcgtgattgccgcctcttttctgctcggtacgggctggacgctgatgtcgttggcagcagcttatccggcagcatttgccctgatgctgcccttgcccgtactgatgtttttccgtccgtggcaaagcaggcgtttgatgttgacggcagtcgcctcacttgcctttgccctgccgcttatgaccgtttacccgctgctcttggcaaaaacgcagcccgcgctgttcgcgcaatggctcgacgatcacgttttcggtacgttcggcggcgtgcggcacgttcagacggcattcagtttgttttactatctgaaaaacctgctttggtttgcattgcctgcgctgccgctggcggtttggacggtttgccgcacgcgcctgttttcgaccgactgggggattttgggcattgtgtggatgcttgccgttttggtgctgcttgccgtcaatccgcagcgttttcaggataacctcgtctggctgcttccgccgcttgccctgttcggcgcggcgcaactggacagcctgaggcgcggcgcggcggcgtttgtcaactggttcggcattatggcgttcggactgtttgccgtgttcctgtggacgggctttttcgccatgaattacggctggcccgccaagcttgccgaacgcgccgcctacttcagcccgtattacgttcccgacatcgatcccattccgatggcggttgccgtactgttcacacccttgtggctgtgggcgattacccgcaaaaacatacgcggcaggcaggcggttaccaactgggcggcaggcgttaccctgacctgggctttgctgatgacgctgttcctgccgtggctggacgcggcgaaaagccacgcgccggtcgtccggagtatggaggcatcgctttccccggaattaaaacgggagctttcagacggcatcgagtgtatcggcataggcggcggcgacctgcacacgcggattgtttggacgcagtacggcacattgccgcaccgcgtcggcgatgtacaatgccgctaccgcatcgtcctcctgccccaaaatgcggatgcgccgcaaggctggcagacggtttggcagggtgcgcgtccgcgcaacaaagacagtaagttcgcactgatacggaaaatcggggaaaatatataa

SEQ ID NO: 63444 - DNA, 621 bp, Neisseria meningitidis
atgcttacctcgaaaagttgcgatttgttcaatatcccgtttttccaattttcccagcttaaaaaataccagcctgaaagcattccgcaaatcaaggcagactataaagaaaactggcaggtatggcagcagctgatccagcaggttgccgccgaattgggtgcgccgttcgcgccgccgcatatcgaacgctggtgtaacggctggcaggtgcgcgcccatttctttgcctacttcaaatacgaacaatataaaaattccgccgcgattttatcgattttattgaaccgccgccgcctgagcgtcagcttggattggcactgctacaaagccgacgtgtcgccgattgcgctgcccgaatacaaccgctggttggatgatttcgataccgacaaatacgccgcattcgatatgtggcacggcgcggaaagcgaatatgacgactaccgcaccgtcgcacaacaaagcgaatccgaccgaaagttacaaaacgacgaagactttttctgcatcggcaaacacatcgagcgcgacgatttgggcaagcaggatgtcgcgaaatggatagcggaaacggtggaagatttgctgccgctttacgaagcctgccacggcaaatga

SEQ ID NO: 63445 - DNA, 381 bp, Neisseria meningitidis; identical to SEQ ID NO: 61631
